United States Patent Application Publication US 2024/0309320 A1 - sequence listing, part 3

SEQ ID NO: 2242 - DNA, 2423 bp, Homo sapiens
  source 1..2423: mol_type = genomic DNA
accgccaccatgtctcgccgcaagcaaggcaaaccccagcacttaagcaaacgggaattctcgcccgagcctcttgaagccattcttacagatgatgaaccagaccacggcccgttgggagctccagaaggggatcatgacctcctcacctgtgggcagtgccagatgaacttcccattgggggacattcttatttttatcgagcacaaacggaaacaatgcaatggcagcctctgcttagaaaaagctgtggataagccaccttccccttcaccaatcgagatgaaaaaagcatccaatcccgtggaggttggcatccaggtcacgccagaggatgacgattgtttatcaacgtcatctagaggaatttgccccaaacaggaacacatagcagataaacttctgcactggaggggcctctcctcccctcgttctgcacatggagctctaatccccacgcctgggatgagtgcagaatatgccccgcagggtatttgtaaagatgagcccagcagctacacatgtacaacttgcaaacagccattcaccagtgcatggtttctcttgcaacacgcacagaacactcatggattaagaatctacttagaaagcgaacacggaagtcccctgaccccgcgggttggtatcccttcaggactaggtgcagaatgtccttcccagccacctctccatgggattcatattgcagacaataacccctttaacctgctaagaataccaggatcagtatcgagagaggcttccggcctggcagaagggcgctttccacccactccccccctgtttagtccaccaccgagacatcacttggacccccaccgcatagagcgcctgggggcggaagagatggccctggccacccatcacccgagtgcctttgacagggtgctgcggttgaatccaatggctatggagcctcccgccatggatttctctaggagacttagagagctggcagggaacacgtctagcccaccgctgtccccaggccggcccagccctatgcaaaggttactgcaaccattccagccaggtagcaagccgcccttcctggcgacgccccccctccctcctctgcaatccgcccctcctccctcccagcccccggtcaagtccaagtcatgcgagttctgcggcaagacgttcaaatttcagagcaacctggtggtgcaccggcgcagccacacgggcgagaagccctacaagtgcaacctgtgcgaccacgcgtgcacccaggccagcaagctgaagcgccacatgaagacgcacatgcacaaatcgtcccccatgacggtcaagtccgacgacggtctctccaccgccagctccccggaacccggcaccagcgacttggtgggcagcgccagcagcgcgctcaagtccgtggtggccaagttcaagagcgagaacgaccccaacctgatcccggagaacggggacgaggaggaagaggaggacgacgaggaagaggaagaagaggaggaagaggaggaggaggagctgacggagagcgagagggtggactacggcttcgggctgagcctggaggcggcgcgccaccacgagaacagctcgcggggcgcggtcgtgggcgtgggcgacgagagccgcgccctgcccgacgtcatgcagggcatggtgctcagctccatgcagcacttcagcgaggccttccaccaggtcctgggcgagaagcataagcgcggccacctggccgaggccgagggccacagggacacttgcgacgaagactcggtggccggcgagtcggaccgcatagacgatggcactgttaatggccgcggctgctccccgggcgagtcggcctcggggggcctgtccaaaaagctgctgctgggcagccccagctcgctgagccccttctctaagcgcatcaagctcgagaaggagttcgacctgcccccggccgcgatgcccaacacggagaacgtgtactcgcagtggctcgccggctacgcggcctccaggcagctcaaagatcccttccttagcttcggagactccagacaatcgccttttgcctcctcgtcggagcactcctcggagaacgggagtttgcgcttctccacaccgcccggggagctggacggagggatctcggggcgcagcggcacgggaagtggagggagcacgccccatattagtggtccgggcccgggcaggcccagctcaaaagagggcagacgcagcgacacttgttcttcacacacccccattcggcgtagtacccagagagctcaagatgtgtggcagttttcggatggaagctcgagagcccttaagttctagtaatgaactagtccgtaacttgaaagtatttcgatttcttggctttatatatcttgtggaaaggacgatttaccctacggcgggcgaactgg

SEQ ID NO: 2243 - DNA, 2507 bp, Homo sapiens
  source 1..2507: mol_type = genomic DNA
accgccaccatgtctcgccgcaagcaaggcaaaccccagcacttaagcaaacgggaattctcgcccgagcctcttgaagccattcttacagatgatgaaccagaccacggcccgttgggagctccagaaggggatcatgacctcctcacctgtgggcagtgccagatgaacttcccattgggggacattcttatttttatcgagcacaaacggaaacaatgcaatggcagcctctgcttagaaaaagctgtggataagccaccttccccttcaccaatcgagatgaaaaaagcatccaatcccgtggaggttggcatccaggtcacgccagaggatgacgattgtttatcaacgtcatctagaggaatttgccccaaacaggaacacatagcaggtaaagatgagcccagcagctacacatgtacaacttgcaaacagccattcaccagtgcatggtttctcttgcaacacgcacagaacactcatggattaagaatctacttagaaagcgaacacggaagtcccctgaccccgcgggttggtatcccttcaggactaggtgcagaatgtccttcccagccacctctccatgggattcatattgcagacaataacccctttaacctgctaagaataccaggatcagtatcgagagaggcttccggcctggcagaagggcgctttccacccactccccccctgtttagtccaccaccgagacatcacttggacccccaccgcatagagcgcctgggggcggaagagatggccctggccacccatcacccgagtgcctttgacagggtgctgcggttgaatccaatggctatggagcctcccgccatggatttctctaggagacttagagagctggcagggaacacgtctagcccaccgctgtccccaggccggcccagccctatgcaaaggttactgcaaccattccagccaggtagcaagccgcccttcctggcgacgccccccctccctcctctgcaatccgcccctcctccctcccagcccccggtcaagtccaagtcatgcgagttctgcggcaagacgttcaaatttcagagcaacctggtggtgcaccggcgcagccacacgggcgagaagccctacaagtgcaacctgtgcgaccacgcgtgcacccaggccagcaagctgaagcgccacatgaagacgcacatgcacaaatcgtcccccatgacggtcaagtccgacgacggtctctccaccgccagctccccggaacccggcaccagcgacttggtgggcagcgccagcagcgcgctcaagtccgtggtggccaagttcaagagcgagaacgaccccaacctgatcccggagaacggggacgaggaggaagaggaggacgacgaggaagaggaagaagaggaggaagaggaggaggaggagctgacggagagcgagagggtggactacggcttcgggctgagcctggaggcggcgcgccaccacgagaacagctcgcggggcgcggtcgtgggcgtgggcgacgagagccgcgccctgcccgacgtcatgcagggcatggtgctcagctccatgcagcacttcagcgaggccttccaccaggtcctgggcgagaagcataagcgcggccacctggccgaggccgagggccacagggacacttgcgacgaagactcggtggccggcgagtcggaccgcatagacgatggcactgttaatggccgcggctgctccccgggcgagtcggcctcggggggcctgtccaaaaagctgctgctgggcagccccagctcgctgagccccttctctaagcgcatcaagctcgagaaggagttcgacctgcccccggccgcgatgcccaacacggagaacgtgtactcgcagtggctcgccggctacgcggcctccaggcagctcaaagatcccttccttagcttcggagactccagacaatcgccttttgcctcctcgtcggagcactcctcggagaacgggagtttgcgcttctccacaccgcccggggagctggacggagggatctcggggcgcagcggcacgggaagtggagggagcacgccccatattagtggtccgggcccgggcaggcccagctcaaaagagggcagacgcagcgacacttgtgagtactgtgggaaagtcttcaagaactgtagcaatctcactgtccacaggagaagccacacgggcgaaaggccttataaatgcgagctgtgcaactatgcctgtgcccagagtagcaagctcaccaggcacatgaaaacgcatggccaggtggggaaggacgtttacaaatgtgaaatttgtaagatgccttttagcgtgtacagtaccctggagaaacacatgaaaaaatggcacagtgatcgagtgttgaataatgatataaaaactgaatagtaatgaactagtccgtaacttgaaagtatttcgatttcttggctttatatatcttgtggaaaggacgatcccagctccggatcaatagttat

SEQ ID NO: 2244 - DNA, 833 bp, Homo sapiens
  source 1..833: mol_type = genomic DNA
accgccaccatgtctcgccgcaagcaaggcaaaccccagcacttaagcaaacgggaattctcgcccgagcctcttgaagccattcttacagatgatgaaccagaccacggcccgttgggagctccagaaggggatcatgacctcctcacctgtgggcagtgccagatgaacttcccattgggggacattcttatttttatcgagcacaaacggaaacaatgcaatggcagcctctgcttagaaaaagctgtggataagccaccttccccttcaccaatcgagatgaaaaaagcatccaatcccgtggaggttggcatccaggtcacgccagaggatgacgattgtttatcaacgtcatctagaggaatttgccccaaacaggaacacatagcagataaacttctgcactggaggggcctctcctcccctcgttctgcacatggagctctaatccccacgcctgggatgagtgcagaatatgccccgcagggtatttgtaaagatgagcccagcagctacacatgtacaacttgcaaacagccattcaccagtgcatggtttctcttgcaacacgcacagaacactcatggattaagaatctacttagaaagcgaacacggaagtcccctgaccccgcgggttcttcacacacccccattcggcgtagtacccagagagctcaagatgtgtggcagttttcggatggaagctcgagagcccttaagttctgagaaaatttagtaatgaactagtccgtaacttgaaagtatttcgatttcttggctttatatatcttgtggaaaggacgaaccacaagtctagccacttcactg

SEQ ID NO: 2245 - DNA, 2609 bp, Homo sapiens
  source 1..2609: mol_type = genomic DNA
accgccaccatgtctcgccgcaagcaaggcaaaccccagcacttaagcaaacgggaattctcgcccgagcctcttgaagccattcttacagatgatgaaccagaccacggcccgttgggagctccagaaggggatcatgacctcctcacctgtgggcagtgccagatgaacttcccattgggggacattcttatttttatcgagcacaaacggaaacaatgcaatggcagcctctgcttagaaaaagctgtggataagccaccttccccttcaccaatcgagatgaaaaaagcatccaatcccgtggaggttggcatccaggtcacgccagaggatgacgattgtttatcaacgtcatctagaggaatttgccccaaacaggaacacatagcagataaacttctgcactggaggggcctctcctcccctcgttctgcacatggagctctaatccccacgcctgggatgagtgcagaatatgccccgcagggtatttgtaaagatgagcccagcagctacacatgtacaacttgcaaacagccattcaccagtgcatggtttctcttgcaacacgcacagaacactcatggattaagaatctacttagaaagcgaacacggaagtcccctgaccccgcgggttggtatcccttcaggactaggtgcagaatgtccttcccagccacctctccatgggattcatattgcagacaataacccctttaacctgctaagaataccaggatcagtatcgagagaggcttccggcctggcagaagggcgctttccacccactccccccctgtttagtccaccaccgagacatcacttggacccccaccgcatagagcgcctgggggcggaagagatggccctggccacccatcacccgagtgcctttgacagggtgctgcggttgaatccaatggctatggagcctcccgccatggatttctctaggagacttagagagctggcagggaacacgtctagcccaccgctgtccccaggccggcccagccctatgcaaaggttactgcaaccattccagccaggtagcaagccgcccttcctggcgacgccccccctccctcctctgcaatccgcccctcctccctcccagcccccggtcaagtccaagtcatgcgagttctgcggcaagacgttcaaatttcagagcaacctggtggtgcaccggcgcagccacacgggcgagaagccctacaagtgcaacctgtgcgaccacgcgtgcacccaggccagcaagctgaagcgccacatgaagacgcacatgcacaaatcgtcccccatgacggtcaagtccgacgacggtctctccaccgccagctccccggaacccggcaccagcgacttggtgggcagcgccagcagcgcgctcaagtccgtggtggccaagttcaagagcgagaacgaccccaacctgatcccggagaacggggacgaggaggaagaggaggacgacgaggaagaggaagaagaggaggaagaggaggaggaggagctgacggagagcgagagggtggactacggcttcgggctgagcctggaggcggcgcgccaccacgagaacagctcgcggggcgcggtcgtgggcgtgggcgacgagagccgcgccctgcccgacgtcatgcagggcatggtgctcagctccatgcagcacttcagcgaggccttccaccaggtcctgggcgagaagcataagcgcggccacctggccgaggccgagggccacagggacacttgcgacgaagactcggtggccggcgagtcggaccgcatagacgatggcactgttaatggccgcggctgctccccgggcgagtcggcctcggggggcctgtccaaaaagctgctgctgggcagccccagctcgctgagccccttctctaagcgcatcaagctcgagaaggagttcgacctgcccccggccgcgatgcccaacacggagaacgtgtactcgcagtggctcgccggctacgcggcctccaggcagctcaaagatcccttccttagcttcggagactccagacaatcgccttttgcctcctcgtcggagcactcctcggagaacgggagtttgcgcttctccacaccgcccggggagctggacggagggatctcggggcgcagcggcacgggaagtggagggagcacgccccatattagtggtccgggcccgggcaggcccagctcaaaagagggcagacgcagcgacacttgtgagtactgtgggaaagtcttcaagaactgtagcaatctcactgtccacaggagaagccacacgggcgaaaggccttataaatgcgagctgtgcaactatgcctgtgcccagagtagcaagctcaccaggcacatgaaaacgcatggccaggtggggaaggacgtttacaaatgtgaaatttgtaagatgccttttagcgtgtacagtaccctggagaaacacatgaaaaaatggcacagtgatcgagtgttgaataatgatataaaaactgaatagtaatgaactagtccgtaacttgaaagtatttcgatttcttggctttatatatcttgtggaaaggacgatgctagcgcatggatgtcacagat

SEQ ID NO: 2246 - DNA, 968 bp, Homo sapiens
  source 1..968: mol_type = genomic DNA
accgccaccatggagcctccggaccagtgtagccagtatatgaccagcttgctcagccctgcagtcgacgacgagaaagaactacaggatatgaatgctatggtgctgtcgcttactgaagaggtcaaagaggaggaagaggatgcacagcctgagcctgagcaaggcacagcagcaggagaaaagttaaagtcggcaggagcccaaggcggagaagaaaaagatggcggcggagaagaaaaagatggcggcggcgccggagttcctggccacctatgggaaggagacctcgagggcaccagcggcagcgatggcaacgttgaggacagcgaccagagcgagaaggaacctgggcagcagtattcgcgcccacagggcgccgtcggggggctggagcctggcaacgcgcagcagcccaacgtccacgccttcaccccattgcagctgcaggagctggagcgcattttccaacgcgagcagttccccagtgagttcctgcgaaggaggctggcaagaagcatgaatgtgactgaactcgcagtgcagatttggtttgagaatagaagagccaaatggaggagacatcagagggcattaatggcaagaaacatgctgcccttcatggcagtgggccagcctgtcatggtaaccgcagctgaggccataacggcacccttgttcatcagcgggatgagagatgattacttctgggaccacagccattccagcagcctgtgtttccccatgccaccctttcctcctccgtccttgccccttccactcatgcttcttccacctatgccacccgctggccaggctgaatttggcccattcccttttgttatcgtgccttctttcacattccccaatgtctagtaatgaactagtccgtaacttgaaagtatttcgatttcttggctttatatatcttgtggaaaggacgacgcgtgaggcgtgcaggacccaac

SEQ ID NO: 2247 - DNA, 656 bp, Homo sapiens
  source 1..656: mol_type = genomic DNA
accgccaccatggcgcgttcgctcgtccacgacaccgtgttctactgcctgagtgtataccaggtaaaaataagccccacacctcagctgggggcagcatcaagcgcagaaggccatgttggccaaggagctccaggcctcatgggtaatatgaaccctgagggcggtgtgaaccacgagaacggcatgaaccgcgatggcggcatgatccccgagggcggcggtggaaaccaggagcctcggcagcagccgcagcccccgccggaggagccggcccaggcggccatggagggtccgcagcccgagaacatgcagccacgaactcggcgcacgaagttcacgctgttgcaggtggaggagctggaaagtgttttccgacacactcaataccctgatgtgcccacaagaagggaacttgccgaaaacttaggtgtgactgaagacaaagtgcgggtttggtttaagaataaaagggccagatgtaggcgacatcagagagaattaatgctcgccaatgaactacgtgctgacccagacgactgtgtctacatcgtcgtggactagtaatgaactagtccgtaacttgaaagtatttcgatttcttggctttatatatcttgtggaaaggacgaggcaagacgagcgaatgattcctc

SEQ ID NO: 2248 - DNA, 2786 bp, Homo sapiens
  source 1..2786: mol_type = genomic DNA
accgccaccatgtcccgccgcaaacagggcaacccgcagcacttgtcccagagggagctcatcaccccagaggctgaccatgtggaggccgccatcctcgaagaagacgagggtctggagatagaggagccaagtggcctggggctgatggtgggtggccccgaccctgacctgctcacctgtggccagtgtcaaatgaacttccccttgggggacatcctggtttttatagagcacaaaaggaagcagtgtggcggcagcttgggtgcctgctatgacaaggccctggacaaggacagcccgccaccctcctcacgctccgagctcaggaaagtgtccgagccggtggagatcgggatccaagtcacccccgacgaagatgaccacctgctctcacccacgaaaggcatctgtcccaagcaggagaacattgcagggccgtgcaggcctgcccagctgccagcggtggcccccatagctgcctcctcccaccctcactcatccgtgatcacttcacctctgcgtgccctgggcgctctcccgccctgcctccccctgccgtgctgcagcgcgcgcccggtctcgggtgacgggactcagggtgagggtcagacggaggctccctttggatgccagtgtcagttgtcaggtaaagatgagccttccagctacatttgcacaacatgcaagcagcccttcaacagcgcgtggttcctgctgcagcacgcgcagaacacgcacggcttccgcatctacctggagcccgggccggccagcagctcgctcacgccgcggctcaccatcccgccgccgctcgggccggaggccgtggcgcagtccccgctcatgaatttcctgggcgacagcaaccccttcaacctgctgcgcatgacgggccccatcctgcgggaccacccgggcttcggcgagggccgcctgccgggcacgccgcctctcttcagtcccccgccgcgccaccacctggacccgcaccgcctcagtgccgaggagatggggctcgtcgcccagcaccccagtgccttcgaccgagtcatgcgcctgaaccccatggccatcgactcgcccgccatggacttctcgcggcggctccgcgagctggcgggcaacagctccacgccgccgcccgtgtccccgggccgcggcaaccctatgcaccggctcctgaaccccttccagcccagccccaagtccccgttcctgagcacgccgccgctgccgcccatgccccctggcggcacgccgcccccgcagccgccagccaagagcaagtcgtgcgagttctgcggcaagaccttcaagttccagagcaatctcatcgtgcaccggcgcagtcacacgggcgagaagccctacaagtgccagctgtgcgaccacgcgtgctcgcaggccagcaagctcaagcgccacatgaagacgcacatgcacaaggccggctcgctggccggccgctccgacgacgggctctcggccgccagctcccccgagcccggcaccagcgagctggcgggcgagggcctcaaggcggccgacggtgacttccgccaccacgagagcgacccgtcgctgggccacgagccggaggaggaggacgaggaggaggaggaggaggaggaggagctgctactggagaacgagagccggcccgagtcgagcttcagcatggactcggagctgagccgcaaccgcgagaacggcggtggtggggtgcccggggtcccgggcgcggggggcggcgcggccaaggcgctggctgacgagaaggcgctggtgctgggcaaggtcatggagaacgtgggcctaggcgcactgccgcagtacggcgagctcctggccgacaagcagaagcgcggcgccttcctgaagcgtgcggcgggcggcggggacgcgggcgacgacgacgacgcgggcggctgcggggacgcgggcgcgggcggcgcggtcaacgggcgcgggggcggcttcgcgccaggcaccgagcccttccccgggctcttcccgcgcaagcccgcgccgctgcccagccccgggctcaacagcgccgccaagcgcatcaaggtggagaaggacctggagctgccgcccgccgcgctcatcccgtccgagaacgtgtactcgcagtggctggtgggctacgcggcgtcgcggcacttcatgaaggaccccttcctgggcttcacggacgcacgacagtcgcccttcgccacgtcgtccgagcactcgtccgagaacggcagcctgcgcttctccacgccgcccggggacctgctggacggcggcctctcgggccgcagcggcacggccagcggaggcagcaccccgcacctgggcggcccgggccccgggcggcccagctccaaggagggccgccgcagcgacacgtgcgagtactgcggcaaggtgttcaagaactgcagcaacttgacggtgcaccggcggagccacaccggcgagcggccttacaagtgcgagctgtgcaactacgcgtgcgcgcagagcagcaagctcacgcgccacatgaagacgcacgggcagatcggcaaggaggtgtaccgctgcgacatctgccagatgcccttcagcgtctacagcaccctggagaaacacatgaaaaagtggcacggcgagcacttgctgactaacgacgtcaaaatcgagcaggccgagaggagctagtaatgaactagtccgtaacttgaaagtatttcgatttcttggctttatatatcttgtggaaaggacgaacttcgtccagatttcctaataaa

SEQ ID NO: 2249 - DNA, 2573 bp, Homo sapiens
  source 1..2573: mol_type = genomic DNA
accgccaccatgtcccgccgcaaacagggcaacccgcagcacttgtcccagagggagctcatcaccccagaggctgaccatgtggaggccgccatcctcgaagaagacgagggtctggagatagaggagccaagtggcctggggctgatggtgggtggccccgaccctgacctgctcacctgtggccagtgtcaaatgaacttccccttgggggacatcctggtttttatagagcacaaaaggaagcagtgtggcggcagcttgggtgcctgctatgacaaggccctggacaaggacagcccgccaccctcctcacgctccgagctcaggaaagtgtccgagccggtggagatcgggatccaagtcacccccgacgaagatgaccacctgctctcacccacgaaaggcatctgtcccaagcaggagaacattgcaggtaaagatgagccttccagctacatttgcacaacatgcaagcagcccttcaacagcgcgtggttcctgctgcagcacgcgcagaacacgcacggcttccgcatctacctggagcccgggccggccagcagctcgctcacgccgcggctcaccatcccgccgccgctcgggccggaggccgtggcgcagtccccgctcatgaatttcctgggcgacagcaaccccttcaacctgctgcgcatgacgggccccatcctgcgggaccacccgggcttcggcgagggccgcctgccgggcacgccgcctctcttcagtcccccgccgcgccaccacctggacccgcaccgcctcagtgccgaggagatggggctcgtcgcccagcaccccagtgccttcgaccgagtcatgcgcctgaaccccatggccatcgactcgcccgccatggacttctcgcggcggctccgcgagctggcgggcaacagctccacgccgccgcccgtgtccccgggccgcggcaaccctatgcaccggctcctgaaccccttccagcccagccccaagtccccgttcctgagcacgccgccgctgccgcccatgccccctggcggcacgccgcccccgcagccgccagccaagagcaagtcgtgcgagttctgcggcaagaccttcaagttccagagcaatctcatcgtgcaccggcgcagtcacacgggcgagaagccctacaagtgccagctgtgcgaccacgcgtgctcgcaggccagcaagctcaagcgccacatgaagacgcacatgcacaaggccggctcgctggccggccgctccgacgacgggctctcggccgccagctcccccgagcccggcaccagcgagctggcgggcgagggcctcaaggcggccgacggtgacttccgccaccacgagagcgacccgtcgctgggccacgagccggaggaggaggacgaggaggaggaggaggaggaggaggagctgctactggagaacgagagccggcccgagtcgagcttcagcatggactcggagctgagccgcaaccgcgagaacggcggtggtggggtgcccggggtcccgggcgcggggggcggcgcggccaaggcgctggctgacgagaaggcgctggtgctgggcaaggtcatggagaacgtgggcctaggcgcactgccgcagtacggcgagctcctggccgacaagcagaagcgcggcgccttcctgaagcgtgcggcgggcggcggggacgcgggcgacgacgacgacgcgggcggctgcggggacgcgggcgcgggcggcgcggtcaacgggcgcgggggcggcttcgcgccaggcaccgagcccttccccgggctcttcccgcgcaagcccgcgccgctgcccagccccgggctcaacagcgccgccaagcgcatcaaggtggagaaggacctggagctgccgcccgccgcgctcatcccgtccgagaacgtgtactcgcagtggctggtgggctacgcggcgtcgcggcacttcatgaaggaccccttcctgggcttcacggacgcacgacagtcgcccttcgccacgtcgtccgagcactcgtccgagaacggcagcctgcgcttctccacgccgcccggggacctgctggacggcggcctctcgggccgcagcggcacggccagcggaggcagcaccccgcacctgggcggcccgggccccgggcggcccagctccaaggagggccgccgcagcgacacgtgcgagtactgcggcaaggtgttcaagaactgcagcaacttgacggtgcaccggcggagccacaccggcgagcggccttacaagtgcgagctgtgcaactacgcgtgcgcgcagagcagcaagctcacgcgccacatgaagacgcacgggcagatcggcaaggaggtgtaccgctgcgacatctgccagatgcccttcagcgtctacagcaccctggagaaacacatgaaaaagtggcacggcgagcacttgctgactaacgacgtcaaaatcgagcaggccgagaggagctagtaatgaactagtccgtaacttgaaagtatttcgatttcttggctttatatatcttgtggaaaggacgatcaaactcaccgacgtgccggttc

SEQ ID NO: 2250 - DNA, 1685 bp, Homo sapiens
  source 1..1685: mol_type = genomic DNA
accgccaccatgatcctttcctcctataacaccatccagtcggttttctgttgctgctgttgctgttcagtgcagaagcgacaaatgagaacacagataagcctgagcacagatgaagagcttccagaaaaatacacccagcgtcgcaggccgtggctcagccaattgtcaaataagaagcaatccaacacgggccgtgtgcagccgtcaaaacgaaagccactgcctcccctcccaccctctgaggttgctgaagagaagatccaagtcaaggcactttatgattttctgcccagagaaccctgtaatttagccttaaggagagcagaagaatacctgatactggagaaatacaatcctcactggtggaaggcaagagaccgtttggggaatgaaggcttaatcccaagcaactatgtgactgaaaacaaaataactaatttagaaatatatgagtggtaccatagaaacattaccagaaatcaggcagaacatctattgagacaagagtctaaagaaggtgcatttattgtcagagattcaagacatttaggatcctacacaatttccgtatttatgggagctagaagaagtacggaggctgccataaaacattatcagataaaaaagaatgactcaggacagtggtatgtggctgaaagacacgcctttcaatcaatccctgagttaatctggtatcaccagcacaatgcagccggtctcatgactcgtctccgatatccagttgggctgatgggcagttgtttaccagccacagctgggtttagctacgaaaagtgggagatagatccatctgagttggcttttataaaggagattggaagcggtcagtttggagtggtccatttaggtgaatggcggtcacatatccaggtagctatcaaggccatcaatgaaggctccatgtctgaagaggatttcattgaagaggccaaagtgatgatgaaattatctcattcaaagctagtgcaactttatggagtctgtatacagcggaagcccctttacattgtgacagagttcatggaaaatggctgcctgcttaactatctcagggagaataaaggaaagcttaggaaggaaatgctactgagtgtatgccaggatatatgtgaaggaatggaatatctggagaggaatggctatattcatagggatttggcggcaaggaattgtttggtcagttcaacatgcatagtaaaaatttcagactttggaatgacaaggtacgttttggatgatgagtatgtcagttcttttggagccaagttcccaatcaagtggtcccctcctgaagtttttcttttcaataagtacagcagtaaatctgatgtctggtcatttggagttttaatgtgggaagtttttacagaaggaaaaatgccttttgaaaataagtcaaatttgcaagtcgtggaagctatttctgaaggcttcaggctatatcgccctcacctggcaccaatgtccatatatgaagtcatgtacagctgctggcatgagaaacctgaaggccgccctacatttgccgagctgctgcgggctgtcacagagattgcggaaacctggtagtaatgaactagtccgtaacttgaaagtatttcgatttcttggctttatatatcttgtggaaaggacgaactacgactgagactgctaattaa

SEQ ID NO: 2251 - DNA, 1958 bp, Homo sapiens
  source 1..1958: mol_type = genomic DNA
accgccaccatgacacaggagtacgacaacaaacggccagtgttggttcttcagaatgaagcactttatccacagcggcggtcctacactagtgaggatgaggcctggaaatccttcctggaaaaccctctcactgcagcgaccaaagcgatgatgagcatcaatggagatgaagacagcgccgctgcgctgggcctgctctatgactactacaaggttccaagagagagaaggtcatcaacagcaaagccagaggtggagcaccctgagccagatcacagcaaaagaaacagcataccaattgtgacagagcagcccctcatctctgctggagaaaacagagtgcaagtactgaaaaatgtgccatttaacattgtccttccccatggcaaccagctgggcattgataagagaggccatctgacagctccagatacgacagtcactgtctccatagcaacgatgcctacccactccatcaagacagaaacccagccacatggcttcgctgtgggaatccccccagcagtgtatcatcctgagcccactgagcgggtggtggttttcgatcggaatctcaatactgaccagttcagctctggtgctcaagccccaaatgctcaaaggcgaactccagactcgaccttctcagagaccttcaaggaaggcgttcaggaggttttcttcccctcggatctcagtctgcggatgcctggcatgaattcagaggactatgtttttgacagtgtttctgggaacaactttgaatataccctagaagcttcaaaatcacttcgacagaagccaggagacagtaccatgacgtacctgaacaaaggccagttctatcccatcaccttgaaggaggtgagcagcagtgaaggaatccatcatcccatcagcaaagttcgaagtgtgatcatggtggtttttgctgaagacaaaagcagagaagatcagttaaggcattggaagtactggcactcccggcagcacaccgctaaacaaagatgcattgacatagctgactataaagaaagcttcaacactatcagtaacatcgaggagattgcgtataacgccatttccttcacatgggacatcaacgatgaagcaaaggttttcatctctgtgaactgcttaagcacagatttctcttcccagaagggagtgaaggggttgcctcttaacattcaagttgatacctatagttacaacaaccgcagcaacaagcctgtgcaccgggcctactgccagatcaaggtcttctgtgacaagggagctgagcggaaaatcagggatgaagaacgaaagcaaagcaaaagaaaagtttctgatgttaaagtgccactgcttccctctcacaagcgaatggatatcacagttttcaaacccttcattgatctcgatactcagcctgtcctcttcattcctgacgtgcactttgccaacttgcagcggggcactcatgtccttcccattgcctctgaagaattggagggtgaaggctctgtcttgaaaagggggccgtacggcacagaagatgactttgctgtccctccttctaccaagctggcccggatagaagaaccaaagagagtgctgctctacgttcgaaaggagtcagaagaagtctttgatgccctgatgctcaaaaccccatctttgaagggcttgatggaagctatctcagacaaatacgatgttccccatgacaagattgggaaaatattcaagaagtgtaaaaaggggatcctggtgaacatggacgacaacattgtgaagcattactccaatgaggacaccttccagctgcagattgaagaagccggggggtcttacaagctcaccctgacggagatctagtaatgaactagtccgtaacttgaaagtatttcgatttcttggctttatatatcttgtggaaaggacgagcggccattgtgattagcccttta

SEQ ID NO: 2252 - DNA, 1391 bp, Homo sapiens
  source 1..1391: mol_type = genomic DNA
accgccaccatggcttcgctgtgggaatccccccagcagtgtatcatcctgagcccactgagcgggtggtggttttcgatcggaatctcaatactgaccagttcagctctggtgctcaagccccaaatgctcaaaggcgaactccagactcgaccttctcagagaccttcaaggaaggcgttcaggaggaacaactttgaatataccctagaagcttcaaaatcacttcgacagaagccaggagacagtaccatgacgtacctgaacaaaggccagttctatcccatcaccttgaaggaggtgagcagcagtgaaggaatccatcatcccatcagcaaagttcgaagtgtgatcatggtggtttttgctgaagacaaaagcagagaagatcagttaaggcattggaagtactggcactcccggcagcacaccgctaaacaaagatgcattgacatagctgactataaagaaagcttcaacactatcagtaacatcgaggagattgcgtataacgccatttccttcacatgggacatcaacgatgaagcaaaggttttcatctctgtgaactgcttaagcacagatttctcttcccagaagggagtgaaggggttgcctcttaacattcaagttgatacctatagttacaacaaccgcagcaacaagcctgtgcaccgggcctactgccagatcaaggtcttctgtgacaagggagctgagcggaaaatcagggatgaagaacgaaagcaaagcaaaagaaaagtttctgatgttaaagtgccactgcttccctctcacaagcgaatggatatcacagttttcaaacccttcattgatctcgatactcagcctgtcctcttcattcctgacgtgcactttgccaacttgcagcggggcactcatgtccttcccattgcctctgaagaattggagggtgaaggctctgtcttgaaaagggggccgtacggcacagaagatgactttgctgtccctccttctaccaagctggcccggatagaagaaccaaagagagtgctgctctacgttcgaaaggagtcagaagaagtctttgatgccctgatgctcaaaaccccatctttgaagggcttgatggaagctatctcagacaaatacgatgttccccatgacaagattgggaaaatattcaagaagtgtaaaaaggggatcctggtgaacatggacgacaacattgtgaagcattactccaatgaggacaccttccagctgcagattgaagaagccggggggtcttacaagctcaccctgacggagatctagtaatgaactagtccgtaacttgaaagtatttcgatttcttggctttatatatcttgtggaaaggacgacagataaatgaagggcatggactg

SEQ ID NO: 2253 - DNA, 1931 bp, Homo sapiens
  source 1..1931: mol_type = genomic DNA
accgccaccatgcccagtgaccctccattcaatacccgaagagcctacaccagtgaggatgaagcctggaagtcatacttggagaatcccctgacagcagccaccaaggccatgatgagcattaatggtgatgaggacagtgctgctgccctcggcctgctctatgactactacaaggttcctcgagacaagaggctgctgtctgtaagcaaagcaagtgacagccaagaagaccaggagaaaagaaactgccttggcaccagtgaagcccagagtaatttgagtggaggagaaaaccgagtgcaagtcctaaagactgttccagtgaacctttccctaaatcaagatcacctggagaattccaagcgggaacagtacagcatcagcttccccgagagctctgccatcatcccggtgtcgggaatcacggtggtgaaagctgaagatttcacaccagttttcatggccccacctgtgcactatccccggggagatggggaagagcaacgagtggttatctttgaacagactcagtatgacgtgccctcgctggccacccacagcgcctatctcaaagacgaccagcgcagcactccggacagcacatacagcgagagcttcaaggacgcagccacagagaaatttcggagtgcttcagttggggctgaggagtacatgtatgatcagacatcaagtggcacatttcagtacaccctggaagccaccaaatctctccgtcagaagcagggggagggccccatgacctacctcaacaaaggacagttctatgccataacactcagcgagaccggagacaacaaatgcttccgacaccccatcagcaaagtcaggagtgtggtgatggtggtcttcagtgaagacaaaaacagagatgaacagctcaaatactggaaatactggcactctcggcagcatacggcgaagcagagggtccttgacattgccgattacaaggagagctttaatacgattggaaacattgaagagattgcatataatgctgtttcctttacctgggacgtgaatgaagaggcgaagattttcatcaccgtgaattgcttgagcacagatttctcctcccaaaaaggggtgaaaggacttcctttgatgattcagattgacacatacagttataacaatcgtagcaataaacccattcatagagcttattgccagatcaaggtcttctgtgacaaaggagcagaaagaaaaatccgagatgaagagcggaagcagaacaggaagaaagggaaaggccaggcctcccaaactcaatgcaacagctcctctgatgggaagttggctgccatacctttacagaagaagagtgacatcacctacttcaaaaccatgcctgatctccactcacagccagttctcttcatacctgatgttcactttgcaaacctgcagaggaccggacaggtgtattacaacacggatgatgaacgagaaggtggcagtgtccttgttaaacggatgttccggcccatggaagaggagtttggtccagtgccttcaaagcagatgaaagaagaagggacaaagcgagtgctcttgtacgtgaggaaggagactgacgatgtgttcgatgcattgatgttgaagtctcccacagtgaagggcctgatggaagcgatatctgagaaatatgggctgcccgtggagaagatagcaaagctttacaagaaaagcaaaaaaggcatcttggtgaacatggatgacaacatcatcgagcactactcgaacgaggacaccttcatcctcaacatggagagcatggtggagggcttcaaggtcacgctcatggaaatctagtaatgaactagtccgtaacttgaaagtatttcgatttcttggctttatatatcttgtggaaaggacgatgcgacaagtggcttcgcccgagg

SEQ ID NO: 2254 - DNA, 1979 bp, Homo sapiens
  source 1..1979: mol_type = genomic DNA
accgccaccatgtcacaagagtcggacaataataaaagactagtggccttagtgcccatgcccagtgaccctccattcaatacccgaagagcctacaccagtgaggatgaagcctggaagtcatacttggagaatcccctgacagcagccaccaaggccatgatgagcattaatggtgatgaggacagtgctgctgccctcggcctgctctatgactactacaaggttcctcgagacaagaggctgctgtctgtaagcaaagcaagtgacagccaagaagaccaggagaaaagaaactgccttggcaccagtgaagcccagagtaatttgagtggaggagaaaaccgagtgcaagtcctaaagactgttccagtgaacctttccctaaatcaagatcacctggagaattccaagcgggaacagtacagcatcagcttccccgagagctctgccatcatcccggtgtcgggaatcacggtggtgaaagctgaagatttcacaccagttttcatggccccacctgtgcactatccccggggagatggggaagagcaacgagtggttatctttgaacagactcagtatgacgtgccctcgctggccacccacagcgcctatctcaaagacgaccagcgcagcactccggacagcacatacagcgagagcttcaaggacgcagccacagagaaatttcggagtgcttcagttggggctgaggagtacatgtatgatcagacatcaagtggcacatttcagtacaccctggaagccaccaaatctctccgtcagaagcagggggagggccccatgacctacctcaacaaaggacagttctatgccataacactcagcgagaccggagacaacaaatgcttccgacaccccatcagcaaagtcaggagtgtggtgatggtggtcttcagtgaagacaaaaacagagatgaacagctcaaatactggaaatactggcactctcggcagcatacggcgaagcagagggtccttgacattgccgattacaaggagagctttaatacgattggaaacattgaagagattgcatataatgctgtttcctttacctgggacgtgaatgaagaggcgaagattttcatcaccgtgaattgcttgagcacagatttctcctcccaaaaaggggtgaaaggacttcctttgatgattcagattgacacatacagttataacaatcgtagcaataaacccattcatagagcttattgccagatcaaggtcttctgtgacaaaggagcagaaagaaaaatccgagatgaagagcggaagcagaacaggaagaaagggaaaggccaggcctcccaaactcaatgcaacagctcctctgatgggaagttggctgccatacctttacagaagaagagtgacatcacctacttcaaaaccatgcctgatctccactcacagccagttctcttcatacctgatgttcactttgcaaacctgcagaggaccggacaggtgtattacaacacggatgatgaacgagaaggtggcagtgtccttgttaaacggatgttccggcccatggaagaggagtttggtccagtgccttcaaagcagatgaaagaagaagggacaaagcgagtgctcttgtacgtgaggaaggagactgacgatgtgttcgatgcattgatgttgaagtctcccacagtgaagggcctgatggaagcgatatctgagaaatatgggctgcccgtggagaagatagcaaagctttacaagaaaagcaaaaaaggcatcttggtgaacatggatgacaacatcatcgagcactactcgaacgaggacaccttcatcctcaacatggagagcatggtggagggcttcaaggtcacgctcatggaaatctagtaatgaactagtccgtaacttgaaagtatttcgatttcttggctttatatatcttgtggaaaggacgacgtatgtaggtttgggatcgctct

SEQ ID NO: 2255 - DNA, 1910 bp, Homo sapiens
  source 1..1910: mol_type = genomic DNA
accgccaccatgtcgaatgaacttgatttcaggtctgtgcggctgctaaagaacgacccagtcaacttgcagaaattctcttacactagtgaggatgaggcctggaagacgtacctagaaaacccgttgacagctgccacaaaggccatgatgagagtcaatggagatgatgacagtgttgcggccttgagcttcctctatgattactacatgggtcccaaggagaagcggatattgtcctccagcactgggggcaggaatgaccaaggaaagaggtactaccatggcatggaatatgagacggacctcactccccttgaaagccccacacacctcatgaaattcctgacagagaacgtgtctggaaccccagagtacccagatttgctcaagaagaataacctgatgagcttggagggggccttgcccacccctggcaaggcagctcccctccctgcaggccccagcaagctggaggccggctctgtggacagctacctgttacccaccactgatatgtatgataatggctccctcaactccttgtttgagagcattcatggggtgccgcccacacagcgctggcagccagacagcaccttcaaagatgacccacaggagtcgatgctcttcccagatatcctgaaaacctccccggaacccccatgtccagaggactaccccagcctcaaaagtgactttgaatacaccctgggctcccccaaagccatccacatcaagtcaggcgagtcacccatggcctacctcaacaaaggccagttctaccccgtcaccctgcggaccccagcaggtggcaaaggccttgccttgtcctccaacaaagtcaagagtgtggtgatggttgtcttcgacaatgagaaggtcccagtagagcagctgcgcttctggaagcactggcattcccggcaacccactgccaagcagcgggtcattgacgtggctgactgcaaagaaaacttcaacactgtggagcacattgaggaggtggcctataatgcactgtcctttgtgtggaacgtgaatgaagaggccaaggtgttcatcggcgtaaactgtctgagcacagacttttcctcacaaaagggggtgaagggtgtccccctgaacctgcagattgacacctatgactgtggcttgggcactgagcgcctggtacaccgtgctgtctgccagatcaagatcttctgtgacaagggagctgagaggaagatgcgcgatgacgagcggaagcagttccggaggaaggtcaagtgccctgactccagcaacagtggcgtcaagggctgcctgctgtcgggcttcaggggcaatgagacgacctaccttcggccagagactgacctggagacgccacccgtgctgttcatccccaatgtgcacttctccagcctgcagcgctctggaggggcagccccctcggcaggacccagcagctccaacaggctgcctctgaagcgtacctgctcgcccttcactgaggagtttgagcctctgccctccaagcaggccaaggaaggcgaccttcagagagttctgctgtatgtgcggagggagactgaggaggtgtttgacgcgctcatgttgaagaccccagacctgaaggggctgaggaatgcgatctctgagaagtatgggttccctgaagagaacatttacaaagtctacaagaaatgcaagcgaggaatcttagtcaacatggacaacaacatcattcagcattacagcaaccacgtcgccttcctgctggacatgggggagctggacggcaaaattcagatcatccttaaggagctgtagtaatgaactagtccgtaacttgaaagtatttcgatttcttggctttatatatcttgtggaaaggacgaggtggtaacgctgtaggaatactc

SEQ ID NO: 2256 - DNA, 1982 bp, Homo sapiens
  source 1..1982: mol_type = genomic DNA
accgccaccatgtcgaatgaacttgatttcaggtctgtgcggctgctaaagaacgacccagtcaacttgcagaaattctcttacactagtgaggatgaggcctggaagacgtacctagaaaacccgttgacagctgccacaaaggccatgatgagagtcaatggagatgatgacagtgttgcggccttgagcttcctctatgattactacatgggtcccaaggagaagcggatattgtcctccagcactgggggcaggaatgaccaaggaaagaggtactaccatggcatggaatatgagacggacctcactccccttgaaagccccacacacctcatgaaattcctgacagagaacgtgtctggaaccccagagtacccagatttgctcaagaagaataacctgatgagcttggagggggccttgcccacccctggcaaggcagctcccctccctgcaggccccagcaagctggaggccggctctgtggacagctacctgttacccaccactgatatgtatgataatggctccctcaactccttgtttgagagcattcatggggtgccgcccacacagcgctggcagccagacagcaccttcaaagatgacccacaggagtcgatgctcttcccagatatcctgaaaacctccccggaacccccatgtccagaggactaccccagcctcaaaagtgactttgaatacaccctgggctcccccaaagccatccacatcaagtcaggcgagtcacccatggcctacctcaacaaaggccagttctaccccgtcaccctgcggaccccagcaggtggcaaaggccttgccttgtcctccaacaaagtcaagagtgtggtgatggttgtcttcgacaatgagaaggtcccagtagagcagctgcgcttctggaagcactggcattcccggcaacccactgccaagcagcgggtcattgacgtggctgactgcaaagaaaacttcaacactgtggagcacattgaggaggtggcctataatgcactgtcctttgtgtggaacgtgaatgaagaggccaaggtgttcatcggcgtaaactgtctgagcacagacttttcctcacaaaagggggtgaagggtgtccccctgaacctgcagattgacacctatgactgtggcttgggcactgagcgcctggtacaccgtgctgtctgccagatcaagatcttctgtgacaagggagctgagaggaagatgcgcgatgacgagcggaagcagttccggaggaaggtcaagtgccctgactccagcaacagtggcgtcaagggctgcctgctgtcgggcttcaggggcaatgagacgacctaccttcggccagagactgacctggagacgccacccgtgctgttcatccccaatgtgcacttctccagcctgcagcgctctggaggggcagccccctcggcaggacccagcagctccaacaggctgcctctgaagcgtacctgctcgcccttcactgaggagtttgagcctctgccctccaagcaggccaaggaaggcgaccttcagagagttctgctgtatgtgcggagggagactgaggaggtgtttgacgcgctcatgttgaagaccccagacctgaaggggctgaggaatgcgatctctgagaagtatgggttccctgaagagaacatttacaaagtctacaagaaatgcaagcgaggggaaacttctctcctccacccacgcctgtctcgccaccccccacctgactgtcttgaatgttcccatcctgtgactcaagtgaggaacatgggttttggagatggattttggaggcagagggacctggattcaaatcccagccccaccaccgtcaacagcctgcacttcactgtaaactcggaatagtaatgaactagtccgtaacttgaaagtatttcgatttcttggctttatatatcttgtggaaaggacgatcctcgcagaatcaccaattatcg

SEQ ID NO: 2257 - DNA, 1925 bp, Homo sapiens
  source 1..1925: mol_type = genomic DNA
accgccaccatgtggatgaattccattcttcctatttttcttttcaggtctgtgcggctgctaaagaacgacccagtcaacttgcagaaattctcttacactagtgaggatgaggcctggaagacgtacctagaaaacccgttgacagctgccacaaaggccatgatgagagtcaatggagatgatgacagtgttgcggccttgagcttcctctatgattactacatgggtcccaaggagaagcggatattgtcctccagcactgggggcaggaatgaccaaggaaagaggtactaccatggcatggaatatgagacggacctcactccccttgaaagccccacacacctcatgaaattcctgacagagaacgtgtctggaaccccagagtacccagatttgctcaagaagaataacctgatgagcttggagggggccttgcccacccctggcaaggcagctcccctccctgcaggccccagcaagctggaggccggctctgtggacagctacctgttacccaccactgatatgtatgataatggctccctcaactccttgtttgagagcattcatggggtgccgcccacacagcgctggcagccagacagcaccttcaaagatgacccacaggagtcgatgctcttcccagatatcctgaaaacctccccggaacccccatgtccagaggactaccccagcctcaaaagtgactttgaatacaccctgggctcccccaaagccatccacatcaagtcaggcgagtcacccatggcctacctcaacaaaggccagttctaccccgtcaccctgcggaccccagcaggtggcaaaggccttgccttgtcctccaacaaagtcaagagtgtggtgatggttgtcttcgacaatgagaaggtcccagtagagcagctgcgcttctggaagcactggcattcccggcaacccactgccaagcagcgggtcattgacgtggctgactgcaaagaaaacttcaacactgtggagcacattgaggaggtggcctataatgcactgtcctttgtgtggaacgtgaatgaagaggccaaggtgttcatcggcgtaaactgtctgagcacagacttttcctcacaaaagggggtgaagggtgtccccctgaacctgcagattgacacctatgactgtggcttgggcactgagcgcctggtacaccgtgctgtctgccagatcaagatcttctgtgacaagggagctgagaggaagatgcgcgatgacgagcggaagcagttccggaggaaggtcaagtgccctgactccagcaacagtggcgtcaagggctgcctgctgtcgggcttcaggggcaatgagacgacctaccttcggccagagactgacctggagacgccacccgtgctgttcatccccaatgtgcacttctccagcctgcagcgctctggaggggcagccccctcggcaggacccagcagctccaacaggctgcctctgaagcgtacctgctcgcccttcactgaggagtttgagcctctgccctccaagcaggccaaggaaggcgaccttcagagagttctgctgtatgtgcggagggagactgaggaggtgtttgacgcgctcatgttgaagaccccagacctgaaggggctgaggaatgcgatctctgagaagtatgggttccctgaagagaacatttacaaagtctacaagaaatgcaagcgaggaatcttagtcaacatggacaacaacatcattcagcattacagcaaccacgtcgccttcctgctggacatgggggagctggacggcaaaattcagatcatccttaaggagctgtagtaatgaactagtccgtaacttgaaagtatttcgatttcttggctttatatatcttgtggaaaggacgattgcggactttcctgaatcggaga

SEQ ID NO: 2258 - DNA, 1772 bp, Homo sapiens
  source 1..1772: mol_type = genomic DNA
accgccaccatgatgagagtcaatggagatgatgacagtgttgcggccttgagcttcctctatgattactacatgggtcccaaggagaagcggatattgtcctccagcactgggggcaggaatgaccaaggaaagaggtactaccatggcatggaatatgagacggacctcactccccttgaaagccccacacacctcatgaaattcctgacagagaacgtgtctggaaccccagagtacccagatttgctcaagaagaataacctgatgagcttggagggggccttgcccacccctggcaaggcagctcccctccctgcaggccccagcaagctggaggccggctctgtggacagctacctgttacccaccactgatatgtatgataatggctccctcaactccttgtttgagagcattcatggggtgccgcccacacagcgctggcagccagacagcaccttcaaagatgacccacaggagtcgatgctcttcccagatatcctgaaaacctccccggaacccccatgtccagaggactaccccagcctcaaaagtgactttgaatacaccctgggctcccccaaagccatccacatcaagtcaggcgagtcacccatggcctacctcaacaaaggccagttctaccccgtcaccctgcggaccccagcaggtggcaaaggccttgccttgtcctccaacaaagtcaagagtgtggtgatggttgtcttcgacaatgagaaggtcccagtagagcagctgcgcttctggaagcactggcattcccggcaacccactgccaagcagcgggtcattgacgtggctgactgcaaagaaaacttcaacactgtggagcacattgaggaggtggcctataatgcactgtcctttgtgtggaacgtgaatgaagaggccaaggtgttcatcggcgtaaactgtctgagcacagacttttcctcacaaaagggggtgaagggtgtccccctgaacctgcagattgacacctatgactgtggcttgggcactgagcgcctggtacaccgtgctgtctgccagatcaagatcttctgtgacaagggagctgagaggaagatgcgcgatgacgagcggaagcagttccggaggaaggtcaagtgccctgactccagcaacagtggcgtcaagggctgcctgctgtcgggcttcaggggcaatgagacgacctaccttcggccagagactgacctggagacgccacccgtgctgttcatccccaatgtgcacttctccagcctgcagcgctctggaggggcagccccctcggcaggacccagcagctccaacaggctgcctctgaagcgtacctgctcgcccttcactgaggagtttgagcctctgccctccaagcaggccaaggaaggcgaccttcagagagttctgctgtatgtgcggagggagactgaggaggtgtttgacgcgctcatgttgaagaccccagacctgaaggggctgaggaatgcgatctctgagaagtatgggttccctgaagagaacatttacaaagtctacaagaaatgcaagcgaggaatcttagtcaacatggacaacaacatcattcagcattacagcaaccacgtcgccttcctgctggacatgggggagctggacggcaaaattcagatcatccttaaggagctgtagtaatgaactagtccgtaacttgaaagtatttcgatttcttggctttatatatcttgtggaaaggacgaagcacacatgacatgtggcgggac

SEQ ID NO: 2259 - DNA, 626 bp, Homo sapiens
  source 1..626: mol_type = genomic DNA
accgccaccatgactactaaaaatttagaaaccaaagtcaccgttacttcatccccaatccgaggagcaggagatggaatggaaactgaggaaccacctaaatctgttgaagttacctccggagtccaatctagaaagcatcatagtcttcagagtccatggaagaaagcagttccatcagagagcccaggagttcttcagctagggaaaatgctcactgaaaaagcaatggaagttaaagctgtaagaatattagttcccaaagctgctataactcatgatatccccaacaaaaatacaaaggttaagtctctgggacatcataaaggagaattccttggtcagtcagagggagttatagaacctaataaggaactctcagaggtaaagaatgtattggaaaagctcaagaattctgaaagaaggttactacaggacaaagaaggtctttcaaaccagctccgtgtacagacagaggtaagaagagccttaatcgataaaatgagtactactctttacgtctggaccttttagtaatgaactagtccgtaacttgaaagtatttcgatttcttggctttatatatcttgtggaaaggacgacgttcattcgcgcatcacagatgc

SEQ ID NO: 2260 - DNA, 1247 bp, Homo sapiens
  source 1..1247: mol_type = genomic DNA
accgccaccatggagcgcgggatgcacctcggtgcagcggccgccggcgaggacgacctcttcctgcacaagagcctgagcgcctccacctccaagcgcttggaagcggctttccgctccacgcccccgggcatggacctgtccctggcgccgccgcctcgggaacgcccggcgtcctcctcctcgtcgcccctgggctgcttcgagccggctgaccccgagggggcagggctgctgttgccgccgcctggaggaggcggcggcggcagcgcgggaagtggcggcggcggcggcggcggggtgggtgtccccgggctgctagtaggttcagccggcgttgggggcgaccctagcctaagcagcctgccggccggggccgccctttgcctcaagtacggcgaaagcgcgagccggggctcggtggccgagagcagcggcggcgagcagagccccgacgacgacagcgacggtcgctgcgagctcgtgctgcgggccggagtagccgacccgcgggcctccccgggagcgggaggtggtggcgcgaaggcagccgagggctgctccaatgcccacctccacggcggcgccagcgtccccccggggggcctgggcggcggcggcggcgggggtagcagcagcggtagcagtggcggcggtggcggtagcggtagcggcagcggcggcagcagcagcagcagcagcagcagcagcaagaaatccaaagagcaaaaggcgctgcggcttaacatcaatgcccgagagcgccggcggatgcacgacctgaacgacgcgctggacgagctgcgcgcggtgatcccctacgcgcacagcccctcggtgcgaaagctctccaagatcgccacgctgctgctcgccaagaactacatcctcatgcaggcgcaggccctggaggagatgcggcgcctagtcgcctacctcaaccagggccaggccatctcggctgcctccctgcccagctcggcggctgcagcggcagcagctgctgccctgcacccggcgctcggcgcctacgagcaggcagccggctacccgttcagcgccggactgcccccggctgcctcctgcccggagaagtgcgccctgtttaacagcgtctcctccagcctctgcaaacagtgcacggagaagccttagtaatgaactagtccgtaacttgaaagtatttcgatttcttggctttatatatcttgtggaaaggacgaccgtcggcggcaatcggcgaagcc

SEQ ID NO: 2261 - DNA, 827 bp, Homo sapiens
  source 1..827: mol_type = genomic DNA
accgccaccatgagcatccgcccacccggcgagcccccgagcccaggcggcgcggccatggccgagctcaagtcgctgtcgggggacgcgtacctggcactaagccacggctacgcggcggcggctgcgggtctcgcctacggggcggcgcgagaacccgaagcggcccgcggctacggcactccgggcccgggcggcgacctccccgcggcgcctgcacctcgcgccccagctcaggcggcggagagcagcggcgaacagagcggggacgaggacgacgccttcgagcagcggcggcggcggcgcgggccagggagcgcggcggacgggcggcggcggccgcgagagcagcggtctctgcggctcagcatcaacgcgcgcgagcggcggcgcatgcacgacctaaacgacgcgctggacgggctgcgagccgtcatcccctacgcgcacagcccgtcggtgcgcaagctctccaagatcgccacgctgctgctcgccaagaactatatcctcatgcaggcgcaggccctggacgagatgcggcgcctggtggccttcctcaaccagggccagggcctggccgcgcccgtaaacgccgcgcccttgacgcccttcggccaggccactgtgtgccccttctccgcaggcgccgccctggggccctgccctgacaagtgcgccgccttctccgggacgccctccgcgctttgcaaacactgtcacgagaagccgtagtaatgaactagtccgtaacttgaaagtatttcgatttcttggctttatatatcttgtggaaaggacgacccagcccggtctaggatcacgtg

SEQ ID NO: 2262 - DNA, 1634 bp, Homo sapiens
  source 1..1634: mol_type = genomic DNA
accgccaccatggcggcggccgccctgagggaccccgctcaggttcctgtggctgcagacttgcttacagaccatgaggagggctatgtgacctttgaggatgtggctgtctacttctcccaggaggaatggagattgcttgatgacgctcagaggctcctctaccgcaatgtgatgctggagaactttacacttctggcctctctgggacttgcatcttccaagacccatgaaataacccagctggagtcatgggaggagcccttcatgcctgcttgggaagttgtgacttcagccataccgagaggttgttggcatggagccgaggctgaggaggctcctgagcagattgcttctgtaggactgctcagttcaaacattcagcaacaccagaagcagcactgtggagagaaacccttaaaaagacaagagggcagggtcccagttttgaggagttgcaaagttcacctatcagagaagtccttgcaaagcagggaggttgggaaggccctcctgatcagctcaggtgttctcaagcaccaggtgactcacacaggagagaagtcacataggagctccaaaagtagggaggcctttcatgctggaaaaaggcattacaaatgcagtgaatgtgggaaagcctttggtcagaaatatttacttgttcagcaccagagactacatgctgggaaaaagacgtatgaatgcagtgaatgtgggaagttatttagagatatgtccaacctttttatacaccaaatagttcacactggagaaaggccttacgggtgtagtaactgtggaaaatcctttagccgtaatgctcacctcattgaacaccagagagttcacactggagaaaagccttttacatgcagtgaatgtggaaaagctttcaggcataattccacacttgttcagcatcacaaaatccacactggagtaaggccttatgagtgcagtgaatgtggaaaattgtttagtttcaactccagcctcatgaaacatcagagaattcacactggagaaagaccttataagtgcagtgaatgtggaaaattctatagccacaagtccaaccttatcaaacattggcgtgttcatactggagaaaggccttacaagtgcagcgactgtgggaaattttttacccaatgctcaagcctcatgcaacatcaaaaagttcacactggagaaaagccttttaagtgcaatgaatgtgggagattctttagagagaattccaccctagttagacatcagagggttcacactggagcaaagccttatgagtgcagggaatgtgggaaattttttagccaaagctcaaccctcatgcaacatcgaaaagttcacattggagaaaagccttttaagtgcaatgaatgtgggagattgtttagagagaattccagccttgttaaacatcagagggttcacactggagcaaagccttatgagtgcagggaatgtgggaagttttttcgccacaactccagtctttttaaacatcgaaggattcacactggagaaatgcagtagtaatgaactagtccgtaacttgaaagtatttcgatttcttggctttatatatcttgtggaaaggacgaaactttacaggaccttcagacctc

SEQ ID NO: 2263 - DNA, 1496 bp, Homo sapiens
  source 1..1496: mol_type = genomic DNA
accgccaccatggcggcggccgccctgagggaccccgctcagggctatgtgacctttgaggatgtggctgtctacttctcccaggaggaatggagattgcttgatgacgctcagaggctcctctaccgcaatgtgatgctggagaactttacacttctggcctctctgggttgttggcatggagccgaggctgaggaggctcctgagcagattgcttctgtaggactgctcagttcaaacattcagcaacaccagaagcagcactgtggagagaaacccttaaaaagacaagagggcagggtcccagttttgaggagttgcaaagttcacctatcagagaagtccttgcaaagcagggaggttgggaaggccctcctgatcagctcaggtgttctcaagcaccaggtgactcacacaggagagaagtcacataggagctccaaaagtagggaggcctttcatgctggaaaaaggcattacaaatgcagtgaatgtgggaaagcctttggtcagaaatatttacttgttcagcaccagagactacatgctgggaaaaagacgtatgaatgcagtgaatgtgggaagttatttagagatatgtccaacctttttatacaccaaatagttcacactggagaaaggccttacgggtgtagtaactgtggaaaatcctttagccgtaatgctcacctcattgaacaccagagagttcacactggagaaaagccttttacatgcagtgaatgtggaaaagctttcaggcataattccacacttgttcagcatcacaaaatccacactggagtaaggccttatgagtgcagtgaatgtggaaaattgtttagtttcaactccagcctcatgaaacatcagagaattcacactggagaaagaccttataagtgcagtgaatgtggaaaattctatagccacaagtccaaccttatcaaacattggcgtgttcatactggagaaaggccttacaagtgcagcgactgtgggaaattttttacccaatgctcaagcctcatgcaacatcaaaaagttcacactggagaaaagccttttaagtgcaatgaatgtgggagattctttagagagaattccaccctagttagacatcagagggttcacactggagcaaagccttatgagtgcagggaatgtgggaaattttttagccaaagctcaaccctcatgcaacatcgaaaagttcacattggagaaaagccttttaagtgcaatgaatgtgggagattgtttagagagaattccagccttgttaaacatcagagggttcacactggagcaaagccttatgagtgcagggaatgtgggaagttttttcgccacaactccagtctttttaaacatcgaaggattcacactggagaaatgcagtagtaatgaactagtccgtaacttgaaagtatttcgatttcttggctttatatatcttgtggaaaggacgacgctgtcgtaggatgggaccttca

SEQ ID NO: 2264 - DNA, 1637 bp, Homo sapiens
  source 1..1637: mol_type = genomic DNA
accgccaccatggcggcggccgccctgagggaccccgctcaggttcctgtggctgcagacttgcttacagaccatgaggagcagggctatgtgacctttgaggatgtggctgtctacttctcccaggaggaatggagattgcttgatgacgctcagaggctcctctaccgcaatgtgatgctggagaactttacacttctggcctctctgggacttgcatcttccaagacccatgaaataacccagctggagtcatgggaggagcccttcatgcctgcttgggaagttgtgacttcagccataccgagaggttgttggcatggagccgaggctgaggaggctcctgagcagattgcttctgtaggactgctcagttcaaacattcagcaacaccagaagcagcactgtggagagaaacccttaaaaagacaagagggcagggtcccagttttgaggagttgcaaagttcacctatcagagaagtccttgcaaagcagggaggttgggaaggccctcctgatcagctcaggtgttctcaagcaccaggtgactcacacaggagagaagtcacataggagctccaaaagtagggaggcctttcatgctggaaaaaggcattacaaatgcagtgaatgtgggaaagcctttggtcagaaatatttacttgttcagcaccagagactacatgctgggaaaaagacgtatgaatgcagtgaatgtgggaagttatttagagatatgtccaacctttttatacaccaaatagttcacactggagaaaggccttacgggtgtagtaactgtggaaaatcctttagccgtaatgctcacctcattgaacaccagagagttcacactggagaaaagccttttacatgcagtgaatgtggaaaagctttcaggcataattccacacttgttcagcatcacaaaatccacactggagtaaggccttatgagtgcagtgaatgtggaaaattgtttagtttcaactccagcctcatgaaacatcagagaattcacactggagaaagaccttataagtgcagtgaatgtggaaaattctatagccacaagtccaaccttatcaaacattggcgtgttcatactggagaaaggccttacaagtgcagcgactgtgggaaattttttacccaatgctcaagcctcatgcaacatcaaaaagttcacactggagaaaagccttttaagtgcaatgaatgtgggagattctttagagagaattccaccctagttagacatcagagggttcacactggagcaaagccttatgagtgcagggaatgtgggaaattttttagccaaagctcaaccctcatgcaacatcgaaaagttcacattggagaaaagccttttaagtgcaatgaatgtgggagattgtttagagagaattccagccttgttaaacatcagagggttcacactggagcaaagccttatgagtgcagggaatgtgggaagttttttcgccacaactccagtctttttaaacatcgaaggattcacactggagaaatgcagtagtaatgaactagtccgtaacttgaaagtatttcgatttcttggctttatatatcttgtggaaaggacgaagtaactgcgtggagcgagttagc

SEQ ID NO: 2265 - DNA, 1538 bp, Homo sapiens
  source 1..1538: mol_type = genomic DNA
accgccaccatggcggcggccgccctgagggaccccgctcaggttcctgtggctgcagacttgcttacagaccatgaggagcagggctatgtgacctttgaggatgtggctgtctacttctcccaggaggaatggagattgcttgatgacgctcagaggctcctctaccgcaatgtgatgctggagaactttacacttctggcctctctgggttgttggcatggagccgaggctgaggaggctcctgagcagattgcttctgtaggactgctcagttcaaacattcagcaacaccagaagcagcactgtggagagaaacccttaaaaagacaagagggcagggtcccagttttgaggagttgcaaagttcacctatcagagaagtccttgcaaagcagggaggttgggaaggccctcctgatcagctcaggtgttctcaagcaccaggtgactcacacaggagagaagtcacataggagctccaaaagtagggaggcctttcatgctggaaaaaggcattacaaatgcagtgaatgtgggaaagcctttggtcagaaatatttacttgttcagcaccagagactacatgctgggaaaaagacgtatgaatgcagtgaatgtgggaagttatttagagatatgtccaacctttttatacaccaaatagttcacactggagaaaggccttacgggtgtagtaactgtggaaaatcctttagccgtaatgctcacctcattgaacaccagagagttcacactggagaaaagccttttacatgcagtgaatgtggaaaagctttcaggcataattccacacttgttcagcatcacaaaatccacactggagtaaggccttatgagtgcagtgaatgtggaaaattgtttagtttcaactccagcctcatgaaacatcagagaattcacactggagaaagaccttataagtgcagtgaatgtggaaaattctatagccacaagtccaaccttatcaaacattggcgtgttcatactggagaaaggccttacaagtgcagcgactgtgggaaattttttacccaatgctcaagcctcatgcaacatcaaaaagttcacactggagaaaagccttttaagtgcaatgaatgtgggagattctttagagagaattccaccctagttagacatcagagggttcacactggagcaaagccttatgagtgcagggaatgtgggaaattttttagccaaagctcaaccctcatgcaacatcgaaaagttcacattggagaaaagccttttaagtgcaatgaatgtgggagattgtttagagagaattccagccttgttaaacatcagagggttcacactggagcaaagccttatgagtgcagggaatgtgggaagttttttcgccacaactccagtctttttaaacatcgaaggattcacactggagaaatgcagtagtaatgaactagtccgtaacttgaaagtatttcgatttcttggctttatatatcttgtggaaaggacgagatctgtgatgcagcaatgatctg

SEQ ID NO: 2266 - DNA, 1598 bp, Homo sapiens
  source 1..1598: mol_type = genomic DNA
accgccaccatggcggcggccgccctgagggaccccgctcagcagggctatgtgacctttgaggatgtggctgtctacttctcccaggaggaatggagattgcttgatgacgctcagaggctcctctaccgcaatgtgatgctggagaactttacacttctggcctctctgggacttgcatcttccaagacccatgaaataacccagctggagtcatgggaggagcccttcatgcctgcttgggaagttgtgacttcagccataccgagaggttgttggcatggagccgaggctgaggaggctcctgagcagattgcttctgtaggactgctcagttcaaacattcagcaacaccagaagcagcactgtggagagaaacccttaaaaagacaagagggcagggtcccagttttgaggagttgcaaagttcacctatcagagaagtccttgcaaagcagggaggttgggaaggccctcctgatcagctcaggtgttctcaagcaccaggtgactcacacaggagagaagtcacataggagctccaaaagtagggaggcctttcatgctggaaaaaggcattacaaatgcagtgaatgtgggaaagcctttggtcagaaatatttacttgttcagcaccagagactacatgctgggaaaaagacgtatgaatgcagtgaatgtgggaagttatttagagatatgtccaacctttttatacaccaaatagttcacactggagaaaggccttacgggtgtagtaactgtggaaaatcctttagccgtaatgctcacctcattgaacaccagagagttcacactggagaaaagccttttacatgcagtgaatgtggaaaagctttcaggcataattccacacttgttcagcatcacaaaatccacactggagtaaggccttatgagtgcagtgaatgtggaaaattgtttagtttcaactccagcctcatgaaacatcagagaattcacactggagaaagaccttataagtgcagtgaatgtggaaaattctatagccacaagtccaaccttatcaaacattggcgtgttcatactggagaaaggccttacaagtgcagcgactgtgggaaattttttacccaatgctcaagcctcatgcaacatcaaaaagttcacactggagaaaagccttttaagtgcaatgaatgtgggagattctttagagagaattccaccctagttagacatcagagggttcacactggagcaaagccttatgagtgcagggaatgtgggaaattttttagccaaagctcaaccctcatgcaacatcgaaaagttcacattggagaaaagccttttaagtgcaatgaatgtgggagattgtttagagagaattccagccttgttaaacatcagagggttcacactggagcaaagccttatgagtgcagggaatgtgggaagttttttcgccacaactccagtctttttaaacatcgaaggattcacactggagaaatgcagtagtaatgaactagtccgtaacttgaaagtatttcgatttcttggctttatatatcttgtggaaaggacgagaatagaatacctaaggcaatgca

SEQ ID NO: 2267 - DNA, 1595 bp, Homo sapiens
  source 1..1595: mol_type = genomic DNA
accgccaccatggcggcggccgccctgagggaccccgctcagggctatgtgacctttgaggatgtggctgtctacttctcccaggaggaatggagattgcttgatgacgctcagaggctcctctaccgcaatgtgatgctggagaactttacacttctggcctctctgggacttgcatcttccaagacccatgaaataacccagctggagtcatgggaggagcccttcatgcctgcttgggaagttgtgacttcagccataccgagaggttgttggcatggagccgaggctgaggaggctcctgagcagattgcttctgtaggactgctcagttcaaacattcagcaacaccagaagcagcactgtggagagaaacccttaaaaagacaagagggcagggtcccagttttgaggagttgcaaagttcacctatcagagaagtccttgcaaagcagggaggttgggaaggccctcctgatcagctcaggtgttctcaagcaccaggtgactcacacaggagagaagtcacataggagctccaaaagtagggaggcctttcatgctggaaaaaggcattacaaatgcagtgaatgtgggaaagcctttggtcagaaatatttacttgttcagcaccagagactacatgctgggaaaaagacgtatgaatgcagtgaatgtgggaagttatttagagatatgtccaacctttttatacaccaaatagttcacactggagaaaggccttacgggtgtagtaactgtggaaaatcctttagccgtaatgctcacctcattgaacaccagagagttcacactggagaaaagccttttacatgcagtgaatgtggaaaagctttcaggcataattccacacttgttcagcatcacaaaatccacactggagtaaggccttatgagtgcagtgaatgtggaaaattgtttagtttcaactccagcctcatgaaacatcagagaattcacactggagaaagaccttataagtgcagtgaatgtggaaaattctatagccacaagtccaaccttatcaaacattggcgtgttcatactggagaaaggccttacaagtgcagcgactgtgggaaattttttacccaatgctcaagcctcatgcaacatcaaaaagttcacactggagaaaagccttttaagtgcaatgaatgtgggagattctttagagagaattccaccctagttagacatcagagggttcacactggagcaaagccttatgagtgcagggaatgtgggaaattttttagccaaagctcaaccctcatgcaacatcgaaaagttcacattggagaaaagccttttaagtgcaatgaatgtgggagattgtttagagagaattccagccttgttaaacatcagagggttcacactggagcaaagccttatgagtgcagggaatgtgggaagttttttcgccacaactccagtctttttaaacatcgaaggattcacactggagaaatgcagtagtaatgaactagtccgtaacttgaaagtatttcgatttcttggctttatatatcttgtggaaaggacgaacgtcgccggctgtgcttatccct

SEQ ID NO: 2268 - DNA, 2195 bp, Homo sapiens
  source 1..2195: mol_type = genomic DNA
accgccaccatgcaagaaggccttcatagaatgacttgggactgcattgctattgggagccatgagaattctgtgcagggcactgtggcatttgaagatgtggctgtgaacttttcccaggaggagtggagtctccttagtgaggttcagagatgcctttaccatgacgtgatgctggagaactgggtacttatatcctccctgggttgttggtgtggatcagaagatgaggaggcaccttctaagaagagcatttctatacaaagagtgtctcaggtcagcactcctggggcaggtgtgtctcccaagaaggcccactcttgtgaaatgtgtggcgcgatcttgggagacattttgcacttggcagatcatcaggggacacatcacaagcagaaactgcacaggtgtgaggcatgggggaataaattgtatgatagttcaaaccgtccgcaccagaatcagtaccttggagagaaaccctatagaagcagtgttgaggaagcattgtttgtgaagaggtgtaagttccatgtgtcagaggagtcatctatcttcattcagagtggaaaggactttttgcccagctcaggattactgctgcaggaggccactcacactggggagaagtcaaacagcaaacctgagtgtgagtctccctttcagtggggagatactcattacagctgtggagaatgcatgaaacattctagcaccaaacacgtatttgttcaacagcagagacttccctctagagaggaatgttattgctgggaatgtgggaaatcctttagcaaatatgatagcgtcagtaatcatcagagagttcacactgggaaaagaccttatgaatgtggagaatgtgggaaatcttttagtcataagggcagccttgttcagcatcagcgagttcacactgggaaaagaccttatgaatgtggagaatgtgggaaatcttttagtcataagggcagccttgttcagcatcagcgagttcatactggagaaagaccttatgagtgtggagaatgtgggaaatcttttagtcaaaatggtactctcattaaacatcaacgagttcacactggagaaagaccttatgagtgtgaagaatgtgggaaatgttttactcagaagggcaatctcattcaacatcaacgaggtcacactagtgaaagaccttatgagtgtgaagaatgtggaaaatgttttagtcaaaagggcaccctaactgaacatcatcgagttcacactagagaacgaccttatgagtgtggagaatgtgggaaatcttttagtcgaaagggacaccttaggaaccatcagcgaggtcacactggagaaagaccttacgagtgtggagaatgtgggaaatcttttagtcgaaagggcaacctcattcagcatcagcgaagccacactggagaaaggccttatgagtgtagagagtgtaggaaattatttaggggcaagtcccacctcattgaacaccagagagttcacactggagaaaggccatatgaatgtaatgaatgtgggaaatcatttcaagacagctctgggtttcgtgttcatcagagagttcacactggagaaaaaccgtttgagtgtagtgaatgtgggaagtcatttcctcaaagctgttccctccttcgacatcggagagttcatactggagaaaggccttatgaatgtggagaatgtggaaagtcatttcatcagagctcttccctccttcgacatcagaaaactcacactgcagaaagaccttatgagtgcagagaatgtgggaaattcttctccagtctccttgaacacaggagagttcacactggagaaaggccttatgaatgcagggaatgtggaaaaacatttactcgaaggtctgcgcattttaaacatcagagacttcatactcgaggaaagccttacgagtgcagcgaatgtgggaaatcctttgctgaaaccttcagtcttactgaacacaggagagtacacactggagaaaggccttatgagtgcagtgaatgtggaaaatcatttcatcgaagctcttctctccttcgacatcagagagttcacacagaaagaagtccttacaagtagtaatgaactagtccgtaacttgaaagtatttcgatttcttggctttatatatcttgtggaaaggacgagataaggctactatcccaatagcc

SEQ ID NO: 2269 - DNA, 1877 bp, Homo sapiens
  source 1..1877: mol_type = genomic DNA
accgccaccatgtgtggcgcgatcttgggagacattttgcacttggcagatcatcaggggacacatcacaagcagaaactgcacaggtgtgaggcatgggggaataaattgtatgatagttcaaaccgtccgcaccagaatcagtaccttggagagaaaccctatagaagcagtgttgaggaagcattgtttgtgaagaggtgtaagttccatgtgtcagaggagtcatctatcttcattcagagtggaaaggactttttgcccagctcaggattactgctgcaggaggccactcacactggggagaagtcaaacagcaaacctgagtgtgagtctccctttcagtggggagatactcattacagctgtggagaatgcatgaaacattctagcaccaaacacgtatttgttcaacagcagagacttccctctagagaggaatgttattgctgggaatgtgggaaatcctttagcaaatatgatagcgtcagtaatcatcagagagttcacactgggaaaagaccttatgaatgtggagaatgtgggaaatcttttagtcataagggcagccttgttcagcatcagcgagttcacactgggaaaagaccttatgaatgtggagaatgtgggaaatcttttagtcataagggcagccttgttcagcatcagcgagttcatactggagaaagaccttatgagtgtggagaatgtgggaaatcttttagtcaaaatggtactctcattaaacatcaacgagttcacactggagaaagaccttatgagtgtgaagaatgtgggaaatgttttactcagaagggcaatctcattcaacatcaacgaggtcacactagtgaaagaccttatgagtgtgaagaatgtggaaaatgttttagtcaaaagggcaccctaactgaacatcatcgagttcacactagagaacgaccttatgagtgtggagaatgtgggaaatcttttagtcgaaagggacaccttaggaaccatcagcgaggtcacactggagaaagaccttacgagtgtggagaatgtgggaaatcttttagtcgaaagggcaacctcattcagcatcagcgaagccacactggagaaaggccttatgagtgtagagagtgtaggaaattatttaggggcaagtcccacctcattgaacaccagagagttcacactggagaaaggccatatgaatgtaatgaatgtgggaaatcatttcaagacagctctgggtttcgtgttcatcagagagttcacactggagaaaaaccgtttgagtgtagtgaatgtgggaagtcatttcctcaaagctgttccctccttcgacatcggagagttcatactggagaaaggccttatgaatgtggagaatgtggaaagtcatttcatcagagctcttccctccttcgacatcagaaaactcacactgcagaaagaccttatgagtgcagagaatgtgggaaattcttctccagtctccttgaacacaggagagttcacactggagaaaggccttatgaatgcagggaatgtggaaaaacatttactcgaaggtctgcgcattttaaacatcagagacttcatactcgaggaaagccttacgagtgcagcgaatgtgggaaatcctttgctgaaaccttcagtcttactgaacacaggagagtacacactggagaaaggccttatgagtgcagtgaatgtggaaaatcatttcatcgaagctcttctctccttcgacatcagagagttcacacagaaagaagtccttacaagtagtaatgaactagtccgtaacttgaaagtatttcgatttcttggctttatatatcttgtggaaaggacgactgcttatggacggtctgtgcggc

SEQ ID NO: 2270 - DNA, 1829 bp, Homo sapiens
  source 1..1829: mol_type = genomic DNA
accgccaccatggcagcggctgcgccgaggcgcccgactcagcagggcactgtgacctttgaagatgtggctgtgaacttttcccaggaggagtggtgtcttcttagtgaggctcagaggtgcttgtaccgtgatgtgatgctagagaacctggctctcatatcctcgctgggttgttggtgtggatcaaaagatgaggaggcaccttgtaagcagagaatttctgtacaaagagagtctcagagcaggactcctagggcaggtgtttctcctaagaaggctcacccctgtgaaatgtgtggcctcatcttggaggatgtttttcactttgctgaccaccaggaaactcatcacaagcagaagctgaacaggagtggagcatgtggaaaaaacttggatgacactgcataccttcatcagcaccagaagcagcatattggagagaaattctacagaaagagtgtcagagaagcatcgtttgtaaagaaacgtaagctcagggtgtcacaggagccatttgtcttccgcgagtttgggaaggacgttctgcccagttcaggattgtgccaagaagcagctgctgtagagaagacagacagtgaaactatgcatggcccaccctttcaggagggaaaaactaattacagttgtggaaaacgcacaaaagccttcagcaccaaacactcagttattccacaccagaaacttttcactagagatggatgttatgtgtgcagtgattgtggaaaatcctttagcagatatgtcagcttcagtaatcatcagcgagatcacactgcaaaaggaccttatgattgtggagagtgtgggaaatcttatagtcgaaagagcagccttattcaacatcagcgagtccacactggaaagacagcttatccctgtgaggagtgcgggaaatcttttagtcagaagggcagccttattagccatcagcgtgttcacactggagaaaggccttatgagtgtagagaatatgggaaatcttttggtcaaaagggtaacctcattcaacatcagcaaggtcacactggagagagagcttatcactgtggggaatgtgggaaatcttttcgtcagaagttctgctttattaaccatcagcgtgttcacactggagaaaggccttacaagtgtggagaatgtggaaaatcttttggtcaaaagggcaacctcgttcaacatcagcgaggtcatactggagaaaggccctatgagtgcaaggaatgtgggaaatcatttaggtacagatcccacctcactgaacaccagagacttcacactggggaaagaccttacaattgtagggaatgtgggaaattatttaacaggaagtatcatcttctcgttcatgagagagttcacactggagaaaggccatatgcgtgtgaggtatgtgggaaattatttggtaataagaactgcgtgactatacatcagaggattcacactggagaaaggccgtatgaatgcaatgaatgtgggaaatcatttctttccagctctgcgcttcatgttcataaaagagttcattctggacaaaagccttataagtgcagtgaatgtggaaaatcctttgctgaatgttccagtctcattaaacacaggagaattcacactggagaaaggccttatgaatgtaccaaatgtggaaaaacatttcagcgaagctctaccctccttcatcatcagagttcacacaggagaaaggccttatagtaatgaactagtccgtaacttgaaagtatttcgatttcttggctttatatatcttgtggaaaggacgagtttatggaacctacgaatgccag

SEQ ID NO: 2271 - DNA, 1826 bp, Homo sapiens
  source 1..1826: mol_type = genomic DNA
accgccaccatggcagcggctgcgccgaggcgcccgactcagggcactgtgacctttgaagatgtggctgtgaacttttcccaggaggagtggtgtcttcttagtgaggctcagaggtgcttgtaccgtgatgtgatgctagagaacctggctctcatatcctcgctgggttgttggtgtggatcaaaagatgaggaggcaccttgtaagcagagaatttctgtacaaagagagtctcagagcaggactcctagggcaggtgtttctcctaagaaggctcacccctgtgaaatgtgtggcctcatcttggaggatgtttttcactttgctgaccaccaggaaactcatcacaagcagaagctgaacaggagtggagcatgtggaaaaaacttggatgacactgcataccttcatcagcaccagaagcagcatattggagagaaattctacagaaagagtgtcagagaagcatcgtttgtaaagaaacgtaagctcagggtgtcacaggagccatttgtcttccgcgagtttgggaaggacgttctgcccagttcaggattgtgccaagaagcagctgctgtagagaagacagacagtgaaactatgcatggcccaccctttcaggagggaaaaactaattacagttgtggaaaacgcacaaaagccttcagcaccaaacactcagttattccacaccagaaacttttcactagagatggatgttatgtgtgcagtgattgtggaaaatcctttagcagatatgtcagcttcagtaatcatcagcgagatcacactgcaaaaggaccttatgattgtggagagtgtgggaaatcttatagtcgaaagagcagccttattcaacatcagcgagtccacactggaaagacagcttatccctgtgaggagtgcgggaaatcttttagtcagaagggcagccttattagccatcagcgtgttcacactggagaaaggccttatgagtgtagagaatatgggaaatcttttggtcaaaagggtaacctcattcaacatcagcaaggtcacactggagagagagcttatcactgtggggaatgtgggaaatcttttcgtcagaagttctgctttattaaccatcagcgtgttcacactggagaaaggccttacaagtgtggagaatgtggaaaatcttttggtcaaaagggcaacctcgttcaacatcagcgaggtcatactggagaaaggccctatgagtgcaaggaatgtgggaaatcatttaggtacagatcccacctcactgaacaccagagacttcacactggggaaagaccttacaattgtagggaatgtgggaaattatttaacaggaagtatcatcttctcgttcatgagagagttcacactggagaaaggccatatgcgtgtgaggtatgtgggaaattatttggtaataagaactgcgtgactatacatcagaggattcacactggagaaaggccgtatgaatgcaatgaatgtgggaaatcatttctttccagctctgcgcttcatgttcataaaagagttcattctggacaaaagccttataagtgcagtgaatgtggaaaatcctttgctgaatgttccagtctcattaaacacaggagaattcacactggagaaaggccttatgaatgtaccaaatgtggaaaaacatttcagcgaagctctaccctccttcatcatcagagttcacacaggagaaaggccttatagtaatgaactagtccgtaacttgaaagtatttcgatttcttggctttatatatcttgtggaaaggacgaccgttgtgcccagccggattactc

SEQ ID NO: 2272 - DNA, 1079 bp, Homo sapiens
  source 1..1079: mol_type = genomic DNA
accgccaccatgactgtacgtcaggtaagtcattctggagagaaaggatataaatgtgatctgtgtggcaaggtctttagtcaaaaatcaaaccttgcgcgtcattggagagttcatactggagagaaaccatacaaatgtaatgaatgtgacagaagtttcagtcgcaactcatgccttgcactacatcggagagttcacactggagagaaaccttacaaatgttatgagtgtgacaaggtcttcagtcgaaattcatgccttgcactacatcagaaaactcatattggagagaaaccttacacatgtaaagagtgtggcaaagcctttagtgtgaggtcaacacttaccaaccatcaggtaattcatagtggcaagaaaccttacaaatgcaatgaatgtggcaaggtgttcagtcagacttcaagccttgcaactcatcagagaattcacactggggagaaaccatacaagtgtaatgaatgtggtaaagtcttcagtcagacttcaagccttgcaaggcattggagaattcatactggagagaaaccttacaaatgcaatgaatgtggtaaggttttcagttacaattcacaccttgcgagtcatcggagagttcatactggagagaaaccttacaagtgtaatgagtgtgggaaagcctttagtgtgcattcgaacttaactacccatcaggtcatccatactggagagaagccttacaaatgtaatcaatgtggcaaaggcttcagtgtgcattcaagcctaactacccatcaggtcatccatactggagaaaaaccttacaaatgtaatgagtgtggcaaatcctttagtgtgcgcccaaacctcactagacatcagataatccatactggaaagaaaccttacaaatgtagtgattgtgggaagtcctttagtgtgcgcccaaacctcttcagacatcaaattatccatactaaggagaaaccttataaaagaaattagtaatgaactagtccgtaacttgaaagtatttcgatttcttggctttatatatcttgtggaaaggacgacttatccatatcaatagtccagtc

SEQ ID NO: 2273 - DNA, 1769 bp, Homo sapiens
  source 1..1769: mol_type = genomic DNA
accgccaccatggcttttactcagttgacattcagggacgtggccatcgaattctctcaagatgagtggaaatgcctgaactctacacagaggactttatacagggatgtgatgttggagaactacaggaacctggtctccctggatctgtctcgtaactgtgtaatcaaggaactagcaccacaacaggaaggtaacccaggagaagtattccacacagtgacattggaacaacatgaaaaacatgacattgaagagttttgcttcagggaaatcaagaaaaaaatacacgactttgactgtcagtggagagatgatgaaagaaattgcaacaaagtgactacggccccaaaagaaaatcttacttgtaggagagaccaacgcgatagaagaggtataggaaacaagtctattaaacatcagcttggattaagctttctaccacatccccatgaactgcagcagtttcaagctgaagggaaaatttatgaatgtaaccatgttgagaagtctgtcaaccatggttcctcagtttcaccaccccaaataatttcttctaccatcaaaacccatgtttctaataaatatgggactgatttcatctgttcttcattactcacacaagaacagaaatcatgcattagggaaaaaccttacagatatattgagtgcgacaaagccttgaatcatggctcacacatgactgtacgtcaggtaagtcattctggagagaaaggatataaatgtgatctgtgtggcaaggtctttagtcaaaaatcaaaccttgcgcgtcattggagagttcatactggagagaaaccatacaaatgtaatgaatgtgacagaagtttcagtcgcaactcatgccttgcactacatcggagagttcacactggagagaaaccttacaaatgttatgagtgtgacaaggtcttcagtcgaaattcatgccttgcactacatcagaaaactcatattggagagaaaccttacacatgtaaagagtgtggcaaagcctttagtgtgaggtcaacacttaccaaccatcaggtaattcatagtggcaagaaaccttacaaatgcaatgaatgtggcaaggtgttcagtcagacttcaagccttgcaactcatcagagaattcacactggggagaaaccatacaagtgtaatgaatgtggtaaagtcttcagtcagacttcaagccttgcaaggcattggagaattcatactggagagaaaccttacaaatgcaatgaatgtggtaaggttttcagttacaattcacaccttgcgagtcatcggagagttcatactggagagaaaccttacaagtgtaatgagtgtgggaaagcctttagtgtgcattcgaacttaactacccatcaggtcatccatactggagagaagccttacaaatgtaatcaatgtggcaaaggcttcagtgtgcattcaagcctaactacccatcaggtcatccatactggagaaaaaccttacaaatgtaatgagtgtggcaaatcctttagtgtgcgcccaaacctcactagacatcagataatccatactggaaagaaaccttacaaatgtagtgattgtgggaagtcctttagtgtgcgcccaaacctcttcagacatcaaattatccatactaaggagaaaccttataaaagaaattagtaatgaactagtccgtaacttgaaagtatttcgatttcttggctttatatatcttgtggaaaggacgaaacttgtgctgattacggatgtct

SEQ ID NO: 2274 - DNA, 1769 bp, Homo sapiens
  source 1..1769: mol_type = genomic DNA
accgccaccatggatggagacgggttgacattcagggacgtggccatcgaattctctcaagatgagtggaaatgcctgaactctacacagaggactttatacagggatgtgatgttggagaactacaggaacctggtctccctggatctgtctcgtaactgtgtaatcaaggaactagcaccacaacaggaaggtaacccaggagaagtattccacacagtgacattggaacaacatgaaaaacatgacattgaagagttttgcttcagggaaatcaagaaaaaaatacacgactttgactgtcagtggagagatgatgaaagaaattgcaacaaagtgactacggccccaaaagaaaatcttacttgtaggagagaccaacgcgatagaagaggtataggaaacaagtctattaaacatcagcttggattaagctttctaccacatccccatgaactgcagcagtttcaagctgaagggaaaatttatgaatgtaaccatgttgagaagtctgtcaaccatggttcctcagtttcaccaccccaaataatttcttctaccatcaaaacccatgtttctaataaatatgggactgatttcatctgttcttcattactcacacaagaacagaaatcatgcattagggaaaaaccttacagatatattgagtgcgacaaagccttgaatcatggctcacacatgactgtacgtcaggtaagtcattctggagagaaaggatataaatgtgatctgtgtggcaaggtctttagtcaaaaatcaaaccttgcgcgtcattggagagttcatactggagagaaaccatacaaatgtaatgaatgtgacagaagtttcagtcgcaactcatgccttgcactacatcggagagttcacactggagagaaaccttacaaatgttatgagtgtgacaaggtcttcagtcgaaattcatgccttgcactacatcagaaaactcatattggagagaaaccttacacatgtaaagagtgtggcaaagcctttagtgtgaggtcaacacttaccaaccatcaggtaattcatagtggcaagaaaccttacaaatgcaatgaatgtggcaaggtgttcagtcagacttcaagccttgcaactcatcagagaattcacactggggagaaaccatacaagtgtaatgaatgtggtaaagtcttcagtcagacttcaagccttgcaaggcattggagaattcatactggagagaaaccttacaaatgcaatgaatgtggtaaggttttcagttacaattcacaccttgcgagtcatcggagagttcatactggagagaaaccttacaagtgtaatgagtgtgggaaagcctttagtgtgcattcgaacttaactacccatcaggtcatccatactggagagaagccttacaaatgtaatcaatgtggcaaaggcttcagtgtgcattcaagcctaactacccatcaggtcatccatactggagaaaaaccttacaaatgtaatgagtgtggcaaatcctttagtgtgcgcccaaacctcactagacatcagataatccatactggaaagaaaccttacaaatgtagtgattgtgggaagtcctttagtgtgcgcccaaacctcttcagacatcaaattatccatactaaggagaaaccttataaaagaaattagtaatgaactagtccgtaacttgaaagtatttcgatttcttggctttatatatcttgtggaaaggacgaagatcccaggacctcatcgacaat

SEQ ID NO: 2275 - DNA, 1040 bp, Homo sapiens
  source 1..1040: mol_type = genomic DNA
accgccaccatggaggagaaaccctcagggcccatcccagacatgctggccactgcagagcccagctccagtgagaccgacaaggaggtgttgtccccggctgtgccagctgcagccccttcctcctccatgtcggaggagccaggccctgagcaggcagccacaccgccagtgtgggaacgtggaggggctggagggatgcagcagggctcctccccagccccagacagctgccagcctggccccggacccagccctggcctgaccagcatagtctccgggaccagcgaggacctgcggcctcccagacgacgcccacctccagggaagcaaatcccttgctccagccctggctgctgcctcagttttcccagcgtccgtgacctggcacagcatctgcgaacccactgcccgcccacacagtccctggaaggcaagctcttccgctgctcagccctgagctgcaccgagaccttccccagcatgcaggagctggtggctcacagcaaactgcactacaaacccaatcgctacttcaagtgtgagaactgcctcctgcgcttccgcacgcaccgctcgctcttcaagcacctgcatgtttgcgcggagcatgcgcagagcccagccccgccgccacccccggccctggaccgagagccgcccgcgccggagcgccccccggaggttgaccccgcatcagcgccgggcctgccgttcccgctgctggaacccttcacgacccccgcccctgcccccaccggaccgttcctgccctacttgaaccctgcgccctttggcctaagccccccgcgcctgcgccccttcctggccgctgcacccgggccgccggcttccagcgccgccgtctggaaaaagagccaaggtgctggcagcagcccccgaagaccccagggcggctccgacgcgccctcaggtgcgtgcaggtagtaatgaactagtccgtaacttgaaagtatttcgatttcttggctttatatatcttgtggaaaggacgacattcttcagcgcataaagatgcc

SEQ ID NO: 2276 - DNA, 1274 bp, Homo sapiens
  source 1..1274: mol_type = genomic DNA
accgccaccatggaggagaaaccctcagggcccatcccagacatgctggccactgcagagcccagctccagtgagaccgacaaggaggtgttgtccccggctgtgccagctgcagccccttcctcctccatgtcggaggagccaggccctgagcaggcagccacaccgccagtgtgggaacgtggaggggctggagggatgcagcagggctcctccccagccccagacagctgccagcctggccccggacccagccctggcctgaccagcatagtctccgggaccagcgaggacctgcggcctcccagacgacgcccacctccagggaagcaaatcccttgctccagccctggctgctgcctcagttttcccagcgtccgtgacctggcacagcatctgcgaacccactgcccgcccacacagtccctggaaggcaagctcttccgctgctcagccctgagctgcaccgagaccttccccagcatgcaggagctggtggctcacagcaaactgcactacaaacccaatcgctacttcaagtgtgagaactgcctcctgcgcttccgcacgcaccgctcgctcttcaagcacctgcatgtttgcgcggagcatgcgcagagcccagccccgccgccacccccggccctggaccgagagccgcccgcgccggagcgccccccggaggttgaccccgcatcagcgccgggcctgccgttcccgctgctggaacccttcacgacccccgcccctgcccccaccggaccgttcctgccctacttgaaccctgcgccctttggcctaagccccccgcgcctgcgccccttcctggccgctgcacccgggccgccggcttccagcgccgccgtctggaaaaagagccaaggtgctggcagcagcccccgaagaccccagggcggctccgacgcgccctcagggcacgcggccccgagccgcatcgtgtgggagcacacacgcggccgctactcgtgcatgcagtgcgccttctccacggcctcgcggcccgccatgaccctgcacctggaggaccaccgccccggcgcccccgcggcccccgcggccgggccgccgcgccccgacgcccccgcggatccggccccgcttgcacccaaggtgtcgccgctgctgtcagagggggagcttccagtgttctcgcagctctagtaatgaactagtccgtaacttgaaagtatttcgatttcttggctttatatatcttgtggaaaggacgatacatcgagtcttggaggaaacta

SEQ ID NO: 2277 - DNA, 2087 bp, Homo sapiens
  source 1..2087: mol_type = genomic DNA
accgccaccatgccagctaacgaggacgctccccagccaggggaacatggcagtgcctgtgaggtatcagtgtcatttgaggatgtgactgtggacttcagtagagaggagtggcagcaactggactctactcaaagacgcctgtaccaggatgtaatgttggagaactacagccacctgctctcagtggggttcgaagttcctaaaccagaggtcatcttcaagttggagcaaggagaggggccatggacattggaaggggaagccccacatcagagctgttcagatgggaaatttggaattaagccttcccagaggagaatttctgggaaatctacatttcatagtgaaatggagggtgaagacacaagagatgattcattatactctattttagaagaattgtggcaagatgctgaacagataaagagatgtcaggaaaaacacaacaaacttctgagtcgcactactttcctcaataagaaaatattgaatacagagtgggattatgaatataaagactttggaaaatttgttcatccaagcccaaatctcattctttcacagaaaagaccccataaacgtgattcatttgggaagagttttaagcataatttagacttacatattcataataaaagcaatgcagcaaagaacctggataaaactattgggcatggtcaagtttttacccagaactcttcttatagtcaccacgaaaatacacatacaggagtgaagttctgtgaacgtaatcaatgtggaaaagtcctcagcctcaaacactcactcagtcaaaatgtgaaatttcccattggagagaaagcaaacacatgtactgaatttgggaagatcttcacccagaggtcacatttctttgctcctcaaaaaattcatactgtggaaaaacctcatgagcttagcaaatgtgtaaatgtttttacacagaagccactactcagtatatatctgagagttcatagagatgaaaaactctacatatgtactaaatgtgggaaggccttcatccagaattcagaattaattatgcatgagaaaactcatactagagagaaaccctataaatgcaatgaatgtgggaaatcatttttccaggtgtcatctctactcaggcatcagacaactcatactggagaaaaactctttgaatgcagtgaatgtggtaaaggcttctccctgaactcagccctcaatatacatcagaaaattcacactggagagagacatcacaaatgcagtgagtgtgggaaagcctttacccaaaaatcaacactcaggatgcatcagagaattcatacaggagagaggtcctatatctgtactcaatgtgggcaggccttcatccagaaggcacacttgattgcacatcaaagaattcatactggagagaagccttatgaatgcagtgactgtgggaaatctttcccttctaagtcacaactccagatgcataagagaattcatacaggagagaaaccctatatatgcactgaatgtgggaaggctttcaccaacaggtcaaatctcaatactcaccagaagtctcatactggagaaaagtcttatatatgtgctgaatgtgggaaggccttcaccgacaggtcaaatttcaataaacaccagaccattcacactggagagaaaccctatgtttgtgctgattgtgggagggccttcatccagaagtcagagttgattacacatcagagaattcatactacagagaagccttataaatgtcctgactgtgagaaatccttctccaagaaaccacatctcaaagtacatcaacgaattcacacaggggagaaaccatatatatgtgcagaatgtgggaaagccttcactgataggtcaaatttcaataaacatcagacaattcatactggagataaaccgtataaatgcagcgactgtggaaaggggttcacccagaaatcagttctcagtatgcatcgcaatattcatacatagtaatgaactagtccgtaacttgaaagtatttcgatttcttggctttatatatcttgtggaaaggacgaggttctatgtagatgtgaatctac

SEQ ID NO: 2278 - DNA, 1538 bp, Homo sapiens
  source 1..1538: mol_type = genomic DNA
accgccaccatgttatcagatgagttagaatccaaaccagagctcctggtacagtttgttcagaatacgtccatcccattgggacaggggcttgtagaatcagaagctaaagatattacttgcttgtccctccttcccgtgactgaagcctcagaatgcagtcggctaatgttaccagatgatactacaaatcattctaactcctccaaggaggtcccttcctcagctgttttgagaagccttcgggtgaatgtgggtccagacggagaggagacgagagctcagactgtacagaaatccccggagtttttgtccacttcagagtcttctagcttgttgcaagatctacagccaagtgatagcacttcttttattcttcttaacctaacaagagcaggtctgggctcttcagctgagcacttagtgtttgtacaggatgaggcagaagattcagggaatgatttcctctccagtgagagcacagacagtagcattccatggttcctccgggttcaggagttggcccatgacagtttgattgctgctactcgtgcacaactggcaaagaatgcaaaaaccagcagcaatggagaaaatgtccaccttggttctggtgatgggcagtcaaaagattctgggccccttcctcaagtggaaaagaagctcaagtgtacagttgaaggttgtgaccggacatttgtatggccagctcactttaaataccacctcaagactcatcgaaatgaccgctccttcatctgtcctgcagaaggttgtgggaaaagcttctatgtgctgcagaggctgaaggtgcacatgaggacccacaatggagagaagccctttatgtgccatgagtctggctgtggtaagcagtttactacagctggaaacctgaagaaccaccggcgcatccacacaggagagaaacctttcctttgtgaagcccaaggatgtggccgttcctttgctgagtattctagcctccgaaaacatctggtggttcactcaggagagaagcctcatcagtgccaagtctgtgggaagaccttctctcagagtggaagcaggaatgtgcatatgagaaagcatcacctgcagctgggagcagctgggagtcaagagcaggagcaaactgctgagccactaatgggcagtagtttgcttgaagaggcttcagtacccagtaaaaacctggtgtctatgaattcccagcccagccttggtggagagtccttgaacctaccaaataccaattctatcctgggagttgatgatgaggtgcttgctgaaggatccccacgttccctgtcttcagtgcctgatgtgacacatcacctggtgaccatgcagtcagggaggcaatcatatgaagtttctgtcttaactgcagtaaatccacaagagttactaaaccaaggagatttaactgaaagacggacatagtaatgaactagtccgtaacttgaaagtatttcgatttcttggctttatatatcttgtggaaaggacgacatacctgaacatagccatctaat

SEQ ID NO: 2279 - DNA, 1652 bp, Homo sapiens
  source 1..1652: mol_type = genomic DNA
accgccaccatgttatcagatgagttagaatccaaaccagagctcctggtacagtttgttcagaatacgtccatcccattgggacaggggcttgtagaatcagaagctaaagatattacttgcttgtccctccttcccgtgactgaagcctcagaatgcagtcggctaatgttaccagaacctgttccatggagagaagaggatggaaagtcaggctgcagtgacttgaatgatactacaaatcattctaactcctccaaggaggtcccttcctcagctgttttgagaagccttcgggtgaatgtgggtccagacggagaggagacgagagctcagactgtacagaaatccccggagtttttgtccacttcagagtcttctagcttgttgcaagatctacagccaagtgatagcacttcttttattcttcttaacctaacaagagcaggtctgggctcttcagctgagcacttagtgtttgtacaggatgaggcagaagattcagggaatgatttcctctccagtgagagcacagacagtagcattccatggttcctccgggttcaggagttggcccatgacagtttgattgctgctactcgtgcacaactggcaaagaatgcaaaaaccagcagcaatggagaaaatgtccaccttggttctggtgatgggcagtcaaaagattctgggccccttcctcaagtggaaaagaagctcaagtgtacagttgaaggttgtgaccggacatttgtatggccagctcactttaaataccacctcaagactcatcgaaatgaccgctccttcatctgtcctgcagaaggttgtgggaaaagcttctatgtgctgcagaggctgaaggtgcacatgaggacccacaatggagagaagccctttatgtgccatgagtctggctgtggtaagcagtttactacagctggaaacctgaagaaccaccggcgcatccacacaggagagaaacctttcctttgtgaagcccaaggatgtggccgttcctttgctgagtattctagcctccgaaaacatctggtggttcactcaggagagaagcctcatcagtgccaagtctgtgggaagaccttctctcagagtggaagcaggaatgtgcatatgagaaagcatcacctgcagctgggagcagctgggagtcaagagcaggagcaaactgctgagccactaatgggcagtagtttgcttgaagaggcttcagtacccagtaaaaacctggtgtctatgaattcccagcccagccttggtggagagtccttgaacctaccaaataccaattctatcctgggagttgatgatgaggtgcttgctgaaggatccccacgttccctgtcttcagtgcctgatgtgacacatcacctggtgaccatgcagtcagggaggcaatcatatgaagtttctgtcttaactgcagtaaatccacaagagagtctcgctccgttgcccaggctggagtgcagtggtgcgttctcggctcactgcaacctctgcctcccaggttcaagcgattctcctgcctcagcctcctagtaatgaactagtccgtaacttgaaagtatttcgatttcttggctttatatatcttgtggaaaggacgatagaggatccttaaatctctctgg

SEQ ID NO: 2280 - DNA, 1319 bp, Homo sapiens
  source 1..1319: mol_type = genomic DNA
accgccaccatgttatcagatgagttagaatccaaaccagagctcctggtacagtttgttcagaatacgtccatcccattgggacaggggcttgtagaatcagaagctaaagatattacttgcttgtccctccttcccgtgactgaagcctcagaatgcagtcggctaatgttaccaggtctgggctcttcagctgagcacttagtgtttgtacaggatgaggcagaagattcagggaatgatttcctctccagtgagagcacagacagtagcattccatggttcctccgggttcaggagttggcccatgacagtttgattgctgctactcgtgcacaactggcaaagaatgcaaaaaccagcagcaatggagaaaatgtccaccttggttctggtgatgggcagtcaaaagattctgggccccttcctcaagtggaaaagaagctcaagtgtacagttgaaggttgtgaccggacatttgtatggccagctcactttaaataccacctcaagactcatcgaaatgaccgctccttcatctgtcctgcagaaggttgtgggaaaagcttctatgtgctgcagaggctgaaggtgcacatgaggacccacaatggagagaagccctttatgtgccatgagtctggctgtggtaagcagtttactacagctggaaacctgaagaaccaccggcgcatccacacaggagagaaacctttcctttgtgaagcccaaggatgtggccgttcctttgctgagtattctagcctccgaaaacatctggtggttcactcaggagagaagcctcatcagtgccaagtctgtgggaagaccttctctcagagtggaagcaggaatgtgcatatgagaaagcatcacctgcagctgggagcagctgggagtcaagagcaggagcaaactgctgagccactaatgggcagtagtttgcttgaagaggcttcagtacccagtaaaaacctggtgtctatgaattcccagcccagccttggtggagagtccttgaacctaccaaataccaattctatcctgggagttgatgatgaggtgcttgctgaaggatccccacgttccctgtcttcagtgcctgatgtgacacatcacctggtgaccatgcagtcagggaggcaatcatatgaagtttctgtcttaactgcagtaaatccacaagagttactaaaccaaggagatttaactgaaagacggacatagtaatgaactagtccgtaacttgaaagtatttcgatttcttggctttatatatcttgtggaaaggacgagctgcgtgttggacatgcccgttg

SEQ ID NO: 2281 - DNA, 656 bp, Homo sapiens
  source 1..656: mol_type = genomic DNA
accgccaccatgttcctgagcccgggcgaggggccggcaaccgagggtgggggtctggggccgggcgaggaggcccccaagaagaagcaccggaggaaccgcaccaccttcaccacctaccagctgcaccagctggagcgggcgttcgaggcctctcactacccggatgtgtacagccgtgaggagctggcagccaaggtgcacctacctgaggtgcgcgtgcaggtgtggttccagaaccgccgggccaagtggcgccgccaggagcggctggagtcaggctcgggtgccgtggcagctccgagactccccgaggccccagcgctgccgttcgcccgccccccggccatgtcgctgcccctggagccctggttgggccccggaccgccggccgtgccaggcctcccccgcctcctgggcccgggcccggggctgcaagcgtccttcgggcctcatgcctttgctcccaccttcgcagatggcttcgccctggaggaggcgtccctgcggctgctggccaaggaacatgcacaggctctggacagggcctggccgccagcctagtaatgaactagtccgtaacttgaaagtatttcgatttcttggctttatatatcttgtggaaaggacgaagggaactgcaagtacacagcacc

SEQ ID NO: 2282 - DNA, 815 bp, Homo sapiens
  source 1..815: mol_type = genomic DNA
accgccaccatggagcttacccagcctgcagaagacctcatccagacccagcagacccctgcctcagaacttggggaccctgaagaccccggagaggaggctgcagatggctcagacactgtggtcctcagtctctttccctgcacccctgagcctgtgaatcctgaaccggatgccagtgtttcctctccacagggcagctccctgaagcactccaccactctcaccaaccggcagcgagggaacgaggtgtcagctctgccggccaccctagactgtgacaacctcgtcaacaagccagacgagcgcggcttcacccccctcatctgggcctccgcctttggagagattgagaccgttcgcttcctgctggagtggggtgccgacccccacatcctggcaaaagagcgagagagcgccctgtcgctggccagcacaggcggctacacagacattgtggggctgctgctggagcgtgacgtggacatcaacatctatgattggaatggagggacgccactgctgtacgctgtgcgcgggaaccacgtgaaatgcgttgaggccttgctggcccgaggcgctgacctcaccaccgaagccgactctggctacaccccgatggaccttgccgtggccctgggataccggaaagtgcaacaggtgatcgagaaccacatcctcaagctcttccagagcaacctggtgcccgctgaccctgagtagtaatgaactagtccgtaacttgaaagtatttcgatttcttggctttatatatcttgtggaaaggacgatgaaattactcggtaacttgactc

SEQ ID NO: 2283 - DNA, 842 bp, Homo sapiens
  source 1..842: mol_type = genomic DNA
accgccaccatggcgtttctccgaagcatgtggggcgtgctgagtgccctgggaaggtctggagcagagctgtgcaccggctgtggaagtcgactgcgctcccccttcagttttgtgtatttaccgaggtggttttcatctgtcttggcaagttgtccaaagaaacctgtaagttcttaccttcgattttctaaagaacaactacccatatttaaagctcagaacccagatgcaaaaactacagaactaattagaagaattgcccagcgttggagggaacttcctgattcaaagaaaaaaatatatcaagatgcttatagggcggagtggcaggtatataaagaagagataagcagatttaaagaacagctaactccaagtcagattatgtctttggaaaaagaaatcatggacaaacatttaaaaaggaaagctatgacaaaaaaaaaagagttaacactgcttggaaaaccaaaaagacctcgttcagcttataacgtttatgtagctgaaagattccaagaagctaagggtgattcaccgcaggaaaagctgaagactgtaaaggaaaactggaaaaatctgtctgactctgaaaaggaattatatattcagcatgctaaagaggacgaaactcgttatcataatgaaatgaagtcttgggaagaacaaatgattgaagttggacgaaaggatcttctacgtcgcacaataaagaaacaacgaaaatatggtgctgaggagtgttagtaatgaactagtccgtaacttgaaagtatttcgatttcttggctttatatatcttgtggaaaggacgaaattcagaagtgctcagttagcat

SEQ ID NO: 2284 - DNA, 746 bp, Homo sapiens
  source 1..746: mol_type = genomic DNA
accgccaccatggcgtttctccgaagcatgtggggcgtgctgagtgccctgggaaggtctggagcagagctgtgcaccggctgtggaagtcgactgcgctcccccttcagttttgtgtatttaccgaggtggttttcatctgtcttggcaagttgtccaaagaaacctgtaagttcttaccttcgattttctaaagaacaactacccatatttaaagctcagaacccagatgcaaaaactacagaactaattagaagaattgcccagcgttggagggaacttcctgattcaaagaaaaaaatatatcaagatgcttatagggcggagtggcaggtatataaagaagagataagcagatttaaagaacagctaactccaagtcagattatgtctttggaaaaagaaatcatggacaaacatttaaaaaggaaagctatgacaaaaaaaaaagaaaagctgaagactgtaaaggaaaactggaaaaatctgtctgactctgaaaaggaattatatattcagcatgctaaagaggacgaaactcgttatcataatgaaatgaagtcttgggaagaacaaatgattgaagttggacgaaaggatcttctacgtcgcacaataaagaaacaacgaaaatatggtgctgaggagtgttagtaatgaactagtccgtaacttgaaagtatttcgatttcttggctttatatatcttgtggaaaggacgacgttaactgatagcgtgcactgca

SEQ ID NO: 2285 - DNA, 2597 bp, Homo sapiens
  source 1..2597: mol_type = genomic DNA
accgccaccatggccggcgcgctggcaggtctggccgcgggcttgcaggtcccgcgggtcgcgcccagcccagactcggactcggacacagactcggaggacccgagtctccggcgcagcgcgggcggcttgctccgctcgcaggtcatccacagcggtcacttcatggtgtcgtcgccgcacagcgactcgctgccccggcggcgcgaccaggaggggtccgtggggccctccgacttcgggccgcgcagtatcgaccccacactcacacgcctcttcgagtgcttgagcctggcctacagtggcaagctggtgtctcccaagtggaagaatttcaaaggcctcaagctgctctgcagagacaagatccgcctgaacaacgccatctggagggcctggtatatccagtatgtgaagcggaggaagagccccgtgtgtggcttcgtgacccccctgcaggggcctgaggctgatgcgcaccggaagccggaggccgtggtcctggaggggaactactggaagcggcgcatcgaggtggtgatgcgggaataccacaagtggcgcatctactacaagaagcggctccgtaagcccagcagggaagatgacctcctggcccctaagcaggcggaaggcaggtggccgccgccggagcaatggtgcaaacagctcttctccagtgtggtccccgtgctgctgggggacccagaggaggagccgggtgggcggcagctcctggacctcaattgctttttgtccgacatctcagacactctcttcaccatgactcagtccggcccttcgcccctgcagctgccgcctgaggatgcctacgtcggcaatgctgacatgatccagccggacctgacgccactgcagccaagcctggatgacttcatggacatctcagatttctttaccaactcccgcctcccacagccgcccatgccttcaaacttcccagagccccccagcttcagccccgtggttgactccctcttcagcagtgggaccctgggcccagaggtgcccccggcttcctcggccatgacccacctctctggacacagccgtctgcaggctcggaacagctgccctggccccttggactccagcgccttcctgagttctgatttcctccttcctgaagaccccaagccccggctcccaccccctcctgtacccccacctctgctgcattaccctccccctgccaaggtgccaggcctggagccctgccccccacctcccttccctcccatggcaccacccactgctttgctgcaggaagagcctctcttctctcccaggtttcccttccccaccgtccctcctgccccaggagtgtctccgctgcctgctcctgcagccttcccacccaccccacagtctgtccccagcccagcccccacccccttccccatagagcttctacccttggggtattcggagcctgcctttgggccttgcttctccatgcccagaggcaagccccccgccccatcccctaggggacagaaagccagcccccctaccttagcccctgccactgccagtccccccaccactgcggggagcaacaacccctgcctcacacagctgctcacagcagctaagccggagcaagccctggagccaccacttgtatccagcaccctcctccggtccccagggtccccgcaggagacagtccctgaattcccctgcacattccttcccccgaccccggcccctacaccgccccggccacctccaggcccggccacattggccccttccaggcccctgcttgtccccaaagcggagcggctctcacccccagcgcccagcggcagtgaacggcggctgtcaggggacctcagctccatgccaggccctgggactctgagcgtccgtgtctctcccccgcaacccatcctcagccggggccgtccagacagcaacaagaaccggcgtatcacacacatctccgcggagcagaagcggcgcttcaacatcaagctggggtttgacacccttcatgggctcgtgagcacactcagtgcccagcccagcctcaaggagcgtgcgggcttgcaggaggaggcccagcagctgcgggatgagattgaggagctcaatgccgccattaacctgtgccagcagcagctgcccgccacaggggtacccatcacacaccagcgttttgaccagatgcgagacatgtttgatgactacgtccgaacccgtacgctgcacaactggaagttctgggtgttcagcatcctcatccggcctctgtttgagtccttcaacgggatggtgtccacggcaagtgtgcacaccctccgccagacctcactggcctggctggaccagtactgctctctgcccgctctccggccaactgtcctgaactccctacgccagctgggcacatctaccagtatcctgaccgacccgggccgcatccctgagcaagccacacgggcagtcacagagggcacccttggcaaacctttatagtaatgaactagtccgtaacttgaaagtatttcgatttcttggctttatatatcttgtggaaaggacgatgccgtgagaatgacataccaagc

SEQ ID NO: 2286 - DNA, 2654 bp, Homo sapiens
  source 1..2654: mol_type = genomic DNA
accgccaccatggccggcgcgctggcaggtctggccgcgggcttgcaggtcccgcgggtcgcgcccagcccagactcggactcggacacagactcggaggacccgagtctccggcgcagcgcgggcggcttgctccgctcgcaggtcatccacagcggtcacttcatggtgtcgtcgccgcacagcgactcgctgccccggcggcgcgaccaggaggggtccgtggggccctccgacttcgggccgcgcagtatcgaccccacactcacacgcctcttcgagtgcttgagcctggcctacagtggcaagctggtgtctcccaagtggaagaatttcaaaggcctcaagctgctctgcagagacaagatccgcctgaacaacgccatctggagggcctggtatatccagtatgtgaagcggaggaagagccccgtgtgtggcttcgtgacccccctgcaggggcctgaggctgatgcgcaccggaagccggaggccgtggtcctggaggggaactactggaagcggcgcatcgaggtggtgatgcgggaataccacaagtggcgcatctactacaagaagcggctccgtaagcccagcagggaagatgacctcctggcccctaagcaggcggaaggcaggtggccgccgccggagcaatggtgcaaacagctcttctccagtgtggtccccgtgctgctgggggacccagaggaggagccgggtgggcggcagctcctggacctcaattgctttttgtccgacatctcagacactctcttcaccatgactcagtccggcccttcgcccctgcagctgccgcctgaggatgcctacgtcggcaatgctgacatgatccagccggacctgacgccactgcagccaagcctggatgacttcatggacatctcagatttctttaccaactcccgcctcccacagccgcccatgccttcaaacttcccagagccccccagcttcagccccgtggttgactccctcttcagcagtgggaccctgggcccagaggtgcccccggcttcctcggccatgacccacctctctggacacagccgtctgcaggctcggaacagctgccctggccccttggactccagcgccttcctgagttctgatttcctccttcctgaagaccccaagccccggctcccaccccctcctgtacccccacctctgctgcattaccctccccctgccaaggtgccaggcctggagccctgccccccacctcccttccctcccatggcaccacccactgctttgctgcaggaagagcctctcttctctcccaggtttcccttccccaccgtccctcctgccccaggagtgtctccgctgcctgctcctgcagccttcccacccaccccacagtctgtccccagcccagcccccacccccttccccatagagcttctacccttggggtattcggagcctgcctttgggccttgcttctccatgcccagaggcaagccccccgccccatcccctaggggacagaaagccagcccccctaccttagcccctgccactgccagtccccccaccactgcggggagcaacaacccctgcctcacacagctgctcacagcagctaagccggagcaagccctggagccaccacttgtatccagcaccctcctccggtccccagggtccccgcaggagacagtccctgaattcccctgcacattccttcccccgaccccggcccctacaccgccccggccacctccaggcccggccacattggccccttccaggcccctgcttgtccccaaagcggagcggctctcacccccagcgcccagcggcagtgaacggcggctgtcaggggacctcagctccatgccaggccctgggactctgagcgtccgtgtctctcccccgcaacccatcctcagccggggccgtccagacagcaacaagaaccggcgtatcacacacatctccgcggagcagaagcggcgcttcaacatcaagctggggtttgacacccttcatgggctcgtgagcacactcagtgcccagcccagcctcaaggtgagcaaagctaccacgctgcagaagacagctgagtacatccttatgctacagcaggagcgtgcgggcttgcaggaggaggcccagcagctgcgggatgagattgaggagctcaatgccgccattaacctgtgccagcagcagctgcccgccacaggggtacccatcacacaccagcgttttgaccagatgcgagacatgtttgatgactacgtccgaacccgtacgctgcacaactggaagttctgggtgttcagcatcctcatccggcctctgtttgagtccttcaacgggatggtgtccacggcaagtgtgcacaccctccgccagacctcactggcctggctggaccagtactgctctctgcccgctctccggccaactgtcctgaactccctacgccagctgggcacatctaccagtatcctgaccgacccgggccgcatccctgagcaagccacacgggcagtcacagagggcacccttggcaaacctttatagtaatgaactagtccgtaacttgaaagtatttcgatttcttggctttatatatcttgtggaaaggacgactgtatcgccacgggtcaaactgg

SEQ ID NO: 2287 - DNA, 2603 bp, Homo sapiens
  source 1..2603: mol_type = genomic DNA
accgccaccatggccggcgcgctggcaggtctggccgcgggcttgcaggtcccgcgggtcgcgcccagcccagactcggactcggacacagactcggaggacccgagtctccggcgcagcgcgggcggcttgctccgctcgcaggtcatccacagcggtcacttcatggtgtcgtcgccgcacagcgactcgctgccccggcggcgcgaccaggaggggtccgtggggccctccgacttcgggccgcgcagtatcgaccccacactcacacgcctcttcgagtgcttgagcctggcctacagtggcaagctggtgtctcccaagtggaagaatttcaaaggcctcaagctgctctgcagagacaagatccgcctgaacaacgccatctggagggcctggtatatccagtatgtgaagcggaggaagagccccgtgtgtggcttcgtgacccccctgcaggggcctgaggctgatgcgcaccggaagccggaggccgtggtcctggaggggaactactggaagcggcgcatcgaggtggtgatgcgggaataccacaagtggcgcatctactacaagaagcggctccgtaagcccagcagggaagatgacctcctggcccctaagcaggcggaaggcaggtggccgccgccggagcaatggtgcaaacagctcttctccagtgtggtccccgtgctgctgggggacccagaggaggagccgggtgggcggcagctcctggacctcaattgctttttgtccgacatctcagacactctcttcaccatgactcagtccggcccttcgcccctgcagctgccgcctgaggatgcctacgtcggcaatgctgacatgatccagccggacctgacgccactgcagccaagcctggatgacttcatggacatctcagatttctttaccaactcccgcctcccacagccgcccatgccttcaaacttcccagagccccccagcttcagccccgtggttgactccctcttcagcagtgggaccctgggcccagaggtgcccccggcttcctcggccatgacccacctctctggacacagccgtctgcaggctcggaacagctgccctggccccttggactccagcgccttcctgagttctgatttcctccttcctgaagaccccaagccccggctcccaccccctcctgtacccccacctctgctgcattaccctccccctgccaaggtgccaggcctggagccctgccccccacctcccttccctcccatggcaccacccactgctttgctgcaggaagagcctctcttctctcccaggtttcccttccccaccgtccctcctgccccaggagtgtctccgctgcctgctcctgcagccttcccacccaccccacagtctgtccccagcccagcccccacccccttccccatagagcttctacccttggggtattcggagcctgcctttgggccttgcttctccatgcccagaggcaagccccccgccccatcccctaggggacagaaagccagcccccctaccttagcccctgccactgccagtccccccaccactgcggggagcaacaacccctgcctcacacagctgctcacagcagctaagccggagcaagccctggagccaccacttgtatccagcaccctcctccggtccccagggtccccgcaggagacagtccctgaattcccctgcacattccttcccccgaccccggcccctacaccgccccggccacctccaggcccggccacattggccccttccaggcccctgcttgtccccaaagcggagcggctctcacccccagcgcccagcggcagtgaacggcggctgtcaggggacctcagctccatgccaggccctgggactctgagcgtccgtgtctctcccccgcaacccatcctcagccggggccgtccagacagcaacaagaccgagaaccggcgtatcacacacatctccgcggagcagaagcggcgcttcaacatcaagctggggtttgacacccttcatgggctcgtgagcacactcagtgcccagcccagcctcaaggagcgtgcgggcttgcaggaggaggcccagcagctgcgggatgagattgaggagctcaatgccgccattaacctgtgccagcagcagctgcccgccacaggggtacccatcacacaccagcgttttgaccagatgcgagacatgtttgatgactacgtccgaacccgtacgctgcacaactggaagttctgggtgttcagcatcctcatccggcctctgtttgagtccttcaacgggatggtgtccacggcaagtgtgcacaccctccgccagacctcactggcctggctggaccagtactgctctctgcccgctctccggccaactgtcctgaactccctacgccagctgggcacatctaccagtatcctgaccgacccgggccgcatccctgagcaagccacacgggcagtcacagagggcacccttggcaaacctttatagtaatgaactagtccgtaacttgaaagtatttcgatttcttggctttatatatcttgtggaaaggacgaaaactaatatcggcacgctctggt

SEQ ID NO: 2288 - DNA, 2660 bp, Homo sapiens
  source 1..2660: mol_type = genomic DNA
accgccaccatggccggcgcgctggcaggtctggccgcgggcttgcaggtcccgcgggtcgcgcccagcccagactcggactcggacacagactcggaggacccgagtctccggcgcagcgcgggcggcttgctccgctcgcaggtcatccacagcggtcacttcatggtgtcgtcgccgcacagcgactcgctgccccggcggcgcgaccaggaggggtccgtggggccctccgacttcgggccgcgcagtatcgaccccacactcacacgcctcttcgagtgcttgagcctggcctacagtggcaagctggtgtctcccaagtggaagaatttcaaaggcctcaagctgctctgcagagacaagatccgcctgaacaacgccatctggagggcctggtatatccagtatgtgaagcggaggaagagccccgtgtgtggcttcgtgacccccctgcaggggcctgaggctgatgcgcaccggaagccggaggccgtggtcctggaggggaactactggaagcggcgcatcgaggtggtgatgcgggaataccacaagtggcgcatctactacaagaagcggctccgtaagcccagcagggaagatgacctcctggcccctaagcaggcggaaggcaggtggccgccgccggagcaatggtgcaaacagctcttctccagtgtggtccccgtgctgctgggggacccagaggaggagccgggtgggcggcagctcctggacctcaattgctttttgtccgacatctcagacactctcttcaccatgactcagtccggcccttcgcccctgcagctgccgcctgaggatgcctacgtcggcaatgctgacatgatccagccggacctgacgccactgcagccaagcctggatgacttcatggacatctcagatttctttaccaactcccgcctcccacagccgcccatgccttcaaacttcccagagccccccagcttcagccccgtggttgactccctcttcagcagtgggaccctgggcccagaggtgcccccggcttcctcggccatgacccacctctctggacacagccgtctgcaggctcggaacagctgccctggccccttggactccagcgccttcctgagttctgatttcctccttcctgaagaccccaagccccggctcccaccccctcctgtacccccacctctgctgcattaccctccccctgccaaggtgccaggcctggagccctgccccccacctcccttccctcccatggcaccacccactgctttgctgcaggaagagcctctcttctctcccaggtttcccttccccaccgtccctcctgccccaggagtgtctccgctgcctgctcctgcagccttcccacccaccccacagtctgtccccagcccagcccccacccccttccccatagagcttctacccttggggtattcggagcctgcctttgggccttgcttctccatgcccagaggcaagccccccgccccatcccctaggggacagaaagccagcccccctaccttagcccctgccactgccagtccccccaccactgcggggagcaacaacccctgcctcacacagctgctcacagcagctaagccggagcaagccctggagccaccacttgtatccagcaccctcctccggtccccagggtccccgcaggagacagtccctgaattcccctgcacattccttcccccgaccccggcccctacaccgccccggccacctccaggcccggccacattggccccttccaggcccctgcttgtccccaaagcggagcggctctcacccccagcgcccagcggcagtgaacggcggctgtcaggggacctcagctccatgccaggccctgggactctgagcgtccgtgtctctcccccgcaacccatcctcagccggggccgtccagacagcaacaagaccgagaaccggcgtatcacacacatctccgcggagcagaagcggcgcttcaacatcaagctggggtttgacacccttcatgggctcgtgagcacactcagtgcccagcccagcctcaaggtgagcaaagctaccacgctgcagaagacagctgagtacatccttatgctacagcaggagcgtgcgggcttgcaggaggaggcccagcagctgcgggatgagattgaggagctcaatgccgccattaacctgtgccagcagcagctgcccgccacaggggtacccatcacacaccagcgttttgaccagatgcgagacatgtttgatgactacgtccgaacccgtacgctgcacaactggaagttctgggtgttcagcatcctcatccggcctctgtttgagtccttcaacgggatggtgtccacggcaagtgtgcacaccctccgccagacctcactggcctggctggaccagtactgctctctgcccgctctccggccaactgtcctgaactccctacgccagctgggcacatctaccagtatcctgaccgacccgggccgcatccctgagcaagccacacgggcagtcacagagggcacccttggcaaacctttatagtaatgaactagtccgtaacttgaaagtatttcgatttcttggctttatatatcttgtggaaaggacgagaagcctttatacgccaaagggag

SEQ ID NO: 2289 - DNA, 1490 bp, Homo sapiens
  source 1..1490: mol_type = genomic DNA
accgccaccatggacaccaaacatttcctgccgctcgatttctccacccaggtgaactcctccctcacctccccgacggggcgaggctccatggctgccccctcgctgcacccgtccctggggcctggcatcggctccccgggacagctgcattctcccatcagcaccctgagctcccccatcaacggcatgggcccgcctttctcggtcatcagctcccccatgggcccccactccatgtcggtgcccaccacacccaccctgggcttcagcactggcagcccccagctcagctcacctatgaaccccgtcagcagcagcgaggacatcaagccccccctgggcctcaatggcgtcctcaaggtccccgcccacccctcaggaaacatggcttccttcaccaagcacatctgcgccatctgcggggaccgctcctcaggcaagcactatggagtgtacagctgcgaggggtgcaagggcttcttcaagcggacggtgcgcaaggacctgacctacacctgccgcgacaacaaggactgcctgattgacaagcggcagcggaaccggtgccagtactgccgctaccagaagtgcctggccatgggcatgaagcgggaagccgtgcaggaggagcggcagcgtggcaaggaccggaacgagaatgaggtggagtcgaccagcagcgccaacgaggacatgccggtggagaggatcctggaggctgagctggccgtggagcccaagaccgagacctacgtggaggcaaacatggggctgaaccccagctcgccgaacgaccctgtcaccaacatttgccaagcagccgacaaacagcttttcaccctggtggagtgggccaagcggatcccacacttctcagagctgcccctggacgaccaggtcatcctgctgcgggcaggctggaatgagctgctcatcgcctccttctcccaccgctccatcgccgtgaaggacgggatcctcctggccaccgggctgcacgtccaccggaacagcgcccacagcgcaggggtgggcgccatctttgacagggtgctgacggagcttgtgtccaagatgcgggacatgcagatggacaagacggagctgggctgcctgcgcgccatcgtcctctttaaccctgactccaaggggctctcgaacccggccgaggtggaggcgctgagggagaaggtctatgcgtccttggaggcctactgcaagcacaagtacccagagcagccgggaaggttcgctaagctcttgctccgcctgccggctctgcgctccatcgggctcaaatgcctggaacatctcttcttcttcaagctcatcggggacacacccattgacaccttccttatggagatgctggaggcgccgcaccaaatgacttagtaatgaactagtccgtaacttgaaagtatttcgatttcttggctttatatatcttgtggaaaggacgagcaactatttacctggtggagtaa

SEQ ID NO: 2290 - DNA, 1361 bp, Homo sapiens
  source 1..1361: mol_type = genomic DNA
accgccaccatgatgtccatgaacagcaagcagcctcactttgccatgcatcccaccctccctgagcacaagtacccgtcgctgcactccagctccgaggccatccggcgggcctgcctgcccacgccgccgctgcagagcaacctcttcgccagcctggacgagacgctgctggcgcgggccgaggcgctggcggccgtggacatcgccgtgtcccagggcaagagccatcctttcaagccggacgccacgtaccacacgatgaacagcgtgccgtgcacgtccacttccacggtgcctctggcgcaccaccaccaccaccaccaccaccaccaggcgctcgaacccggcgatctgctggaccacatctcctcgccgtcgctcgcgctcatggccggcgcgggcggcgcgggcgcggcggccggcggcggcggcgcccacgacggcccggggggcggtggcggcccgggcggcggcggcggcccgggcggcggccccgggggaggcggcggtggcggcccggggggcggcggcggcggcccgggcggcgggctcctgggcggctccgcgcaccctcacccgcatatgcacagcctgggccacctgtcgcaccccgcggcggcggccgccatgaacatgccgtccgggctgccgcaccccgggctggtggcggcggcggcgcaccacggcgcggcagcggcagcggcggcggcggcggccgggcaggtggcagcggcatcggcggcggcggccgtggtgggcgcagcgggcctggcgtccatctgcgactcggacacggacccgcgcgagctcgaggcgttcgcggagcgcttcaagcagcggcgcatcaagctgggcgtgacgcaggccgacgtgggctcggcgctggccaacctcaagatcccgggcgtgggctcactcagccagagcaccatctgcaggttcgagtcgctcacgctctcgcacaacaacatgatcgcgctcaagcccatcctgcaggcgtggctcgaggaggccgagggcgcccagcgcgagaaaatgaacaagcctgagctcttcaacggcggcgagaagaagcgcaagcggacttccatcgccgcgcccgagaagcgctccctcgaggcctacttcgccgtgcagccccggccctcgtccgagaagatcgccgccatcgccgagaaactggacctcaaaaagaacgtggtgcgggtgtggttttgcaaccagagacagaagcagaagcggatgaaattctctgccacttactagtaatgaactagtccgtaacttgaaagtatttcgatttcttggctttatatatcttgtggaaaggacgaaaatttcagcaccaaagggtcgga

SEQ ID NO: 2291 - DNA, 1331 bp, Homo sapiens
  source 1..1331: mol_type = genomic DNA
accgccaccatgatgatgatgtccctgaacagcaagcaggcgtttagcatgccgcacggcggcagcctgcacgtggagcccaagtactcggcactgcacagcacctcgccgggctcctcggctcccatcgcgccctcggccagctcccccagcagctcgagcaacgctggtggtggcggcggcggcggcggcggcggcggcggcggcggaggccgaagcagcagctccagcagcagtggcagcagcggcggcgggggctcggaggctatgcggagagcctgtcttccaaccccaccgagcaatatattcggcgggctggatgagagtctgctggcccgcgccgaggctctggcagccgtggacatcgtctcccagagcaagagccaccaccaccatccaccccaccacagccccttcaaaccggacgccacctaccacactatgaataccatcccgtgcacgtcggccgcctcttcttcatcggtgcccatctcgcacccttccgcgttggcgggcacgcaccaccaccaccaccatcaccaccaccaccaccaccaaccgcaccaggcgctggagggcgagctgctggagcacctgagtcccgggctggccctgggcgctatggcgggccccgacggcgctgtggtgtccacgccggctcacgcgccgcacatggccaccatgaaccccatgcaccaagcagcgctcagcatggcccacgcgcacgggctgccgtcgcacatgggctgcatgagcgacgtggacgccgacccgcgggacctggaggcattcgccgagcgcttcaagcagcgacgcatcaagctgggggtgacccaggcagatgtgggctccgcgctggccaacctcaagatccccggcgtgggctcgcttagccagagcaccatctgcaggttcgagtccctcacactgtcccacaataatatgatcgcgctcaaacccatcctgcaggcatggctcgaggaggccgagaagtcccaccgcgagaagctcaccaagcctgaactcttcaatggcgcggagaagaagcgcaagcgcacgtccatcgctgcgccagagaagcgctcgctcgaagcctactttgccattcagcctcggccctcctctgaaaagatcgccgccatcgcggagaagctggacctgaagaaaaacgtggtgcgcgtctggttctgcaaccagaggcagaaacagaaaagaatgaaatattccgccggcatttagtaatgaactagtccgtaacttgaaagtatttcgatttcttggctttatatatcttgtggaaaggacgaatacagtccttgagcaatatgcgc

SEQ ID NO: 2292 - DNA, 1118 bp, Homo sapiens
  source 1..1118: mol_type = genomic DNA
accgccaccatgatggccatgaactccaagcagcctttcggcatgcacccggtgctgcaagaacccaaattctccagtctgcactctggctccgaggccatgcgccgagtctgtctcccagccccgcagctgcagggtaatatatttggaagctttgatgagagcctgctggcacgcgccgaagctctggcggcggtggatatcgtctcccacggcaagaaccatccgttcaagcccgacgccacctaccataccatgagcagcgtgccctgcacgtccacttcgtccaccgtgcccatctcccacccagctgcgctcacctcacaccctcaccacgccgtgcaccagggcctcgaaggcgacctgctggagcacatctcgcccacgctgagtgtgagcggcctgggcgctccggaacactcggtgatgcccgcacagatccatccacaccacctgggcgccatgggccacctgcaccaggccatgggcatgagtcacccgcacaccgtggcccctcatagcgccatgcctgcatgcctcagcgacgtggagtcagacccgcgcgagctggaagccttcgccgagcgcttcaagcagcggcgcatcaagctgggggtgacccaggcggacgtgggcgcggctctggctaatctcaagatccccggcgtgggctcgctgagccaaagcaccatctgcaggttcgagtctctcactctctcgcacaacaacatgatcgctctcaagccggtgctccaggcctggttggaggaggccgaggccgcctaccgagagaagaacagcaagccagagctcttcaacggcagcgaacggaagcgcaaacgcacgtccatcgcggcgccggagaagcgttcactcgaggcctatttcgctatccagccacgtccttcatctgagaagatcgcggccatcgctgagaaactggaccttaaaaagaacgtggtgagagtctggttctgcaaccagagacagaaacagaaacgaatgaagtattcggctgtccactagtaatgaactagtccgtaacttgaaagtatttcgatttcttggctttatatatcttgtggaaaggacgataaagcagtaccacaatagttacc

SEQ ID NO: 2293 - DNA, 1934 bp, Homo sapiens
  source 1..1934: mol_type = genomic DNA
accgccaccatgcagtattcgcaccactgtgagcaccttttagagagactgaacaaacagcgggaagcaggttttctctgtgactgtaccatagtgattggggaattccagtttaaagctcataggaatgtgctggcctcctttagtgagtattttggtgcgatctacagaagcacttctgagaacaatgtctttcttgatcagagtcaggtgaaggctgatggatttcagaaactgttggagtttatatacacaggaactttaaatcttgacagttggaatgttaaagaaattcatcaggctgctgactatctcaaagtggaagaggtggtcactaaatgcaaaataaagatggaagattttgcttttattgctaatccttcttctacagagatatctagtattactggaaacattgaattgaatcaacagacttgtcttcttactctgcgagattataataatcgagagaaatcagaagtatctacagatttgattcaggcaaatcctaaacaaggcgcgttagcgaaaaagtcatctcaaacgaaaaagaagaagaaggctttcaactccccgaaaacagggcagaataaaacagtgcaatatcccagtgacatcttagagaatgcatctgttgaattattcctagatgcaaataaactgcccacacctgtagtagaacaagttgcacaaataaatgataattcagaactcgagttgacatcagttgtggaaaatacttttccagcacaagatattgtgcacactgttacagtgaaacggaaacgtggaaaatcacagccaaactgtgctctgaaagaacactctatgtctaatatagccagcgtcaagagtccttatgaggcggagaactccggggaagagctggatcagaggtattccaaggccaagccaatgtgtaacacatgtgggaaagtgttttcagaagccagcagtttgagaaggcacatgagaatacataaaggagtcaaaccttacgtctgccacttatgtggaaaggcatttacccaatgtaaccagctgaaaacgcatgtaagaactcatacaggtgagaagccatacaaatgtgaattgtgtgataaaggatttgctcagaaatgtcagctagtcttccatagtcgcatgcatcatggtgaagaaaaaccctataaatgtgatgtatgcaacttacagtttgcaacttctagcaatctcaagattcatgcaaggaagcatagtggagagaagccatatgtctgtgataggtgtggacagagatttgctcaagccagcacactgacctatcatgtccgtaggcatactggagaaaagccttatgtatgtgatacctgtgggaaggcatttgctgtctctagttctcttatcactcattctcgaaaacatacaggtgaaaaaccatacatatgtggtatttgtgggaaaagttttatttcctcaggagagctcaacaaacactttcggtcccatacaggagaaagaccatttatctgcgaattatgtggaaattcttacacagatattaaaaatttaaagaagcacaaaacaaaagtccattctggtgcagataaaactctagactccagtgcagaggatcatactttgagtgaacaggattccatacaaaaaagtcctttatcagaaactatggatgtgaagccttctgatatgactttaccattagctcttccacttgggactgaggaccatcacatgcttctgcctgtcacggatactcagtctcctacatcagatacattgttgaggtcaactgtgaatgggtattcagaaccacagttgatttttttacaacaattatactagtaatgaactagtccgtaacttgaaagtatttcgatttcttggctttatatatcttgtggaaaggacgatgcgcgccactctttctgtgcctt

SEQ ID NO: 2294 - DNA, 1847 bp, Homo sapiens
  source 1..1847: mol_type = genomic DNA
accgccaccatgcagtattcgcaccactgtgagcaccttttagagagactgaacaaacagcgggaagcaggttttctctgtgactgtaccatagtgattggggaattccagtttaaagctcataggaatgtgctggcctcctttagtgagtattttggtgcgatctacagaagcacttctgagaacaatgtctttcttgatcagagtcaggtgaaggctgatggatttcagaaactgttggagtttatatacacaggaactttaaatcttgacagttggaatgttaaagaaattcatcaggctgctgactatctcaaagtggaagaggtggtcactaaatgcaaaataaagatggaagattttgcttttattgctaatccttcttctacagagatatctagtattactggaaacattgaattgaatcaacagacttgtcttcttactctgcgagattataataatcgagagaaatcagaagtatctacagatttgattcaggcaaatcctaaacaaggcgcgttagcgaaaaagtcatctcaaacgaaaaagaagaagaaggctttcaactccccgaaaacagggcagaataaaacagtgcaatatcccagtgacatcttagagaatgcatctgttgaattattcctagatgcaaataaactgcccacacctgtagtagaacaagttgcacaaataaatgataattcagaactcgagttgacatcagttgtggaaaatacttttccagcacaagatattgtgcacactgttacagtgaaacggaaacgtggaaaatcacagccaaactgtgctctgaaagaacactctatgtctaatatagccagcgtcaagagtccttatgaggcggagaactccggggaagagctggatcagaggtattccaaggccaagccaatgtgtaacacatgtgggaaagtgttttcagaagccagcagtttgagaaggcacatgagaatacataaaggagtcaaaccttacgtctgccacttatgtggaaaggcatttacccaatgtaaccagctgaaaacgcatgtaagaactcatacaggtgagaagccatacaaatgtgaattgtgtgataaaggatttgctcagaaatgtcagctagtcttccatagtcgcatgcatcatggtgaagaaaaaccctataaatgtgatgtatgcaacttacagtttgcaacttctagcaatctcaagattcatgcaaggaagcatagtggagagaagccatatgtctgtgataggtgtggacagagatttgctcaagccagcacactgacctatcatgtccgtaggcatactggagaaaagccttatgtatgtgatacctgtgggaaggcatttgctgtctctagttctcttatcactcattctcgaaaacatacaggtgaaaaaccatacatatgtggtatttgtgggaaaagttttatttcctcaggagagctcaacaaacactttcggtcccatacaggtgcagataaaactctagactccagtgcagaggatcatactttgagtgaacaggattccatacaaaaaagtcctttatcagaaactatggatgtgaagccttctgatatgactttaccattagctcttccacttgggactgaggaccatcacatgcttctgcctgtcacggatactcagtctcctacatcagatacattgttgaggtcaactgtgaatgggtattcagaaccacagttgatttttttacaacaattatactagtaatgaactagtccgtaacttgaaagtatttcgatttcttggctttatatatcttgtggaaaggacgagagagtagagatatatcgaatatt

SEQ ID NO: 2295 - DNA, 1418 bp, Homo sapiens
  source 1..1418: mol_type = genomic DNA
accgccaccatggagtctccaagaactgctaaaggaggaagggatatcaagatgagtggggatgtagccgattccacggatgctcgcagcactctcagccaggtggagccaggaaatgatcgaaatggcctagatttcaacaggcagattaaaaccgaagatctcagtgactccctgcagcagaccctctcccatcggccatgccacctgagtcaaggacctgccatgatgtccggaaaccaaatgtctgggctaaatgccagcccatgtcaggacatggcttccctccatccgctccagcagcttgtgctggttcccggccacttacagtctgtatcccagttcctgctatctcagacccagcctgggcagcaaggtctgcagccaaatctcctcccctttccacagcaacaaagcggtctcctcctcccacagactgggccgggactggcatcccaggcatttgggcaccctgggctgccaggatcctctttagaaccccacctggaagcatcccagcatctcccagtgcccaagcatctacccagctctggaggggccgatgagcccagtgacctcgaggagctggagaagtttgccaagaccttcaagcagaggcgcattaagctgggcttcacacagggagatgtggggctggcgatgggaaagctgtatggcaacgacttcagccagaccaccatctcacgatttgaggccctcaacctgagcttcaagaacatgtgcaagctcaagcccctgctggagaagtggctgaatgatgcagagtcctctccgtcagacccctcagtgagcacgcccagctcctaccccagcctcagtgaagtatttggtaggaagagaaagaaacggaccagcatcgagaccaacatccgcctgactctggagaagaggtttcaagataacccaaaacccagctcggaggagatctccatgattgcagagcagttgtccatggagaaggaggtggtgagggtctggttctgcaaccgacgccaaaaggagaagcgaatcaactgccctgtggccacacccatcaaaccacctgtctacaactcccggctggtatctccctcagggtctctgggccccctctctgtccctcctgtccacagtaccatgcctggaacagtaacgtcatcctgttcccctgggaacaacagcaggccttcatctcctggctcaggactccacgccagcagccccactgcatctcaaaataactccaaagcagcagtgaactccgcctccagttttaactcttcaggatcttggtaccgatggaatcattccacctacctccactagtaatgaactagtccgtaacttgaaagtatttcgatttcttggctttatatatcttgtggaaaggacgagggccgcaagagttatcggacaca

SEQ ID NO: 2296 - DNA, 1412 bp, Homo sapiens
  source 1..1412: mol_type = genomic DNA
accgccaccatggtgaatctggagtccatgcacacagatatcaagatgagtggggatgtagccgattccacggatgctcgcagcactctcagccaggtggagccaggaaatgatcgaaatggcctagatttcaacaggcagattaaaaccgaagatctcagtgactccctgcagcagaccctctcccatcggccatgccacctgagtcaaggacctgccatgatgtccggaaaccaaatgtctgggctaaatgccagcccatgtcaggacatggcttccctccatccgctccagcagcttgtgctggttcccggccacttacagtctgtatcccagttcctgctatctcagacccagcctgggcagcaaggtctgcagccaaatctcctcccctttccacagcaacaaagcggtctcctcctcccacagactgggccgggactggcatcccaggcatttgggcaccctgggctgccaggatcctctttagaaccccacctggaagcatcccagcatctcccagtgcccaagcatctacccagctctggaggggccgatgagcccagtgacctcgaggagctggagaagtttgccaagaccttcaagcagaggcgcattaagctgggcttcacacagggagatgtggggctggcgatgggaaagctgtatggcaacgacttcagccagaccaccatctcacgatttgaggccctcaacctgagcttcaagaacatgtgcaagctcaagcccctgctggagaagtggctgaatgatgcagagtcctctccgtcagacccctcagtgagcacgcccagctcctaccccagcctcagtgaagtatttggtaggaagagaaagaaacggaccagcatcgagaccaacatccgcctgactctggagaagaggtttcaagataacccaaaacccagctcggaggagatctccatgattgcagagcagttgtccatggagaaggaggtggtgagggtctggttctgcaaccgacgccaaaaggagaagcgaatcaactgccctgtggccacacccatcaaaccacctgtctacaactcccggctggtatctccctcagggtctctgggccccctctctgtccctcctgtccacagtaccatgcctggaacagtaacgtcatcctgttcccctgggaacaacagcaggccttcatctcctggctcaggactccacgccagcagccccactgcatctcaaaataactccaaagcagcagtgaactccgcctccagttttaactcttcaggatcttggtaccgatggaatcattccacctacctccactagtaatgaactagtccgtaacttgaaagtatttcgatttcttggctttatatatcttgtggaaaggacgaaggtaatcggtttcatcagcaaag

SEQ ID NO: 2297 - DNA, 1664 bp, Homo sapiens
  source 1..1664: mol_type = genomic DNA
accgccaccatggaggtgctggagagcggggagcagggcgtgctgcagtgggaccgcaagctgagcgagctgtcagagcccggggacggcgaggccctcatgtaccacacgcacttctcagaacttctggatgagttttcccagaacgtcttgggtcagctcctgaatgatcctttcctctcagagaagagtgtgtcaatggaggtggaaccttccccgacgtccccggcgcctctcatccaggctgagcacagctactccctgtgcgaggagcctcgggcccagtcgcccttcacccacattaccaccagtgacagcttcaatgacgatgaggtggaaagtgagaaatggtacctgtctacagacttcccttcaacatccatcaagacagagccagttacagacgaaccacccccaggactcgttccgtctgtcactctgaccatcacagccatctccaccccgttggaaaaggaggaacctcctctggaaatgaacactggggttgattcctcgtgccagaccattattcctaaaattaagctggagcctcatgaagtggatcagtttctaaacttctctcctaaagaagccccagtggaccacctgcatttgccgcccacccctccgagcagtcacggcagtgactcagagggcagcctgagtcccaacccacgcctgcaccccttcagcctgcctcagacccacagcccctccagagctgcaccccgggccccctccgccctctccagctcccctctcctcacggctcctcataaactgcagggatcaggccctctggtcctgacagaggaggagaagaggaccctgatcgctgagggctatcccatccccaccaaattgcccctgtcaaaatcagaggagaaggccctgaagaaaattcggaggaagatcaagaataagatttctgctcaggaaagtaggagaaagaagaaagaatacatggacagcctggagaaaaaagtggagtcttgttcaactgagaacttggagcttcggaagaaggtagaggttctagagaacactaataggactctccttcagcaactccagaagcttcagactttggtgatgggcaaggtttctcgaacctgcaagttagctggcacgcagactggcacctgcctcatggttgtggtgctgtgctttgccgttgcattcggcagcttctttcaaggctacgggccctatccttctgccaccaagatggctctgcccagccagcattccctgcaggagccctacacagcctccgtggtgagatccagaaacctgctgatctacgaggaacattctcccccagaggagtcatccagcccgggctcggctggggagctggggggctgggatagaggttcctccctgctcagggtgtcagggctggagtccaggccggatgtggatcttccccatttcattatctcgaatgagaccagcctggagaagtcagtgcttttggagctgcagcagcacctggtcagcgccaaactggaggggaatgaaacactaaaagttgtagaactcgacagaagagtgaacaccactttctagtaatgaactagtccgtaacttgaaagtatttcgatttcttggctttatatatcttgtggaaaggacgacagctcgtgggttcttacgtggaa

SEQ ID NO: 2298 - DNA, 848 bp, Homo sapiens
  source 1..848: mol_type = genomic DNA
accgccaccatggaggtgctggagagcggggagcagggcgtgctgcagtgggaccgcaagctgagcgagctgtcagagcccggggacggcgaggccctcatgtaccacacgcacttctcagaacttctggatgagttttcccagaacgtcttgggtcagctcctgaatgatcctttcctctcagagaagagtgtgtcaatggaggtggaaccttccccgacgtccccggcgcctctcatccaggctgagcacagctactccctgtgcgaggagcctcgggcccagtcgcccttcacccacattaccaccagtgacagcttcaatgacgatgaggtggaaagtgagaaatggtacctgtctacagacttcccttcaacatccatcaagacagagccagttacagacgaaccacccccaggactcgttccgtctgtcactctgaccatcacagccatctccaccccgttggaaaaggaggaacctcctctggaaatgaacactggggttgattcctcgtgccagaccattattcctaaaattaagctggagcctcatgaagtggatcagtttctaaacttctctcctaaagaaggtctgtctgccctccctgtgtccctttgggttatggatatggtctctgggtctacagagagggaatatggcgagagagctgggatgagtttgtaccacagatgttgtagctggctttatgaaatagctctgttcttaaaaaataaaaattttgcttccaaatagtaatgaactagtccgtaacttgaaagtatttcgatttcttggctttatatatcttgtggaaaggacgacggagtgccaatcgggttagagtt

SEQ ID NO: 2299 - DNA, 1487 bp, Homo sapiens
  source 1..1487: mol_type = genomic DNA
accgccaccatgaatacggatttagctgctggaaagatggcttctgctgcctgctccatggaccccatcgacagctttgagctcctggatctcctgtttgaccggcaggacggcatcctgagacacgtggagctgggcgagggctggggtcacgtcaaggaccagcaggtcctgccaaaccccgactctgacgacttcctcagctccatcctgggctctggagactcactgcccagctccccactctggtcccccgaaggcagtgatagtggcatctccgaagacctcccctccgacccccaggacacccctccacgcagcggaccagccacctcccccgccggctgccatcctgcccagcctggcaaggggccctgcctctcctatcatcctggcaactcttgctccaccacaaccccagggccagtgatccaagtacctgaagcctctgtgaccatagacctggaaatgtggagcccaggaggaaggatctgtgctgagaagccggctgatccggtggacctgtccccacgatgcaatctcaccgtgaaagacctcctcctttcgggcagcagtggggacctgcaacagcatcacctgggggcctcctacctcctgcgacctggggctgggcactgtcaggagctggtgctcaccgaggatgagaagaagctgctggctaaagaaggcatcaccctgcccactcagctgcccctcactaagtacgaggagcgagtgctgaaaaaaatccgccggaaaatccggaacaagcagtcggcgcaagaaagcaggaagaagaagaaggaatatatcgatggcctggagactcggatgtcagcttgcactgctcagaatcaggagttacagaggaaagtcttgcatctcgagaagcaaaacctgtccctcttggagcaactgaagaaactccaggccattgtggtgcagtccaccagcaagtcagcccagacaggcacctgtgtcgcagtcctgttgctgtcctttgccctcatcatcctcccctccatcagcccttttggccccaacaaaaccgagagccctggggactttgcgcctgtacgagtgttctccagaactttgcacaacgatgctgcctcccgcgtggctgctgatgctgtgccaggctccgaggccccaggaccccgacccgaggctgacacaacccgagaagagtctccaggaagccccggggcagactggggcttccaggacaccgcgaacctgaccaattcgacggaggagctggacaacgccaccctggtcctgaggaatgcaacagaggggctgggccaggtcgccctgctggactgggtggcgcctgggccgagcactggctcaggacgtgcagggctggaggcggcgggagacgagctgtagtaatgaactagtccgtaacttgaaagtatttcgatttcttggctttatatatcttgtggaaaggacgatacccatcggcatacagagcttat

SEQ ID NO: 2300 - DNA, 1115 bp, Homo sapiens
  source 1..1115: mol_type = genomic DNA
accgccaccatgaatacggatttagctgctggaaagatggcttctgctgcctgctccatggaccccatcgacagctttgagctcctggatctcctgtttgaccggcaggacggcatcctgagacacgtggagctgggcgagggctggggtcacgtcaaggaccagcaggtcctgccaaaccccgactctgacgacttcctcagctccatcctgggctctggagactcactgcccagctccccactctggtcccccgaaggcagtgatagtggcatctccgaagacctcccctccgacccccaggacacccctccacgcagcggaccagccacctcccccgccggctgccatcctgcccagcctggcaaggggccctgcctctcctatcatcctggcaactcttgctccaccacaaccccagggccagtgatccaagtacctgaagcctctgtgaccatagacctggaaatgtggagcccaggaggaaggatctgtgctgagaagccggctgatccggtggacctgtccccacgatgcaatctcaccgtgaaagacctcctcctttcgggcagcagtggggacctgcaacagcatcacctgggggcctcctacctcctgcgacctggggctgggcactgtcaggagctggtgctcaccgaggatgagaagaagctgctggctaaagaaggcatcaccctgcccactcagctgcccctcactaaggatgtcagcttgcactgctcagaatcaggagttacagaggaaagtcttgcatctcgagaagcaaaacctgtccctcttggagcaactgaagaaactccaggccattgtggtgcagtccaccagcaagtcagcccagacaggcacctgtgtcgcagtcctgttgctgtcctttgccctcatcatcctcccctccatcagcccttttggccccaacaaaaccgagagccctggggactttgcgcctgtacgagtgttctccagaactttgcacaacgatgctgcctcccgcgtggctgctagtaatgaactagtccgtaacttgaaagtatttcgatttcttggctttatatatcttgtggaaaggacgagccttaccgatttccttacacgct

SEQ ID NO: 2301 - DNA, 1484 bp, Homo sapiens
  source 1..1484: mol_type = genomic DNA
accgccaccatgaatacggatttagctgctggaaagatggcttctgctgcctgctccatggaccccatcgacagctttgagctcctggatctcctgtttgaccggcaggacggcatcctgagacacgtggagctgggcgagggctggggtcacgtcaaggaccaggtcctgccaaaccccgactctgacgacttcctcagctccatcctgggctctggagactcactgcccagctccccactctggtcccccgaaggcagtgatagtggcatctccgaagacctcccctccgacccccaggacacccctccacgcagcggaccagccacctcccccgccggctgccatcctgcccagcctggcaaggggccctgcctctcctatcatcctggcaactcttgctccaccacaaccccagggccagtgatccaagtacctgaagcctctgtgaccatagacctggaaatgtggagcccaggaggaaggatctgtgctgagaagccggctgatccggtggacctgtccccacgatgcaatctcaccgtgaaagacctcctcctttcgggcagcagtggggacctgcaacagcatcacctgggggcctcctacctcctgcgacctggggctgggcactgtcaggagctggtgctcaccgaggatgagaagaagctgctggctaaagaaggcatcaccctgcccactcagctgcccctcactaagtacgaggagcgagtgctgaaaaaaatccgccggaaaatccggaacaagcagtcggcgcaagaaagcaggaagaagaagaaggaatatatcgatggcctggagactcggatgtcagcttgcactgctcagaatcaggagttacagaggaaagtcttgcatctcgagaagcaaaacctgtccctcttggagcaactgaagaaactccaggccattgtggtgcagtccaccagcaagtcagcccagacaggcacctgtgtcgcagtcctgttgctgtcctttgccctcatcatcctcccctccatcagcccttttggccccaacaaaaccgagagccctggggactttgcgcctgtacgagtgttctccagaactttgcacaacgatgctgcctcccgcgtggctgctgatgctgtgccaggctccgaggccccaggaccccgacccgaggctgacacaacccgagaagagtctccaggaagccccggggcagactggggcttccaggacaccgcgaacctgaccaattcgacggaggagctggacaacgccaccctggtcctgaggaatgcaacagaggggctgggccaggtcgccctgctggactgggtggcgcctgggccgagcactggctcaggacgtgcagggctggaggcggcgggagacgagctgtagtaatgaactagtccgtaacttgaaagtatttcgatttcttggctttatatatcttgtggaaaggacgaaataatgtttagcaccatgttgct

SEQ ID NO: 2302 - DNA, 1481 bp, Homo sapiens
  source 1..1481: mol_type = genomic DNA
accgccaccatgaatacggatttagctgctggaaagatggcttctgctgcctgctccatggaccccatcgacagctttgagctcctggatctcctgtttgaccggcaggacggcatcctgagacacgtggagctgggcgagggctggggtcacgtcaaggaccagcaggtcctgccaaaccccgactctgacgacttcctcagctccatcctgggctctggagactcactgcccagctccccactctggtcccccgaaggcagtgatagtggcatctccgaagacctcccctccgacccccaggacacccctccacgcagcggaccagccacctcccccgccggctgccatcctgcccagcctggcaaggggccctgcctctcctatcatcctggcaactcttgctccaccacaaccccagggccagtgatccaagtacctgaagcctctgtgaccatagacctggaaatgtggagcccaggaggaaggatctgtgctgagaagccggctgatccggtggacctgtccccacgatgcaatctcaccgtgaaagacctcctcctttcgggcagcagtggggacctgcatcacctgggggcctcctacctcctgcgacctggggctgggcactgtcaggagctggtgctcaccgaggatgagaagaagctgctggctaaagaaggcatcaccctgcccactcagctgcccctcactaagtacgaggagcgagtgctgaaaaaaatccgccggaaaatccggaacaagcagtcggcgcaagaaagcaggaagaagaagaaggaatatatcgatggcctggagactcggatgtcagcttgcactgctcagaatcaggagttacagaggaaagtcttgcatctcgagaagcaaaacctgtccctcttggagcaactgaagaaactccaggccattgtggtgcagtccaccagcaagtcagcccagacaggcacctgtgtcgcagtcctgttgctgtcctttgccctcatcatcctcccctccatcagcccttttggccccaacaaaaccgagagccctggggactttgcgcctgtacgagtgttctccagaactttgcacaacgatgctgcctcccgcgtggctgctgatgctgtgccaggctccgaggccccaggaccccgacccgaggctgacacaacccgagaagagtctccaggaagccccggggcagactggggcttccaggacaccgcgaacctgaccaattcgacggaggagctggacaacgccaccctggtcctgaggaatgcaacagaggggctgggccaggtcgccctgctggactgggtggcgcctgggccgagcactggctcaggacgtgcagggctggaggcggcgggagacgagctgtagtaatgaactagtccgtaacttgaaagtatttcgatttcttggctttatatatcttgtggaaaggacgaaggtccgtagaccggagtatttca

SEQ ID NO: 2303 - DNA, 1661 bp, Homo sapiens
  source 1..1661: mol_type = genomic DNA
accgccaccatggacgccgtcttggaacccttcccggccgacaggctgttccccggatccagcttcctggacttgggggatctgaacgagtcggacttcctcaacaatgcgcactttcctgagcacctggaccactttacggagaacatggaggacttctccaatgacctgttcagcagcttctttgatgaccctgtgctggatgagaagagccctctattggacatggaactggactcccctacgccaggcatccaggcggagcacagctactccctgagcggcgactcagcgccccagagcccccttgtgcccatcaagatggaggacaccacccaagatgcagagcatggagcatgggcgctgggacacaaactgtgctccatcatggtgaagcaggagcagagcccggagctgcccgtggaccctctggctgccccctcggccatggctgccgcggccgccatggccaccaccccgctgctgggcctcagccccttgtccaggctgcccatcccccaccaggccccgggagagatgactcagctgccagtgatcaaagcagagcctctggaggtgaaccagttcctcaaagtgacaccggaggacctggtgcagatgcctccgacgccccccagcagccatggcagtgacagcgacggctcccagagtccccgctctctgcccccctccagccctgtcaggcccatggcgcgctcctccacggccatctccacctccccactcctcactgcccctcacaaattacaggggacatcagggccactgctcctgacagaggaggagaagcggaccctgattgctgagggctaccccatccccacaaaactccccctcaccaaagccgaggagaaggccttgaagagagtccggaggaaaatcaagaacaagatctcagcccaggagagccgtcgtaagaagaaggagtatgtggagtgtctagaaaagaaggtggagacatttacatctgagaacaatgaactgtggaagaaggtggagaccctggagaatgccaacaggaccctgctccagcagctgcagaaactccagactctggtcaccaacaagatctccagaccttacaagatggccgccacccagactgggacctgcctcatggtggcagccttgtgctttgttctggtgctgggctccctcgtgccctgccttcccgagttctcctccggctcccagactgtgaaggaagaccccctggccgcagacggcgtctacacggccagccagatgccctcccgaagcctcctattctacgatgacggggcaggcttatgggaagatggccgcagcaccctgctgcccatggagcccccagatggctgggaaatcaaccccggggggccggcagagcagcggccccgggaccacctgcagcatgatcacctggacagcacccacgagaccaccaagtacctgagtgaggcctggcctaaagacggtggaaacggcaccagccccgacttctcccactccaaggagtggttccacgacagggatctgggccccaacaccaccatcaaactctcctagtaatgaactagtccgtaacttgaaagtatttcgatttcttggctttatatatcttgtggaaaggacgatgtttgtgcgaccagcagaaccgt

SEQ ID NO: 2304 - DNA, 1229 bp, Homo sapiens
  source 1..1229: mol_type = genomic DNA
accgccaccatggatctcggaatccctgacctgctggacgcgtggctggagcccccagaggatatcttctcgacaggatccgtcctggagctgggactccactgcccccctccagaggttccgggccttcaagagagtgagcctgaagatttcttgaagcttttcattgatcccaatgaggtgtactgctcagaagcatctcctggcagtgacagtggcatctctgaggacccctgccatccagacagtccccctgcccccagggcaaccagttctcctatgctctatgaggttgtctatgaggcaggggccctggagaggatgcagggggaaactgggccaaatgtaggccttatctccatccagctagatcagtggagcccagcatttatggtgcctgattcctgcatggtcagtgagctgccctttgatgctcatgcccacatcctgcccagagcaggcaccgtagccccagtgccctgtacaaccctgctgccctgtcaaaccctgttcctgaccgatgaggagaagcgtctgctggggcaggaaggggtttccctgccctctcacctgcccctcaccaaggcagaggagagggtcctcaagaaggtcaggaggaaaatccgtaacaagcagtcagctcaggacagtcggcggcggaagaaggagtacattgatgggctggagagcagggtggcagcctgttctgcacagaaccaagaattacagaaaaaagtccaggagctggagaggcacaacatctccttggtagctcagctccgccagctgcagacgctaattgctcaaacttccaacaaagctgcccagaccagcacttgtgttttgattcttcttttttccctggctctcatcatcctgcccagcttcagtccattccagagtcgaccagaagctgggtctgaggattaccagcctcacggagtgacttccagaaatatcctgacccacaaggacgtaacagaaaatctggagacccaagtggtagagtccagactgagggagccacctggagccaaggatgcaaatggctcaacaaggacactgcttgagaagatgggagggaagccaagacccagtgggcgcatccggtccgtgctgcatgcagatgagatgtagtaatgaactagtccgtaacttgaaagtatttcgatttcttggctttatatatcttgtggaaaggacgatggagttcctggagccgtagccca

SEQ ID NO: 2305 - DNA, 1289 bp, Homo sapiens
  source 1..1289: mol_type = genomic DNA
accgccaccatggatctcggaatccctgacctgctggacgcgtggctggagcccccagaggatatcttctcgacaggatccgtcctggagctgggactccactgcccccctccagaggttccggtaactaggctacaggaacagggactgcaaggctggaagtccggtggggaccgtggctgtggccttcaagagagtgagcctgaagatttcttgaagcttttcattgatcccaatgaggtgtactgctcagaagcatctcctggcagtgacagtggcatctctgaggacccctgccatccagacagtccccctgcccccagggcaaccagttctcctatgctctatgaggttgtctatgaggcaggggccctggagaggatgcagggggaaactgggccaaatgtaggccttatctccatccagctagatcagtggagcccagcatttatggtgcctgattcctgcatggtcagtgagctgccctttgatgctcatgcccacatcctgcccagagcaggcaccgtagccccagtgccctgtacaaccctgctgccctgtcaaaccctgttcctgaccgatgaggagaagcgtctgctggggcaggaaggggtttccctgccctctcacctgcccctcaccaaggcagaggagagggtcctcaagaaggtcaggaggaaaatccgtaacaagcagtcagctcaggacagtcggcggcggaagaaggagtacattgatgggctggagagcagggtggcagcctgttctgcacagaaccaagaattacagaaaaaagtccaggagctggagaggcacaacatctccttggtagctcagctccgccagctgcagacgctaattgctcaaacttccaacaaagctgcccagaccagcacttgtgttttgattcttcttttttccctggctctcatcatcctgcccagcttcagtccattccagagtcgaccagaagctgggtctgaggattaccagcctcacggagtgacttccagaaatatcctgacccacaaggacgtaacagaaaatctggagacccaagtggtagagtccagactgagggagccacctggagccaaggatgcaaatggctcaacaaggacactgcttgagaagatgggagggaagccaagacccagtgggcgcatccggtccgtgctgcatgcagatgagatgtagtaatgaactagtccgtaacttgaaagtatttcgatttcttggctttatatatcttgtggaaaggacgaggcctggtagtgtagtgtgcccgg

SEQ ID NO: 2306 - DNA, 857 bp, Homo sapiens
  source 1..857: mol_type = genomic DNA
accgccaccatgcctagccccaggccgcgaggcagcccgccacccgctccctcgggctctcgggtccgacctccgcgctctggccgctctccggcgcccaggtcccctactggcccgaacacgccccgcgctcccggacgcttcgagtcccctttctcggtcgaggccatcctggcgaggcccgacccctgcgcgccggcggcctcccagccgtcgggctccgcctgcgtccacccggccttctggaccgctgcttccctgtgcgccaccgggggtctgccctgggcttgcccgacatcgtggctgcccgcctacctgagcgtaggtttttaccctgtgccagggccgcgcgtggctcccgtctgcggcctgctgggcttcggcgtcacagggttggagctggctcactgctcaggactctgggccttcccagactgggccccaacggaggacctacaggacactgagagacagcaaaagagagtccgaactatgtttaacttggagcagctggaagagttggagaaagtgtttgcaaaacagcacaatctggtggggaagaagagagcccagctggcagctcggctcaaacttacagagaaccaggtgagagtctggttccagaaccgcagggtcaagtatcagaagcagcaaaagctgagggcagcagttacatctgccgaggctgcctccctggatgagccttccagcagctccatcgccagtatccagagtgatgatgccgagtcaggagtggacggctagtaatgaactagtccgtaacttgaaagtatttcgatttcttggctttatatatcttgtggaaaggacgacccactaaatgcaagaattcaaga

SEQ ID NO: 2307 - DNA, 1466 bp, Homo sapiens
  source 1..1466: mol_type = genomic DNA
accgccaccatggatcccgggcagcagccgccgcctcaaccggccccccagggccaagggcagccgccttcgcagcccccgcaggggcagggcccgccgtccggacccgggcaaccggcacccgcggcgacccaggcggcgccgcaggcaccccccgccgggcatcagatcgtgcacgtccgcggggactcggagaccgacctggaggcgctcttcaacgccgtcatgaaccccaagacggccaacgtgccccagaccgtgcccatgaggctccggaagctgcccgactccttcttcaagccgccggagcccaaatcccactcccgacaggccagtactgatgcaggcactgcaggagccctgactccacagcatgttcgagctcattcctctccagcttctctgcagttgggagctgtttctcctgggacactgacccccactggagtagtctctggcccagcagctacacccacagctcagcatcttcgacagtcttcttttgagatacctgatgatgtacctctgccagcaggttgggagatggcaaagacatcttctggtcagagatacttcttaaatcacatcgatcagacaacaacatggcaggaccccaggaaggccatgctgtcccagatgaacgtcacagcccccaccagtccaccagtgcagcagaatatgatgaactcggcttcagccatgaaccagagaatcagtcagagtgctccagtgaaacagccaccacccctggctccccagagcccacagggaggcgtcatgggtggcagcaactccaaccagcagcaacagatgcgactgcagcaactgcagatggagaaggagaggctgcggctgaaacagcaagaactgcttcggcaggtgaggccacaggagttagccctgcgtagccagttaccaacactggagcaggatggtgggactcaaaatccagtgtcttctcccgggatgtctcaggaattgagaacaatgacgaccaatagctcagatcctttccttaacagtggcacctatcactctcgagatgagagtacagacagtggactaagcatgagcagctacagtgtccctcgaaccccagatgacttcctgaacagtgtggatgagatggatacaggtgatactatcaaccaaagcaccctgccctcacagcagaaccgtttcccagactaccttgaagccattcctgggacaaatgtggaccttggaacactggaaggagatggaatgaacatagaaggagaggagctgatgccaagtctgcaggaagctttgagttctgacatccttaatgacatggagtctgttttggctgccaccaagctagataaagaaagctttcttacatggttatagtaatgaactagtccgtaacttgaaagtatttcgatttcttggctttatatatcttgtggaaaggacgatcgatgaaccacatgacctaaacc

SEQ ID NO: 2308 - DNA, 1514 bp, Homo sapiens
  source 1..1514: mol_type = genomic DNA
accgccaccatggatcccgggcagcagccgccgcctcaaccggccccccagggccaagggcagccgccttcgcagcccccgcaggggcagggcccgccgtccggacccgggcaaccggcacccgcggcgacccaggcggcgccgcaggcaccccccgccgggcatcagatcgtgcacgtccgcggggactcggagaccgacctggaggcgctcttcaacgccgtcatgaaccccaagacggccaacgtgccccagaccgtgcccatgaggctccggaagctgcccgactccttcttcaagccgccggagcccaaatcccactcccgacaggccagtactgatgcaggcactgcaggagccctgactccacagcatgttcgagctcattcctctccagcttctctgcagttgggagctgtttctcctgggacactgacccccactggagtagtctctggcccagcagctacacccacagctcagcatcttcgacagtcttcttttgagatacctgatgatgtacctctgccagcaggttgggagatggcaaagacatcttctggtcagagatacttcttaaatcacatcgatcagacaacaacatggcaggaccccaggaaggccatgctgtcccagatgaacgtcacagcccccaccagtccaccagtgcagcagaatatgatgaactcggcttcagccatgaaccagagaatcagtcagagtgctccagtgaaacagccaccacccctggctccccagagcccacagggaggcgtcatgggtggcagcaactccaaccagcagcaacagatgcgactgcagcaactgcagatggagaaggagaggctgcggctgaaacagcaagaactgcttcggcaggtgaggccacaggcaatgcggaatatcaatcccagcacagcaaattctccaaaatgtcaggagttagccctgcgtagccagttaccaacactggagcaggatggtgggactcaaaatccagtgtcttctcccgggatgtctcaggaattgagaacaatgacgaccaatagctcagatcctttccttaacagtggcacctatcactctcgagatgagagtacagacagtggactaagcatgagcagctacagtgtccctcgaaccccagatgacttcctgaacagtgtggatgagatggatacaggtgatactatcaaccaaagcaccctgccctcacagcagaaccgtttcccagactaccttgaagccattcctgggacaaatgtggaccttggaacactggaaggagatggaatgaacatagaaggagaggagctgatgccaagtctgcaggaagctttgagttctgacatccttaatgacatggagtctgttttggctgccaccaagctagataaagaaagctttcttacatggttatagtaatgaactagtccgtaacttgaaagtatttcgatttcttggctttatatatcttgtggaaaggacgactaggctggagttcttgaggtact

SEQ ID NO: 2309 - DNA, 1616 bp, Homo sapiens
  source 1..1616: mol_type = genomic DNA
accgccaccatggatcccgggcagcagccgccgcctcaaccggccccccagggccaagggcagccgccttcgcagcccccgcaggggcagggcccgccgtccggacccgggcaaccggcacccgcggcgacccaggcggcgccgcaggcaccccccgccgggcatcagatcgtgcacgtccgcggggactcggagaccgacctggaggcgctcttcaacgccgtcatgaaccccaagacggccaacgtgccccagaccgtgcccatgaggctccggaagctgcccgactccttcttcaagccgccggagcccaaatcccactcccgacaggccagtactgatgcaggcactgcaggagccctgactccacagcatgttcgagctcattcctctccagcttctctgcagttgggagctgtttctcctgggacactgacccccactggagtagtctctggcccagcagctacacccacagctcagcatcttcgacagtcttcttttgagatacctgatgatgtacctctgccagcaggttgggagatggcaaagacatcttctggtcagagatacttcttaaatcacatcgatcagacaacaacatggcaggaccccaggaaggccatgctgtcccagatgaacgtcacagcccccaccagtccaccagtgcagcagaatatgatgaactcggcttcaggtcctcttcctgatggatgggaacaagccatgactcaggatggagaaatttactatataaaccataagaacaagaccacctcttggctagacccaaggcttgaccctcgttttgccatgaaccagagaatcagtcagagtgctccagtgaaacagccaccacccctggctccccagagcccacagggaggcgtcatgggtggcagcaactccaaccagcagcaacagatgcgactgcagcaactgcagatggagaaggagaggctgcggctgaaacagcaagaactgcttcggcaggcaatgcggaatatcaatcccagcacagcaaattctccaaaatgtcaggagttagccctgcgtagccagttaccaacactggagcaggatggtgggactcaaaatccagtgtcttctcccgggatgtctcaggaattgagaacaatgacgaccaatagctcagatcctttccttaacagtggcacctatcactctcgagatgagagtacagacagtggactaagcatgagcagctacagtgtccctcgaaccccagatgacttcctgaacagtgtggatgagatggatacaggtgatactatcaaccaaagcaccctgccctcacagcagaaccgtttcccagactaccttgaagccattcctgggacaaatgtggaccttggaacactggaaggagatggaatgaacatagaaggagaggagctgatgccaagtctgcaggaagctttgagttctgacatccttaatgacatggagtctgttttggctgccaccaagctagataaagaaagctttcttacatggttatagtaatgaactagtccgtaacttgaaagtatttcgatttcttggctttatatatcttgtggaaaggacgatcttattgttggatgagtgtctta

SEQ ID NO: 2310 - DNA, 1454 bp, Homo sapiens
  source 1..1454: mol_type = genomic DNA
accgccaccatggatcccgggcagcagccgccgcctcaaccggccccccagggccaagggcagccgccttcgcagcccccgcaggggcagggcccgccgtccggacccgggcaaccggcacccgcggcgacccaggcggcgccgcaggcaccccccgccgggcatcagatcgtgcacgtccgcggggactcggagaccgacctggaggcgctcttcaacgccgtcatgaaccccaagacggccaacgtgccccagaccgtgcccatgaggctccggaagctgcccgactccttcttcaagccgccggagcccaaatcccactcccgacaggccagtactgatgcaggcactgcaggagccctgactccacagcatgttcgagctcattcctctccagcttctctgcagttgggagctgtttctcctgggacactgacccccactggagtagtctctggcccagcagctacacccacagctcagcatcttcgacagtcttcttttgagatacctgatgatgtacctctgccagcaggttgggagatggcaaagacatcttctggtcagagatacttcttaaatcacatcgatcagacaacaacatggcaggaccccaggaaggccatgctgtcccagatgaacgtcacagcccccaccagtccaccagtgcagcagaatatgatgaactcggcttcagccatgaaccagagaatcagtcagagtgctccagtgaaacagccaccacccctggctccccagagcccacagggaggcgtcatgggtggcagcaactccaaccagcagcaacagatgcgactgcagcaactgcagatggagaaggagaggctgcggctgaaacagcaagaactgcttcggcaggagttagccctgcgtagccagttaccaacactggagcaggatggtgggactcaaaatccagtgtcttctcccgggatgtctcaggaattgagaacaatgacgaccaatagctcagatcctttccttaacagtggcacctatcactctcgagatgagagtacagacagtggactaagcatgagcagctacagtgtccctcgaaccccagatgacttcctgaacagtgtggatgagatggatacaggtgatactatcaaccaaagcaccctgccctcacagcagaaccgtttcccagactaccttgaagccattcctgggacaaatgtggaccttggaacactggaaggagatggaatgaacatagaaggagaggagctgatgccaagtctgcaggaagctttgagttctgacatccttaatgacatggagtctgttttggctgccaccaagctagataaagaaagctttcttacatggttatagtaatgaactagtccgtaacttgaaagtatttcgatttcttggctttatatatcttgtggaaaggacgacctgggagttgcgcaggtatgcat

SEQ ID NO: 2311 - DNA, 1628 bp, Homo sapiens
  source 1..1628: mol_type = genomic DNA
accgccaccatggatcccgggcagcagccgccgcctcaaccggccccccagggccaagggcagccgccttcgcagcccccgcaggggcagggcccgccgtccggacccgggcaaccggcacccgcggcgacccaggcggcgccgcaggcaccccccgccgggcatcagatcgtgcacgtccgcggggactcggagaccgacctggaggcgctcttcaacgccgtcatgaaccccaagacggccaacgtgccccagaccgtgcccatgaggctccggaagctgcccgactccttcttcaagccgccggagcccaaatcccactcccgacaggccagtactgatgcaggcactgcaggagccctgactccacagcatgttcgagctcattcctctccagcttctctgcagttgggagctgtttctcctgggacactgacccccactggagtagtctctggcccagcagctacacccacagctcagcatcttcgacagtcttcttttgagatacctgatgatgtacctctgccagcaggttgggagatggcaaagacatcttctggtcagagatacttcttaaatcacatcgatcagacaacaacatggcaggaccccaggaaggccatgctgtcccagatgaacgtcacagcccccaccagtccaccagtgcagcagaatatgatgaactcggcttcaggtcctcttcctgatggatgggaacaagccatgactcaggatggagaaatttactatataaaccataagaacaagaccacctcttggctagacccaaggcttgaccctcgttttgccatgaaccagagaatcagtcagagtgctccagtgaaacagccaccacccctggctccccagagcccacagggaggcgtcatgggtggcagcaactccaaccagcagcaacagatgcgactgcagcaactgcagatggagaaggagaggctgcggctgaaacagcaagaactgcttcggcaggtgaggccacaggcaatgcggaatatcaatcccagcacagcaaattctccaaaatgtcaggagttagccctgcgtagccagttaccaacactggagcaggatggtgggactcaaaatccagtgtcttctcccgggatgtctcaggaattgagaacaatgacgaccaatagctcagatcctttccttaacagtggcacctatcactctcgagatgagagtacagacagtggactaagcatgagcagctacagtgtccctcgaaccccagatgacttcctgaacagtgtggatgagatggatacaggtgatactatcaaccaaagcaccctgccctcacagcagaaccgtttcccagactaccttgaagccattcctgggacaaatgtggaccttggaacactggaaggagatggaatgaacatagaaggagaggagctgatgccaagtctgcaggaagctttgagttctgacatccttaatgacatggagtctgttttggctgccaccaagctagataaagaaagctttcttacatggttatagtaatgaactagtccgtaacttgaaagtatttcgatttcttggctttatatatcttgtggaaaggacgatacggacggttgtccaacctttag

SEQ ID NO: 2312 - DNA, 1568 bp, Homo sapiens
  source 1..1568: mol_type = genomic DNA
accgccaccatggatcccgggcagcagccgccgcctcaaccggccccccagggccaagggcagccgccttcgcagcccccgcaggggcagggcccgccgtccggacccgggcaaccggcacccgcggcgacccaggcggcgccgcaggcaccccccgccgggcatcagatcgtgcacgtccgcggggactcggagaccgacctggaggcgctcttcaacgccgtcatgaaccccaagacggccaacgtgccccagaccgtgcccatgaggctccggaagctgcccgactccttcttcaagccgccggagcccaaatcccactcccgacaggccagtactgatgcaggcactgcaggagccctgactccacagcatgttcgagctcattcctctccagcttctctgcagttgggagctgtttctcctgggacactgacccccactggagtagtctctggcccagcagctacacccacagctcagcatcttcgacagtcttcttttgagatacctgatgatgtacctctgccagcaggttgggagatggcaaagacatcttctggtcagagatacttcttaaatcacatcgatcagacaacaacatggcaggaccccaggaaggccatgctgtcccagatgaacgtcacagcccccaccagtccaccagtgcagcagaatatgatgaactcggcttcaggtcctcttcctgatggatgggaacaagccatgactcaggatggagaaatttactatataaaccataagaacaagaccacctcttggctagacccaaggcttgaccctcgttttgccatgaaccagagaatcagtcagagtgctccagtgaaacagccaccacccctggctccccagagcccacagggaggcgtcatgggtggcagcaactccaaccagcagcaacagatgcgactgcagcaactgcagatggagaaggagaggctgcggctgaaacagcaagaactgcttcggcaggagttagccctgcgtagccagttaccaacactggagcaggatggtgggactcaaaatccagtgtcttctcccgggatgtctcaggaattgagaacaatgacgaccaatagctcagatcctttccttaacagtggcacctatcactctcgagatgagagtacagacagtggactaagcatgagcagctacagtgtccctcgaaccccagatgacttcctgaacagtgtggatgagatggatacaggtgatactatcaaccaaagcaccctgccctcacagcagaaccgtttcccagactaccttgaagccattcctgggacaaatgtggaccttggaacactggaaggagatggaatgaacatagaaggagaggagctgatgccaagtctgcaggaagctttgagttctgacatccttaatgacatggagtctgttttggctgccaccaagctagataaagaaagctttcttacatggttatagtaatgaactagtccgtaacttgaaagtatttcgatttcttggctttatatatcttgtggaaaggacgactaagaaacaggatggcgcgagac

SEQ ID NO: 2313 - DNA, 1082 bp, Homo sapiens
  source 1..1082: mol_type = genomic DNA
accgccaccatggcaaagacatcttctggtcagagatacttcttaaatcacatcgatcagacaacaacatggcaggaccccaggaaggccatgctgtcccagatgaacgtcacagcccccaccagtccaccagtgcagcagaatatgatgaactcggcttcaggtcctcttcctgatggatgggaacaagccatgactcaggatggagaaatttactatataaaccataagaacaagaccacctcttggctagacccaaggcttgaccctcgttttgccatgaaccagagaatcagtcagagtgctccagtgaaacagccaccacccctggctccccagagcccacagggaggcgtcatgggtggcagcaactccaaccagcagcaacagatgcgactgcagcaactgcagatggagaaggagaggctgcggctgaaacagcaagaactgcttcggcaggcaatgcggaatatcaatcccagcacagcaaattctccaaaatgtcaggagttagccctgcgtagccagttaccaacactggagcaggatggtgggactcaaaatccagtgtcttctcccgggatgtctcaggaattgagaacaatgacgaccaatagctcagatcctttccttaacagtggcacctatcactctcgagatgagagtacagacagtggactaagcatgagcagctacagtgtccctcgaaccccagatgacttcctgaacagtgtggatgagatggatacaggtgatactatcaaccaaagcaccctgccctcacagcagaaccgtttcccagactaccttgaagccattcctgggacaaatgtggaccttggaacactggaaggagatggaatgaacatagaaggagaggagctgatgccaagtctgcaggaagctttgagttctgacatccttaatgacatggagtctgttttggctgccaccaagctagataaagaaagctttcttacatggttatagtaatgaactagtccgtaacttgaaagtatttcgatttcttggctttatatatcttgtggaaaggacgaggctgattctattaagtgtctggt

SEQ ID NO: 2314 - DNA, 1580 bp, Homo sapiens
  source 1..1580: mol_type = genomic DNA
accgccaccatggatcccgggcagcagccgccgcctcaaccggccccccagggccaagggcagccgccttcgcagcccccgcaggggcagggcccgccgtccggacccgggcaaccggcacccgcggcgacccaggcggcgccgcaggcaccccccgccgggcatcagatcgtgcacgtccgcggggactcggagaccgacctggaggcgctcttcaacgccgtcatgaaccccaagacggccaacgtgccccagaccgtgcccatgaggctccggaagctgcccgactccttcttcaagccgccggagcccaaatcccactcccgacaggccagtactgatgcaggcactgcaggagccctgactccacagcatgttcgagctcattcctctccagcttctctgcagttgggagctgtttctcctgggacactgacccccactggagtagtctctggcccagcagctacacccacagctcagcatcttcgacagtcttcttttgagatacctgatgatgtacctctgccagcaggttgggagatggcaaagacatcttctggtcagagatacttcttaaatcacatcgatcagacaacaacatggcaggaccccaggaaggccatgctgtcccagatgaacgtcacagcccccaccagtccaccagtgcagcagaatatgatgaactcggcttcaggtcctcttcctgatggatgggaacaagccatgactcaggatggagaaatttactatataaaccataagaacaagaccacctcttggctagacccaaggcttgaccctcgttttgccatgaaccagagaatcagtcagagtgctccagtgaaacagccaccacccctggctccccagagcccacagggaggcgtcatgggtggcagcaactccaaccagcagcaacagatgcgactgcagcaactgcagatggagaaggagaggctgcggctgaaacagcaagaactgcttcggcaggtgaggccacaggagttagccctgcgtagccagttaccaacactggagcaggatggtgggactcaaaatccagtgtcttctcccgggatgtctcaggaattgagaacaatgacgaccaatagctcagatcctttccttaacagtggcacctatcactctcgagatgagagtacagacagtggactaagcatgagcagctacagtgtccctcgaaccccagatgacttcctgaacagtgtggatgagatggatacaggtgatactatcaaccaaagcaccctgccctcacagcagaaccgtttcccagactaccttgaagccattcctgggacaaatgtggaccttggaacactggaaggagatggaatgaacatagaaggagaggagctgatgccaagtctgcaggaagctttgagttctgacatccttaatgacatggagtctgttttggctgccaccaagctagataaagaaagctttcttacatggttatagtaatgaactagtccgtaacttgaaagtatttcgatttcttggctttatatatcttgtggaaaggacgatttgatcgcgctcatatcaaacga

SEQ ID NO: 2315 - DNA, 1631 bp, Homo sapiens
  source 1..1631: mol_type = genomic DNA
accgccaccatgctggagaattacaggaatcttctctcattggcagaaccaaagccagaaatctacacttgttcctcctgccttctggccttctcctgtcagcagttcctcagtcaacatgtacttcagatcttcctgggcttatgtgcagaaaatcacttccatccagggaattctagcccagggcattggaaacagcaggggcagcagtattcccatgtaagctgttggtttgaaaatgcagaaggtcaggagagaggaggtggctccaaaccctggtctgcaaggacagaggagagagaaacctcaagggcattccccagcccactccaaagacagtcagcaagtcctagaaaaggcaacatggtggtagaaacagagcccagctcagcccaaagaccaaaccctgtgcagctagacaaaggcttgaaggaattagaaaccttgagatttggagcaatcaactgtagagagtatgaaccggaccataacctggaatcaaactttattacaaacccgaggaccctcttagggaagaagccctacatttgcagtgattgtgggcgaagctttaaagatagatcaaccctcatcagacaccatcgtatacactcgatggagaagccttatgtgtgcagtgagtgcgggcgaggttttagccagaagtccaacctcagcagacaccagagaacacattcagaagagaagccttatttgtgcagggagtgtgggcaaagctttagaagtaagtccatcctcaatagacatcagtggactcactcagaggagaagccctatgtttgcagcgagtgtgggcgaggctttagcgagaagtcatccttcatcagacaccagaggacacactccggtgagaaaccctatgtgtgcctggagtgtggacgaagcttttgtgataagtcaaccctcagaaaacaccagaggatacactcaggggagaagccttatgtttgcagggagtgtgggcgaggctttagccagaactcagatctcatcaaacaccagaggacacacttggatgagaagccttatgtttgcagggagtgtgggcgaggcttttgtgacaagtcaaccctcatcatacacgagcggacgcactctggagagaagccttatgtgtgtggtgagtgtggccgaggctttagtcggaaatcactcctccttgtccaccagaggacacactcaggggagaagcattatgtctgcagggagtgtaggcgaggttttagccagaagtcaaatctcatcagacaccagaggacgcactcaaatgagaagccttatatttgcagggaatgtgggcgaggcttttgtgacaagtcaaccctcattgtacatgagaggacacactcaggagagaagccttacgtgtgcagtgagtgtggccgaggctttagccggaaatcactcctccttgtccaccagaggacacactcaggggagaagcattatgtttgtagggagtgtgggcgaggctttagtcataagtcaaatctcatcagacaccagaggacacactagtaatgaactagtccgtaacttgaaagtatttcgatttcttggctttatatatcttgtggaaaggacgatcaataggcataaagcgctgggag

SEQ ID NO: 2316 - DNA, 2024 bp, Homo sapiens
  source 1..2024: mol_type = genomic DNA
accgccaccatgatgttgccttatccttcagcactgggagatcaatactgggaagagattttgcttccaaagaatggggaaaatgtagagactatgaagaaattgacccaaaatcataaagcgaaaggcttgccttctaatgatactgactgcccccagaaaaaggagggaaaggcccaaatagtggtaccagttacattcagggatgtgactgtgatcttcacagaagcagaatggaagagactgagtccagagcagaggaatctatacaaagaagtgatgctggagaattacaggaatcttctctcattggatggagtttcgctcttgttgcccaggctagagtgcaatcgtgcaatctcggctcaccacaacctttgcctcccgggttcaagcaattctcctgccacagcctctcgagtagttgggattacagcagaaccaaagccagaaatctacacttgttcctcctgccttctggccttctcctgtcagcagttcctcagtcaacatgtacttcagatcttcctgggcttatgtgcagaaaatcacttccatccagggaattctagcccagggcattggaaacagcaggggcagcagtattcccatgtaagctgttggtttgaaaatgcagaaggtcaggagagaggaggtggctccaaaccctggtctgcaaggacagaggagagagaaacctcaagggcattccccagcccactccaaagacagtcagcaagtcctagaaaaggcaacatggtggtagaaacagagcccagctcagcccaaagaccaaaccctgtgcagctagacaaaggcttgaaggaattagaaaccttgagatttggagcaatcaactgtagagagtatgaaccggaccataacctggaatcaaactttattacaaacccgaggaccctcttagggaagaagccctacatttgcagtgattgtgggcgaagctttaaagatagatcaaccctcatcagacaccatcgtatacactcgatggagaagccttatgtgtgcagtgagtgcgggcgaggttttagccagaagtccaacctcagcagacaccagagaacacattcagaagagaagccttatttgtgcagggagtgtgggcaaagctttagaagtaagtccatcctcaatagacatcagtggactcactcagaggagaagccctatgtttgcagcgagtgtgggcgaggctttagcgagaagtcatccttcatcagacaccagaggacacactccggtgagaaaccctatgtgtgcctggagtgtggacgaagcttttgtgataagtcaaccctcagaaaacaccagaggatacactcaggggagaagccttatgtttgcagggagtgtgggcgaggctttagccagaactcagatctcatcaaacaccagaggacacacttggatgagaagccttatgtttgcagggagtgtgggcgaggcttttgtgacaagtcaaccctcatcatacacgagcggacgcactctggagagaagccttatgtgtgtggtgagtgtggccgaggctttagtcggaaatcactcctccttgtccaccagaggacacactcaggggagaagcattatgtctgcagggagtgtaggcgaggttttagccagaagtcaaatctcatcagacaccagaggacgcactcaaatgagaagccttatatttgcagggaatgtgggcgaggcttttgtgacaagtcaaccctcattgtacatgagaggacacactcaggagagaagccttacgtgtgcagtgagtgtggccgaggctttagccggaaatcactcctccttgtccaccagaggacacactcaggggagaagcattatgtttgtagggagtgtgggcgaggctttagtcataagtcaaatctcatcagacaccagaggacacactagtaatgaactagtccgtaacttgaaagtatttcgatttcttggctttatatatcttgtggaaaggacgaaggaatacgcgtgaggttgtgttt

SEQ ID NO: 2317 - DNA, 458 bp, Homo sapiens
  source 1..458: mol_type = genomic DNA
accgccaccatgatgttgccttatccttcagcactgggagatcaatactgggaagagattttgcttccaaagaatggggaaaatgtagagactatgaagaaattgacccaaaatcataaagcgaaaggcttgccttctaatgatactgactgcccccagaaaaaggagggaaaggcccaaatagtggtaccagttacattcagggatgtgactgtgatcttcacagaagcagaatggaagagactgagtccagagcagaggaatctatacaaagaagtgatgctggagaattacaggaatcttctctcattgggtcaggagatcgagaccatcctggccaacatagtgaaatcccatctctactagtaatgaactagtccgtaacttgaaagtatttcgatttcttggctttatatatcttgtggaaaggacgaggcatggatctcgccctaaagcta

SEQ ID NO: 2318 - DNA, 1901 bp, Homo sapiens
  source 1..1901: mol_type = genomic DNA
accgccaccatgatgttgccttatccttcagcactgggagatcaatactgggaagagattttgcttccaaagaatggggaaaatgtagagactatgaagaaattgacccaaaatcataaagcgaaaggcttgccttctaatgatactgactgcccccagaaaaaggagggaaaggcccaaatagtggtaccagttacattcagggatgtgactgtgatcttcacagaagcagaatggaagagactgagtccagagcagaggaatctatacaaagaagtgatgctggagaattacaggaatcttctctcattggcagaaccaaagccagaaatctacacttgttcctcctgccttctggccttctcctgtcagcagttcctcagtcaacatgtacttcagatcttcctgggcttatgtgcagaaaatcacttccatccagggaattctagcccagggcattggaaacagcaggggcagcagtattcccatgtaagctgttggtttgaaaatgcagaaggtcaggagagaggaggtggctccaaaccctggtctgcaaggacagaggagagagaaacctcaagggcattccccagcccactccaaagacagtcagcaagtcctagaaaaggcaacatggtggtagaaacagagcccagctcagcccaaagaccaaaccctgtgcagctagacaaaggcttgaaggaattagaaaccttgagatttggagcaatcaactgtagagagtatgaaccggaccataacctggaatcaaactttattacaaacccgaggaccctcttagggaagaagccctacatttgcagtgattgtgggcgaagctttaaagatagatcaaccctcatcagacaccatcgtatacactcgatggagaagccttatgtgtgcagtgagtgcgggcgaggttttagccagaagtccaacctcagcagacaccagagaacacattcagaagagaagccttatttgtgcagggagtgtgggcaaagctttagaagtaagtccatcctcaatagacatcagtggactcactcagaggagaagccctatgtttgcagcgagtgtgggcgaggctttagcgagaagtcatccttcatcagacaccagaggacacactccggtgagaaaccctatgtgtgcctggagtgtggacgaagcttttgtgataagtcaaccctcagaaaacaccagaggatacactcaggggagaagccttatgtttgcagggagtgtgggcgaggctttagccagaactcagatctcatcaaacaccagaggacacacttggatgagaagccttatgtttgcagggagtgtgggcgaggcttttgtgacaagtcaaccctcatcatacacgagcggacgcactctggagagaagccttatgtgtgtggtgagtgtggccgaggctttagtcggaaatcactcctccttgtccaccagaggacacactcaggggagaagcattatgtctgcagggagtgtaggcgaggttttagccagaagtcaaatctcatcagacaccagaggacgcactcaaatgagaagccttatatttgcagggaatgtgggcgaggcttttgtgacaagtcaaccctcattgtacatgagaggacacactcaggagagaagccttacgtgtgcagtgagtgtggccgaggctttagccggaaatcactcctccttgtccaccagaggacacactcaggggagaagcattatgtttgtagggagtgtgggcgaggctttagtcataagtcaaatctcatcagacaccagaggacacactagtaatgaactagtccgtaacttgaaagtatttcgatttcttggctttatatatcttgtggaaaggacgagatatagttaccaagggaagaata

SEQ ID NO: 2319 - DNA, 1613 bp, Homo sapiens
  source 1..1613: mol_type = genomic DNA
accgccaccatgggagcgttgacatttagagatgtggccatagaattctctctggaggagtggcaatgtctggacaccgaacaacagaatttatatagaaatgtaatgttagataactacagaaacctggtcttcctgggtattgctgtctcaaagccagacctgatcacctgtctggagcaagaaaaagagccttggaatttgaagacacatgatatggtagccaaacccccagttatatgttctcatattgcccaagacctttggccagagcaaggcataaaagattatttccaagaagtcatactgagacaatataaaaaatgtagacatgagaatttactgttaagaaaaggctgtaaaaatgtggatgagtttaagatgcacaaaaaaggttataatagacataaccagtgtttgacaacttcccatagcaaaatatttcagtgtgacaaatatgtgaaagtctttcataaattttcaaattcaaacagacataagataagacatacttcgaagaaacctttcaaatgtaaagaatgtggaaaattattttgcattctttcacacttagctcaacataaaaaaattcatactggagagaaatcctacaaatgtgaagaatatggcaaagcctttaatgagtcctcaaactgtactacacataaaagaattactgagaaaaaaccttacaaatgtaaagaatgtggcaaagcctttaactggttttcacattttactacacataagagaattcatactggagaaaaaccctaccaatgtgagaaatgtggcaaattttttaaccaatccacaaaccttactacacataaaagaattcatactggagagaaaccctataaatgtgaagaatgtggcaaagcctttaaccagtcctcaaaccttactgaacataagaaaattcatactaaagagcaaccatacaaatgcgaaaaatgtggcaaagcttttaagtggtcctcaacccttacaaaacataaaagaattcataatggagaaaaaccctacaaatgtgaagaatgtggcaaagcttttaaccgatcctcaacccttaatagacataagataactcatactggagggaaaccctacaaatataaagaatgtggtaaagcttttaaccaatcctcaactcttactatacataagataattcatactgtagagaaattttacaaatgtgaagaatgtggcaaagcctttagccgtatctcacaccttactacacataagagaattcatactggagagaaaccctacaaatgtgaagaatgtggcagagctttcaaccagtcctcaacccttactacacataaaagaattcatactggagagaaaccctatgaatgtgaagaatgtggcaaagcttttaaccggtcctcaaccctcactacacataagataattcattctggggaaaaaatctacaaatgtaaagaatgtggtaaagcctttaggcggttctcacaccttactaggcataagacaattcatacatagtaatgaactagtccgtaacttgaaagtatttcgatttcttggctttatatatcttgtggaaaggacgaggccgaggcgcagtgcagcctctc

SEQ ID NO: 2320 - DNA, 935 bp, Homo sapiens
  source 1..935: mol_type = genomic DNA
accgccaccatgattctggaaggaggtggtgtaatgaatctcaaccccggcaacaacctccttcaccagccgccagcctggacagacagctactccacgtgcaatgtttccagtgggttttttggaggccagtggcatgaaattcatcctcagtactggaccaagtaccaggtgtgggagtggctccagcacctcctggacaccaaccagctggatgccaattgtatccctttccaagagttcgacatcaacggcgagcacctctgcagcatgagtttgcaggagttcacccgggcggcagggacggcggggcagctcctctacagcaacttgcagcatctgaagtggaacggccagtgcagtagtgacctgttccagtccacacacaatgtcattgtcaagactgaacaaactgagccttccatcatgaacacctggaaagacgagaactatttatatgacaccaactatggtagcacagtagcagagtcacctgatatgaaaaaggagcaagacccccctgccaagtgccacaccaaaaagcacaacccgagagggactcacttatgggaattcatccgcgacatcctcttgaacccagacaagaacccaggattaataaaatgggaagaccgatctgagggcgtcttcaggttcttgaaatcagaggcagtggctcagctatggggtaaaaagaagaacaacagcagcatgacctatgaaaagctcagccgagctatgagatattactacaaaagagaaattctggagcgtgtggatggacgaagactggtatataaatttgggaagaatgcccgaggatggagagaaaatgaaaactagtaatgaactagtccgtaacttgaaagtatttcgatttcttggctttatatatcttgtggaaaggacgactcgcctcacacagacaagatatg

SEQ ID NO: 2321 - DNA, 1004 bp, Homo sapiens
  source 1..1004: mol_type = genomic DNA
accgccaccatgattctggaaggaggtggtgtaatgaatctcaaccccggcaacaacctccttcaccagccgccagcctggacagacagctactccacgtgcaatgtttccagtgggttttttggaggccagtggcatgaaattcatcctcagtactggaccaagtaccaggtgtgggagtggctccagcacctcctggacaccaaccagctggatgccaattgtatccctttccaagagttcgacatcaacggcgagcacctctgcagcatgagtttgcaggagttcacccgggcggcagggacggcggggcagctcctctacagcaacttgcagcatctgaagtggaacggccagtgcagtagtgacctgttccagtccacacacaatgtcattgtcaagactgaacaaactgagccttccatcatgaacacctggaaagacgagaactatttatatgacaccaactatggtagcacagtagatttgttggacagcaaaactttctgccgggctcagatctccatgacaaccaccagtcaccttcctgttgcagagtcacctgatatgaaaaaggagcaagacccccctgccaagtgccacaccaaaaagcacaacccgagagggactcacttatgggaattcatccgcgacatcctcttgaacccagacaagaacccaggattaataaaatgggaagaccgatctgagggcgtcttcaggttcttgaaatcagaggcagtggctcagctatggggtaaaaagaagaacaacagcagcatgacctatgaaaagctcagccgagctatgagatattactacaaaagagaaattctggagcgtgtggatggacgaagactggtatataaatttgggaagaatgcccgaggatggagagaaaatgaaaactagtaatgaactagtccgtaacttgaaagtatttcgatttcttggctttatatatcttgtggaaaggacgaaggatacaggtgctggagacttaa

SEQ ID NO: 2322 - DNA, 1070 bp, Homo sapiens
  source 1..1070: mol_type = genomic DNA
accgccaccatggggttgccggagagaagaggattggtcctgcttttaagcctagctgaaattcttttcaagatcatgattctggaaggaggtggtgtaatgaatctcaaccccggcaacaacctccttcaccagccgccagcctggacagacagctactccacgtgcaatgtttccagtgggttttttggaggccagtggcatgaaattcatcctcagtactggaccaagtaccaggtgtgggagtggctccagcacctcctggacaccaaccagctggatgccaattgtatccctttccaagagttcgacatcaacggcgagcacctctgcagcatgagtttgcaggagttcacccgggcggcagggacggcggggcagctcctctacagcaacttgcagcatctgaagtggaacggccagtgcagtagtgacctgttccagtccacacacaatgtcattgtcaagactgaacaaactgagccttccatcatgaacacctggaaagacgagaactatttatatgacaccaactatggtagcacagtagatttgttggacagcaaaactttctgccgggctcagatctccatgacaaccaccagtcaccttcctgttgcagagtcacctgatatgaaaaaggagcaagacccccctgccaagtgccacaccaaaaagcacaacccgagagggactcacttatgggaattcatccgcgacatcctcttgaacccagacaagaacccaggattaataaaatgggaagaccgatctgagggcgtcttcaggttcttgaaatcagaggcagtggctcagctatggggtaaaaagaagaacaacagcagcatgacctatgaaaagctcagccgagctatgagatattactacaaaagagaaattctggagcgtgtggatggacgaagactggtatataaatttgggaagaatgcccgaggatggagagaaaatgaaaactagtaatgaactagtccgtaacttgaaagtatttcgatttcttggctttatatatcttgtggaaaggacgaagactgcggtcaggtgcgcaagtc

SEQ ID NO: 2323 - DNA, 1526 bp, Homo sapiens
  source 1..1526: mol_type = genomic DNA
accgccaccatggcggcccgggcgggtttccagtctgtggctccaagcggcggcgccggagcctcaggaggggcgggcgcggctgctgccttgggcccgggcggaactccggggcctcctgtgcgaatgggcccggctccgggtcaagggctgtaccgctccccgatgcccggagcggcctatccgagaccaggtatgttgccaggcagccgaatgacacctcagggaccttccatgggaccccctggctatggggggaacccttcagtccgacctggcctggcccagtcagggatggatcagtcccgcaagagacctgcccctcagcagatccagcaggtccagcagcaggcggtccaaaatcgaaaccacaatgcaaagaaaaagaagatggctgacaaaattctacctcaaaggattcgtgaactggtaccagaatcccaggcctatatggatctcttggcttttgaaaggaaactggaccagactatcatgaggaaacggctagatatccaagaggccttgaaacgtcccatcaagcaaaaacggaagctgcgaattttcatttctaacactttcaatccggctaagtcagatgccgaggatggggaagggacggtggcttcctgggagcttcgggtagaaggacggctcctggaggattcagccttgtccaaatatgatgccactaaacaaaagaggaagttctcttccttttttaagtccttggtgattgaactggacaaagacctgtatgggccagacaaccatctggtagaatggcacaggaccgccactacccaggagaccgatggctttcaggtgaagcggccgggagacgtgaatgtacggtgtactgtcctactgatgctggattaccagcctccccagtttaaattagacccccgcctagctcgactcctgggcatccatacccagactcgtccagtgatcatccaagcactgtggcaatatattaagacacataagctccaggaccctcacgagcgggagtttgtcatctgtgacaagtacctgcagcagatctttgagtctcaacgtatgaagttttcagagatccctcagcggctccatgccttgcttatgccaccagaacctatcatcattaatcatgtcatcagtgttgacccgaatgatcagaaaaagacagcttgttatgacattgatgttgaagtggatgacaccttgaagacccagatgaattcttttctgctgtccactgccagccaacaggagattgctactctagacaacaagacaatgactgatgtggtgggtaacccagaggaggagcgccgagctgagttctacttccagccctgggctcaggaggctgtgtgccgatacttctactccaaggtgcagcagagacgacaagaattagagcaagccctgggaatccggaatacatagtaatgaactagtccgtaacttgaaagtatttcgatttcttggctttatatatcttgtggaaaggacgaagtaccggcttattaaccttagtc

SEQ ID NO: 2324 - DNA, 1889 bp, Homo sapiens
  source 1..1889: mol_type = genomic DNA
accgccaccatggccttgactgacggcggctggtgcttgccgaagcgcttcggggccgcgggtgcggacgccagcgactccagagcctttccagcgcgggagccctccacgccgccttcccccatctcttcctcgtcctcctcctgctcccggggcggagagcggggccccggcggcgccagcaactgcgggacgcctcagctcgacacggaggcggcggccggacccccggcccgctcgctgctgctcagttcctacgcttcgcatcccttcggggctccccacggaccttcggcgcctggggtcgcgggccccgggggcaacctgtcgagctgggaggacttgctgctgttcactgacctcgaccaagccgcgaccgccagcaagctgctgtggtccagccgcggcgccaagctgagccccttcgcacccgagcagccggaggagatgtaccagaccctcgccgctctctccagccagggtccggccgcctacgacggcgcgcccggcggcttcgtgcactctgcggccgcggcggcagcagccgcggcggcggccagctccccggtctacgtgcccaccacccgcgtgggttccatgctgcccggcctaccgtaccacctgcaggggtcgggcagtgggccagccaaccacgcgggcggcgcgggcgcgcaccccggctggcctcaggcctcggccgacagccctccatacggcagcggaggcggcgcggctggcggcggggccgcggggcctggcggcgctggctcagccgcggcgcacgtctcggcgcgcttcccctactctcccagcccgcccatggccaacggcgccgcgcgggagccgggaggctacgcggcggcgggcagtgggggcgcgggaggcgtgagcggcggcggcagtagcctggcggccatgggcggccgcgagccccagtacagctcgctgtcggccgcgcggccgctgaacgggacgtaccaccaccaccaccaccaccaccaccaccatccgagcccctactcgccctacgtgggggcgccactgacgcctgcctggcccgccggacccttcgagaccccggtgctgcacagcctgcagagccgcgccggagccccgctcccggtgccccggggtcccagtgcagacctgctggaggacctgtccgagagccgcgagtgcgtgaactgcggctccatccagacgccgctgtggcggcgggacggcaccggccactacctgtgcaacgcctgcgggctctacagcaagatgaacggcctcagccggcccctcatcaagccgcagaagcgcgtgccttcatcacggcggcttggattgtcctgtgccaactgtcacaccacaactaccaccttatggcgcagaaacgccgagggtgaacccgtgtgcaatgcttgtggactctacatgaaactccatggggtgcccagaccacttgctatgaaaaaagagggaattcaaaccaggaaacgaaaacctaagaacataaataaatcaaagacttgctctggtaatagcaataattccattcccatgactccaacttccacctcttctaactcagatgattgcagcaaaaatacttcccccacaacacaacctacagcctcaggggcgggtgccccggtgatgactggtgcgggagagagcaccaatcccgagaacagcgagctcaagtattcgggtcaagatgggctctacataggcgtcagtctcgcctcgccggccgaagtcacgtcctccgtgcgaccggattcctggtgcgccctggccctggcctagtaatgaactagtccgtaacttgaaagtatttcgatttcttggctttatatatcttgtggaaaggacgattactgaatcgtctttgatctctt

SEQ ID NO: 2325 - DNA, 1835 bp, Homo sapiens
  source 1..1835: mol_type = genomic DNA
accgccaccatgctgcggcgtggacacttggcattcagggacgtggccatagaattccctcaggaggagtggaaatgtctggaccctgctcagaggactttatacagggaagtgatggtggagaactacaggaacctggtctttctgggaatctgtcttcctgacctgagtgttatctccatgttggagcaaaggagagatccccggaatctgcagagtgaagtgaaaatagcaaacaatccaggtggcagggagtgcatcaaaggtgtgaacgcagagagcagctctaaattgggaagcaatgccggaaacaagtctcttaaaaatcaacttggattaacctttcagttacatctgagtgaactgcagctatttcaagctgaaaggaatatttctggatgtaaacatgtcgaaaaacctatcaacaattccttagtttcaccacttcaaaaaatttattctagtgtcaaatcccacattttaaataaatacagaaatgattttgatgattctccatttctcccacaagaacaaaaagcacaaataagggaaaaaccgtgtgaatgtaatgagcatggcaaagcctttagagtgtcttcaagacttgctaacaatcaagtaatccacactgcagataacccttacaaatgtaatgaatgtgacaaggtcttcagtaacagttcaaaccttgtacaacatcaaagaattcatactggagagaagccttacaagtgtcatgaatgtggcaagctcttcaatcgaatttcactccttgcacgacatcagagaatacatactggagagaaaccttacaaatgtcatgagtgtggcaaagtcttcactcaaaattctcaccttgcaaatcatcacagaatccacactggagagaaaccttacaaatgtaatgagtgtggcaaggtcttcaacagaaatgcacaccttgcacgacatcagaaaattcatagtggagagaaaccttacaaatgtaaggaatgtggcaaagcattttcagggggttcaggccttactgctcatcttgtaattcacactggagagaaactttacaaatgtaataaatgtggcaaggtcttcaatcgaaatgcacaccttaccagacatcaaagaatccatactggagagaaaccttatgaatgtaaagaatgtggcaaggtcttcaggcacaagttttgtctaaccaatcatcatagaatgcacacgggagagcaaccttacaaatgtaatgaatgtggcaaagcatttagagactgttcaggccttactgcccatctactaattcacactggagagaaaccttacaaatgtaaagaatgtgccaaggtcttcaggcatagattatccctaagcaatcatcagagatttcatactggagagaaaccttacagatgtgatgaatgtggcaaggacttcactcgaaattcaaaccttgcaaatcatcacagaatccatactggagagaaaccttacaaatgcagtgaatgtcacaaagtctttagtcacaattcacaccttgcacgacataggcaaattcatactggagagaagtcttacaaatgcaatgaatgtggcaaggtcttcagccacaagttatacctaaaaaaacatgagagaattcatactggggagaaaccgtacagatgtcatgaatgtggtaaggacttcactcgaaattcaaacctggcaaatcatcacagaatccatactggagagaaaccgtacagatagtaatgaactagtccgtaacttgaaagtatttcgatttcttggctttatatatcttgtggaaaggacgaggcggccgagcggtagggcgccgg

SEQ ID NO: 2326 - DNA, 812 bp, Homo sapiens
  source 1..812: mol_type = genomic DNA
accgccaccatgtttgacgacttctcagaaggcagagagtgtgtcaactgtggggctatgtccaccccgctctggaggcgagatgggacgggtcactatctgtgcaacgcctgcggcctctaccacaagatgaacggcatcaaccggccgctcatcaagcctcagcgccggctgtccgcctcccgccgagtgggcctctcctgtgccaactgccagaccaccaccaccacgctgtggcgccgcaatgcggagggcgagcctgtgtgcaatgcctgcggcctctacatgaagctccacggggtccccaggcctcttgcaatgcggaaagaggggatccaaaccagaaaacggaagcccaagaacctgaataaatctaagacaccagcagctccttcaggcagtgagagccttcctcccgccagcggtgcttccagcaactccagcaacgccaccaccagcagcagcgaggagatgcgtcccatcaagacggagcctggcctgtcatctcactacgggcacagcagctccgtgtcccagacgttctcagtcagtgcgatgtctggccatgggccctccatccaccctgtcctctcggccctgaagctctccccacaaggctatgcgtctcccgtcagccagtctccacagaccagctccaagcaggactcttggaacagcctggtcttggccgacagtcacggggacataatcactgcgtagtaatgaactagtccgtaacttgaaagtatttcgatttcttggctttatatatcttgtggaaaggacgacgaacaagcgctcctggcatagtg

SEQ ID NO: 2327 - DNA, 1433 bp, Homo sapiens
  source 1..1433: mol_type = genomic DNA
accgccaccatgtatcagagcttggccatggccgccaaccacgggccgccccccggtgcctacgaggcgggcggccccggcgccttcatgcacggcgcgggcgccgcgtcctcgccagtctacgtgcccacaccgcgggtgccctcctccgtgctgggcctgtcctacctccagggcggaggcgcgggctctgcgtccggaggcgcctcgggcggcagctccggtggggccgcgtctggtgcggggcccgggacccagcagggcagcccgggatggagccaggcgggagccgacggagccgcttacaccccgccgccggtgtcgccgcgcttctccttcccggggaccaccgggtccctggcggccgccgccgccgctgccgcggcccgggaagctgcggcctacagcagtggcggcggagcggcgggtgcgggcctggcgggccgcgagcagtacgggcgcgccggcttcgcgggctcctactccagcccctacccggcttacatggccgacgtgggcgcgtcctgggccgcagccgccgccgcctccgccggccccttcgacagcccggtcctgcacagcctgcccggccgggccaacccggccgcccgacaccccaatctcgtagatatgtttgacgacttctcagaaggcagagagtgtgtcaactgtggggctatgtccaccccgctctggaggcgagatgggacgggtcactatctgtgcaacgcctgcggcctctaccacaagatgaacggcatcaaccggccgctcatcaagcctcagcgccggctgtccgcctcccgccgagtgggcctctcctgtgccaactgccagaccaccaccaccacgctgtggcgccgcaatgcggagggcgagcctgtgtgcaatgcctgcggcctctacatgaagctccacggggtccccaggcctcttgcaatgcggaaagaggggatccaaaccagaaaacggaagcccaagaacctgaataaatctaagacaccagcagctccttcaggcagtgagagccttcctcccgccagcggtgcttccagcaactccagcaacgccaccaccagcagcagcgaggagatgcgtcccatcaagacggagcctggcctgtcatctcactacgggcacagcagctccgtgtcccagacgttctcagtcagtgcgatgtctggccatgggccctccatccaccctgtcctctcggccctgaagctctccccacaaggctatgcgtctcccgtcagccagtctccacagaccagctccaagcaggactcttggaacagcctggtcttggccgacagtcacggggacataatcactgcgtagtaatgaactagtccgtaacttgaaagtatttcgatttcttggctttatatatcttgtggaaaggacgaaactgtgggtgctgagtcaatacc

SEQ ID NO: 2328 - DNA, 1430 bp, Homo sapiens
  source 1..1430: mol_type = genomic DNA
accgccaccatgtatcagagcttggccatggccgccaaccacgggccgccccccggtgcctacgaggcgggcggccccggcgccttcatgcacggcgcgggcgccgcgtcctcgccagtctacgtgcccacaccgcgggtgccctcctccgtgctgggcctgtcctacctccagggcggaggcgcgggctctgcgtccggaggcgcctcgggcggcagctccggtggggccgcgtctggtgcggggcccgggacccagcagggcagcccgggatggagccaggcgggagccgacggagccgcttacaccccgccgccggtgtcgccgcgcttctccttcccggggaccaccgggtccctggcggccgccgccgccgctgccgcggcccgggaagctgcggcctacagcagtggcggcggagcggcgggtgcgggcctggcgggccgcgagcagtacgggcgcgccggcttcgcgggctcctactccagcccctacccggcttacatggccgacgtgggcgcgtcctgggccgcagccgccgccgcctccgccggccccttcgacagcccggtcctgcacagcctgcccggccgggccaacccggccgcccgacaccccaatctcgatatgtttgacgacttctcagaaggcagagagtgtgtcaactgtggggctatgtccaccccgctctggaggcgagatgggacgggtcactatctgtgcaacgcctgcggcctctaccacaagatgaacggcatcaaccggccgctcatcaagcctcagcgccggctgtccgcctcccgccgagtgggcctctcctgtgccaactgccagaccaccaccaccacgctgtggcgccgcaatgcggagggcgagcctgtgtgcaatgcctgcggcctctacatgaagctccacggggtccccaggcctcttgcaatgcggaaagaggggatccaaaccagaaaacggaagcccaagaacctgaataaatctaagacaccagcagctccttcaggcagtgagagccttcctcccgccagcggtgcttccagcaactccagcaacgccaccaccagcagcagcgaggagatgcgtcccatcaagacggagcctggcctgtcatctcactacgggcacagcagctccgtgtcccagacgttctcagtcagtgcgatgtctggccatgggccctccatccaccctgtcctctcggccctgaagctctccccacaaggctatgcgtctcccgtcagccagtctccacagaccagctccaagcaggactcttggaacagcctggtcttggccgacagtcacggggacataatcactgcgtagtaatgaactagtccgtaacttgaaagtatttcgatttcttggctttatatatcttgtggaaaggacgaacccggaatctatgaactagggtt

SEQ ID NO: 2329 - DNA, 1295 bp, Homo sapiens
  source 1..1295: mol_type = genomic DNA
accgccaccatgtaccagagcctggcgctggccgcgagcccccgccaggccgcctacgccgactcgggctccttcctgcacgctccgggcgccggctctccgatgtttgtgccgccggcgcgcgtcccctcgatgctgtcctacctgtccgggtgtgagccgagcccgcagccccccgagctcgctgcgcgccccggctgggcgcagacagccaccgcggattcgtcggccttcggcccgggcagtccgcaccccccagccgcgcacccgcccggggccaccgccttccctttcgcgcacagcccctcggggcccggcagcggcggcagcgcggggggccgagacggcagtgcctaccagggcgcgctgttgcctcgagaacagttcgcggccccgcttgggcggccggtggggacctcgtactccgccacctacccggcctacgtgagccccgacgtggcccagtcctggactgccgggcccttcgatggcagcgtcctgcacggcctcccaggccgcaggcccaccttcgtgtccgacttcttggaggagttcccgggtgagggtcgtgagtgtgtcaactgcggggccctgtccacaccgctgtggcgccgagacggcaccggccactacctgtgcaatgcctgcggcctctaccacaagatgaatggcgtcaaccggccgctcgttcggcctcagaagcgcctgtcctcgtcccgccgcgccggcctctgctgcaccaactgccacacgaccaacaccacgctgtggcggcggaactcggagggggagcccgtgtgcaatgcctgcggcctctacatgaagctgcacggggtgccgcggcctctggctatgaagaaggaaagcatccagacacggaagcggaagccaaagaccatcgccaaggccaggggctcctcaggatccacaaggaatgcctcggcctccccatctgctgtcgccagcactgacagctcagcagccacttcgaaagccaagcccagcctggcgtccccagtgtgccctgggcccagcatggccccccaggcctctggccaggaggatgactctcttgcccccggccacttggagttcaagttcgagcctgaggactttgccttcccctccacggccccaagcccccaggctggcctcaggggggctctgcgccaagaggcctggtgtgcgctggccttggcctagtaatgaactagtccgtaacttgaaagtatttcgatttcttggctttatatatcttgtggaaaggacgagaacatgacaatggatataaacga

SEQ ID NO: 2330 - DNA, 1433 bp, Homo sapiens
  source 1..1433: mol_type = genomic DNA
accgccaccatggaggtgacggcggaccagccgcgctgggtgagccaccaccaccccgccgtgctcaacgggcagcacccggacacgcaccacccgggcctcagccactcctacatggacgcggcgcagtacccgctgccggaggaggtggatgtgctttttaacatcgacggtcaaggcaaccacgtcccgccctactacggaaactcggtcagggccacggtgcagaggtaccctccgacccaccacgggagccaggtgtgccgcccgcctctgcttcatggatccctaccctggctggacggcggcaaagccctgggcagccaccacaccgcctccccctggaatctcagccccttctccaagacgtccatccaccacggctccccggggcccctctccgtctaccccccggcctcgtcctcctccttgtcggggggccacgccagcccgcacctcttcaccttcccgcccaccccgccgaaggacgtctccccggacccatcgctgtccaccccaggctcggccggctcggcccggcaggacgagaaagagtgcctcaagtaccaggtgcccctgcccgacagcatgaagctggagtcgtcccactcccgtggcagcatgaccgccctgggtggagcctcctcgtcgacccaccaccccatcaccacctacccgccctacgtgcccgagtacagctccggactcttcccccccagcagcctgctgggcggctcccccaccggcttcggatgcaagtccaggcccaaggcccggtccagcacaggcagggagtgtgtgaactgtggggcaacctcgaccccactgtggcggcgagatggcacgggacactacctgtgcaacgcctgcgggctctatcacaaaatgaacggacagaaccggcccctcattaagcccaagcgaaggctgtctgcagccaggagagcagggacgtcctgtgcgaactgtcagaccaccacaaccacactctggaggaggaatgccaatggggaccctgtctgcaatgcctgtgggctctactacaagcttcacaatattaacagacccctgactatgaagaaggaaggcatccagaccagaaaccgaaaaatgtctagcaaatccaaaaagtgcaaaaaagtgcatgactcactggaggacttccccaagaacagctcgtttaacccggccgccctctccagacacatgtcctccctgagccacatctcgcccttcagccactccagccacatgctgaccacgcccacgccgatgcacccgccatccagcctgtcctttggaccacaccacccctccagcatggtcaccgccatgggttagtaatgaactagtccgtaacttgaaagtatttcgatttcttggctttatatatcttgtggaaaggacgaatagtagtaccattggcggttgat

SEQ ID NO: 2331 - DNA, 1436 bp, Homo sapiens
  source 1..1436: mol_type = genomic DNA
accgccaccatggaggtgacggcggaccagccgcgctgggtgagccaccaccaccccgccgtgctcaacgggcagcacccggacacgcaccacccgggcctcagccactcctacatggacgcggcgcagtacccgctgccggaggaggtggatgtgctttttaacatcgacggtcaaggcaaccacgtcccgccctactacggaaactcggtcagggccacggtgcagaggtaccctccgacccaccacgggagccaggtgtgccgcccgcctctgcttcatggatccctaccctggctggacggcggcaaagccctgggcagccaccacaccgcctccccctggaatctcagccccttctccaagacgtccatccaccacggctccccggggcccctctccgtctaccccccggcctcgtcctcctccttgtcggggggccacgccagcccgcacctcttcaccttcccgcccaccccgccgaaggacgtctccccggacccatcgctgtccaccccaggctcggccggctcggcccggcaggacgagaaagagtgcctcaagtaccaggtgcccctgcccgacagcatgaagctggagtcgtcccactcccgtggcagcatgaccgccctgggtggagcctcctcgtcgacccaccaccccatcaccacctacccgccctacgtgcccgagtacagctccggactcttcccccccagcagcctgctgggcggctcccccaccggcttcggatgcaagtccaggcccaaggcccggtccagcacagaaggcagggagtgtgtgaactgtggggcaacctcgaccccactgtggcggcgagatggcacgggacactacctgtgcaacgcctgcgggctctatcacaaaatgaacggacagaaccggcccctcattaagcccaagcgaaggctgtctgcagccaggagagcagggacgtcctgtgcgaactgtcagaccaccacaaccacactctggaggaggaatgccaatggggaccctgtctgcaatgcctgtgggctctactacaagcttcacaatattaacagacccctgactatgaagaaggaaggcatccagaccagaaaccgaaaaatgtctagcaaatccaaaaagtgcaaaaaagtgcatgactcactggaggacttccccaagaacagctcgtttaacccggccgccctctccagacacatgtcctccctgagccacatctcgcccttcagccactccagccacatgctgaccacgcccacgccgatgcacccgccatccagcctgtcctttggaccacaccacccctccagcatggtcaccgccatgggttagtaatgaactagtccgtaacttgaaagtatttcgatttcttggctttatatatcttgtggaaaggacgaaccatttgtttggcggaaacgccg

SEQ ID NO: 2332 - DNA, 1343 bp, Homo sapiens
  source 1..1343: mol_type = genomic DNA
accgccaccatggagttccctggcctggggtccctggggacctcagagcccctcccccagtttgtggatcctgctctggtgtcctccacaccagaatcaggggttttcttcccctctgggcctgagggcttggatgcagcagcttcctccactgccccgagcacagccaccgctgcagctgcggcactggcctactacagggacgctgaggcctacagacactccccagtctttcaggtgtacccattgctcaactgtatggaggggatcccagggggctcaccatatgccggctgggcctacggcaagacggggctctaccctgcctcaactgtgtgtcccacccgcgaggactctcctccccaggccgtggaagatctggatggaaaaggcagcaccagcttcctggagactttgaagacagagcggctgagcccagacctcctgaccctgggacctgcactgccttcatcactccctgtccccaatagtgcttatgggggccctgacttttccagtaccttcttttctcccaccgggagccccctcaattcagcagcctattcctctcccaagcttcgtggaactctccccctgcctccctgtgaggccagggagtgtgtgaactgcggagcaacagccactccactgtggcggagggacaggacaggccactacctatgcaacgcctgcggcctctatcacaagatgaatgggcagaacaggcccctcatccggcccaagaagcgcctgattgtcagtaaacgggcaggtactcagtgcaccaactgccagacgaccaccacgacactgtggcggagaaatgccagtggggatcccgtgtgcaatgcctgcggcctctactacaagctacaccaggtgaaccggccactgaccatgcggaaggatggtattcagactcgaaaccgcaaggcatctggaaaagggaaaaagaaacggggctccagtctgggaggcacaggagcagccgaaggaccagctggtggctttatggtggtggctgggggcagcggtagcgggaattgtggggaggtggcttcaggcctgacactgggccccccaggtactgcccatctctaccaaggcctgggccctgtggtgctgtcagggcctgttagccacctcatgcctttccctggacccctactgggctcacccacgggctccttccccacaggccccatgccccccaccaccagcactactgtggtggctccgctcagctcatagtaatgaactagtccgtaacttgaaagtatttcgatttcttggctttatatatcttgtggaaaggacgagtatcagaacttgccgctctcgtg

SEQ ID NO: 2333 - DNA, 560 bp, Homo sapiens
  source 1..560: mol_type = genomic DNA
accgccaccatgtcggttccaggaccttaccaggcggccactgggccttcctcagcaccatccgcacctccatcctatgaagagacagtggctgttaacagttattaccccacacctccagctcccatgcctgggccaactacggggcttgtgacggggcctgatgggaagggcatgaatcctccttcgtattatacccagccagcgcccatccccaataacaatccaattaccgtgcagacggtctacgtgcagcaccccatcacctttttggaccgccctatccaaatgtgttgtccttcctgcaacaagatgatcgtgagtcagctgtcctataacgccggtgctctgacctggctgtcctgcgggagcctgtgcctgctggggcaggagtgcagtggtacgatcgtagctctccgcagctttgatctcctgggctcctgcaatccgcccagctcagcctcctagtaatgaactagtccgtaacttgaaagtatttcgatttcttggctttatatatcttgtggaaaggacgaggtctcgggaagatcttcgaagac

SEQ ID NO: 2334 - DNA, 701 bp, Homo sapiens
  source 1..701: mol_type = genomic DNA
accgccaccatggcgttcgcgctgctgcggcccgtcggcgcgcacgtgctgtacccggacgtgcggctgctgagcgaggacgaggagaaccgcagcgagagcgacgcgtcggaccagtcgttcggctgctgcgagggcccggaggcggcgcggcgcggcccgggccccgggggcgggcggcgggcgggcggcggcggcggcgcgggccccgtggtggtggtgcgacagcggcaggcggccaacgcgcgggagcgggaccgcactcagagcgtgaacacggccttcacggcgctgcgcacgctcatccccaccgagccggtggaccgcaagctgtccaagatcgagaccgtgcgcctggcgtccagctacatcgcgcacctggccaacgtgctgctgctgggcgactcggccgacgacgggcagccgtgcttccgtgccgcgggcagtgccaagggcgccgtccccgccgccgccgacggcggccgccagccgcgctccatctgcaccttctgcctcagcaaccagcgcaaggggggtggccgtcgtgacctggggggcagctgcttgaaggtgaggggggtggccccccttcgagggccacggagatagtaatgaactagtccgtaacttgaaagtatttcgatttcttggctttatatatcttgtggaaaggacgatcataatcctgcgcaatgaagtcg

SEQ ID NO: 2335 - DNA, 1712 bp, Homo sapiens
  source 1..1712: mol_type = genomic DNA
accgccaccatgtattgtgcttatcctgtccctggaatgggcagcaattctttgatgtattactacaatgggaaaacggtatatgcaccatccccaaattcagatgatttcaaccgtgaatctcctagttatccatctcctaagccaccaaccagtatgttcgctagcactttctttatgcaagatgggacccacaattcttctgacctttggagttcatcaaatgggatgagccagcctggttttggtggaattctggggacctccacttcccacatgtctcaatccagtagttatggcaaccttcattcacatgaccgcttgagttatcctccacactcagtttcaccaacagacataaacacgagtcttccaccaatgtccagctttcatcgcggcagtaccagcagttcaccttacgttgctgcctcacacactcctcccatcaatggatcagacagcattctaggaaccagagggaatgctgctggaagctcacagacaggtgatgcacttggaaaggctttggcatctatttattctcctgaccataccagcagtagttttccgtcaaatccatcaacaccagttggatcaccttcacctctcacaggtaccagtcagtggccaagacctggagggcaagcaccttcatccccaagctatgaaaactcactccactccctgaaaaatcgagttgagcagcaacttcacgagcatttgcaagatgcaatgtccttcttaaaggatgtctgtgagcagtctcgaatggaggatcgtttagacagactggatgatgcaatccatgtgctgcggaaccatgctgtgggaccttccaccagtttgcctgctggtcacagtgatatacatagtttattgggaccatcccataatgcaccaattggaagcctcaattcaaactatggaggatcaagccttgttgcaagcagtcgatcagcttcaatggttggaactcatcgggaagactctgtcagtctcaatggcaatcattcagtcctgtctagtacagtcactacttcaagcacagacctgaaccataaaacacaagaaaattatagaggtggcttgcaaagtcagtctggaactgttgttacaacagaaatcaagactgaaaacaaagaaaaggatgaaaaccttcatgaacctccttcatcagatgacatgaagtcagatgatgaatcctcccaaaaagatatcaaggtttcatctagaggcagaacaagcagtactaatgaagatgaggatttgaaccctgaacagaagatagaaagggagaaggagaggcggatggctaacaatgccagagaacgcttacgcgtgcgggatattaatgaagcattcaaagagcttggccgaatgtgtcagcttcacttgaagagtgaaaaaccccaaacaaaactccttattcttcatcaagccgtggcagtcatccttagtctagaacagcaagtcagagagaggaaccttaaccccaaagcagcctgccttaagagaagggaagaagaaaaagtttctgccgtatcggcagagccgccaaccacactgccaggaacccatcctgggcttagtgaaactaccaaccctatgggtcatatgtagtaatgaactagtccgtaacttgaaagtatttcgatttcttggctttatatatcttgtggaaaggacgattgttggtagatcctagtgcgata

SEQ ID NO: 2336 - DNA, 1640 bp, Homo sapiens
  source 1..1640: mol_type = genomic DNA
accgccaccatgtattgtgcttatcctgtccctggaatgggcagcaattctttgatgtattactacaatgggaaaacggtatatgcaccatccccaaattcagatgatttcaaccgtgaatctcctagttatccatctcctaagccaccaaccagtatgttcgctagcactttctttatgcaagatgggacccacaattcttctgacctttggagttcatcaaatgggatgagccagcctggttttggtggaattctggggacctccacttcccacatgtctcaatccagtagttatggcaaccttcattcacatgaccgcttgagttatcctccacactcagtttcaccaacagacataaacacgagtcttccaccaatgtccagctttcatcgcggcagtaccagcagttcaccttacgttgctgcctcacacactcctcccatcaatggatcagacagcattctaggaaccagagggaatgctgctggaagctcacagacaggtgatgcacttggaaaggctttggcatctatttattctcctgaccataccagcagtagttttccgtcaaatccatcaacaccagttggatcaccttcacctctcacaggtaccagtcagtggccaagacctggagggcaagcaccttcatccccaagctatgaaaactcactccactccctgcagtctcgaatggaggatcgtttagacagactggatgatgcaatccatgtgctgcggaaccatgctgtgggaccttccaccagtttgcctgctggtcacagtgatatacatagtttattgggaccatcccataatgcaccaattggaagcctcaattcaaactatggaggatcaagccttgttgcaagcagtcgatcagcttcaatggttggaactcatcgggaagactctgtcagtctcaatggcaatcattcagtcctgtctagtacagtcactacttcaagcacagacctgaaccataaaacacaagaaaattatagaggtggcttgcaaagtcagtctggaactgttgttacaacagaaatcaagactgaaaacaaagaaaaggatgaaaaccttcatgaacctccttcatcagatgacatgaagtcagatgatgaatcctcccaaaaagatatcaaggtttcatctagaggcagaacaagcagtactaatgaagatgaggatttgaaccctgaacagaagatagaaagggagaaggagaggcggatggctaacaatgccagagaacgcttacgcgtgcgggatattaatgaagcattcaaagagcttggccgaatgtgtcagcttcacttgaagagtgaaaaaccccaaacaaaactccttattcttcatcaagccgtggcagtcatccttagtctagaacagcaagtcagagagaggaaccttaaccccaaagcagcctgccttaagagaagggaagaagaaaaagtttctgccgtatcggcagagccgccaaccacactgccaggaacccatcctgggcttagtgaaactaccaaccctatgggtcatatgtagtaatgaactagtccgtaacttgaaagtatttcgatttcttggctttatatatcttgtggaaaggacgaagtggtcggaggtaccgtcaagct

SEQ ID NO: 2337 - DNA, 2150 bp, Homo sapiens
  source 1..2150: mol_type = genomic DNA
accgccaccatgaatccccagcaacaacgcatggccgctatagggaccgacaaggagctgagcgacctactggacttcagtgcgatgttttccccacctgttaatagtgggaaaactagaccaactacactgggaagcagtcaattcagtggatcaggtattgatgaaagaggaggtacaacatcttggggaacaagtggtcaaccaagtccttcctatgattcatctagaggttttacagacagccctcattacagtgatcacttgaatgacagtcgattaggagcccatgaaggcttgtccccaacacctttcatgaactcaaatctgatgggaaaaacatcagagagaggctcattttccctgtacagcagagatactggattaccaggctgtcaatctagtctcctgagacaagatctggggcttgggagcccagcacagctatcttcttcaggaaaacctgggacagcatactattcattctctgctacaagttccaggaggagaccactccatgactctgcagcgcttgatcccttgcaagcaaaaaaagtcagaaaggtgcctcctggtttgccttcttctgtatatgcaccatccccaaattcagatgatttcaaccgtgaatctcctagttatccatctcctaagccaccaaccagtatgttcgctagcactttctttatgcaagatgggacccacaattcttctgacctttggagttcatcaaatgggatgagccagcctggttttggtggaattctggggacctccacttcccacatgtctcaatccagtagttatggcaaccttcattcacatgaccgcttgagttatcctccacactcagtttcaccaacagacataaacacgagtcttccaccaatgtccagctttcatcgcggcagtaccagcagttcaccttacgttgctgcctcacacactcctcccatcaatggatcagacagcattctaggaaccagagggaatgctgctggaagctcacagacaggtgatgcacttggaaaggctttggcatctatttattctcctgaccataccagcagtagttttccgtcaaatccatcaacaccagttggatcaccttcacctctcacaggtaccagtcagtggccaagacctggagggcaagcaccttcatccccaagctatgaaaactcactccactccctgcagtctcgaatggaggatcgtttagacagactggatgatgcaatccatgtgctgcggaaccatgctgtgggaccttccaccagtttgcctgctggtcacagtgatatacatagtttattgggaccatcccataatgcaccaattggaagcctcaattcaaactatggaggatcaagccttgttgcaagcagtcgatcagcttcaatggttggaactcatcgggaagactctgtcagtctcaatggcaatcattcagtcctgtctagtacagtcactacttcaagcacagacctgaaccataaaacacaagaaaattatagaggtggcttgcaaagtcagtctggaactgttgttacaacagaaatcaagactgaaaacaaagaaaaggatgaaaaccttcatgaacctccttcatcagatgacatgaagtcagatgatgaatcctcccaaaaagatatcaaggtttcatctagaggcagaacaagcagtactaatgaagatgaggatttgaaccctgaacagaagatagaaagggagaaggagaggcggatggctaacaatgccagagaacgcttacgcgtgcgggatattaatgaagcattcaaagagcttggccgaatgtgtcagcttcacttgaagagtgaaaaaccccaaacaaaactccttattcttcatcaagccgtggcagtcatccttagtctagaacagcaagtcagagagaggaaccttaaccccaaagcagcctgccttaagagaagggaagaagaaaaagtttctgccgtatcggcagagccgccaaccacactgccaggaacccatcctgggcttagtgaaactaccaaccctatgggtcatatgtagtaatgaactagtccgtaacttgaaagtatttcgatttcttggctttatatatcttgtggaaaggacgagtgctttccaggatgggcttcgtg

SEQ ID NO: 2338 - DNA, 1442 bp, Homo sapiens
  source 1..1442: mol_type = genomic DNA
accgccaccatgggaaaacggtatatgcaccatccccaaattcagatgatttcaaccgtgaatctcctagttatccatctcctaagccaccaaccagtatgttcgctagcactttctttatgcaagagttatcctccacactcagtttcaccaacagacataaacacgagtcttccaccaatgtccagctttcatcgcggcagtaccagcagttcaccttacgttgctgcctcacacactcctcccatcaatggatcagacagcattctaggaaccagagggaatgctgctggaagctcacagacaggtgatgcacttggaaaggctttggcatctatttattctcctgaccataccagcagtagttttccgtcaaatccatcaacaccagttggatcaccttcacctctcacaggtaccagtcagtggccaagacctggagggcaagcaccttcatccccaagctatgaaaactcactccactccctgcagtctcgaatggaggatcgtttagacagactggatgatgcaatccatgtgctgcggaaccatgctgtgggaccttccaccagtttgcctgctggtcacagtgatatacatagtttattgggaccatcccataatgcaccaattggaagcctcaattcaaactatggaggatcaagccttgttgcaagcagtcgatcagcttcaatggttggaactcatcgggaagactctgtcagtctcaatggcaatcattcagtcctgtctagtacagtcactacttcaagcacagacctgaaccataaaacacaagaaaattatagaggtggcttgcaaagtcagtctggaactgttgttacaacagaaatcaagactgaaaacaaagaaaaggatgaaaaccttcatgaacctccttcatcagatgacatgaagtcagatgatgaatcctcccaaaaagatatcaaggtttcatctagaggcagaacaagcagtactaatgaagatgaggatttgaaccctgaacagaagatagaaagggagaaggagaggcggatggctaacaatgccagagaacgcttacgcgtgcgggatattaatgaagcattcaaagagcttggccgaatgtgtcagcttcacttgaagagtgaaaaaccccaaacaaaactccttattcttcatcaagccgtggcagtcatccttagtctagaacagcaagtcagagagaggaaccttaaccccaaagcagcctgccttaagagaagggaagaagaaaaagtttctgccgtatcggcagagccgccaaccacactgccaggaacccatcctgggcttagtgaaactaccaaccctatgggtcatatgtagtaatgaactagtccgtaacttgaaagtatttcgatttcttggctttatatatcttgtggaaaggacgacctcccaaagattgcaattattac

SEQ ID NO: 2339 - DNA, 2222 bp, Homo sapiens
  source 1..2222: mol_type = genomic DNA
accgccaccatgaatccccagcaacaacgcatggccgctatagggaccgacaaggagctgagcgacctactggacttcagtgcgatgttttccccacctgttaatagtgggaaaactagaccaactacactgggaagcagtcaattcagtggatcaggtattgatgaaagaggaggtacaacatcttggggaacaagtggtcaaccaagtccttcctatgattcatctagaggttttacagacagccctcattacagtgatcacttgaatgacagtcgattaggagcccatgaaggcttgtccccaacacctttcatgaactcaaatctgatgggaaaaacatcagagagaggctcattttccctgtacagcagagatactggattaccaggctgtcaatctagtctcctgagacaagatctggggcttgggagcccagcacagctatcttcttcaggaaaacctgggacagcatactattcattctctgctacaagttccaggaggagaccactccatgactctgcagcgcttgatcccttgcaagcaaaaaaagtcagaaaggtgcctcctggtttgccttcttctgtatatgcaccatccccaaattcagatgatttcaaccgtgaatctcctagttatccatctcctaagccaccaaccagtatgttcgctagcactttctttatgcaagatgggacccacaattcttctgacctttggagttcatcaaatgggatgagccagcctggttttggtggaattctggggacctccacttcccacatgtctcaatccagtagttatggcaaccttcattcacatgaccgcttgagttatcctccacactcagtttcaccaacagacataaacacgagtcttccaccaatgtccagctttcatcgcggcagtaccagcagttcaccttacgttgctgcctcacacactcctcccatcaatggatcagacagcattctaggaaccagagggaatgctgctggaagctcacagacaggtgatgcacttggaaaggctttggcatctatttattctcctgaccataccagcagtagttttccgtcaaatccatcaacaccagttggatcaccttcacctctcacaggtaccagtcagtggccaagacctggagggcaagcaccttcatccccaagctatgaaaactcactccactccctgaaaaatcgagttgagcagcaacttcacgagcatttgcaagatgcaatgtccttcttaaaggatgtctgtgagcagtctcgaatggaggatcgtttagacagactggatgatgcaatccatgtgctgcggaaccatgctgtgggaccttccaccagtttgcctgctggtcacagtgatatacatagtttattgggaccatcccataatgcaccaattggaagcctcaattcaaactatggaggatcaagccttgttgcaagcagtcgatcagcttcaatggttggaactcatcgggaagactctgtcagtctcaatggcaatcattcagtcctgtctagtacagtcactacttcaagcacagacctgaaccataaaacacaagaaaattatagaggtggcttgcaaagtcagtctggaactgttgttacaacagaaatcaagactgaaaacaaagaaaaggatgaaaaccttcatgaacctccttcatcagatgacatgaagtcagatgatgaatcctcccaaaaagatatcaaggtttcatctagaggcagaacaagcagtactaatgaagatgaggatttgaaccctgaacagaagatagaaagggagaaggagaggcggatggctaacaatgccagagaacgcttacgcgtgcgggatattaatgaagcattcaaagagcttggccgaatgtgtcagcttcacttgaagagtgaaaaaccccaaacaaaactccttattcttcatcaagccgtggcagtcatccttagtctagaacagcaagtcagagagaggaaccttaaccccaaagcagcctgccttaagagaagggaagaagaaaaagtttctgccgtatcggcagagccgccaaccacactgccaggaacccatcctgggcttagtgaaactaccaaccctatgggtcatatgtagtaatgaactagtccgtaacttgaaagtatttcgatttcttggctttatatatcttgtggaaaggacgattgtcagggatcaaccggcaacta

SEQ ID NO: 2340 - DNA, 1139 bp, Homo sapiens
  source 1..1139: mol_type = genomic DNA
accgccaccatgctgccctgcttccaactgctgcgcatagggggcggcaggggcggtgatctctacaccttccacccccccgccggggctggctgcacctatcgcttgggccacagggccgacctgtgtgatgtggccctgcggccccagcaggagcctggcctcatctctgggatccacgccgaactgcatgccgagccccggggtgatgactggagggtcagcctggaagaccacagcagccaaggtactttggtcaataatgtccgactcccaagaggtcacaggctggaattgagtgatggagacctcctgacctttggccctgaagggcccccaggaaccagcccctcggagttctacttcatgttccaacaagtacgagtcaagcctcaggactttgctgccattaccatcccacggtctaggggagaagcccgggttggggctggtttccggcctatgctgccctcccagggggctccacagcggcctctcagcaccttctcccctgcccccaaggccacactgatcctaaactccataggcagcctcagcaagctccggccccagcccctcaccttctcccctagttggggtggaccaaagagcctgcctgttcccgccccacctggggaaatggggaccacgccttctgctccaccacaacgcaatcggaggaaatctgttcaccgagtgttggcggaactggatgatgagagtgagcctcctgagaacccgccaccggtccttatggagcccaggaagaaactccgtgtagacaaagccccactgactcccactggaaatcgacgtggccgtcctcggaagtacccagtgagcgctcccatggctccccctgcagttgggggcggggagccctgtgcagctccttgttgctgcctgccccaggaagagacagtggcctgggttcagtgtgatggctgtgacgtctggttccatgtggcctgtgttggctgcagcatccaggctgccagggaggccgacttccgatgcccagggtgccgggctggcattcagacctagtaatgaactagtccgtaacttgaaagtatttcgatttcttggctttatatatcttgtggaaaggacgaagtggataccggccgaaatattat

SEQ ID NO: 2341 - DNA, 2075 bp, Homo sapiens
  source 1..2075: mol_type = genomic DNA
accgccaccatgattgagtcccaggaaccagtgacatttgaggatgtggctgtggacttcacgcaggaagagtggcagcagttgaatcctgctcagaagaccctgcatagggatgtgatgctggagacctataatcacctggtctccgtggggtgttcaggtataaaaccagatgtaatctttaagttggaacatggaaaggacccatggatcatagagagtgagttgtcaaggtggatctacccagacagagtgaaaggccttgaatcttcccagcagatcatttctggagaacttttatttcaaagggagatactagaaagagccccaaaggataattcattgtactctgttttaaaaatctggcatattgataatcagatggatagatatcaaggaaatcaagacagagttttgaggcaggtcacagtcatcagtcgtgaaacattgactgatgagatgggttccaagtacagtgcatttgggaaaatgttcaatcggtgcacagaccttgctcctttaagtcaaaaattccataagtttgattcatgtgaaaatagcttgaagtctaattcagacttactaaattataacaggagctatgcaagaaagaaccccactaagagatttagatgtgggagaccacctaagtataatgcttcctgttctgtgcctgagaaggaaggcttcattcatactggaatggagccctatggagatagtcaatgtgaaaaagttctcagtcataagcaagcccatgttcagtataagaaatttcaagccagagagaaacccaatgtttgtagtatgtgtgggaaagcctttatcaagaagtcacagctcattatacatcaaagaattcatactggagagaaaccatatgtatgtggagattgtaggaaagccttcagtgagaaatcacacctcattgtgcatcagaggattcatactggggagaaaccctatgaatgtactaagtatggaagagcattctcccggaagtcacctttcactgttcatcagagagtccatactggagagaaaccctatgagtgttttgagtgtccaaaagctttctcccagaagtcacatctaattatacatcagagagttcataccagagagaagccctttgaatgcagtgaatgcaggaaagccttctgtgagatgtctcacctttttatacaccagataactcatactgggaagaagccctatgaatgtactgaatgtgggaagaccttccctcggaaaacacagctcattatacatcagagaacgcatactggagagaagccctataagtgtggtgaatgtgggaaaactttctgccaacagtcccacctcataggacatcaaagaattcatacaggagaaaaaccttatgtgtgtactgactgtgggaaggccttttcccagaagtcacacctcactggccatcaaagacttcatactggagagaaaccttatatgtgtactgaatgtggaaaatccttctctcagaaatcacctcttatcatacaccagagaattcatacaggggagaaaccttatcagtgtggtgaatgtggcaaaaccttctcccagaaatcactcctcattattcatctgagagttcacacaggggagaaaccttatgagtgtactgagtgtgggagggccttttccctgaagtcacatctcattctacatcagagaggtcatactggagagaaaccctatgaatgtagtgaatgtggaaaggccttctgtggaaagtctccactcattatacatcagaaaactcatcctagggagaaaacccctgaatgtgctgagtctggaatgacttttttctggaaatcacagatgattacatatcagagaagacacactggggagaaaccctccagatgcagtgactgtgggaaggcattctgccagcatgtatactttactgggcatcagaatccatataggaaagacaccttgtatatatgctagtaatgaactagtccgtaacttgaaagtatttcgatttcttggctttatatatcttgtggaaaggacgaagcccgtaatcttaatcgcaggtg

SEQ ID NO: 2342 - DNA, 1703 bp, Homo sapiens
  source 1..1703: mol_type = genomic DNA
accgccaccatggatagatatcaaggaaatcaagacagagttttgaggcaggtcacagtcatcagtcgtgaaacattgactgatgagatgggttccaagtacagtgcatttgggaaaatgttcaatcggtgcacagaccttgctcctttaagtcaaaaattccataagtttgattcatgtgaaaatagcttgaagtctaattcagacttactaaattataacaggagctatgcaagaaagaaccccactaagagatttagatgtgggagaccacctaagtataatgcttcctgttctgtgcctgagaaggaaggcttcattcatactggaatggagccctatggagatagtcaatgtgaaaaagttctcagtcataagcaagcccatgttcagtataagaaatttcaagccagagagaaacccaatgtttgtagtatgtgtgggaaagcctttatcaagaagtcacagctcattatacatcaaagaattcatactggagagaaaccatatgtatgtggagattgtaggaaagccttcagtgagaaatcacacctcattgtgcatcagaggattcatactggggagaaaccctatgaatgtactaagtatggaagagcattctcccggaagtcacctttcactgttcatcagagagtccatactggagagaaaccctatgagtgttttgagtgtccaaaagctttctcccagaagtcacatctaattatacatcagagagttcataccagagagaagccctttgaatgcagtgaatgcaggaaagccttctgtgagatgtctcacctttttatacaccagataactcatactgggaagaagccctatgaatgtactgaatgtgggaagaccttccctcggaaaacacagctcattatacatcagagaacgcatactggagagaagccctataagtgtggtgaatgtgggaaaactttctgccaacagtcccacctcataggacatcaaagaattcatacaggagaaaaaccttatgtgtgtactgactgtgggaaggccttttcccagaagtcacacctcactggccatcaaagacttcatactggagagaaaccttatatgtgtactgaatgtggaaaatccttctctcagaaatcacctcttatcatacaccagagaattcatacaggggagaaaccttatcagtgtggtgaatgtggcaaaaccttctcccagaaatcactcctcattattcatctgagagttcacacaggggagaaaccttatgagtgtactgagtgtgggagggccttttccctgaagtcacatctcattctacatcagagaggtcatactggagagaaaccctatgaatgtagtgaatgtggaaaggccttctgtggaaagtctccactcattatacatcagaaaactcatcctagggagaaaacccctgaatgtgctgagtctggaatgacttttttctggaaatcacagatgattacatatcagagaagacacactggggagaaaccctccagatgcagtgactgtgggaaggcattctgccagcatgtatactttactgggcatcagaatccatataggaaagacaccttgtatatatgctagtaatgaactagtccgtaacttgaaagtatttcgatttcttggctttatatatcttgtggaaaggacgatgtacacacggtcattacgtttgg

SEQ ID NO: 2343 - DNA, 401 bp, Homo sapiens
  source 1..401: mol_type = genomic DNA
accgccaccatgccgaagagaaagtctccagagaatacagagggcaaagatggatccaaagtaactaaacaggagcccacaagacggtctgccagattgtcagcgaaacctgctccaccaaaacctgaacccaaaccaagaaaaacatctgctaagaaagaacctggagcaaagattagcagaggtgctaaagggaagaaggaggaaaagcaggaagctggaaaggaaggtactgcaccatctgaaaatggtgaaactaaagctgaagaggcacagaaaactgaatctgtagataacgagggagaatagtaatgaactagtccgtaacttgaaagtatttcgatttcttggctttatatatcttgtggaaaggacgatgcatattgtcagatccatcggct

SEQ ID NO: 2344 - DNA, 494 bp, Homo sapiens
  source 1..494: mol_type = genomic DNA
accgccaccatgccgaagagaaagtctccagagaatacagagggcaaagatggatccaaagtaactaaacaggagcccacaagacggtctgccagattgtcagcgaaacctgctccaccaaaacctgaacccaaaccaagaaaaacatctgctaagaaagaacctggagcaaagattagcagaggtgctaaagggaagaaggaggaaaagcaggaagctggaaaggaaggtactgcaccatctgaaaatggtgaaactaaagctgaagagatccacatctctcgctcaactgttaatgtctcaacctccagaggcaccccacccagcacactgtcagtaaaggggcagattgaaacagtgagagcacagaaaactgaatctgtagataacgagggagaatagtaatgaactagtccgtaacttgaaagtatttcgatttcttggctttatatatcttgtggaaaggacgatactatcacggttcggagtggtaa

SEQ ID NO: 2345 - DNA, 1982 bp, Homo sapiens
  source 1..1982: mol_type = genomic DNA
accgccaccatggcagaccagagaatggacatttcttcaaccatcagtgatttcatgtccccgggccccaccgacctgctttccagctctcttggtaccagtggtgtggattgcaaccgcaaacggaaaggcagctccactgactaccaagaaagcatggacacagacaaagatgaccctcatggaaggttagaatatacagaacaccaaggaaggataaaaaatgcaagggaagctcacagtcagattgaaaagcggcgtcgggataaaatgaacagttttatagatgaattggcttctttggtaccaacatgcaacgcaatgtccaggaaattagataaacttactgtgctaaggatggctgttcagcacatgaaaacattaagaggtgccaccaatccatacacagaagcaaactacaaaccaacttttctatcagacgatgaattgaaacacctcattctcagggcagcagatggatttttgtttgtcgtaggatgtgaccgagggaagatactctttgtctcagagtctgtcttcaagatcctcaactacagccagaatgatctgattggtcagagtttgtttgactacctgcatcctaaagatattgccaaagtcaaggagcagctctcctcctctgacaccgcaccccgggagcggctcatagatgcaaaaactggacttccagttaaaacagatataacccctgggccatctcgattatgttctggagcacgacgttctttcttctgtaggatgaagtgtaacaggccttcagtaaaggttgaagacaaggacttcccctctacctgctcaaagaaaaaagcagatcgaaaaagcttctgcacaatccacagcacaggctatttgaaaagctggccacccacaaagatggggctggatgaagacaacgaaccagacaatgaggggtgtaacctcagctgcctcgtcgcaattggacgactgcattctcatgtagttccacaaccagtgaacggggaaatcagggtgaaatctatggaatatgtttctcggcacgcgatagatggaaagtttgtttttgtagaccagagggcaacagctattttggcatatttaccacaagaacttctaggcacatcgtgttatgaatattttcaccaagatgacataggacatcttgcagaatgtcataggcaagttttacagacgagagaaaaaattacaactaattgctataaatttaaaatcaaagatggttcttttatcacactacggagtcgatggttcagtttcatgaacccttggaccaaggaagtagaatatattgtctcaactaacactgttgttttagccaacgtcctggaaggcggggacccaaccttcccacagctcacagcatccccccacagcatggacagcatgctgccctctggagaaggtggcccaaagaggacccaccccactgttccagggattccagggggaacccgggctggggcaggaaaaataggccgaatgattgctgaggaaatcatggaaatccacaggataagagggtcatcgccttctagctgtggctccagcccattgaacatcacgagtacgcctccccctgatgcctcttctccaggaggcaagaagattttaaatggagggactccagacattccttccagtggcctactatcaggccaggctcaggagaacccaggttatccatattctgatagttcttctattcttggtgagaacccccacataggtatagacatgattgacaacgaccaaggatcaagtagtcccagtaatgatgaggcagcaatggctgtcatcatgagcctcttggaagcagatgctggactgggtggccctgttgactttagtgacttgccatggccgctgtagtaatgaactagtccgtaacttgaaagtatttcgatttcttggctttatatatcttgtggaaaggacgactgctaaagttgggctcagctaga

SEQ ID NO: 2346 - DNA, 1853 bp, Homo sapiens
  source 1..1853: mol_type = genomic DNA
accgccaccatgattaatatagaaagcatggacacagacaaagatgaccctcatggaaggttagaatatacagaacaccaaggaaggataaaaaatgcaagggaagctcacagtcagattgaaaagcggcgtcgggataaaatgaacagttttatagatgaattggcttctttggtaccaacatgcaacgcaatgtccaggaaattagataaacttactgtgctaaggatggctgttcagcacatgaaaacattaagaggtgccaccaatccatacacagaagcaaactacaaaccaacttttctatcagacgatgaattgaaacacctcattctcagggcagcagatggatttttgtttgtcgtaggatgtgaccgagggaagatactctttgtctcagagtctgtcttcaagatcctcaactacagccagaatgatctgattggtcagagtttgtttgactacctgcatcctaaagatattgccaaagtcaaggagcagctctcctcctctgacaccgcaccccgggagcggctcatagatgcaaaaactggacttccagttaaaacagatataacccctgggccatctcgattatgttctggagcacgacgttctttcttctgtaggatgaagtgtaacaggccttcagtaaaggttgaagacaaggacttcccctctacctgctcaaagaaaaaagcagatcgaaaaagcttctgcacaatccacagcacaggctatttgaaaagctggccacccacaaagatggggctggatgaagacaacgaaccagacaatgaggggtgtaacctcagctgcctcgtcgcaattggacgactgcattctcatgtagttccacaaccagtgaacggggaaatcagggtgaaatctatggaatatgtttctcggcacgcgatagatggaaagtttgtttttgtagaccagagggcaacagctattttggcatatttaccacaagaacttctaggcacatcgtgttatgaatattttcaccaagatgacataggacatcttgcagaatgtcataggcaagttttacagacgagagaaaaaattacaactaattgctataaatttaaaatcaaagatggttcttttatcacactacggagtcgatggttcagtttcatgaacccttggaccaaggaagtagaatatattgtctcaactaacactgttgttttagccaacgtcctggaaggcggggacccaaccttcccacagctcacagcatccccccacagcatggacagcatgctgccctctggagaaggtggcccaaagaggacccaccccactgttccagggattccagggggaacccgggctggggcaggaaaaataggccgaatgattgctgaggaaatcatggaaatccacaggataagagggtcatcgccttctagctgtggctccagcccattgaacatcacgagtacgcctccccctgatgcctcttctccaggaggcaagaagattttaaatggagggactccagacattccttccagtggcctactatcaggccaggctcaggagaacccaggttatccatattctgatagttcttctattcttggtgagaacccccacataggtatagacatgattgacaacgaccaaggatcaagtagtcccagtaatgatgaggcagcaatggctgtcatcatgagcctcttggaagcagatgctggactgggtggccctgttgactttagtgacttgccatggccgctgtagtaatgaactagtccgtaacttgaaagtatttcgatttcttggctttatatatcttgtggaaaggacgagtagcgatttgatccaacgccaca

SEQ ID NO: 2347 - DNA, 1850 bp, Homo sapiens
  source 1..1850: mol_type = genomic DNA
accgccaccatgattaatatagaaagcatggacacagacaaagatgaccctcatggaaggttagaatatacagaacaccaaggaaggataaaaaatgcaagggaagctcacagtcagattgaaaagcggcgtcgggataaaatgaacagttttatagatgaattggcttctttggtaccaacatgcaacgcaatgtccaggaaattagataaacttactgtgctaaggatggctgttcagcacatgaaaacattaagaggtgccaccaatccatacacagaagcaaactacaaaccaacttttctatcagacgatgaattgaaacacctcattctcagggcagcagatggatttttgtttgtcgtaggatgtgaccgagggaagatactctttgtctcagagtctgtcttcaagatcctcaactacagccagaatgatctgattggtcagagtttgtttgactacctgcatcctaaagatattgccaaagtcaaggagcagctctcctcctctgacaccgcaccccgggagcggctcatagatgcaaaaactggacttccagttaaaacagatataacccctgggccatctcgattatgttctggagcacgacgttctttcttctgtaggatgaagtgtaacaggccttcagtaaaggttgaagacaaggacttcccctctacctgctcaaagaaaaaagatcgaaaaagcttctgcacaatccacagcacaggctatttgaaaagctggccacccacaaagatggggctggatgaagacaacgaaccagacaatgaggggtgtaacctcagctgcctcgtcgcaattggacgactgcattctcatgtagttccacaaccagtgaacggggaaatcagggtgaaatctatggaatatgtttctcggcacgcgatagatggaaagtttgtttttgtagaccagagggcaacagctattttggcatatttaccacaagaacttctaggcacatcgtgttatgaatattttcaccaagatgacataggacatcttgcagaatgtcataggcaagttttacagacgagagaaaaaattacaactaattgctataaatttaaaatcaaagatggttcttttatcacactacggagtcgatggttcagtttcatgaacccttggaccaaggaagtagaatatattgtctcaactaacactgttgttttagccaacgtcctggaaggcggggacccaaccttcccacagctcacagcatccccccacagcatggacagcatgctgccctctggagaaggtggcccaaagaggacccaccccactgttccagggattccagggggaacccgggctggggcaggaaaaataggccgaatgattgctgaggaaatcatggaaatccacaggataagagggtcatcgccttctagctgtggctccagcccattgaacatcacgagtacgcctccccctgatgcctcttctccaggaggcaagaagattttaaatggagggactccagacattccttccagtggcctactatcaggccaggctcaggagaacccaggttatccatattctgatagttcttctattcttggtgagaacccccacataggtatagacatgattgacaacgaccaaggatcaagtagtcccagtaatgatgaggcagcaatggctgtcatcatgagcctcttggaagcagatgctggactgggtggccctgttgactttagtgacttgccatggccgctgtagtaatgaactagtccgtaacttgaaagtatttcgatttcttggctttatatatcttgtggaaaggacgaaaagtgctcgaccggtttggcccg

SEQ ID NO: 2348 - DNA, 1427 bp, Homo sapiens
  source 1..1427: mol_type = genomic DNA
accgccaccatggtgcagcaggcggagagcttggaagcggagagcaacctgccccgggaggcgctggacacggaggagggcgaattcatggcttgcagcccggtggccctggacgagagcgacccagactggtgcaagacggcgtcgggccacatcaagcggccgatgaacgcgttcatggtatggtccaagatcgaacgcaggaagatcatggagcagtctccggacatgcacaacgccgagatctccaagaggctgggcaagcgctggaaaatgctgaaggacagcgagaagatcccgttcatccgggaggcggagcggctgcggctcaagcacatggccgactaccccgactacaagtaccggccccggaaaaagcccaaaatggacccctcggccaagcccagcgccagccagagcccagagaagagcgcggccggcggcggcggcgggagcgcgggcggaggcgcgggcggtgccaagacctccaagggctccagcaagaaatgcggcaagctcaaggcccccgcggccgcgggcgccaaggcgggcgcgggcaaggcggcccagtccggggactacgggggcgcgggcgacgactacgtgctgggcagcctgcgcgtgagcggctcgggcggcggcggcgcgggcaagacggtcaagtgcgtgtttctggatgaggacgacgacgacgacgacgacgacgacgagctgcagctgcagatcaaacaggagccggacgaggaggacgaggaaccaccgcaccagcagctcctgcagccgccggggcagcagccgtcgcagctgctgagacgctacaacgtcgccaaagtgcccgccagccctacgctgagcagctcggcggagtcccccgagggagcgagcctctacgacgaggtgcgggccggcgcgacctcgggcgccgggggcggcagccgcctctactacagcttcaagaacatcaccaagcagcacccgccgccgctcgcgcagcccgcgctgtcgcccgcgtcctcgcgctcggtgtccacctcctcgtccagcagcagcggcagcagcagcggcagcagcggcgaggacgccgacgacctgatgttcgacctgagcttgaatttctctcaaagcgcgcacagcgccagcgagcagcagctggggggcggcgcggcggccgggaacctgtccctgtcgctggtggataaggatttggattcgttcagcgagggcagcctgggctcccacttcgagttccccgactactgcacgccggagctgagcgagatgatcgcgggggactggctggaggcgaacttctccgacctggtgttcacatattagtaatgaactagtccgtaacttgaaagtatttcgatttcttggctttatatatcttgtggaaaggacgatcggacggcgtggtagtatctgac

SEQ ID NO: 2349 - DNA, 1970 bp, Homo sapiens
  source 1..1970: mol_type = genomic DNA
accgccaccatgtccatgaggagccccatctctgcccagctggccctggatggcgttggcaccatggtgaactgcaccatcaagtcagaggagaagaaagagccttgccacgaggccccccagggctcagccactgccgctgaacctcagcctggagacccagcccgggcctcccaggatagtgctgacccccaagctccagcccaggggaatttcaggggctcctgggactgtagctctccagagggtaatgggtccccagaacccaagagaccaggagtgtcggaggctgcctctggaagccaggagaagctggacttcaaccgaaatttgaaagaagtggtgccagccatagagaagctgttgtccagtgactggaaggagaggtttctaggaaggaactctatggaagccaaagatgtcaaagggacccaagagagcctagcagagaaggagctccagcttctggtcatgattcaccagctgtccaccctgcgggaccagctcctgacagcccactcggagcagaagaacatggctgccatgctgtttgagaagcagcagcagcagatggagcttgcccggcagcagcaggagcagattgcaaagcagcagcagcagctgattcagcagcagcataagatcaacctccttcagcagcagatccagcaggttaacatgccttatgtcatgatcccagccttccccccaagccaccaacctctgcctgtcacccctgactcccagctggccttacccattcagcccattccctgcaaaccagtggagtatccgctgcagctgctgcacagcccccctgccccagtggtgaagaggcctggggccatggccacccaccaccccctgcaggagccctcccagcccctgaacctcacagccaagcccaaggcccccgagctgcccaacacctccagctccccaagcctgaagatgagcagctgtgtgccccgcccccccagccatggaggccccacgcgggacctgcagtccagccccccgagcctgcctctgggcttccttggtgaaggggacgctgtcaccaaagccatccaggatgctcggcagctgctgcacagccacagtggggccttggatggctcccccaacacccccttccgtaaggacctcatcagcctggactcatccccagccaaggagcggctggaggacggctgtgtgcacccactggaggaagccatgctgagctgcgacatggatggctcccgccacttccccgagtcccgaaacagcagccacatcaagaggcccatgaacgccttcatggtgtgggccaaggatgagcggaggaagatcctgcaagccttcccagacatgcacaactccagcatcagcaagatccttggatctcgctggaagtccatgaccaaccaggagaagcagccctactatgaggaacaggcgcggctgagccggcagcacctggagaagtatcctgactacaagtacaagccgcggcccaagcgcacctgcatcgtggagggcaagcggctgcgcgtgggagagtacaaggccctgatgaggacccggcgtcaggatgcccgccagagctacgtgatccccccgcaggctggccaggtgcagatgagctcctcagatgtcctgtaccctcgggcagcaggcatgccgctggcacagccactggtggagcactatgtccctcgtagcctggaccccaacatgcctgtgatcgtcaacacctgcagcctcagagaggagggtgagggcacagatgacaggcactcggtggctgatggcgagatgtaccggtacagcgaggacgaggactcggagggcgaagagaagagcgatggggagttggtggtgctcacagactagtaatgaactagtccgtaacttgaaagtatttcgatttcttggctttatatatcttgtggaaaggacgaaggtaggattctagatctctttat

SEQ ID NO: 2350 - DNA, 1346 bp, Homo sapiens
  source 1..1346: mol_type = genomic DNA
accgccaccatgagcagcccggatgcgggatacgccagtgacgaccagagccagacccagagcgcgctgcccgcggtgatggccgggctgggcccctgcccctgggccgagtcgctgagccccatcggggacatgaaggtgaagggcgaggcgccggcgaacagcggagcaccggccggggccgcgggccgagccaagggcgagtcccgtatccggcggccgatgaacgctttcatggtgtgggctaaggacgagcgcaagcggctggcgcagcagaatccagacctgcacaacgccgagttgagcaagatgctgggcaagtcgtggaaggcgctgacgctggcggagaagcggcccttcgtggaggaggcagagcggctgcgcgtgcagcacatgcaggaccaccccaactacaagtaccggccgcggcggcgcaagcaggtgaagcggctgaagcgggtggagggcggcttcctgcacggcctggctgagccgcaggcggccgcgctgggccccgagggcggccgcgtggccatggacggcctgggcctccagttccccgagcagggcttccccgccggcccgccgctgctgcctccgcacatgggcggccactaccgcgactgccagagtctgggcgcgcctccgctcgacggctacccgttgcccacgcccgacacgtccccgctggacggcgtggaccccgacccggctttcttcgccgccccgatgcccggggactgcccggcggccggcacctacagctacgcgcaggtctcggactacgctggccccccggagcctcccgccggtcccatgcacccccgactcggcccagagcccgcgggtccctcgattccgggcctcctggcgccacccagcgcccttcacgtgtactacggcgcgatgggctcgcccggggcgggcggcgggcgcggcttccagatgcagccgcaacaccagcaccagcaccagcaccagcaccaccccccgggccccggacagccgtcgccccctccggaggcactgccctgccgggacggcacggaccccagtcagcccgccgagctcctcggggaggtggaccgcacggaatttgaacagtatctgcacttcgtgtgcaagcctgagatgggcctcccctaccaggggcatgactccggtgtgaatctccccgacagccacggggccatttcctcggtggtgtccgacgccagctccgcggtatattactgcaactatcctgacgtgtagtaatgaactagtccgtaacttgaaagtatttcgatttcttggctttatatatcttgtggaaaggacgacaacctcacaggatatagcatatt

SEQ ID NO: 2351 - DNA, 1505 bp, Homo sapiens
  source 1..1505: mol_type = genomic DNA
accgccaccatggctacgggcgcggatgtacgggacattctagaactcgggggtccagaaggggatgcagcctctgggaccatcagcaagaaggacattatcaacccggacaagaaaaaatccaagaagtcctctgagacactgactttcaagaggcccgagggcatgcaccgggaagtctatgccttgctctactctgacaagaaggatgcacccccactgctacccagtgacactggccagggataccgtacagtgaaggccaagttgggctccaagaaggtgcggccttggaagtggatgccattcaccaacccggcccgcaaggacggagcaatgttcttccactggcgacgtgcagcggaggagggcaaggactacccctttgccaggttcaataagactgtgcaggtgcctgtgtactcggagcaggagtaccagctttatctccacgatgatgcttggactaaggcagaaactgaccacctctttgacctcagccgccgctttgacctgcgttttgttgttatccatgaccggtatgaccaccagcagttcaagaagcgttctgtggaagacctgaaggagcggtactaccacatctgtgctaagcttgccaacgtgcgggctgtgccaggcacagaccttaagataccagtatttgatgctgggcacgaacgacggcggaaggaacagcttgagcgtctctacaaccggaccccagagcaggtggcagaggaggagtacctgctacaggagctgcgcaagattgaggcccggaagaaggagcgggagaaacgcagccaggacctgcagaagctgatcacagcggcagacaccactgcagagcagcggcgcacggaacgcaaggcccccaaaaagaagctaccccagaaaaaggaggctgagaagccggctgttcctgagactgcaggcatcaagtttccagacttcaagtctgcaggtgtcacgctgcggagccaacggatgaagctgccaagctctgtgggacagaagaagatcaaggccctggaacagatgctgctggagcttggtgtggagctgagcccgacacctacggaggagctggtgcacatgttcaatgagctgcgaagcgacctggtgctgctctacgagctcaagcaggcctgtgccaactgcgagtatgagctgcagatgctgcggcaccgtcatgaggcactggcccgggctggtgtgctagggggccctgccacaccagcatcaggcccaggcccggcctctgctgagccggcagtgactgaacccggacttggtcctgaccccaaggacaccatcattgatgtggtgggcgcacccctcacgcccaattcgagaaagcgacgggagtcggcctccagctcatcttccgtgaagaaagccaagaagccgtagtaatgaactagtccgtaacttgaaagtatttcgatttcttggctttatatatcttgtggaaaggacgagaatggtgctaaggtagagcatgg

SEQ ID NO: 2352 - DNA, 1151 bp, Homo sapiens
  source 1..1151: mol_type = genomic DNA
accgccaccatgcggggggcggcgagcgcgagtgtccgcgagccgacgccgctcccgggtagaggcgccccccgcacaaagccccgggcgggccgaggcccgactgtagggactccagccaccttggccctccctgcccggggaaggccgcgctcaaggaatggcctcgcatccaaaggccagcgaggagcggcccctacggggcctgggcacagagctctgccttccagggacactgctcttccccaggagagaaacaagaagctggaggctgtggggacaggaattgaacctaaagccatgtcccagggcttggtgacatttggggatgtggctgtagatttctcccaagaggagtgggagtggctgaaccccattcagaggaacttgtacaggaaggtgatgttggagaactacaggaacctggcatcgctgggactttgtgtttctaagcccgatgtgatctcctcgttggaacaaggaaaagagccttggacagtgaagcgaaagatgacaagagcctggtgcccagacttgaaggctgtgtggaagatcaaggagttacctctcaagaaggacttctgcgaaggaaagctatcccaggcagtgataacagagagactcacaagctataatctggagtactctctgttaggggaacactgggattatgatgctctgtttgagacacagccgggcttggtgactatcaaaaacctggctgttgacttccgccagcagctacacccagctcagaagaatttctgtaagaatgggatatgggagaacaacagtgacctgggatcagcaggacattgtgtggctaagccagatttagtctctttactagagcaagagaaggagccctggatggtgaagcgagagctgacaggaagcctgttctcaggtgagtgcaggagagcctggtgtggaaaatctactgcaagagagagcggagcttttaccaaaaaggctgcatcctcactaatatacagtaggaaactttacccagggtctctgggtctggaaagaaaattgaactctgggagttccaaatagtaatgaactagtccgtaacttgaaagtatttcgatttcttggctttatatatcttgtggaaaggacgatttagtttgtgcaggaaagcaaca

SEQ ID NO: 2353 - DNA, 2708 bp, Homo sapiens
  source 1..2708: mol_type = genomic DNA
accgccaccatgcggggggcggcgagcgcgagtgtccgcgagccgacgccgctcccgggtagaggcgccccccgcacaaagccccgggcgggccgaggcccgactgtagggactccagccaccttggccctccctgcccggggaaggccgcgctcaaggaatggcctcgcatccaaaggccagcgaggagcggcccctacggggcctgggcacagagctctgccttccagggacactgctcttccccaggagagaaacaagaagctggaggctgtggggacaggaattgaacctaaagccatgtcccagggcttggtgacatttggggatgtggctgtagatttctcccaagaggagtgggagtggctgaaccccattcagaggaacttgtacaggaaggtgatgttggagaactacaggaacctggcatcgctgggactttgtgtttctaagcccgatgtgatctcctcgttggaacaaggaaaagagccttggacagtgaagcgaaagatgacaagagcctggtgcccagacttgaaggctgtgtggaagatcaaggagttacctctcaagaaggacttctgcgaaggaaagctatcccaggcagtgataacagagagactcacaagctataatctggagtactctctgttaggggaacactgggattatgatgctctgtttgagacacagccgggcttggtgactatcaaaaacctggctgttgacttccgccagcagctacacccagctcagaagaatttctgtaagaatgggatatgggagaacaacagtgacctgggatcagcaggacattgtgtggctaagccagatttagtctctttactagagcaagagaaggagccctggatggtgaagcgagagctgacaggaagcctgttctcaggccagcgatctgtacatgagacccaggaattatttccaaagcaagattcatatgctgaaggggtaacagacagaacctcaaacactaaacttgattgttccagtttcagagaaaattgggattctgactatgtgtttggaaggaagcttgcagtaggtcaagagacacaattcaggcaagagccaattactcataacaaaaccctctctaaggaaagagaacgtacatataacaaatctggaagatggttctatttggacgattcagaagagaaagttcataatcgtgattcaattaaaaattttcaaaaaagttcagtggtaataaaacaaacaggcatctatgcaggaaaaaagcttttcaagtgtaatgaatgtaagaaaacttttacccagagctcatctcttactgttcatcagagaattcacactggagagaaaccttataaatgtaatgaatgtgggaaggcctttagtgacggctcatcctttgcccgacaccagagatgtcacactggcaagaagccctatgagtgcattgagtgtgggaaagctttcatacagaacacatcccttatccgtcactggagatactatcatactggggagaaaccctttgattgcatcgattgtgggaaagccttcagtgaccacatagggcttaatcaacacaggagaattcatactggagagaaaccttacaaatgtgatgtatgtcacaaatccttcaggtatggttcctcccttactgtacatcaaaggattcataccggagaaaaaccatatgaatgtgatgtttgcagaaaagccttcagccatcatgcatcactcactcaacatcaaagagtacattctggagaaaagccttttaagtgtaaagagtgcggaaaagcttttaggcagaatatacaccttgccagtcatttaaggattcatactggggagaagccttttgaatgtgcggagtgtggaaaatccttcagcatcagttctcagcttgccactcatcagagaatccatactggagagaagccctatgaatgtaaggtttgtagtaaagcgttcacccagaaggctcaccttgcacagcatcagaaaacccatacaggagagaaaccatatgagtgcaaggaatgcggtaaagccttcagccagaccacacacctcattcaacatcagagagttcacactggtgagaaaccctataaatgtatggaatgtgggaaggcctttggtgataactcatcctgtactcaacatcaaagactgcacactggccaaagaccttatgaatgtattgagtgtggaaaggcattcaagacaaaatcctcccttatttgtcatcgcagaagtcatactggagaaaaaccttatgaatgcagtgtgtgtggcaaagcctttagtcatcgtcaatcccttagtgtacatcagagaatccattctggaaagaaaccatatgaatgtaaggaatgtaggaaaaccttcatccaaattggacaccttaatcaacataagagagttcatactggagagagatcttataactataagaaaagcagaaaagtcttcaggcaaactgctcacttagctcatcatcagcgaattcatactggagagtcgtcaacatgcccctctttaccttccacgtcaaatcctgtggatctgtttcccaaatttctctggaatccatcctccctcccatcaccatagtaatgaactagtccgtaacttgaaagtatttcgatttcttggctttatatatcttgtggaaaggacgaagacgtaccaggcaaattcactac

SEQ ID NO: 2354 - DNA, 1667 bp, Homo sapiens
  source 1..1667: mol_type = genomic DNA
accgccaccatggagacagatttggctgaaatgcctgagaaaggagctctgtcttcccaggattctccccatttccaagagaagagcacagaagagggagaagtggctgctctgcgcctcacggccagatcccaggaaacagtgacattcaaggatgtggccatggactttacaccagaggagtgggggaagctggatcctgcacaaagggatgtgatgctggagaactataggaacctagtctcactttggcttccagtttccaaacctgagagctacaacttggagaatggaaaagaaccattgaagcttgagagaaaagcccccaaaagcagctattcagacatggagactagaccacagagcaaggattcaacttcagtgcaagatttttccaaagcagaatcatgcaaagttgcaataatagacagactgacacggaatagtgtctatgactctaacttggaagcagcccttgaatgtgaaaattggttagagaatcagcaaggaaatcaggagagacatttgagagaaatgttcactcacatgaattcactctctgaggaaacagaccataagcatgatgtatactggaaaagcttcaatcagaaatctgtccttatcactgaagacagagttcccaaaggatcttatgccttccatacacttgaaaaaagcttgaaacaaaaatcaaacttaatgaaaaagcagagaacttataaagagaaaaaacctcataaatgtaatgattgtggtgaactcttcacctaccattcagtgcttattcgacaccagagagtccatactggagagaaaccctatacctgcaatgaatgtgggaaatcttttagccacagagctaatttaactaaacaccagagaactcatactagaattctctttgaatgcagtgaatgcaagaaaaccttcacagaaagctcatcccttgcaacacatcagagaattcacgttggagagagaccttatgaatgcaatgaatgtgggaaaggttttaatcgaagtacacatcttgtgcagcatcagttgattcatactggagtgaagccttatgaatgtaatgaatgtgataaagcttttattcattcatcagcactcattaaacatcaaagaactcatactggagagaaaccttataaatgtcaagaatgtgggaaagcctttagccattgctcatccctaactaagcatcagagagttcatactggagaaaagccatatgaatgcagtgaatgtggaaaaacttttagtcagagcacacatcttgttcaacatcagagaattcacactggagagaaaccctatgagtgtaatgaatgtgggaaaaccttcagccggagctccaattttgctaaacatcaaagaattcatattggaaagaaaccgtacaaatgtagcgagtgtggaaaagccttcattcattcatcagctctcattcaacatcagagaactcataccggagagaaaccctttagatgtaatgagtgtgggaaaagctttaagtgcagttcatctctcatcagacatcaaagagttcacactgaagagcaaccctagtaatgaactagtccgtaacttgaaagtatttcgatttcttggctttatatatcttgtggaaaggacgagctaatatattctccctgtgctaa

SEQ ID NO: 2355 - DNA, 1637 bp, Homo sapiens
  source 1..1637: mol_type = genomic DNA
accgccaccatgggagctctgtcttcccaggattctccccatttccaagagaagagcacagaagagggagaagtggctgctctgcgcctcacggccagatcccaggaaacagtgacattcaaggatgtggccatggactttacaccagaggagtgggggaagctggatcctgcacaaagggatgtgatgctggagaactataggaacctagtctcactttggcttccagtttccaaacctgagagctacaacttggagaatggaaaagaaccattgaagcttgagagaaaagcccccaaaagcagctattcagacatggagactagaccacagagcaaggattcaacttcagtgcaagatttttccaaagcagaatcatgcaaagttgcaataatagacagactgacacggaatagtgtctatgactctaacttggaagcagcccttgaatgtgaaaattggttagagaatcagcaaggaaatcaggagagacatttgagagaaatgttcactcacatgaattcactctctgaggaaacagaccataagcatgatgtatactggaaaagcttcaatcagaaatctgtccttatcactgaagacagagttcccaaaggatcttatgccttccatacacttgaaaaaagcttgaaacaaaaatcaaacttaatgaaaaagcagagaacttataaagagaaaaaacctcataaatgtaatgattgtggtgaactcttcacctaccattcagtgcttattcgacaccagagagtccatactggagagaaaccctatacctgcaatgaatgtgggaaatcttttagccacagagctaatttaactaaacaccagagaactcatactagaattctctttgaatgcagtgaatgcaagaaaaccttcacagaaagctcatcccttgcaacacatcagagaattcacgttggagagagaccttatgaatgcaatgaatgtgggaaaggttttaatcgaagtacacatcttgtgcagcatcagttgattcatactggagtgaagccttatgaatgtaatgaatgtgataaagcttttattcattcatcagcactcattaaacatcaaagaactcatactggagagaaaccttataaatgtcaagaatgtgggaaagcctttagccattgctcatccctaactaagcatcagagagttcatactggagaaaagccatatgaatgcagtgaatgtggaaaaacttttagtcagagcacacatcttgttcaacatcagagaattcacactggagagaaaccctatgagtgtaatgaatgtgggaaaaccttcagccggagctccaattttgctaaacatcaaagaattcatattggaaagaaaccgtacaaatgtagcgagtgtggaaaagccttcattcattcatcagctctcattcaacatcagagaactcataccggagagaaaccctttagatgtaatgagtgtgggaaaagctttaagtgcagttcatctctcatcagacatcaaagagttcacactgaagagcaaccctagtaatgaactagtccgtaacttgaaagtatttcgatttcttggctttatatatcttgtggaaaggacgaccttaatggaatctagattcgggc

SEQ ID NO: 2356 - DNA, 1241 bp, Homo sapiens
  source 1..1241: mol_type = genomic DNA
accgccaccatgcagagcttcctgactctgctgaaggagcatgaggacacctgtgcacccccggcggagctggtgacccttgcgggcagactgtgccgggacttccaggatgaccttgcccaactgcagcctttggtcacagccattctggacagccagctccgcctgcatctcctggacaacgcagatgtggccctggcgtgcgcccgtgtcctggaccagcaggagcagcagcaggcggcttgccgcctcctggaggggtgccaggtgccgggaggcagccaggagttagtgcagctctggaacgacatccactaccgtctggtcatgaggaggctgggcgtggctgcgctcaccccggtgcagaagttccgctgcaggaagaggaaccccccgcccccctccctctgcccagaggggctgaagagccggaacttccccagagaggttcgtgagaagctgcacaatttcgctgtgggggtgaacaccaaccccagcaaggctgagagggagaacttggcattggagacgagcttgacccctgagcaggtgtacaactggtttgccaattaccggcgccgccaaagagcccttccccagcacatgaagccagcccagcaggccacagctgaagaccctggtgcgagggagaggggtcctgacctcctgcagccctcaggcaacccccgtgttgactctgggtttgtggacaggcctcagtggtcagaggaacgtgaggaaaaggggcctccacagtccccacagaccacccaaggaccatgggagccactggccttagccccggactttcccgcagatgagacagtctcaaagccactggatgtcagcggccatccccagagcgtgcaattggaggagggtctgggcacaagcagtggacggacagagctacgggtgggcagcttcctggtgacacagcccccactgcaagctcctgaattcatcctcacccagagccctccagagctggccccagccccatctgccttccccggccctgtgtctgccatggagctgagccaggccctgccctccagccaggtgcagtgttctgatagccaggcctctggtgatgccttctggggagccaggatgctccttgagttttcagggagcagcctgggctagtaatgaactagtccgtaacttgaaagtatttcgatttcttggctttatatatcttgtggaaaggacgagatattgaatgagtcgcatatgct

SEQ ID NO: 2357 - DNA, 2255 bp, Homo sapiens
  source 1..2255: mol_type = genomic DNA
accgccaccatggcaaccccggcggcggtcaaccctccggaaatggcttcagacatacctggatctgtgacgttgcccgttgcccccatggcggccaccggacaggtgaggatggcgggggccatgcctgcccgtggaggaaagcggcgttccggaatggacttcgatgatgaagatggtgaaggccccagtaaattttcaagagagaatcatagtgaaatcgaaaggcgcagacggaacaagatgactcagtacatcacggagctctccgacatggtccccacatgcagcgcactggctcggaagccagacaagctcaccatcctccgcatggccgtctcgcacatgaagtccatgaggggtacagggaacaagtccaccgatggcgcgtacaagccttccttcctcacagagcaggaactgaagcatctcatccttgaagcagctgatggatttctgtttgtggtggctgctgagacagggcgagtgatttatgtgtctgactccgtcacccctgttctgaaccagccccagtcagagtggtttgggagcacactgtatgaacaggtgcatcctgatgacgtggagaagctgagagagcaactgtgcacctcagaaaactcaatgacaggccggatcttggacctgaagactgggacggtcaagaaagaagggcagcagtcatccatgaggatgtgcatgggctcgcggcggtctttcatctgcaggatgaggtgtggaaatgctcctttggaccaccttcctctaaacagaataaccaccatgaggaaaaggttcaggaatggccttggccctgtgaaagaaggagaagcccaatatgctgtggtccactgtacaggatacatcaaggcctggccaccagcaggaatgaccatacctgaagaagacgctgatgtgggacaaggcagtaaatattgcctcgtggcaattgggagactccaggtgaccagctctcctgtatgcatggacatgaatgggatgtcggtgcccacagagttcttatcccggcataactccgatggaatcatcacatttgtggatccaagatgtatcagtgtgattggctaccaaccccaggatcttctgggaaaggacattttggaattctgccaccctgaggatcaaagccatctgcgtgagagcttccagcaggtggttaagctgaaaggccaagtcctgtcggtcatgtatcgatttcgcaccaagaaccgggagtggatgttgatccgcaccagcagcttcacattccagaatccctattctgatgagattgagtacatcatctgcaccaacaccaacgtcaagcaacttcagcaacagcaggcagaattggaagtgcaccagagagatggattgtcatcgtatgacttatcccaggtccccgtccccaacctaccagccggtgttcatgaggccgggaagtccgtggaaaaggcggatgcaatcttctcccaggaaagagatcctcggtttgctgaaatgtttgcaggaattagtgcatcggagaagaagatgatgagctcagcctctgcagcaggaacccagcagatctactcccaaggaagcccatttccctctggacactccgggaaggccttcagctcttcagtggttcatgtgcctggagtgaatgatattcagtcctcttcttccacgggccagaacatgtcccaaatctcccggcagctaaaccagagtcaggtggcatggacagggagtcgtccgccctttccgggacagcaaatcccatctcagtccagcaagactcagtcatctccctttgggattggaacgagccacacctacccggcagacccctcttcctacagccccctctccagcccagctacctcctcgccaagtgggaatgcctactccagtcttgccaacaggactccagggttcgctgaaagtggacaaagtagcgggcagttccaagggcggccctcggaagtctggtcgcagtggcaaagccagcaccatggccagcagagcggtgagcagcactcccaccagcagcccggtcagactgaagtgttccaggacatgctgcccatgccaggagatccaacccaggggactggcaactataacatcgaagactttgccgacctgggcatgtttccaccgttttctgagtagtaatgaactagtccgtaacttgaaagtatttcgatttcttggctttatatatcttgtggaaaggacgagtctcgtacgatagaggcatttac

SEQ ID NO: 2358 - DNA, 1697 bp, Homo sapiens
  source 1..1697: mol_type = genomic DNA
accgccaccatggggtttctccatgttggtcaggatggtctcgaactcccgacatcaggtgatccgcctgcctcggcctcccaaagtgctgggattacaggtgtgagccaccgcactcagcctccctgttttgaaggattgacttctaaagacttggtacgtgaggaaaaaacacggaagaggaagaggaaagcaaaggagtcagggatggctcttcttcagggtctactgacattcagggatgtggccatagaattctctcaggaggagtggaaatgcctggaccctgctcagaggactctatacagagacgtgatgctggagaattataggaacctggtctccctggatacctcttccaaatgcatgatgaagatgttctcatcaacaggacaaggcaatacagaagtggtccacacagggacattgcaaatacatgcaagtcatcacattggagatacttgcttccaggaaattgagaaagatattcatgactttgtgtttcagtggcaagaaaatgaaacaaatggccatgaagcactcatgacaaaaaccaaaaagttgatgagtagtacagagcgacatgatcaaaggcatgctggaaacaaacctattaaaaatgagcttggatcaagctttcattcgcatctgcctgaagtgcacatatttcaccccgaagggaaaattggtaatcaagttgagaaggctatcaacgatgctttctcagtttcagcatcccaacgaatttcctgtaggccaaaaactcgtatttctaataagtataggaataatttcctccagtcttcattactcacacaaaaacgggaagtacacacaagagaaaaatctttccaacgtaatgagagtggcaaagcctttaatggtagctcactcttaaaaaaacatcagataatccatttaggagacaaacagtataaatgtgatgtatgcggcaaggactttcatcagaagcgataccttgcatgccatagatgtcacactggtgagaatccttacacgtgtaatgagtgtggcaagacattcagtcacaattcagccctgttagttcacaaggcaattcatactggagagaaaccttacaagtgtaatgaatgtggcaaggtttttaatcaacaatcaaaccttgcacgtcatcatagagttcatactggagagaaaccttacaaatgtgaagaatgtgacaaagttttcagtcgcaaatcacaccttgaaagacataggagaattcacactggagagaaaccatacaaatgtaaggtttgtgacaaggctttcagacgtgattcacacctggcacaacatactgtaattcacactggagagaaaccttacaagtgtaatgagtgtggcaagacctttgttcaaaattcatctcttgtaatgcataaggtcattcatactggagagaaacgttacaagtgtaatgaatgtggcaaggtttttaatcacaaatcaaaccttgcatgtcatcgtagacttcatactggagagaaaccttacaagtgtaatgaatgtggcaaggtttttaatcgaaaatcaaaccttgaacgtcatcatagacttcatactggaaagaaatcttagtaatgaactagtccgtaacttgaaagtatttcgatttcttggctttatatatcttgtggaaaggacgaagccgattgatcaacgtagatgta

SEQ ID NO: 2359 - DNA, 1499 bp, Homo sapiens
  source 1..1499: mol_type = genomic DNA
accgccaccatggctcttcttcagggtctactgacattcagggatgtggccatagaattctctcaggaggagtggaaatgcctggaccctgctcagaggactctatacagagacgtgatgctggagaattataggaacctggtctccctggatacctcttccaaatgcatgatgaagatgttctcatcaacaggacaaggcaatacagaagtggtccacacagggacattgcaaatacatgcaagtcatcacattggagatacttgcttccaggaaattgagaaagatattcatgactttgtgtttcagtggcaagaaaatgaaacaaatggccatgaagcactcatgacaaaaaccaaaaagttgatgagtagtacagagcgacatgatcaaaggcatgctggaaacaaacctattaaaaatgagcttggatcaagctttcattcgcatctgcctgaagtgcacatatttcaccccgaagggaaaattggtaatcaagttgagaaggctatcaacgatgctttctcagtttcagcatcccaacgaatttcctgtaggccaaaaactcgtatttctaataagtataggaataatttcctccagtcttcattactcacacaaaaacgggaagtacacacaagagaaaaatctttccaacgtaatgagagtggcaaagcctttaatggtagctcactcttaaaaaaacatcagataatccatttaggagacaaacagtataaatgtgatgtatgcggcaaggactttcatcagaagcgataccttgcatgccatagatgtcacactggtgagaatccttacacgtgtaatgagtgtggcaagacattcagtcacaattcagccctgttagttcacaaggcaattcatactggagagaaaccttacaagtgtaatgaatgtggcaaggtttttaatcaacaatcaaaccttgcacgtcatcatagagttcatactggagagaaaccttacaaatgtgaagaatgtgacaaagttttcagtcgcaaatcacaccttgaaagacataggagaattcacactggagagaaaccatacaaatgtaaggtttgtgacaaggctttcagacgtgattcacacctggcacaacatactgtaattcacactggagagaaaccttacaagtgtaatgagtgtggcaagacctttgttcaaaattcatctcttgtaatgcataaggtcattcatactggagagaaacgttacaagtgtaatgaatgtggcaaggtttttaatcacaaatcaaaccttgcatgtcatcgtagacttcatactggagagaaaccttacaagtgtaatgaatgtggcaaggtttttaatcgaaaatcaaaccttgaacgtcatcatagacttcatactggaaagaaatcttagtaatgaactagtccgtaacttgaaagtatttcgatttcttggctttatatatcttgtggaaaggacgagtgataggagaaactttactggta

SEQ ID NO: 2360 - DNA, 1676 bp, Homo sapiens
  source 1..1676: mol_type = genomic DNA
accgccaccatgtacgccctcttcctcctggccagcctcctgggcgcggctctagccggcccggtccttggactgaaagaatgcaccaggggctcggcagtgtggtgccagaatgtgaagacggcgtccgactgcggggcagtgaagcactgcctgcagaccgtttggaacaagccaacagtgaaatcccttccctgcgacatatgcaaagacgttgtcaccgcagctggtgatatgctgaaggacaatgccactgaggaggagatccttgtttacttggagaagacctgtgactggcttccgaaaccgaacatgtctgcttcatgcaaggagatagtggactcctacctccctgtcatcctggacatcattaaaggagaaatgagccgtcctggggaggtgtgctctgctctcaacctctgcgagtctctccagaagcacctagcagagctgaatcaccagaagcagctggagtccaataagatcccagagctggacatgactgaggtggtggcccccttcatggccaacatccctctcctcctctaccctcaggacggcccccgcagcaagccccagccaaaggataatggggacgtttgccaggactgcattcagatggtgactgacatccagactgctgtacggaccaactccacctttgtccaggccttggtggaacatgtcaaggaggagtgtgaccgcctgggccctggcatggccgacatatgcaagaactatatcagccagtattctgaaattgctatccagatgatgatgcacatgcaacccaaggagatctgtgcgctggttgggttctgtgatgaggtgaaagagatgcccatgcagactctggtccccgccaaagtggcctccaagaatgtcatccctgccctggaactggtggagcccattaagaagcacgaggtcccagcaaagtctgatgtttactgtgaggtgtgtgaattcctggtgaaggaggtgaccaagctgattgacaacaacaagactgagaaagaaatactcgacgcttttgacaaaatgtgctcgaagctgccgaagtccctgtcggaagagtgccaggaggtggtggacacgtacggcagctccatcctgtccatcctgctggaggaggtcagccctgagctggtgtgcagcatgctgcacctctgctctggcacgcggctgcctgcactgaccgttcacgtgactcagccaaaggacggtggcttctgcgaagtgtgcaagaagctggtgggttatttggatcgcaacctggagaaaaacagcaccaagcaggagatcctggctgctcttgagaaaggctgcagcttcctgccagacccttaccagaagcagtgtgatcagtttgtggcagagtacgagcccgtgctgatcgagatcctggtggaggtgatggatccttccttcgtgtgcttgaaaattggagcctgcccctcggcccataagcccttgttgggaactgagaagtgtatatggggcccaagctactggtgccagaacacagagacagcagcccagtgcaatgctgtcgagcattgcaaacgccatgtgtggaactagtaatgaactagtccgtaacttgaaagtatttcgatttcttggctttatatatcttgtggaaaggacgaaatttacgctaaggctctatcttc

SEQ ID NO: 2361 - DNA, 1607 bp, Homo sapiens
  source 1..1607: mol_type = genomic DNA
accgccaccatgctgggcatgtacgtgccggacaggttctccctgaagtcctcccgggttcaggacggcatggggctctacacggcccgcagagtgcgaaagggtgaaaagttcggaccctttgctggagagaagagaatgcctgaagacttggatgaaaatatggattacaggttgatgtgggaggttcgtgggagtaagggagaagttttgtacattttggatgctaccaacccacggcactccaactggcttcgcttcgttcatgaggcaccatctcaggagcagaagaacttggctgccattcaagaaggagaaaacattttctatttggcagttgaagatatagaaacagacacggagcttctgattggctacctggatagtgacatggaggctgaggaggaagaacagcaaattatgacagtcatcaaagaaggggaagttgaaaattctagaagacaatcaacagcgggcagaaaagatcgccttggctgtaaagaggactatgcttgtcctcaatgtgaatcgagttttaccagtgaggatattcttgctgagcatctccagacattgcaccagaaacccacagaggagaaagaatttaagtgcaagaactgtgggaagaaattcccagttaagcaggctttgcaaagacattttgagcagcaccaggagacttgccggggggatgccaggtttgtgtgcaaggctgacagctgtggaaagaggctgaagagcaaggatgccctgaaaagacaccaggaaaatgtccacactggagatcctaagaaaaagcttatatgttcagtgtgcaataaaaagtgttcttcagcatcaagcctacaggaacatagaaagattcatgagatatttgattgtcaagaatgtatgaagaaatttatttcagctaatcagctaaaacgtcatatgatcacccactcagaaaaacgaccctataattgcgagatttgtaataagtctttcaagaggcttgatcaagtgggtgctcacaaagtaatacacagcgaagacaaaccttacaaatgcaaactttgtggaaagggatttgcccacagaaatgtttacaagaatcataagaagacccactctgaggagagaccgttccaatgtgaagaatgtaaagctttgttccggaccccattttctttacagagacacctgctaatacataacagtgagaggactttcaagtgccatcactgcgatgctacctttaagaggaaggatacattaaatgttcatgtccaggtggttcatgaaagacacaagaagtataggtgtgagctatgtaataaggcctttgttacaccttcagtgcttagaagtcataagaaaacacatacaggagaaaaggagaaaatctgtccatattgtggccagaaatttgccagcagtggtacactcagagttcatatccggagccacacaggagaagccgtacaagtgctcagagtgcagcaaggccttcagccagaagcgaggcctggatagtaatgaactagtccgtaacttgaaagtatttcgatttcttggctttatatatcttgtggaaaggacgagccttcacggaacacgtacacaag

SEQ ID NO: 2362 - DNA, 1994 bp, Homo sapiens
  source 1..1994: mol_type = genomic DNA
accgccaccatgctgggcatgtacgtgccggacaggttctccctgaagtcctcccgggttcaggacggcatggggctctacacggcccgcagagtgcgaaagggtgaaaagttcggaccctttgctggagagaagagaatgcctgaagacttggatgaaaatatggattacaggttgatgtgggaggttcgtgggagtaagggagaagttttgtacattttggatgctaccaacccacggcactccaactggcttcgcttcgttcatgaggcaccatctcaggagcagaagaacttggctgccattcaagaaggagaaaacattttctatttggcagttgaagatatagaaacagacacggagcttctgattggctacctggatagtgacatggaggctgaggaggaagaacagcaaattatgacagtcatcaaagaaggggaagttgaaaattctagaagacaatcaacagcgggcagaaaagatcgccttggctgtaaagaggactatgcttgtcctcaatgtgaatcgagttttaccagtgaggatattcttgctgagcatctccagacattgcaccagaaacccacagaggagaaagaatttaagtgcaagaactgtgggaagaaattcccagttaagcaggctttgcaaagacatgttcttcagtgcacagcgaaaagcagtctaaaggagtcttcgcgaagttttcagtgctctgtttgcaattcttccttcagttcagcatcgagttttgagcagcaccaggagacttgccggggggatgccaggtttgtgtgcaaggctgacagctgtggaaagaggctgaagagcaaggatgccctgaaaagacaccaggaaaatgtccacactggagatcctaagaaaaagcttatatgttcagtgtgcaataaaaagtgttcttcagcatcaagcctacaggaacatagaaagattcatgagatatttgattgtcaagaatgtatgaagaaatttatttcagctaatcagctaaaacgtcatatgatcacccactcagaaaaacgaccctataattgcgagatttgtaataagtctttcaagaggcttgatcaagtgggtgctcacaaagtaatacacagcgaagacaaaccttacaaatgcaaactttgtggaaagggatttgcccacagaaatgtttacaagaatcataagaagacccactctgaggagagaccgttccaatgtgaagaatgtaaagctttgttccggaccccattttctttacagagacacctgctaatacataacagtgagaggactttcaagtgccatcactgcgatgctacctttaagaggaaggatacattaaatgttcatgtccaggtggttcatgaaagacacaagaagtataggtgtgagctatgtaataaggcctttgttacaccttcagtgcttagaagtcataagaaaacacatacaggagaaaaggagaaaatctgtccatattgtggccagaaatttgccagcagtggtacactcagagttcatatccggagccacacaggtgagcgtccctatcaatgtccttactgtgaaaaaggattcagtaaaaatgatggactgaagatgcacattcgtactcacaccagggagaagccgtacaagtgctcagagtgcagcaaggccttcagccagaagcgaggcctggatgagcacaagaggacgcacactggagaaaagccttttcagtgtgatgtttgtgatttggcttttagcctgaagaaaatgctgattcgacacaagatgactcataatcccaatcgtcccctggcagaatgccagttttgccataagaagtttacaaggaatgactacctcaaagtgcacatggacaatatccatggtgtagctgacagctagtaatgaactagtccgtaacttgaaagtatttcgatttcttggctttatatatcttgtggaaaggacgaccaagttcttgtgaaatcgtctca

SEQ ID NO: 2363 - DNA, 1889 bp, Homo sapiens
  source 1..1889: mol_type = genomic DNA
accgccaccatgctgaagcccggagaccccggcggttcggccttcctcaaagtggacccagcctacctgcagcactggcagcaactcttccctcacggaggcgcaggcccgctcaagggcagcggcgccgcgggtctcctgagcgcgccgcagcctcttcagccgccgccgccgcccccgcccccggagcgcgctgagcctccgccggacagcctgcgcccgcggcccgcctctctctcctccgcctcgtccacgccggcttcctcttccacctccgcctcctccgcctcctcctgcgctgctgcggccgctgccgccgcgctggctggtctctcggccctgccggtgtcgcagctgccggtgttcgcgcctctagccgccgctgccgtcgccgccgagccgctgccccccaaggaactgtgcctcggcgccacctccggccccgggcccgtcaagtgcggtggtggtggcggcggcggcggggagggtcgcggcgccccgcgcttccgctgcagcgcagaggagctggactattacctgtatggccagcagcgcatggagatcatcccgctcaaccagcacaccagcgaccccaacaaccgttgcgacatgtgcgcggacaaccgcaacggcgagtgccctatgcatgggccactgcactcgctgcgccggcttgtgggcaccagcagcgctgcggccgccgcgcccccgccggagctgccggagtggctgcgggacctgcctcgcgaggtgtgcctctgcaccagtactgtgcccggcctggcctacggcatctgcgcggcgcagaggatccagcaaggcacctggattggacctttccaaggcgtgcttctgcccccagagaaggtgcaggcaggcgccgtgaggaacacgcagcatctctgggagatatatgaccaggatgggacactacagcactttattgatggtggggaacctagtaagtcgagctggatgaggtatatccgatgtgcaaggcactgcggagaacagaatctaacagtagttcagtacaggtcgaatatattctaccgagcctgtatagatatccctaggggcaccgagcttctggtgtggtacaatgacagctatacgtctttctttgggatccccttacaatgcattgcccaggatgaaaacttaaatgtcccttcaacggtaatggaagccatgtgcagacaagacgccctgcagcccttcaacaaaagcagcaaactcgcccctaccacccagcagcgctccgttgttttcccccagactccgtgcagcaggaacttctctcttctggataagtctgggcccattgaatcaggatttaatcaaatcaacgtgaaaaaccagcgagtcctggcaagcccaacttccacaagccagctccactcggagttcagtgactggcatctttggaaatgtgggcagtgctttaagactttcacccagcggatcctcttacagatgcacgtgtgcacgcagaaccccgacagaccctaccaatgcggccactgctcccagtccttttcccagccttcagaactgaggaaccacgtggtcactcactctagtgaccggcctttcaagtgcggctactgtggtcgtgcctttgccggggccaccaccctcaacaaccacatccgaacccacactggagaaaagcccttcaagtgcgagaggtgtgagaggagcttcacgcaggccacccagctgagccgacaccagcggatgcccaatgagtgcaagccaataactgagagcccagaatcaatcgaagtggattagtaatgaactagtccgtaacttgaaagtatttcgatttcttggctttatatatcttgtggaaaggacgagttaccacttgaagggctggtgct

SEQ ID NO: 2364 - DNA, 1553 bp, Homo sapiens
  source 1..1553: mol_type = genomic DNA
accgccaccatgcccaccgtggatgacattctggagcaggttggggagtctggctggttccagaagcaagccttcctcatcttatgcctgctgtcggctgcctttgcgcccatctgtgtgggcatcgtcttcctgggtttcacacctgaccaccactgccagagtcctggggtggctgagctgagccagcgctgtggctggagccctgcggaggagctgaactatacagtgccaggcctggggcccgcgggcgaggccttccttggccagtgcaggcgctatgaagtggactggaaccagagcgccctcagctgtgtagaccccctggctagcctggccaccaacaggagccacctgccgctgggtccctgccaggatggctgggtgtatgacacgcccggctcttccatcgtcactgagttcaacctggtgtgtgctgactcctggaagctggacctctttcagtcctgtttgaatgcgggcttcttgtttggctctctcggtgttggctactttgcagacaggtttggccgtaagctgtgtctcctgggaactgtgctggtcaacgcggtgtcgggcgtgctcatggccttctcgcccaactacatgtccatgctgctcttccgcctgctgcagggcctggtcagcaagggcaactggatggctggctacaccctaatcacagaatttgttggctcgggctccagaagaacggtggcgatcatgtaccagatggccttcacggtggggctggtggcgcttaccgggctggcctacgccctgcctcactggcgctggctgcagctggcagtctccctgcccaccttcctcttcctgctctactactggtgtgtgccggagtcccctcggtggctgttatcacaaaaaagaaacactgaagcaataaagataatggaccacatcgctcaaaagaatgggaagttgcctcctgctgatttaaagatgctttccctcgaagaggatgtcaccgaaaagctgagcccttcatttgcagacctgttccgcacgccgcgcctgaggaagcgcaccttcatcctgatgtacctgtggttcacggactctgtgctctatcaggggctcatcctgcacatgggcgccaccagcgggaacctctacctggatttcctttactccgctctggtcgaaatcccgggggccttcatagccctcatcaccattgaccgcgtgggccgcatctaccccatggccatgtcaaatttgttggcgggggcagcctgcctcgtcatgatttttatctcacctgacctgcactggttaaacatcataatcatgtgtgttggccgaatgggaatcaccattgcaatacaaatgatctgcctggtgaatgctgagctgtaccccacattcgtcagaaaagcaaagcccaaagaaaacacgatttaccttaaggtccaaacctcagaaccctcgggcacctagtaatgaactagtccgtaacttgaaagtatttcgatttcttggctttatatatcttgtggaaaggacgaccggtggacgcccattccacgacg

SEQ ID NO: 2365 - DNA, 1766 bp, Homo sapiens
  source 1..1766: mol_type = genomic DNA
accgccaccatgcccaccgtggatgacattctggagcaggttggggagtctggctggttccagaagcaagccttcctcatcttatgcctgctgtcggctgcctttgcgcccatctgtgtgggcatcgtcttcctgggtttcacacctgaccaccactgccagagtcctggggtggctgagctgagccagcgctgtggctggagccctgcggaggagctgaactatacagtgccaggcctggggcccgcgggcgaggccttccttggccagtgcaggcgctatgaagtggactggaaccagagcgccctcagctgtgtagaccccctggctagcctggccaccaacaggagccacctgccgctgggtccctgccaggatggctgggtgtatgacacgcccggctcttccatcgtcactgagttcaacctggtgtgtgctgactcctggaagctggacctctttcagtcctgtttgaatgcgggcttcttgtttggctctctcggtgttggctactttgcagacaggtttggccgtaagctgtgtctcctgggaactgtgctggtcaacgcggtgtcgggcgtgctcatggccttctcgcccaactacatgtccatgctgctcttccgcctgctgcagggcctggtcagcaagggcaactggatggctggctacaccctaatcacagaatttgttggctcgggctccagaagaacggtggcgatcatgtaccagatggccttcacggtggggctggtggcgcttaccgggctggcctacgccctgcctcactggcgctggctgcagctggcagtctccctgcccaccttcctcttcctgctctactactggtgtgtgccggagtcccctcggtggctgttatcacaaaaaagaaacactgaagcaataaagataatggaccacatcgctcaaaagaatgggaagttgcctcctgctgatttaaagatgctttccctcgaagaggatgtcaccgaaaagctgagcccttcatttgcagacctgttccgcacgccgcgcctgaggaagcgcaccttcatcctgatgtacctgtggttcacggactctgtgctctatcaggggctcatcctgcacatgggcgccaccagcgggaacctctacctggatttcctttactccgctctggtcgaaatcccgggggccttcatagccctcatcaccattgaccgcgtgggccgcatctaccccatggccatgtcaaatttgttggcgggggcagcctgcctcgtcatgatttttatctcacctgacctgcactggttaaacatcataatcatgtgtgttggccgaatgggaatcaccattgcaatacaaatgatctgcctggtgaatgctgagctgtaccccacattcgtcaggaacctcggagtgatggtgtgttcctccctgtgtgacataggtgggataatcacccccttcatagtcttcaggctgagggaggtctggcaagccttgcccctcattttgtttgcggtgttgggcctgcttgccgcgggagtgacgctacttcttccagagaccaagggggtcgctttgccagagaccatgaaggacgccgagaaccttgggagaaaagcaaagcccaaagaaaacacgatttaccttaaggtccaaacctcagaaccctcgggcacctagtaatgaactagtccgtaacttgaaagtatttcgatttcttggctttatatatcttgtggaaaggacgatggacgacccttcaatcgcgttcc

SEQ ID NO: 2366 - DNA, 1622 bp, Homo sapiens
  source 1..1622: mol_type = genomic DNA
accgccaccatgcccaccgtggatgacattctggagcaggttggggagtctggctggttccagaagcaagccttcctcatcttatgcctgctgtcggctgcctttgcgcccatctgtgtgggcatcgtcttcctgggtttcacacctgaccaccactgccagagtcctggggtggctgagctgagccagcgctgtggctggagccctgcggaggagctgaactatacagtgccaggcctggggcccgcgggcgaggccttccttggccagtgcaggcgctatgaagtggactggaaccagagcgccctcagctgtgtagaccccctggctagcctggccaccaacaggagccacctgccgctgggtccctgccaggatggctgggtgtatgacacgcccggctcttccatcgtcactgagttcaacctggtgtgtgctgactcctggaagctggacctctttcagtcctgtttgaatgcgggcttcttgtttggctctctcggtgttggctactttgcagacaggtttggccgtaagctgtgtctcctgggaactgtgctggtcaacgcggtgtcgggcgtgctcatggccttctcgcccaactacatgtccatgctgctcttccgcctgctgcagggcctggtcagcaagggcaactggatggctggctacaccctaatcacagaatttgttggctcgggctccagaagaacggtggcgatcatgtaccagatggccttcacggtggggctggtggcgcttaccgggctggcctacgccctgcctcactggcgctggctgcagctggcagtctccctgcccaccttcctcttcctgctctactactggtgtgtgccggagtcccctcggtggctgttatcacaaaaaagaaacactgaagcaataaagataatggaccacatcgctcaaaagaatgggaagttgcctcctgctgatttaaagatgctttccctcgaagaggatgtcaccgaaaagctgagcccttcatttgcagacctgttccgcacgccgcgcctgaggaagcgcaccttcatcctgatgtacctgtggttcacggactctgtgctctatcaggggctcatcctgcacatgggcgccaccagcgggaacctctacctggatttcctttactccgctctggtcgaaatcccgggggccttcatagccctcatcaccattgaccgcgtgggccgcatctaccccatggccatgtcaaatttgttggcgggggcagcctgcctcgtcatgatttttatctcacctgacctgcactggttaaacatcataatcatgtgtgttggccgaatgggaatcaccattgcaatacaaatgatctgcctggtgaatgctgagctgtaccccacattcgtcagcggtgttgggcctgcttgccgcgggagtgacgctacttcttccagagaccaagggggtcgctttgccagagaccatgaaggacgccgagaaccttgggagaaaagcaaagcccaaagaaaacacgatttaccttagtaatgaactagtccgtaacttgaaagtatttcgatttcttggctttatatatcttgtggaaaggacgatagggcaagctggtgatcagagat

SEQ ID NO: 2367 - DNA, 782 bp, Homo sapiens
  source 1..782: mol_type = genomic DNA
accgccaccatgaatcagaacactactgagcctgtggcggccaccgagaccctggctgaggtacccgaacatgtgctgcgaggacttccggaggaagtgaggcttttcccttctgctgttgacaagacccggattggtgtctgggccactaaaccaattttaaaaggcaaaaaatttgggccatttgttggtgataagaaaaaaagatctcaggttaagaataatgtatacatgtgggaggtgtattacccaaatttgggatggatgtgcattgatgccactgatccagagaagggaaactggctgcgatatgtgaattgggcttgctcaggagaagagcaaaatttattcccactggaaatcaacagagccatttactataaaactttaaagccaatcgcgccgggcgaggagctcctggtctggtacaatggggaagacaaccctgagatagcagctgcgattgaggaagagcgagccagcgcccggagcaagcggagctcccccaagagccggaaagctacagcctccgcttggcgtcccgatgctctccaccagcggccccgtacatcaccaggcagtataggaaggtcaaagctccagctgcagcccagttccagggaccattcttcaaagagtagacactctggctgctccctgacagcacctgaagtgacctggaatcagtagtaatgaactagtccgtaacttgaaagtatttcgatttcttggctttatatatcttgtggaaaggacgattagccctgaaggtcaatatacca

SEQ ID NO: 2368 - DNA, 5150 bp, Homo sapiens
  source 1..5150: mol_type = genomic DNA
accgccaccatgaatcagaacactactgagcctgtggcggccaccgagaccctggctgaggtacccgaacatgtgctgcgaggacttccggaggaagtgaggcttttcccttctgctgttgacaagacccggattggtgtctgggccactaaaccaattttaaaaggcaaaaaatttgggccatttgttggtgataagaaaaaaagatctcaggttaagaataatgtatacatgtgggaggtgtattacccaaatttgggatggatgtgcattgatgccactgatccagagaagggaaactggctgcgatatgtgaattgggcttgctcaggagaagagcaaaatttattcccactggaaatcaacagagccatttactataaaactttaaagccaatcgcgccgggcgaggagctcctggtctggtacaatggggaagacaaccctgagatagcagctgcgattgaggaagagcgagccagcgcccggagcaagcggagctcccccaagagccggaaagggaagaaaaaatcccaggaaaataaaaacaaaggaaacaaaatccaagacatacaactgaagacaagtgagccagatttcacctctgcaaatatgagagattctgcagaaggtcctaaagaagacgaagagaagccttcagcctcagcacttgagcagccggccaccctccaggaggtggccagtcaggaggtgcctccagaactagcaacccctgcccctgcctgggagccacagccagaaccagacgagcgattagaagcggcagcttgtgaggtgaatgatttgggggaagaggaggaggaggaagaggaggaggatgaagaagaagaagaagatgatgatgatgatgagttggaagacgagggggaagaagaagccagcatgccaaatgaaaattctgtgaaagagccagaaatacggtgtgatgagaagccagaagatttattagaggaaccaaaaacaacttcagaagaaactcttgaagactgctcagaggtaacacctgccatgcaaatccccagaactaaagaagaggccaatggtgatgtatttgaaacgtttatgtttccgtgtcaacattgtgaaaggaagtttacaaccaaacaggggcttgagcgtcacatgcatatccatatatccaccgtcaatcatgctttcaaatgcaagtactgtgggaaagcctttggcacacagattaaccggcggcgacatgagcggcgccatgaagcagggttaaagcggaaacccagccaaacactacagccgtcagaggatctggctgatggcaaagcatctggagaaaacgttgcttcaaaagatgattcgagtcctcccagtcttgggccagactgtctgatcatgaattcagagaaggcttcccaagacacaataaattcttctgtcgtagaagagaatggggaagttaaagaacttcatccgtgcaaatattgtaaaaaggtttttggaactcatactaatatgagacggcatcagcgtagagttcacgaacgtcatctgattcccaaaggtgtacggcgaaaaggaggccttgaagagccccagcctccagcagaacaggcccaggccacccagaacgtgtatgtaccaagcacagagccggaggaggaaggggaagcagatgatgtgtacatcatggacatttctagcaatatctctgaaaacttaaattactatattgatggtaaaattcaaactaataacaacactagtaactgtgatgtgattgagatggagtctgcttcggcagatttgtatggtataaattgtctgctcactccagttacagtggaaattactcaaaatataaagaccacacaggtccctgtaacagaagatcttcctaaagagcctttgggcagcacaaatagtgaggccaagaagcggagaactgcgagcccacctgcactgcccaaaattaaggccgaaacagactctgaccccatggtcccctcttgctctttaagtcttcctcttagcatatcaacaacagaggcagtgtctttccacaaagagaaaagtgtttatttgtcatcaaagctcaaacaacttcttcaaacccaagataaactaactcctgcagggatttcagcaactgaaatagctaaattaggtcctgtttgtgtgtctgctcctgcatcaatgttgcctgtgacctcaagtaggtttaagaggcggaccagctctcctcccagttctccacagcacagtcctgcccttcgagactttggaaagccaagtgatgggaaagcagcatggaccgatgccgggctgacttccaaaaaatccaaattagaaagtcacagcgactcaccagcatggagtttgtctgggagagatgagagagaaactgtgagccctccatgctttgatgaatataaaatgtctaaagagtggacagctagttctgcttttagcagtgtgtgcaaccagcagccactggatttatccagcggtgtcaaacagaaggctgagggtacaggcaagactccagtccagtgggaatctgtcttagatctcagtgtgcataaaaagcattgtagtgactctgaaggcaaggaattcaaagaaagtcattcagtgcagcctacgtgtagtgctgtaaagaaaaggaaaccaaccacctgcatgctgcagaaggttcttctcaatgaatataatggcatcgatttacctgtagaaaaccctgcagatgggaccaggagcccaagtccttgtaaatccctagaagctcagccagatcctgacctcggtccgggctctggtttccctgcccctactgttgagtccacacctgatgtttgtccttcatcacctgccctgcagacaccctccctttcatccggtcagctgcctcctctcttgatccccacagatccctcttcccctccaccctgtcccccggtattaactgttgccactccgccccctcccctccttcctaccgtacctcttccagccccctcttccagtgcatctccacacccatgcccctctccactctcaaatgccaccgcacagtccccacttccaattctgtccccaacagtgtccccctctccctctcccattcctcccgtggagcccctgatgtctgccgcctcacccgggcctccaacactttcttcttcctcctcttcatcttcctcctcctcttcgttttcttcttcatcttcctcctcttctccttctccacctcctctctccgcaatatcatctgttgtttcctctggtgataatctggaggcttctctccccatgatatctttcaaacaggaggaattagagaatgaaggtctgaaacccagggaagagccccagtctgctgctgaacaggatgttgttgttcaggaaacattcaacaaaaactttgtttgcaacgtctgtgaatcaccttttctttccattaaagatctaaccaaacatttatctattcatgctgaagaatggcccttcaaatgtgaattttgtgtgcagctttttaaggataaaacggacttgtcagaacatcgctttttgcttcatggagttgggaatatctttgtgtgttctgtttgtaaaaaagaatttgcttttttgtgcaatttgcagcagcaccagcgagatctccacccagataaggtgtgcacacatcacgagtttgaaagcgggactctgaggccccagaactttacagatcccagcaaggcccatgtagagcatatgcagagcttgccagaagatcctttagaaacttctaaagaagaagaggagttaaatgattcctctgaagagctttacacgactataaaaataatggcttctggaataaagacaaaagatccagatgttcgattgggcctcaatcagcattacccaagctttaaaccacctccatttcagtaccatcaccgtaaccccatggggattggtgtgacagccacaaatttcactacacacaatattccacagactttcactaccgccattcgctgcacaaagtgtggaaaaggtgtcgacaatatgccggagttgcacaaacatatcctggcttgtgcttctgcaagtgacaagaagaggtacacgcctaagaaaaacccagtaccattaaaacaaactgtgcaacccaaaaatggcgtggtggttttagataactctgggaaaaatgccttccgacgaatgggacagcccaaaaggcttaactttagtgttgagctcagcaaaatgtcgtcgaataagctcaaattaaatgcattgaagaaaaaaaatcagctagtacagaaagcaattcttcagaaaaacaaatctgcaaagcagaaggccgacttgaaaaatgcttgtgagtcatcctctcacatctgcccttactgtaatcgagagttcacttacattggaagcctgaataaacacgccgccttcagctgtcccaaaaaacccctttctcctcccaaaaaaaaagtttctcattcatctaagaaaggtggacactcatcacctgcaagtagtgacaaaaacagtaacagcaaccaccgcagacggacagcggatgcggagattaaaatgcaaagcatgcagactccgttgggcaagaccagagcccgcagctcaggccccacccaagtcccacttccctcctcatccttcaggtccaagcagaacgtcaagtttgcagcttcggtgaaatccaaaaaaccaagctcctcctctttaaggaactccagcccgataagaatggccaaaataactcatgttgaggggaaaaaacctaaagctgtggccaagaatcattctgctcagctttccagcaaaacatcacggagcctgcacgtgagggtacagaaaagcaaagctgttttacaaagcaaatccaccttggcgagtaagaaaagaacagaccggttcaatataaaatctagagagcggagtggggggccagtcacccggagccttcagctggcagctgctgctgacttgagtgagaacaagagagaggacggcagcgccaagcaggagctgaaggacttcaggaacttcctgtagtaatgaactagtccgtaacttgaaagtatttcgatttcttggctttatatatcttgtggaaaggacgaactgctcctgcttgggagtgatag

SEQ ID NO: 2369 - DNA, 5258 bp, Homo sapiens
  source 1..5258: mol_type = genomic DNA
accgccaccatgaatcagaacactactgagcctgtggcggccaccgagaccctggctgaggtacccgaacatgtgctgcgaggacttccggaggaagtgaggcttttcccttctgctgttgacaagacccggattggtgtctgggccactaaaccaattttaaaaggcaaaaaatttgggccatttgttggtgataagaaaaaaagatctcaggttaagaataatgtatacatgtgggaggtgtattacccaaatttgggatggatgtgcattgatgccactgatccagagaagggaaactggctgcgatatgtgaattgggcttgctcaggagaagagcaaaatttattcccactggaaatcaacagagccatttactataaaactttaaagccaatcgcgccgggcgaggagctcctggtctggtacaatggggaagacaaccctgagatagcagctgcgattgaggaagagcgagccagcgcccggagcaagcggagctcccccaagagccggaaagggaagaaaaaatcccaggaaaataaaaacaaaggaaacaaaatccaagacatacaactgaagacaagtgagccagatttcacctctgcaaatatgagagattctgcagaaggtcctaaagaagacgaagagaagccttcagcctcagcacttgagcagccggccaccctccaggaggtggccagtcaggaggtgcctccagaactagcaacccctgcccctgcctgggagccacagccagaaccagacgagcgattagaagcggcagcttgtgaggtgaatgatttgggggaagaggaggaggaggaagaggaggaggatgaagaagaagaagaagatgatgatgatgatgagttggaagacgagggggaagaagaagccagcatgccaaatgaaaattctgtgaaagagccagaaatacggtgtgatgagaagccagaagatttattagaggaaccaaaaacaacttcagaagaaactcttgaagactgctcagaggtaacacctgccatgcaaatccccagaactaaagaagaggccaatggtgatgtatttgaaacgtttatgtttccgtgtcaacattgtgaaaggaagtttacaaccaaacaggggcttgagcgtcacatgcatatccatatatccaccgtcaatcatgctttcaaatgcaagtactgtgggaaagcctttggcacacagattaaccggcggcgacatgagcggcgccatgaagcagggttaaagcggaaacccagccaaacactacagccgtcagaggatctggctgatggcaaagcatctggagaaaacgttgcttcaaaagatgattcgagtcctcccagtcttgggccagactgtctgatcatgaattcagagaaggcttcccaagacacaataaattcttctgtcgtagaagagaatggggaagttaaagaacttcatccgtgcaaatattgtaaaaaggtttttggaactcatactaatatgagacggcatcagcgtagagttcacgaacgtcatctgattcccaaaggtgtacggcgaaaaggaggccttgaagagccccagcctccagcagaacaggcccaggccacccagaacgtgtatgtaccaagcacagagccggaggaggaaggggaagcagatgatgtgtacatcatggacatttctagcaatatctctgaaaacttaaattactatattgatggtaaaattcaaactaataacaacactagtaactgtgatgtgattgagatggagtctgcttcggcagatttgtatggtataaattgtctgctcactccagttacagtggaaattactcaaaatataaagaccacacaggtccctgtaacagaagatcttcctaaagagcctttgggcagcacaaatagtgaggccaagaagcggagaactgcgagcccacctgcactgcccaaaattaaggccgaaacagactctgaccccatggtcccctcttgctctttaagtcttcctcttagcatatcaacaacagaggcagtgtctttccacaaagagaaaagtgtttatttgtcatcaaagctcaaacaacttcttcaaacccaagataaactaactcctgcagggatttcagcaactgaaatagctaaattaggtcctgtttgtgtgtctgctcctgcatcaatgttgcctgtgacctcaagtaggtttaagaggcggaccagctctcctcccagttctccacagcacagtcctgcccttcgagactttggaaagccaagtgatgggaaagcagcatggaccgatgccgggctgacttccaaaaaatccaaattagaaagtcacagcgactcaccagcatggagtttgtctgggagagatgagagagaaactgtgagccctccatgctttgatgaatataaaatgtctaaagagtggacagctagttctgcttttagcagtgtgtgcaaccagcagccactggatttatccagcggtgtcaaacagaaggctgagggtacaggcaagactccagtccagtgggaatctgtcttagatctcagtgtgcataaaaagcattgtagtgactctgaaggcaaggaattcaaagaaagtcattcagtgcagcctacgtgtagtgctgtaaagaaaaggaaaccaaccacctgcatgctgcagaaggttcttctcaatgaatataatggcatcgatttacctgtagaaaaccctgcagatgggaccaggagcccaagtccttgtaaatccctagaagctcagccagatcctgacctcggtccgggctctggtttccctgcccctactgttgagtccacacctgatgtttgtccttcatcacctgccctgcagacaccctccctttcatccggtcagctgcctcctctcttgatccccacagatccctcttcccctccaccctgtcccccggtattaactgttgccactccgccccctcccctccttcctaccgtacctcttccagccccctcttccagtgcatctccacacccatgcccctctccactctcaaatgccaccgcacagtccccacttccaattctgtccccaacagtgtccccctctccctctcccattcctcccgtggagcccctgatgtctgccgcctcacccgggcctccaacactttcttcttcctcctcttcatcttcctcctcctcttcgttttcttcttcatcttcctcctcttctccttctccacctcctctctccgcaatatcatctgttgtttcctctggtgataatctggaggcttctctccccatgatatctttcaaacaggaggaattagagaatgaaggtctgaaacccagggaagagccccagtctgctgctgaacaggatgttgttgttcaggaaacattcaacaaaaactttgtttgcaacgtctgtgaatcaccttttctttccattaaagatctaaccaaacatttatctattcatgctgaagaatggcccttcaaatgtgaattttgtgtgcagctttttaaggataaaacggacttgtcagaacatcgctttttgcttcatggagttgggaatatctttgtgtgttctgtttgtaaaaaagaatttgcttttttgtgcaatttgcagcagcaccagcgagatctccacccagataaggtgtgcacacatcacgagtttgaaagcgggactctgaggccccagaactttacagatcccagcaaggcccatgtagagcatatgcagagcttgccagaagatcctttagaaacttctaaagaagaagaggagttaaatgattcctctgaagagctttacacgactataaaaataatggcttctggaataaagacaaaagatccagatgttcgattgggcctcaatcagcattacccaagctttaaaccacctccatttcagtaccatcaccgtaaccccatggggattggtgtgacagccacaaatttcactacacacaatattccacagactttcactaccgccattcgctgcacaaagtgtggaaaaggtgtcgacaatatgccggagttgcacaaacatatcctggcttgtgcttctgcaagtgacaagaagaggtacacgcctaagaaaaacccagtaccattaaaacaaactgtgcaacccaaaaatggcgtggtggttttagataactctgggaaaaatgccttccgacgaatgggacagcccaaaaggcttaactttagtgttgagctcagcaaaatgtcgtcgaataagctcaaattaaatgcattgaagaaaaaaaatcagctagtacagaaagcaattcttcagaaaaacaaatctgcaaagcagaaggccgacttgaaaaatgcttgtgagtcatcctctcacatctgcccttactgtaatcgagagttcacttacattggaagcctgaataaacacgccgccttcagctgtcccaaaaaacccctttctcctcccaaaaaaaaagtttctcattcatctaagaaaggtggacactcatcacctgcaagtagtgacaaaaacagtaacagcaaccaccgcagacggacagcggatgcggagattaaaatgcaaagcatgcagactccgttgggcaagaccagagcccgcagctcaggccccacccaagtcccacttccctcctcatccttcaggtccaagcagaacgtcaagtttgcagcttcggtgaaatccaaaaaaccaagctcctcctctttaaggaactccagcccgataagaatggccaaaataactcatgttgaggggaaaaaacctaaagctgtggccaagaatcattctgctcagctttccagcaaaacatcacggagcctgcacgtgagggtacagaaaagcaaagctgttttacaaagcaaatccaccttggcgagtaagaaaagaacagaccggttcaatataaaatctagagagcggagtggggggccagtcacccggagccttcagctggcagctgctgctgacttgagtgagaacaagagagaggacggcagcgccaagcaggagctgaaggacttcagctacagcctccgcttggcgtcccgatgctctccaccagcggccccgtacatcaccaggcagtataggaaggtcaaagctccagctgcagcccagttccagggaccattcttcaaagagtagtaatgaactagtccgtaacttgaaagtatttcgatttcttggctttatatatcttgtggaaaggacgagacgtgtgatcccagcatgtacct

SEQ ID NO: 2370 - DNA, 4547 bp, Homo sapiens
  source 1..4547: mol_type = genomic DNA
accgccaccatgagagattctgcagaaggtcctaaagaagacgaagagaagccttcagcctcagcacttgagcagccggccaccctccaggaggtggccagtcaggaggtgcctccagaactagcaacccctgcccctgcctgggagccacagccagaaccagacgagcgattagaagcggcagcttgtgaggtgaatgatttgggggaagaggaggaggaggaagaggaggaggatgaagaagaagaagaagatgatgatgatgatgagttggaagacgagggggaagaagaagccagcatgccaaatgaaaattctgtgaaagagccagaaatacggtgtgatgagaagccagaagatttattagaggaaccaaaaacaacttcagaagaaactcttgaagactgctcagaggtaacacctgccatgcaaatccccagaactaaagaagaggccaatggtgatgtatttgaaacgtttatgtttccgtgtcaacattgtgaaaggaagtttacaaccaaacaggggcttgagcgtcacatgcatatccatatatccaccgtcaatcatgctttcaaatgcaagtactgtgggaaagcctttggcacacagattaaccggcggcgacatgagcggcgccatgaagcagggttaaagcggaaacccagccaaacactacagccgtcagaggatctggctgatggcaaagcatctggagaaaacgttgcttcaaaagatgattcgagtcctcccagtcttgggccagactgtctgatcatgaattcagagaaggcttcccaagacacaataaattcttctgtcgtagaagagaatggggaagttaaagaacttcatccgtgcaaatattgtaaaaaggtttttggaactcatactaatatgagacggcatcagcgtagagttcacgaacgtcatctgattcccaaaggtgtacggcgaaaaggaggccttgaagagccccagcctccagcagaacaggcccaggccacccagaacgtgtatgtaccaagcacagagccggaggaggaaggggaagcagatgatgtgtacatcatggacatttctagcaatatctctgaaaacttaaattactatattgatggtaaaattcaaactaataacaacactagtaactgtgatgtgattgagatggagtctgcttcggcagatttgtatggtataaattgtctgctcactccagttacagtggaaattactcaaaatataaagaccacacaggtccctgtaacagaagatcttcctaaagagcctttgggcagcacaaatagtgaggccaagaagcggagaactgcgagcccacctgcactgcccaaaattaaggccgaaacagactctgaccccatggtcccctcttgctctttaagtcttcctcttagcatatcaacaacagaggcagtgtctttccacaaagagaaaagtgtttatttgtcatcaaagctcaaacaacttcttcaaacccaagataaactaactcctgcagggatttcagcaactgaaatagctaaattaggtcctgtttgtgtgtctgctcctgcatcaatgttgcctgtgacctcaagtaggtttaagaggcggaccagctctcctcccagttctccacagcacagtcctgcccttcgagactttggaaagccaagtgatgggaaagcagcatggaccgatgccgggctgacttccaaaaaatccaaattagaaagtcacagcgactcaccagcatggagtttgtctgggagagatgagagagaaactgtgagccctccatgctttgatgaatataaaatgtctaaagagtggacagctagttctgcttttagcagtgtgtgcaaccagcagccactggatttatccagcggtgtcaaacagaaggctgagggtacaggcaagactccagtccagtgggaatctgtcttagatctcagtgtgcataaaaagcattgtagtgactctgaaggcaaggaattcaaagaaagtcattcagtgcagcctacgtgtagtgctgtaaagaaaaggaaaccaaccacctgcatgctgcagaaggttcttctcaatgaatataatggcatcgatttacctgtagaaaaccctgcagatgggaccaggagcccaagtccttgtaaatccctagaagctcagccagatcctgacctcggtccgggctctggtttccctgcccctactgttgagtccacacctgatgtttgtccttcatcacctgccctgcagacaccctccctttcatccggtcagctgcctcctctcttgatccccacagatccctcttcccctccaccctgtcccccggtattaactgttgccactccgccccctcccctccttcctaccgtacctcttccagccccctcttccagtgcatctccacacccatgcccctctccactctcaaatgccaccgcacagtccccacttccaattctgtccccaacagtgtccccctctccctctcccattcctcccgtggagcccctgatgtctgccgcctcacccgggcctccaacactttcttcttcctcctcttcatcttcctcctcctcttcgttttcttcttcatcttcctcctcttctccttctccacctcctctctccgcaatatcatctgttgtttcctctggtgataatctggaggcttctctccccatgatatctttcaaacaggaggaattagagaatgaaggtctgaaacccagggaagagccccagtctgctgctgaacaggatgttgttgttcaggaaacattcaacaaaaactttgtttgcaacgtctgtgaatcaccttttctttccattaaagatctaaccaaacatttatctattcatgctgaagaatggcccttcaaatgtgaattttgtgtgcagctttttaaggataaaacggacttgtcagaacatcgctttttgcttcatggagttgggaatatctttgtgtgttctgtttgtaaaaaagaatttgcttttttgtgcaatttgcagcagcaccagcgagatctccacccagataaggtgtgcacacatcacgagtttgaaagcgggactctgaggccccagaactttacagatcccagcaaggcccatgtagagcatatgcagagcttgccagaagatcctttagaaacttctaaagaagaagaggagttaaatgattcctctgaagagctttacacgactataaaaataatggcttctggaataaagacaaaagatccagatgttcgattgggcctcaatcagcattacccaagctttaaaccacctccatttcagtaccatcaccgtaaccccatggggattggtgtgacagccacaaatttcactacacacaatattccacagactttcactaccgccattcgctgcacaaagtgtggaaaaggtgtcgacaatatgccggagttgcacaaacatatcctggcttgtgcttctgcaagtgacaagaagaggtacacgcctaagaaaaacccagtaccattaaaacaaactgtgcaacccaaaaatggcgtggtggttttagataactctgggaaaaatgccttccgacgaatgggacagcccaaaaggcttaactttagtgttgagctcagcaaaatgtcgtcgaataagctcaaattaaatgcattgaagaaaaaaaatcagctagtacagaaagcaattcttcagaaaaacaaatctgcaaagcagaaggccgacttgaaaaatgcttgtgagtcatcctctcacatctgcccttactgtaatcgagagttcacttacattggaagcctgaataaacacgccgccttcagctgtcccaaaaaacccctttctcctcccaaaaaaaaagtttctcattcatctaagaaaggtggacactcatcacctgcaagtagtgacaaaaacagtaacagcaaccaccgcagacggacagcggatgcggagattaaaatgcaaagcatgcagactccgttgggcaagaccagagcccgcagctcaggccccacccaagtcccacttccctcctcatccttcaggtccaagcagaacgtcaagtttgcagcttcggtgaaatccaaaaaaccaagctcctcctctttaaggaactccagcccgataagaatggccaaaataactcatgttgaggggaaaaaacctaaagctgtggccaagaatcattctgctcagctttccagcaaaacatcacggagcctgcacgtgagggtacagaaaagcaaagctgttttacaaagcaaatccaccttggcgagtaagaaaagaacagaccggttcaatataaaatctagagagcggagtggggggccagtcacccggagccttcagctggcagctgctgctgacttgagtgagaacaagagagaggacggcagcgccaagcaggagctgaaggacttcaggaacttcctgtagtaatgaactagtccgtaacttgaaagtatttcgatttcttggctttatatatcttgtggaaaggacgagaagaagaggtaacaagcccagtg

SEQ ID NO: 2371 - DNA, 4100 bp, Homo sapiens
  source 1..4100: mol_type = genomic DNA
accgccaccatggagagccgggatcccgcccagccgatgtcgcctggagaagcgacgcagagtggcgcccggcctgccgaccgctatggcctattgaagcacagtcgcgagttcttggacttcttctgggacattgcgaagcctgagcaggagacgcgacttgcggccacggagaagctgctggagtatctgcgtggcaggccgaaggggtccgagatgaaatatgccctgaagcgtctaatcacgggactcggggtcgggcgagaaacagcccggccctgctacagtttggccctggcacagctgttacagtcttttgaagacctccccttgtgcagcatcctgcagcagatacaagaaaaatatgacctgcatcaggtgaagaaggcaatgctgagacctgctctctttgcaaacctgtttggagtgctcgccctctttcagtcaggtcggctggtgaaggaccaggaggcactgatgaagtcggtgaagctgctgcaggccctggcccagtaccaaaaccacttgcaggagcagccccggaaggccctggtggacatcctctccgaggtctcgaaggccacattgcaggagatcctgccggaggtcctcaaagccgacttgaatataatactcagctcccctgaacagctagagctcttcctcctggcccagcagaaggtgccctccaagctcaagaagctggtgggatccgtgaacctattctcagatgagaatgtccccaggctggtgaatgtgctgaagatggccgcctcctctgtgaagaaggaccgcaagctgcccgccattgctctggacctgctccgcctggcactcaaggaagacaagttcccacggttctggaaggaggtggtggaacaagggctgctgaagatgcagttctggccagccagctacctgtgtttccgcctgctgggcgcggccctgcccctgctgaccaaggagcagctgcacctggtgatgcagggagacgtgatccgccattacggggagcacgtgtgcactgctaagctcccaaagcagttcaagtttgccccagagatggacgattacgtgggcaccttcctagaggggtgccaggatgaccctgagcggcagctggccgtgctagtggccttctcatctgtcaccaaccaaggcctccctgtcacgcctactttctggcgggtcgtgcggttcctgagccctccggccctgcagggctatgtggcctggctgcgggccatgtttctccagccagacctggactccttggttgacttcagcaccaacaaccagaagaaagcccaggattcatcgctccacatgcctgagcgagctgtgttccggctgaggaaatggatcatctttcgattggtgagcattgtggacagcctgcacctggagatggaggaggccttgactgagcaggtggccaggttttgtttgttccactcgttctttgtcacaaagaagcccacatcccagatccctgagacaaagcacccgttctccttccctttggaaaaccaggcccgagaggctgtcagcagtgccttcttcagtctgttgcagaccctcagcacgcagttcaagcaggcaccgggccagacccagggtgggcagccctggacctaccacctggtgcagttcgcagacctcctgttgaatcacagccacaacgtgaccaccgtgacacccttcactgcgcagcagcgccaggcctgggaccggatgctgcagactctgaaggagctggaggcccactccgcagaggccagggctgctgccttccagcaccttctgctcctcgtgggcatccacctcctcaagtcccctgcagagagctgtgacctgctgggtgacatccagacctgcatcaggaaaagtctgggagagaagccccgccggagccgcaccaagaccatcgacccccaggaacccccgtgggtagaggtgctggtggagatcttgctggccctgttggcccagcccagccacctcatgcgccaggtggcccggagcgtgtttggccacatctgctcccacctgaccccgcgtgccctgcagctaattctggatgtgctgaaccccgagaccagtgaggatgagaatgaccgtgtggtggtgacggacgattctgatgagcggcggctgaagggtgcagaggacaagagcgaggaaggtgaggacaacagaagctcagagagtgaagaggagagcgagggggaggagagcgaggaggaggagcgcgacggggacgtggatcagggcttccgggaacagctgatgaccgtgctgcaggctgggaaggcgctgggtggagaggacagtgagaacgaggaggagctgggggatgaggccatgatggccctggaccagagcctcgccagcctctttgccgagcagaagctgcgtatccaggcccggcgagacgagaagaacaagctgcagaaggagaaggctctgcggcgcgacttccagatccgggtgctggacctggtggaggtgctagtgaccaagcagcccgagaatgccctggtcctggagctgctggagccgctgctgagcatcatccggcgcagcctgcgcagcagcagctccaaacaggagcaggaccttctgcacaagacggcgcgcatcttcacgcaccacctgtgccgtgcccggcgctactgccacgacttgggtgagcgcgcaggggccctgcacgcccaggtggagcggttggtgcagcaggctggccgccagcccgactcccccaccgccctctaccacttcaacgcctctctctacctgctccgggtcttgaagggcaacactgctgagggctgcgtgcatgagacacaggagaagcagaaagctggcactgaccccagccacatgcccacgggcccgcaggctgccagctgcttggacttgaacctggtgacccgggtgtactcgacagcactgagctccttcctgaccaagcgcaacagccccctcacagttcccatgttcctcagcctcttctcccggcacccggtgctctgtcagagcctgctccccatcctggtccagcatatcacgggcccggtgcggccccgtcatcaggcctgcctgctgctccagaagaccctgtccatgcgggaggtgaggtcgtgctttgaggaccccgagtggaagcagctgatgggccaggtcctagcaaaggtcaccgagaacttgcgcgtgctgggggaggcgcagaccaaggcgcagcatcagcaggcactgtcctccctggagctgctcaacgttctcttcaggacctgcaaacatgagaagctgaccttggacctgacggtgctcctgggtgtgctgcaggggcaacagcagagcctacagcagggggcacactccaccggctccagccgcctgcacgacctctactggcaggccatgaaaaccctgggagtccagcgccccaagttggagaagaaggatgccaaggagatccccagtgccacccagagccccatcagtaagaagcggaagaaaaagggattcttgccagagacgaagaagcgcaagaaacgcaagtcagaggatggcacgccagcggaggatggcacacctgcagccaccggcgggagccagccccccagcatgggcaggaagaagaggaacaggacaaaggctaaggtcccagcccaggcaaacgggacgccaaccaccaagagtccagcccctggcgcccccacccggagccccagcacccctgccaaatccccaaaactgcagaagaaaaaccagaagccgtcccaggtgaatggagctcccgggtcccccacggaacctgcaggccaaaagcagcatcagaaggctcttcccaaaaagggggtcttgggcaaatcaccactgtccgcgctggcacggaaaaaggcaaggctgtctttggtcatcaggagtcccagcctgcttcagagtggggccaagaagaaagcacagactctgagattcacaatcagcagctctaaaaaatagtaatgaactagtccgtaacttgaaagtatttcgatttcttggctttatatatcttgtggaaaggacgaagactcgtctagagttaagagcgg

SEQ ID NO: 2372 - DNA, 4088 bp, Homo sapiens
  source 1..4088: mol_type = genomic DNA
accgccaccatggagagccgggatcccgcccagccgatgtcgcctggagaagcgacgcagagtggcgcccggcctgccgaccgctatggcctattgaagcacagtcgcgagttcttggacttcttctgggacattgcgaagcctgagcaggagacgcgacttgcggccacggagaagctgctggagtatctgcgtggcaggccgaaggggtccgagatgaaatatgccctgaagcgtctaatcacgggactcggggtcgggcgagaaacagcccggccctgctacagtttggccctggcacagctgttacagtcttttgaagacctccccttgtgcagcatcctgcagcagatacaagaaaaatatgacctgcatcaggtgaagaaggcaatgctgagacctgctctctttgcaaacctgtttggagtgctcgccctctttcagtcaggtcggctggtgaaggaccaggaggcactgatgaagtcggtgaagctgctgcaggccctggcccagtaccaaaaccacttgcaggagcagccccggaaggccctggtggacatcctctccgaggtctcgaaggccacattgcaggagatcctgccggaggtcctcaaagccgacttgaatataatactcagctcccctgaacagctagagctcttcctcctggcccagcagaaggtgccctccaagctcaagaagctggtgggatccgtgaacctattctcagatgagaatgtccccaggctggtgaatgtgctgaagatggccgcctcctctgtgaagaaggaccgcaagctgcccgccattgctctggacctgctccgcctggcactcaaggaagacaagttcccacggttctggaaggaggtggtggaacaagggctgctgaagatgcagttctggccagccagctacctgtgtttccgcctgctgggcgcggccctgcccctgctgaccaaggagcagctgcacctggtgatgcagggagacgtgatccgccattacggggagcacgtgtgcactgctaagctcccaaagcagttcaagtttgccccagagatggacgattacgtgggcaccttcctagaggggtgccaggatgaccctgagcggcagctggccgtgctagtggccttctcatctgtcaccaaccaaggcctccctgtcacgcctactttctggcgggtcgtgcggttcctgagccctccggccctgcagggctatgtggcctggctgcgggccatgtttctccagccagacctggactccttggttgacttcagcaccaacaaccagaagaaagcccaggattcatcgctccacatgcctgagcgagctgtgttccggctgaggaaatggatcatctttcgattggtgagcattgtggacagcctgcacctggagatggaggaggccttgactgagcaggtggccaggttttgtttgttccactcgttctttgtcacaaagaagcccacatcccagatccctgagacaaagcacccgttctccttccctttggaaaaccaggcccgagaggctgtcagcagtgccttcttcagtctgttgcagaccctcagcacgcagttcaagcaggcaccgggccagacccagggtgggcagccctggacctaccacctggtgcagttcgcagacctcctgttgaatcacagccacaacgtgaccaccgtgacacccttcactgcgcagcagcgccaggcctgggaccggatgctgcagactctgaaggagctggaggcccactccgcagaggccagggctgctgccttccagcaccttctgctcctcgtgggcatccacctcctcaagtcccctgcagagagctgtgacctgctgggtgacatccagacctgcatcaggaaaagtctgggagagaagccccgccggagccgcaccaagaccatcgacccccaggaacccccgtgggtagaggtgctggtggagatcttgctggccctgttggcccagcccagccacctcatgcgccaggtggcccggagcgtgtttggccacatctgctcccacctgaccccgcgtgccctgcagctaattctggatgtgctgaaccccgagaccagtgaggatgagaatgaccgtgtggtggtgacggacgattctgatgagcggcggctgaagggtgcagaggacaagagcgaggaaggtgaggacaacagaagctcagagagtgaagaggagagcgagggggaggagagcgaggaggaggagcgcgacggggacgtggatcagggcttccgggaacagctgatgaccgtgctgcaggctgggaaggcgctgggtggagaggacagtgagaacgaggaggagctgggggatgaggccatgatggccctggaccagagcctcgccagcctctttgccgagcagaagctgcgtatccaggcccggcgagacgagaagaacaagctgcagaaggagaaggctctgcggcgcgacttccagatccgggtgctggacctggtggaggtgctagtgaccaagcagcccgagaatgccctggtcctggagctgctggagccgctgctgagcatcatccggcgcagcctgcgcagcagcagctccaaacaggagcaggaccttctgcacaagacggcgcgcatcttcacgcaccacctgtgccgtgcccggcgctactgccacgacttgggtgagcgcgcaggggccctgcacgcccaggtggagcggttggtgcagcaggctggccgccagcccgactcccccaccgccctctaccacttcaacgcctctctctacctgctccgggtcttgaagggcaacactgctgagggctgcgtgcatgagacacaggagaagcagaaagctggcactgaccccagccacatgcccacgggcccgcaggctgccagctgcttggacttgaacctggtgacccgggtgtactcgacagcactgagctccttcctgaccaagcgcaacagccccctcacagttcccatgttcctcagcctcttctcccggcacccggtgctctgtcagagcctgctccccatcctggtccagcatatcacgggcccggtgcggccccgtcatcaggcctgcctgctgctccagaagaccctgtccatgcgggaggtgaggtcgtgctttgaggaccccgagtggaagcagctgatgggccaggtcctagcaaaggtcaccgagaacttgcgcgtgctgggggaggcgcagaccaaggcgcagcatcagcaggcactgtcctccctggagctgctcaacgttctcttcaggacctgcaaacatgagaagctgaccttggacctgacggtgctcctgggtgtgctgcaggggcaacagcagagcctacagcagggggcacactccaccggctccagccgcctgcacgacctctactggcaggccatgaaaaccctgggagtccagcgccccaagttggagaagaaggatgccaaggagatccccagtgccacccagagccccatcagtaagaagcggaagaaaaagggattcttgccagagacgaagaagcgcaagaaacgcaagtcagaggatggcacgccagcggaggatggcacacctgcagccaccggcgggagccagccccccagcatgggcaggaagaagaggaacaggacaaaggctaaggtcccagcccaggcaaacgggacgccaaccaccaagagtccagcccctggcgcccccacccggagccccagcacccctgccaaatccccaaaactgcagaagaaaaaccagaagccgtcccaggtgaatggagctcccgggtcccccacggaacctgcaggccaaaagcagcatcagaaggctcttcccaaaaagggggtcttgggcaaatcaccactgtccgcgctggcacggaaaaaggcaaggctgtctttggtcatcaggagtcccagcctgcttcagagtggggccaagaagaaagcacaggtgaggaaggcagggaagccctagtaatgaactagtccgtaacttgaaagtatttcgatttcttggctttatatatcttgtggaaaggacgaataatggttatacccgtagatgtg

SEQ ID NO: 2373 - DNA, 944 bp, Homo sapiens
  source 1..944: mol_type = genomic DNA
accgccaccatgccagctgatataatggagaaaaattcctcgtccccggtggctgctaccccagccagtgtcaacacgacaccggataaaccaaagacagcatctgagcacagaaagtcatcaaagcctattatggagaaaagacgaagagcaagaataaatgaaagtctgagccagctgaaaacactgattttggatgctctgaagaaagatagctcgcggcattccaagctggagaaggcggacattctggaaatgacagtgaagcacctccggaacctgcagcgggcgcagatgacggctgcgctgagcacagacccaagtgtgctggggaagtaccgagccggcttcagcgagtgcatgaacgaggtgacccgcttcctgtccacgtgcgagggcgttaataccgaggtgcgcactcggctgctcggccacctggccaactgcatgacccagatcaatgccatgacctaccccgggcagccgcaccccgccttgcaggcgccgccaccgcccccaccgggacccggcggcccccagcacgcgccgttcgcgccgccgccgccactcgtgcccatccccgggggcgcggcgccccctcccggcggcgccccctgcaagctgggcagccaggctggagaggcggctaaggtgtttggaggcttccaggtggtaccggctcccgatggccagtttgctttcctcattcccaacggggccttcgcgcacagcggccctgtcatccccgtctacaccagcaacagcggcacctccgtgggccccaacgcagtgtcaccttccagcggcccctcgcttacggcggactccatgtggaggccgtggcggaactagtaatgaactagtccgtaacttgaaagtatttcgatttcttggctttatatatcttgtggaaaggacgacgatcgcgacaattagcctctcaa

SEQ ID NO: 2374 - DNA, 623 bp, Homo sapiens
  source 1..623: mol_type = genomic DNA
accgccaccatggggctgcctcgccgggcaggggacgcggcggagctgcgcaagagcctgaagccgctgctggagaagcgccggcgcgcgcgcatcaaccagagcctgagccagcttaaggggctcatcctgccgctgctgggccgggagaactccaactgctcgaagctagagaaggcagacgtcctggaaatgaccgtgcgcttcctgcaggagctgcctgcgtcctcatggcccacggcagcgcccctgccttgcgacagctaccgcgagggctacagcgcctgtgtggcgcgcctggcccgcgtgctgcccgcctgccgtgtcctggagcccgccgtgagcgcgcgcctgctggagcacctgtggcggagagcggccagcgccaccctggacggcgggcgcgctggggattccagtggcccgtctgcccccgccccagcgcccgcgtctgccccagagcccgcatccgctccggtgccctcgccgccctcgcctccctgcggccctggcctctggcggccgtggtagtaatgaactagtccgtaacttgaaagtatttcgatttcttggctttatatatcttgtggaaaggacgacggtctgagtcactcaagtttgct

SEQ ID NO: 2375 - DNA, 662 bp, Homo sapiens
  source 1..662: mol_type = genomic DNA
accgccaccatggagaaaaagcgccgggcacgcatcaatgtgtcactggagcagctcaagtcgctgctggagaaacactactcgcaccagatccggaagcgcaaattggagaaggccgacatcctggagttgagcgtgaagtacatgagaagccttcagaactccttgcaagggctctggcctgtgcccaggggagccgagcaaccgtcgggcttccgcagctgcctgcccggcgtgagccagctccttcggcgcggagatgaggtcggcagcggcctgcgctgccccctggtgcccgagagcgccgccggcagcaccatggacagcgccgggttgggccaggaggcgcccgcgctgttccgcccttgcacccctgccgtctgggctcctgctccggccgccggcggcccgcggtccccaccacccctgctcctcctccccgaaagtctccctggctcgtccgccagcgtccccccgccgcagccagcgtcgagtcgctgcgccgagagtcccgggctgggcctgcgcgtgtggcggccctggggaagccccggggatgacctgaactagtaatgaactagtccgtaacttgaaagtatttcgatttcttggctttatatatcttgtggaaaggacgaagtgtttaagcgttcaggacgctc

SEQ ID NO: 2376 - DNA, 671 bp, Homo sapiens
  source 1..671: mol_type = genomic DNA
accgccaccatggccgcagacacgccggggaaaccgagcgcctcgccgatggcaggagcgccggccagcgccagccggaccccagacaagccccggagcgcggccgagcaccgcaagagctcccgccactcgaagctggagaaggcggacatcctggagatgaccgtgagacacctgcggagcctgcgtcgcgtgcaggtgacggccgcgctcagcgccgaccccgccgttctgggcaagtaccgcgccggcttccacgagtgtctggcggaggtgaaccgcttcctggccggctgcgagggcgtcccggccgacgtgcgctcccgcctgctgggccacctggcagcctgcctgcgccagctgggaccctcccgccgcccggcctcgctgtccccggctgcccccgcagaggccccagcgcccgaggtctacgcgggccgcccgctgctgccatcgctcggcggccccttccctctgctcgcgccgccgctgctgccgggtctgacccgggcgctgcccgccgcccccagggcggggccgcagggcccgggtgggccctggaggccgtggctgcgctagtaatgaactagtccgtaacttgaaagtatttcgatttcttggctttatatatcttgtggaaaggacgagcggtatccaacagtatctagaat

SEQ ID NO: 2377 - DNA, 845 bp, Homo sapiens
  source 1..845: mol_type = genomic DNA
accgccaccatggccgcagacacgccggggaaaccgagcgcctcgccgatggcaggagcgccggccagcgccagccggaccccagacaagccccggagcgcggccgagcaccgcaaggtggggtcccggccgggcgtgaggggggcgaccggggggcgggagggacgcgggactcagccggtgcccgacccgcagtcctccaagccggtcatggagaagcggcgccgagcgcgtattaacgagagcctcgctcagctcaaaaccctcatcctggacgccctcagaaaagagagctcccgccactcgaagctggagaaggcggacatcctggagatgaccgtgagacacctgcggagcctgcgtcgcgtgcaggtgacggccgcgctcagcgccgaccccgccgttctgggcaagtaccgcgccggcttccacgagtgtctggcggaggtgaaccgcttcctggccggctgcgagggcgtcccggccgacgtgcgctcccgcctgctgggccacctggcagcctgcctgcgccagctgggaccctcccgccgcccggcctcgctgtccccggctgcccccgcagaggccccagcgcccgaggtctacgcgggccgcccgctgctgccatcgctcggcggccccttccctctgctcgcgccgccgctgctgccgggtctgacccgggcgctgcccgccgcccccagggcggggccgcagggcccgggtgggccctggaggccgtggctgcgctagtaatgaactagtccgtaacttgaaagtatttcgatttcttggctttatatatcttgtggaaaggacgaggtcagctgggcatgtcacctaat

SEQ ID NO: 2378 - DNA, 767 bp, Homo sapiens
  source 1..767: mol_type = genomic DNA
accgccaccatggccgcagacacgccggggaaaccgagcgcctcgccgatggcaggagcgccggccagcgccagccggaccccagacaagccccggagcgcggccgagcaccgcaagtcctccaagccggtcatggagaagcggcgccgagcgcgtattaacgagagcctcgctcagctcaaaaccctcatcctggacgccctcagaaaagagagctcccgccactcgaagctggagaaggcggacatcctggagatgaccgtgagacacctgcggagcctgcgtcgcgtgcaggtgacggccgcgctcagcgccgaccccgccgttctgggcaagtaccgcgccggcttccacgagtgtctggcggaggtgaaccgcttcctggccggctgcgagggcgtcccggccgacgtgcgctcccgcctgctgggccacctggcagcctgcctgcgccagctgggaccctcccgccgcccggcctcgctgtccccggctgcccccgcagaggccccagcgcccgaggtctacgcgggccgcccgctgctgccatcgctcggcggccccttccctctgctcgcgccgccgctgctgccgggtctgacccgggcgctgcccgccgcccccagggcggggccgcagggcccgggtgggccctggaggccgtggctgcgctagtaatgaactagtccgtaacttgaaagtatttcgatttcttggctttatatatcttgtggaaaggacgactgcctccagctccgttcagcacg

SEQ ID NO: 2379 - DNA, 602 bp, Homo sapiens
  source 1..602: mol_type = genomic DNA
accgccaccatggcccccagcactgtggccgtggagctgctcagccccaaagagaaaaaccgactgcggaagccggtggtggagaagatgcgccgcgaccgcatcaacagcagcatcgagcagctgaagctgctgctggagcaggagttcgcgcggcaccagcccaactccaagctggagaaggccgacatcctggagatggctgtcagctacctgaagcacagcaaagccttcgtcgccgccgccggccccaagagcctgcaccaggactacagcgaaggctactcgtggtgcctgcaggaggccgtgcagttcctgacgctccacgccgccagcgacacgcagatgaagctgctgtaccacttccagcggcccccggccgcgcccgccgcgcccgccaaggagcccaaggcgccgggcgccgcgcccccgcccgcgctctccgccaaggccaccgccgccgccgccgccgcgcaccagcccgcctgcggcctctggcggccctggtagtaatgaactagtccgtaacttgaaagtatttcgatttcttggctttatatatcttgtggaaaggacgagcggcttcaatatgtcagtcgtcc

SEQ ID NO: 2380 - DNA, 770 bp, Homo sapiens
  source 1..770: mol_type = genomic DNA
accgccaccatggcgccacccgcggcgcctggccgggaccgtgtgggccgtgaggatgaggacggctgggagacgcgaggggaccgcaaggcccggaagcccctggtggagaagaagcggcgcgcgcggatcaacgagagcctgcaggagctgcggctgctgctggcgggcgccgaggccaagctggagaacgccgaagtgctggagctgacggtgcggcgggtccagggtgtgctgcggggccgggcgcgcgagcgcgagcagctgcaggcggaagcgagcgagcgcttcgctgccggctacatccagtgcatgcacgaggtgcacacgttcgtgtccacgtgccaggccatcgacgctaccgtcgctgccgagctcctgaaccatctgctcgagtccatgccgctgcgtgagggcagcagcttccaggatctgctgggggacgccctggcggggccacctagagcccctggacggagtggctggcctgcggggggcgctccgggatccccaatacccagccccccgggtcctggggacgacctgtgctccgacctggaggaggcccctgaggctgaactgagtcaggctcctgctgaggggcccgacttggtgcccgcagccctgggcagcctgaccacagcccaaattgcccggagtgtctggaggccttggtagtaatgaactagtccgtaacttgaaagtatttcgatttcttggctttatatatcttgtggaaaggacgagcgtgagatatcaagaatttgtct

SEQ ID NO: 2381 - DNA, 440 bp, Homo sapiens
  source 1..440: mol_type = genomic DNA
accgccaccatggcgccacccgcggcgcctggccgggaccgtgtgggccgtgaggatgaggacggctgggagacgcgaggggaccgcaaggcccggaagcccctggtggagaagaagcggcgcgcgcggatcaacgagagcctgcaggagctgcggctgctgctggcgggcgccgaggtgcaggccaagctggagaacgccgaagtgctggagctgacgagcgcgagcagctgcaggcggaagcgagcgagcgcttcgctgccggctacatccagtgcatgcacgaggtgcacacgttcgtgtccacgtgccaggccatcgacgctaccgtcgctgccgagctcctagtaatgaactagtccgtaacttgaaagtatttcgatttcttggctttatatatcttgtggaaaggacgaccggtacaatgccctcattgtgag

SEQ ID NO: 2382 - DNA, 794 bp, Homo sapiens
  source 1..794: mol_type = genomic DNA
accgccaccatggtcacccgggatcgagctgagaatagggacggccccaagatgctcaagccgcttgtggagaagcggcgccgggaccgcatcaaccgcagcctggaagagctgaggctgctgctgctggagcggacccgggaccagaacctccggaacccgaagctggagaaagcggagatattggagttcgccgtgggctacttgagggagcgaagccgggtggagcccccggccgccgcggctccaggggttccccggtccccagtccaggacgccgaggcgctcgccagctgctacttgtccggtttccgcgagtgcctgcttcgcttggcggccttcgcgcacgacgccagcccggccgcccgcgcccagctcttctccgcgctgcacggctatctgcgccccaaaccgccccggcccaagccggtagatccgaggcctccagcgccgcgcccatccctggaccccgccgcaccggcccttggccctgcgctgcaccagcgccccccagtgcaccagggccaccctagcccgcgctgcgcatggtccccatccctctgctccccgcgcgccggggattctggcgcgccggcgcccctcaccggactgctgccgccgccaccgccgcctcacagacaagacggggcgcccaaggccccgctgcccccgccgcccgctttctggagaccttggccctagtaatgaactagtccgtaacttgaaagtatttcgatttcttggctttatatatcttgtggaaaggacgaatgatgacgctaaacggtagtatg

SEQ ID NO: 2383 - DNA, 779 bp, Homo sapiens
  source 1..779: mol_type = genomic DNA
accgccaccatggtcacccgggatcgagctgagaatagggacggccccaagatgctcaagccgcttgtggagaagcggcgccgggaccgcatcaaccgcagcctggaagagctgaggctgctgctgctggagcggacccgggaccagaacctccggaacccgaagctggagaaagcggagatattggagttcgccgtgggctacttgagggagcgaagccgggtggagcccccgggggttccccggtccccagtccaggacgccgaggcgctcgccagctgctacttgtccggtttccgcgagtgcctgcttcgcttggcggccttcgcgcacgacgccagcccggccgcccgcgcccagctcttctccgcgctgcacggctatctgcgccccaaaccgccccggcccaagccggtagatccgaggcctccagcgccgcgcccatccctggaccccgccgcaccggcccttggccctgcgctgcaccagcgccccccagtgcaccagggccaccctagcccgcgctgcgcatggtccccatccctctgctccccgcgcgccggggattctggcgcgccggcgcccctcaccggactgctgccgccgccaccgccgcctcacagacaagacggggcgcccaaggccccgctgcccccgccgcccgctttctggagaccttggccctagtaatgaactagtccgtaacttgaaagtatttcgatttcttggctttatatatcttgtggaaaggacgatagtcctctggtcgaccctcgcca

SEQ ID NO: 2384 - DNA, 476 bp, Homo sapiens
  source 1..476: mol_type = genomic DNA
accgccaccatggcagatgaggaagaagaccccacgtttgaggaagaaaatgaagaaattggaggaggtgcagaaggtggacagggtaaaagaaagagacttttttctaaagaattgcgatgtatgatgtatggctttggggatgaccagaatccttatactgagtcagtggatattcttgaagatcttgtcatagagtttatcactgaaatgactcacaaggcaatgtcaattggaagacaaggtcgagtacaagttgaagatatcgtcttcttgattcgaaaggacccaaggaagtttgccagggttaaagacttgcttactatgaatgaagaattgaaacgagctagaaaagcatttgatgaagcaaattatggatcttagtaatgaactagtccgtaacttgaaagtatttcgatttcttggctttatatatcttgtggaaaggacgaatttgaagcttcgtaccagaaata

SEQ ID NO: 2385 - DNA, 737 bp, Homo sapiens
  source 1..737: mol_type = genomic DNA
accgccaccatggacgatgcccacgagtcgccctccgacaaaggtggagagacaggggagtcggatgagacggccgctgtgcccggggacccgggggctaccgacaccgatggaatcccagaggaaactgacggagacgcagatgtggacttgaaagaagctgcagcggaggaaggcgagctcgagagtcaggatgtctcagatttaacaacagttgaaagggaagactcatcattacttaatcctgcagccaaaaaactgaaaatagataccaaagaaaagaaagagaaaaagcagaaagtagatgaagatgagattcagaagatgcaaatcctggtttcttctttttctgaggagcagctgaaccgttatgaaatgtatcgccgctcagctttccctaaggcagccatcaaaaggctgatccagtccatcactggcacctctgtgtctcagaatgttgttattgctatgtctggtatttccaaggttttcgtcggggaggtggtagaagaagcactggatgtgtgtgagaagtggggagaaatgccaccactacaacccaaacatatgagggaagccgttagaaggttaaagtcaaaaggacagatccctaactcgaagcacaaaaaaatcatcttcttctagtaatgaactagtccgtaacttgaaagtatttcgatttcttggctttatatatcttgtggaaaggacgaggagttccgtcaatcgggatattg

SEQ ID NO: 2386 - DNA, 566 bp, Homo sapiens
  source 1..566: mol_type = genomic DNA
accgccaccatggacgatgcccacgagtcgccctccgacaaaggtggagagacaggggagtcggatgagacggccgctgtgcccggggacccgggggctaccgacaccgatggaatcccagaggaaactgacggagacgcagatgtggacttgaaagaagctgcagcggaggaaggcgagctcgagagtcaggatgtctcagatttaacaacagttgaaagggaagactcatcattacttaatcctgcagccaaaaaactgaaaatagataccaaagaaaagaaagagaaaaagcagaaagtagatgaagatgagattcagaagatgcaaatcctggtttcttctttttctgaggagcagctgaaccgttatgaaatgtatcgccgctcagctttccctaaggcagccatcaaaaggcactggatgtgtgtgagaagtggggagaaatgccaccactacaacccaaacatatagtaatgaactagtccgtaacttgaaagtatttcgatttcttggctttatatatcttgtggaaaggacgacccggtggtgagcgtaatcgcctg

SEQ ID NO: 2387 - DNA, 758 bp, Homo sapiens
  source 1..758: mol_type = genomic DNA
accgccaccatgagctgcagcggctccggcgcggaccccgaggcggcgccggcctccgccgcctcggccccgggccccgcgcccccggtctcggctcccgccgcgctgccctccagcaccgccgcggagaacaaggccagccccgcggggacagcggggggacctggggctggagcagctgctgggggcacgggacccttggcggcgcgggccggggagccagctgagcggcgtggggcggctccggtgtcggcgggtggcgcggcgcccccggagggggccatatctaacggggtttacgtactgccgagcgcggccaacggagacgtgaagcccgtggtgtccagcacgcctttggtggacttcttgatgcagctggaagattacacgcctacgatcccagatgcagtgactggttactacctgaaccgtgctggctttgaggcctcagacccacgcataattcggctcatctccttagctgcccagaaattcatctcagatattgccaatgatgccctacagcactgcaaaatgaagggcacggcctccggcagctcccggagcaagagcaaggaccgcaagtacactctaaccatggaggacttgacccctgccctcagcgagtatggcatcaatgtgaagaagccgcactacttcacctagtaatgaactagtccgtaacttgaaagtatttcgatttcttggctttatatatcttgtggaaaggacgatgccctcgagagaaatactttcgt

SEQ ID NO: 2388 - DNA, 1706 bp, Homo sapiens
  source 1..1706: mol_type = genomic DNA
accgccaccatgctgcagcagctcctgatcaccctgcccaccgaggccagcacctgggtgaagttgcgtcatccaaaggcggccacggagcgggtggccctgtgggaggatgtgactaagatgtttaaagcagaagctctgctgtctcaggatgctgatgagacccagggcgaaagtttagagagtagagtgacccttggatccctgacagcagaatcccaggaactgttaaccttcaaggacgtatctgtggacttcactcaggaggagtgggggcagctggcccctgctcaccggaatctgtaccgggaggtgatgctggagaactatgggaacctggtctcagtgggatgtcagctttccaaacctggcgtgatttcccagttggagaaaggagaagaaccatggctgatggagagagatatttcaggagttccaagttcagacttgaagagcaaaacaaaaaccaaagagtcagccttacagaatgatatttcgtgggaagaactacattgtggcctaatgatggaaagatttacaaaaggaagcagcatgtattccaccttgggaagaatctccaaatgtaataagctagaaagccaacaagagaaccaaagaatgggtaaggggcaaatccccctgatgtgcaagaaaacattcactcaggagagaggccaagagtctaatagatttgagaaaagaattaatgtgaagtcagaagttatgccaggaccaataggtcttccaagaaaaagagatcgtaaatatgacacacctggaaagagaagcagatacaacatagatttagttaatcattcaaggagttatacaaaaatgaaaacctttgagtgtaatatttgtgaaaaaatcttcaaacagcttattcaccttactgaacacatgagaattcataccggggagaaacctttcagatgtaaggaatgtggaaaagcctttagccaaagttcatctcttattccgcatcagagaattcatactggtgagaaaccctatgaatgtaaggagtgtgggaaaaccttcagacatccttcatcgcttactcaacatgttagaattcataccggggaaaagccctatgaatgtagggtatgtgagaaagccttcagccagagcattggactgatccagcatttgagaactcatgttagagagaaaccttttacatgcaaagactgtggaaaagcgtttttccagattagacaccttaggcaacatgagattattcatactggtgtgaaaccctatatttgtaatgtatgtagtaaaaccttcagccatagtacatacctaactcaacaccagagaactcatactggagaaagaccatataaatgtaaggaatgtgggaaagcctttagccagagaatacatctttctatccatcagagagtccatactggagtaaaaccttatgaatgcagtcattgtgggaaagcctttaggcatgattcatcctttgctaaacatcagagaattcatactggagaaaaaccttatgattgtaatgagtgtggaaaagccttcagctgtagttcatcccttattagacactgcaaaacacatttaagaaataccttcagcaatgttgtgtagtaatgaactagtccgtaacttgaaagtatttcgatttcttggctttatatatcttgtggaaaggacgaacgcgaggaaggtatcgtaggtat

SEQ ID NO: 2389 - DNA, 2246 bp, Homo sapiens
  source 1..2246: mol_type = genomic DNA
accgccaccatgctggacacgatggaggcgcccggccactccaggcagctgctgctgcagctcaacaaccagcgcaccaagggcttcttgtgcgacgtgatcatcgtggtgcagaacgccctcttccgcgcgcacaagaacgtgctggcggccagcagcgcctacctcaagtccctggtggtgcatgacaacctgctcaacctggaccatgacatggtgagcccggccgtgttccgcctggtgctggacttcatctacaccggccgcctggctgacggcgcagaggcggctgcggccgcggccgtggccccgggggctgagccgagcctgggcgccgtgctggccgccgccagctacctgcagatccccgacctcgtggcgctgtgcaagaaacgcctcaagcgccacggcaagtactgccacctgcggggcggcggcggcggcggcggcggctacgcgccctatggtcggccgggccggggcctgcgggccgccacgccggtcatccaggcctgctacccgtccccagtcgggcctccgccgccgcctgccgcggagccgccctcgggcccagaggccgcggtcaacacgcactgcgccgagctgtacgcgtcgggacccggcccggccgccgcactctgtgcctcggagcgccgctgctcccctctttgtggcctggacctgtccaagaagagcccgccgggctccgcggcgccagagcggccgctggctgagcgcgagctgcccccgcgcccggacagccctcccagcgccggccccgccgcctacaaggagccgcctctcgccctgccgtcgctgccgccgctgcccttccagaagctggaggaggccgcaccgccttccgacccatttcgcggcggcagcggcagcccgggacccgagccccccggccgccccgacgggcctagtctcctctatcgctggatgaagcacgagccgggcctgggtagctatggcgacgagctgggccgggagcgcggctcccccagcgagcgctgcgaagagcgtggtggggacgcggccgtctcgcccggggggcccccgctcggcctggcgccgccgccgcgctaccctggcagcctggacgggcccggcgcgggcggcgacggcgacgactacaagagcagcagcgaggagaccggtagcagcgaggaccccagcccgcctggcggccacctcgagggctacccatgcccgcacctggcctatggcgagcccgagagcttcggtgacaacctgtacgtgtgcattccgtgcggcaagggcttccccagctctgagcagctgaacgcgcacgtggaggctcacgtggaggaggaggaagcgctgtacggcagggccgaggcggccgaagtggccgctggggccgccggcctagggcccccttttggaggcggcggggacaaggtcgccggggctccgggtggcctgggagagctgctgcggccctaccgctgcgcgtcgtgcgacaagagctacaaggacccggccacgctgcggcagcacgagaagacgcactggctgacccggccctacccatgcaccatctgcgggaagaagttcacgcagcgtgggaccatgacgcgccacatgcgcagccacctgggcctcaagcccttcgcgtgcgacgcgtgcggcatgcggttcacgcgccagtaccgcctcacggagcacatgcgcatccactcgggcgagaagccctacgagtgccaggtgtgcggcggcaagttcgcacagcaacgcaacctcatcagccacatgaagatgcacgccgtggggggcgcggccggcgcggccggggcgctggcgggcttgggggggctccccggcgtccccggccccgacggcaagggcaagctcgacttccccgagggcgtctttgctgtggctcgcctcacggccgagcagctgagcctgaagcagcaggacaaggcggccgcggccgagctgctggcgcagaccacgcacttcctgcacgaccccaaggtggcgctggagagcctctacccgctggccaagttcacggccgagctgggcctcagccccgacaaggcggccgaggtgctgagccagggcgctcacctggcggccgggcccgacggccggaccatcgaccgtttctctcccacctagtaatgaactagtccgtaacttgaaagtatttcgatttcttggctttatatatcttgtggaaaggacgattgagtaagcggagccataaagga

SEQ ID NO: 2390 - DNA, 2303 bp, Homo sapiens
  source 1..2303: mol_type = genomic DNA
accgccaccatgacttttcctgaagcggacattttacttaaatcgggagagtgtgctgggcagacgatgctggacacgatggaggcgcccggccactccaggcagctgctgctgcagctcaacaaccagcgcaccaagggcttcttgtgcgacgtgatcatcgtggtgcagaacgccctcttccgcgcgcacaagaacgtgctggcggccagcagcgcctacctcaagtccctggtggtgcatgacaacctgctcaacctggaccatgacatggtgagcccggccgtgttccgcctggtgctggacttcatctacaccggccgcctggctgacggcgcagaggcggctgcggccgcggccgtggccccgggggctgagccgagcctgggcgccgtgctggccgccgccagctacctgcagatccccgacctcgtggcgctgtgcaagaaacgcctcaagcgccacggcaagtactgccacctgcggggcggcggcggcggcggcggcggctacgcgccctatggtcggccgggccggggcctgcgggccgccacgccggtcatccaggcctgctacccgtccccagtcgggcctccgccgccgcctgccgcggagccgccctcgggcccagaggccgcggtcaacacgcactgcgccgagctgtacgcgtcgggacccggcccggccgccgcactctgtgcctcggagcgccgctgctcccctctttgtggcctggacctgtccaagaagagcccgccgggctccgcggcgccagagcggccgctggctgagcgcgagctgcccccgcgcccggacagccctcccagcgccggccccgccgcctacaaggagccgcctctcgccctgccgtcgctgccgccgctgcccttccagaagctggaggaggccgcaccgccttccgacccatttcgcggcggcagcggcagcccgggacccgagccccccggccgccccgacgggcctagtctcctctatcgctggatgaagcacgagccgggcctgggtagctatggcgacgagctgggccgggagcgcggctcccccagcgagcgctgcgaagagcgtggtggggacgcggccgtctcgcccggggggcccccgctcggcctggcgccgccgccgcgctaccctggcagcctggacgggcccggcgcgggcggcgacggcgacgactacaagagcagcagcgaggagaccggtagcagcgaggaccccagcccgcctggcggccacctcgagggctacccatgcccgcacctggcctatggcgagcccgagagcttcggtgacaacctgtacgtgtgcattccgtgcggcaagggcttccccagctctgagcagctgaacgcgcacgtggaggctcacgtggaggaggaggaagcgctgtacggcagggccgaggcggccgaagtggccgctggggccgccggcctagggcccccttttggaggcggcggggacaaggtcgccggggctccgggtggcctgggagagctgctgcggccctaccgctgcgcgtcgtgcgacaagagctacaaggacccggccacgctgcggcagcacgagaagacgcactggctgacccggccctacccatgcaccatctgcgggaagaagttcacgcagcgtgggaccatgacgcgccacatgcgcagccacctgggcctcaagcccttcgcgtgcgacgcgtgcggcatgcggttcacgcgccagtaccgcctcacggagcacatgcgcatccactcgggcgagaagccctacgagtgccaggtgtgcggcggcaagttcgcacagcaacgcaacctcatcagccacatgaagatgcacgccgtggggggcgcggccggcgcggccggggcgctggcgggcttgggggggctccccggcgtccccggccccgacggcaagggcaagctcgacttccccgagggcgtctttgctgtggctcgcctcacggccgagcagctgagcctgaagcagcaggacaaggcggccgcggccgagctgctggcgcagaccacgcacttcctgcacgaccccaaggtggcgctggagagcctctacccgctggccaagttcacggccgagctgggcctcagccccgacaaggcggccgaggtgctgagccagggcgctcacctggcggccgggcccgacggccggaccatcgaccgtttctctcccacctagtaatgaactagtccgtaacttgaaagtatttcgatttcttggctttatatatcttgtggaaaggacgagtgagactaaactccacccttatg

SEQ ID NO: 2391 - DNA, 1949 bp, Homo sapiens
  source 1..1949: mol_type = genomic DNA
accgccaccatggtgtctgggcccttggcactccggtggtgcgcgtgggcagggcgcggggacatggggcccgacatggagctgcccagccactcgaagcagctcctgctgcagctgaaccagcagaggaccaagggcttcctgtgtgacgtcatcatcatggtggagaactccatcttccgggcccacaagaacgtcctagccgccagcagcatctatttcaagtccctggtcctgcacgacaacctcatcaacctggacacagacatggtcagctccacagtgttccagcagatcttggacttcatctacacaggcaagctgctgcccagcgaccagccagccgagcccaacttcagcaccctcctcactgccgccagctacctccagctgcccgagttggcagccctctgccgccgcaaactcaagcgagccggcaagccctttggctctgggagggcggggtccactggcatggggcggcccccccgcagccagcggctgtccacggcctctgtcatccaagctcggtatcaggggctcgtggatgggcgcaagggggcccacgccccccaggagctcccccaagccaaaggctcagacgatgaactctttcttggtggctctaaccaggatagcgtgcaaggtctgggccgggctgtctgcccagctggcggggaggcgggtctggggggctgcagcagcagcaccaacgggagcagcgggggctgcgagcaggagctgggcttggacctgtccaagaaaagcccacccttgccccctgccaccccaggtccccacctcactcccgatgacgcagcccagctgagcgacagccaacatggctcgccccctgcggcctctgctcctcccgttgccaacagtgcctcttattctgagctggggggcacccctgatgagcccatggatctggagggggccgaggacaaccacctgagcctgctggaggcgcctggtgggcagcctcggaagagcctccggcactccactcggaagaaggagtggggcaagaaggagcctgtggctggctccccctttgagcggagagaagcagggcccaagggtccctgcccgggagaggagggtgagggggtcggggacagggttcccaatggcatcctggctagtggggctggccctagcgggccctatggggagcccccctacccctgcaaggaggaggaggagaacggcaaggatgcaagtgaagacagtgcgcagagcgggagcgaggggggcagcggccatgccagcgcccactacatgtaccggcaggagggctacgagacggtgtcctacggggacaacttgtatgtgtgcattccctgcgccaagggcttccccagctctgagcagctcaatgcgcacgtggagactcacacggaggaagagctgttcatcaaggaagagggggcctacgagacaggcagtgggggtgccgaggaggaggccgaggacctgtcagcacccagtgcggcctacacggctgagccccggcccttcaagtgttcggtctgcgagaagacctacaaggacccagccacgctgcggcagcacgagaagacgcactggctgacacggcccttcccctgcaacatctgtggcaaaatgttcacgcagcgcggcaccatgacgcgtcacatgcggagccacctgggcctgaagcccttcgcctgcgatgagtgtggcatgcgcttcacccgtcagtaccgcctcacggagcacatgcgtgtgcactcgggcgagaaaccttacgagtgccagctgtgcgggggcaagttcacccagcagcgcaacctcatcagccacctgcgcatgcacacctccccctcctagtaatgaactagtccgtaacttgaaagtatttcgatttcttggctttatatatcttgtggaaaggacgaaatggaataataatcggcgacgca

SEQ ID NO: 2392 - DNA, 3494 bp, Homo sapiens
  source 1..3494: mol_type = genomic DNA
accgccaccatgcgttgcctggctccacgccctgctgggtcctacctgtcagagccccaaggcagctcacagtgtgccaccatggagttggggcccctagaaggtggctacctggagcttcttaacagcgatgctgaccccctgtgcctctaccacttctatgaccagatggacctggctggagaagaagagattgagctctactcagaacccgacacagacaccatcaactgcgaccagttcagcaggctgttgtgtgacatggaaggtgatgaagagaccagggaggcttatgccaatatcgcggaactggaccagtatgtcttccaggactcccagctggagggcctgagcaaggacattttcaagcacataggaccagatgaagtgatcggtgagagtatggagatgccagcagaagttgggcagaaaagtcagaaaagacccttcccagaggagcttccggcagacctgaagcactggaagccagctgagccccccactgtggtgactggcagtctcctagtgggaccagtgagcgactgctccaccctgccctgcctgccactgcctgcgctgttcaaccaggagccagcctccggccagatgcgcctggagaaaaccgaccagattcccatgcctttctccagttcctcgttgagctgcctgaatctccctgagggacccatccagtttgtccccaccatctccactctgccccatgggctctggcaaatctctgaggctggaacaggggtctccagtatattcatctaccatggtgaggtgccccaggccagccaagtaccccctcccagtggattcactgtccacggcctcccaacatctccagaccggccaggctccaccagccccttcgctccatcagccactgacctgcccagcatgcctgaacctgccctgacctcccgagcaaacatgacagagcacaagacgtcccccacccaatgcccggcagctggagaggtctccaacaagcttccaaaatggcctgagccggtggagcagttctaccgctcactgcaggacacgtatggtgccgagcccgcaggcccggatggcatcctagtggaggtggatctggtgcaggccaggctggagaggagcagcagcaagagcctggagcgggaactggccaccccggactgggcagaacggcagctggcccaaggaggcctggctgaggtgctgttggctgccaaggagcaccggcggccgcgtgagacacgagtgattgctgtgctgggcaaagctggtcagggcaagagctattgggctggggcagtgagccgggcctgggcttgtggccggcttccccagtacgactttgtcttctctgtcccctgccattgcttgaaccgtccgggggatgcctatggcctgcaggatctgctcttctccctgggcccacagccactcgtggcggccgatgaggttttcagccacatcttgaagagacctgaccgcgttctgctcatcctagacggcttcgaggagctggaagcgcaagatggcttcctgcacagcacgtgcggaccggcaccggcggagccctgctccctccgggggctgctggccggccttttccagaagaagctgctccgaggttgcaccctcctcctcacagcccggccccggggccgcctggtccagagcctgagcaaggccgacgccctatttgagctgtccggcttctccatggagcaggcccaggcatacgtgatgcgctactttgagagctcagggatgacagagcaccaagacagagccctgacgctcctccgggaccggccacttcttctcagtcacagccacagccctactttgtgccgggcagtgtgccagctctcagaggccctgctggagcttggggaggacgccaagctgccctccacgctcacgggactctatgtcggcctgctgggccgtgcagccctcgacagcccccccggggccctggcagagctggccaagctggcctgggagctgggccgcagacatcaaagtaccctacaggaggaccagttcccatccgcagacgtgaggacctgggcgatggccaaaggcttagtccaacacccaccgcgggccgcagagtccgagctggccttccccagcttcctcctgcaatgcttcctgggggccctgtggctggctctgagtggcgaaatcaaggacaaggagctcccgcagtacctagcattgaccccaaggaagaagaggccctatgacaactggctggagggcgtgccacgctttctggctgggctgatcttccagcctcccgcccgctgcctgggagccctactcgggccatcggcggctgcctcggtggacaggaagcagaaggtgcttgcgaggtacctgaagcggctgcagccggggacactgcgggcgcggcagctgctggagctgctgcactgcgcccacgaggccgaggaggctggaatttggcagcacgtggtacaggagctccccggccgcctctcttttctgggcacccgcctcacgcctcctgatgcacatgtactgggcaaggccttggaggcggcgggccaagacttctccctggacctccgcagcactggcatttgcccctctggattggggagcctcgtgggactcagctgtgtcacccgtttcagggctgccttgagcgacacggtggcgctgtgggagtccctgcagcagcatggggagaccaagctacttcaggcagcagaggagaagttcaccatcgagcctttcaaagccaagtccctgaaggatgtggaagacctgggaaagcttgtgcagactcagaggacgagaagttcctcggaagacacagctggggagctccctgctgttcgggacctaaagaaactggagtttgcgctgggccctgtctcaggcccccaggctttccccaaactggtgcggatcctcacggccttttcctccctgcagcatctggacctggatgcgctgagtgagaacaagatcggggacgagggtgtctcgcagctctcagccaccttcccccagctgaagtccttggaaaccctcaatctgtcccagaacaacatcactgacctgggtgcctacaaactcgccgaggccctgccttcgctcgctgcatccctgctcaggctaagcttgtacaataactgcatctgcgacgtgggagccgagagcttggctcgtgtgcttccggacatggtgtccctccgggtgatggacgtccagtacaacaagttcacggctgccggggcccagcagctcgctgccagccttcggaggtgtcctcatgtggagacgctggcgatgtggacgcccaccatcccattcagtgtccaggaacacctgcaacaacaggattcacggatcagcctgagatagtaatgaactagtccgtaacttgaaagtatttcgatttcttggctttatatatcttgtggaaaggacgaaattctcatactatccgctgtcga

SEQ ID NO: 2393 - DNA, 1742 bp, Homo sapiens
  source 1..1742: mol_type = genomic DNA
accgccaccatgcgttgcctggctccacgccctgctgggtcctacctgtcagagccccaaggcagctcacagtgtgccaccatggagttggggcccctagaaggtggctacctggagcttcttaacagcgatgctgaccccctgtgcctctaccacttctatgaccagatggacctggctggagaagaagagattgagctctactcagaacccgacacagacaccatcaactgcgaccagttcagcaggctgttgtgtgacatggaaggtgatgaagagaccagggaggcttatgccaatatcgcggaactggaccagtatgtcttccaggactcccagctggagggcctgagcaaggacattttcaagcacataggaccagatgaagtgatcggtgagagtatggagatgccagcagaagttgggcagaaaagtcagaaaagacccttcccagaggagcttccggcagacctgaagcactggaagccagtgcctttctccagttcctcgttgagctgcctgaatctccctgagggacccatccagtttgtccccaccatctccactctgccccatgggctctggcaaatctctgaggctggaacaggggtctccagtatattcatctaccatggtgaggtgccccaggccagccaagtaccccctcccagtggattcactgtccacggcctcccaacatctccagaccggccaggctccaccagccccttcgctccatcagccactgacctgcccagcatgcctgaacctgccctgacctcccgagcaaacatgacagagcacaagacgtcccccacccaatgcccggcagctggagaggtctccaacaagcttccaaaatggcctggtctagcctggtcaccgtgcctgggtctgaggccctccctccacagggctgccttgagcgacacggtggcgctgtgggagtccctgcagcagcatggggagaccaagctacttcaggcagcagaggagaagttcaccatcgagcctttcaaagccaagtccctgaaggatgtggaagacctgggaaagcttgtgcagactcagaggacgagaagttcctcggaagacacagctggggagctccctgctgttcgggacctaaagaaactggagtttgcgctgggccctgtctcaggcccccaggctttccccaaactggtgcggatcctcacggccttttcctccctgcagcatctggacctggatgcgctgagtgagaacaagatcggggacgagggtgtctcgcagctctcagccaccttcccccagctgaagtccttggaaaccctcaatctgtcccagaacaacatcactgacctgggtgcctacaaactcgccgaggccctgccttcgctcgctgcatccctgctcaggctaagcttgtacaataactgcatctgcgacgtgggagccgagagcttggctcgtgtgcttccggacatggtgtccctccgggtgatggacgtccagtacaacaagttcacggctgccggggcccagcagctcgctgccagccttcggaggtgtcctcatgtggagacgctggcgatgtggacgcccaccatcccattcagtgtccaggaacacctgcaacaacaggattcacggatcagcctgagatagtaatgaactagtccgtaacttgaaagtatttcgatttcttggctttatatatcttgtggaaaggacgagtctgcttagcgcgaaatggctgc

SEQ ID NO: 2394 - DNA, 3497 bp, Homo sapiens
  source 1..3497: mol_type = genomic DNA
accgccaccatgcgttgcctggctccacgccctgctgggtcctacctgtcagagccccaaggcagctcacagtgtgccaccatggagttggggcccctagaaggtggctacctggagcttcttaacagcgatgctgaccccctgtgcctctaccacttctatgaccagatggacctggctggagaagaagagattgagctctactcagaacccgacacagacaccatcaactgcgaccagttcagcaggctgttgtgtgacatggaaggtgatgaagagaccagggaggcttatgccaatatcgcggaactggaccagtatgtcttccaggactcccagctggagggcctgagcaaggacattttcatagagcacataggaccagatgaagtgatcggtgagagtatggagatgccagcagaagttgggcagaaaagtcagaaaagacccttcccagaggagcttccggcagacctgaagcactggaagccagctgagccccccactgtggtgactggcagtctcctagtgggaccagtgagcgactgctccaccctgccctgcctgccactgcctgcgctgttcaaccaggagccagcctccggccagatgcgcctggagaaaaccgaccagattcccatgcctttctccagttcctcgttgagctgcctgaatctccctgagggacccatccagtttgtccccaccatctccactctgccccatgggctctggcaaatctctgaggctggaacaggggtctccagtatattcatctaccatggtgaggtgccccaggccagccaagtaccccctcccagtggattcactgtccacggcctcccaacatctccagaccggccaggctccaccagccccttcgctccatcagccactgacctgcccagcatgcctgaacctgccctgacctcccgagcaaacatgacagagcacaagacgtcccccacccaatgcccggcagctggagaggtctccaacaagcttccaaaatggcctgagccggtggagcagttctaccgctcactgcaggacacgtatggtgccgagcccgcaggcccggatggcatcctagtggaggtggatctggtgcaggccaggctggagaggagcagcagcaagagcctggagcgggaactggccaccccggactgggcagaacggcagctggcccaaggaggcctggctgaggtgctgttggctgccaaggagcaccggcggccgcgtgagacacgagtgattgctgtgctgggcaaagctggtcagggcaagagctattgggctggggcagtgagccgggcctgggcttgtggccggcttccccagtacgactttgtcttctctgtcccctgccattgcttgaaccgtccgggggatgcctatggcctgcaggatctgctcttctccctgggcccacagccactcgtggcggccgatgaggttttcagccacatcttgaagagacctgaccgcgttctgctcatcctagacggcttcgaggagctggaagcgcaagatggcttcctgcacagcacgtgcggaccggcaccggcggagccctgctccctccgggggctgctggccggccttttccagaagaagctgctccgaggttgcaccctcctcctcacagcccggccccggggccgcctggtccagagcctgagcaaggccgacgccctatttgagctgtccggcttctccatggagcaggcccaggcatacgtgatgcgctactttgagagctcagggatgacagagcaccaagacagagccctgacgctcctccgggaccggccacttcttctcagtcacagccacagccctactttgtgccgggcagtgtgccagctctcagaggccctgctggagcttggggaggacgccaagctgccctccacgctcacgggactctatgtcggcctgctgggccgtgcagccctcgacagcccccccggggccctggcagagctggccaagctggcctgggagctgggccgcagacatcaaagtaccctacaggaggaccagttcccatccgcagacgtgaggacctgggcgatggccaaaggcttagtccaacacccaccgcgggccgcagagtccgagctggccttccccagcttcctcctgcaatgcttcctgggggccctgtggctggctctgagtggcgaaatcaaggacaaggagctcccgcagtacctagcattgaccccaaggaagaagaggccctatgacaactggctggagggcgtgccacgctttctggctgggctgatcttccagcctcccgcccgctgcctgggagccctactcgggccatcggcggctgcctcggtggacaggaagcagaaggtgcttgcgaggtacctgaagcggctgcagccggggacactgcgggcgcggcagctgctggagctgctgcactgcgcccacgaggccgaggaggctggaatttggcagcacgtggtacaggagctccccggccgcctctcttttctgggcacccgcctcacgcctcctgatgcacatgtactgggcaaggccttggaggcggcgggccaagacttctccctggacctccgcagcactggcatttgcccctctggattggggagcctcgtgggactcagctgtgtcacccgtttcagggctgccttgagcgacacggtggcgctgtgggagtccctgcagcagcatggggagaccaagctacttcaggcagcagaggagaagttcaccatcgagcctttcaaagccaagtccctgaaggatgtggaagacctgggaaagcttgtgcagactcagaggacgagaagttcctcggaagacacagctggggagctccctgctgttcgggacctaaagaaactggagtttgcgctgggccctgtctcaggcccccaggctttccccaaactggtgcggatcctcacggccttttcctccctgcagcatctggacctggatgcgctgagtgagaacaagatcggggacgagggtgtctcgcagctctcagccaccttcccccagctgaagtccttggaaaccctcaatctgtcccagaacaacatcactgacctgggtgcctacaaactcgccgaggccctgccttcgctcgctgcatccctgctcaggctaagcttgtacaataactgcatctgcgacgtgggagccgagagcttggctcgtgtgcttccggacatggtgtccctccgggtgatggacgtccagtacaacaagttcacggctgccggggcccagcagctcgctgccagccttcggaggtgtcctcatgtggagacgctggcgatgtggacgcccaccatcccattcagtgtccaggaacacctgcaacaacaggattcacggatcagcctgagatagtaatgaactagtccgtaacttgaaagtatttcgatttcttggctttatatatcttgtggaaaggacgattcgcttgtacgggtcacgtttga

SEQ ID NO: 2395 - DNA, 1226 bp, Homo sapiens
  source 1..1226: mol_type = genomic DNA
accgccaccatgcttcaagatttaagtgcaagtgtcttctttccaccttgttcacaacacagaacgttagctcaggtacctgacaatgatgagcagtttgtaccagactatcaggctgaaagtttggcttttcatggcctgccactgaaaatcaagaaagaaccccacagtccatgttcagaaatcagctctgcctgcagtcaagaacagccctttaaattcagctatggagaaaagtgcctgtacaatgtcagatttcgccgccagctttctgaaccctgtaactcctttcctcctttgccgacgatgccaagggaaggacgtcctatgtaccaacgccagatgtctgagccaaacatccccttcccaccacaaggctttaagcaggagtaccacgacccagtgtatgaacacaacaccatggttggcagtgcggccagccaaagctttccccctcctctgatgattaaacaggaacccagagattttgcatatgactcagaagtgcctagctgccactccatttatatgaggcaagaaggcttcctggctcatcccagcagaacagaaggctgtatgtttgaaaagggccccaggcagttttatgatgacacctgtgttgtcccagaaaaattcgatggagacatcaaacaagagccaggaatgtatcgggaaggacccacataccaacggcgaggatcacttcagctctggcagtttttggtagctcttctggatgacccttcaaattctcattttattgcctggactggtcgaggcatggaatttaaactgattgagcctgaagaggtggcccgacgttggggcattcagaaaaacaggccagctatgaactatgataaacttagccgttcactccgctattactatgagaaaggaattatgcaaaaggtggctggagagagatatgtctacaagtttgtgtgtgatccagaagcccttttctccatggcctttccagataatcagcgtccactgctgaagacagacatggaacgtcacatcaacgaggaggacacagtgcctctttctcactttgatgagagcatggcctacatgccggaagggggctgctgcaacccccacccctacaacgaaggctacgtgtattagtaatgaactagtccgtaacttgaaagtatttcgatttcttggctttatatatcttgtggaaaggacgacgtgacagtggccgcgccgcttac

SEQ ID NO: 2396 - DNA, 1577 bp, Homo sapiens
  source 1..1577: mol_type = genomic DNA
accgccaccatgagtggaagaggagatggagggcagcagcagctgctgcactcaaagtttttggctgggtttgtctgccacattgaaaagaatgaaagtcagcgtgggagaaattgtaacgagaaaccaacaaatgtcaggaaaagaaaattcattaacagagatctggctcatgattcagaagaactctttcaagatctaagtcaattacaggaaacatggcttgcagaagctcaggtacctgacaatgatgagcagtttgtaccagactatcaggctgaaagtttggcttttcatggcctgccactgaaaatcaagaaagaaccccacagtccatgttcagaaatcagctctgcctgcagtcaagaacagccctttaaattcagctatggagaaaagtgcctgtacaatgtcagtgcctatgatcagaagccacaagtgggaatgaggccctccaacccccccacaccatccagcacgccagtgtccccactgcatcatgcatctccaaactcaactcatacaccgaaacctgaccgggccttcccagctcacctccctccatcgcagtccataccagatagcagctaccccatggaccacagatttcgccgccagctttctgaaccctgtaactcctttcctcctttgccgacgatgccaagggaaggacgtcctatgtaccaacgccagatgtctgagccaaacatccccttcccaccacaaggctttaagcaggagtaccacgacccagtgtatgaacacaacaccatggttggcagtgcggccagccaaagctttccccctcctctgatgattaaacaggaacccagagattttgcatatgactcagaagtgcctagctgccactccatttatatgaggcaagaaggcttcctggctcatcccagcagaacagaaggctgtatgtttgaaaagggccccaggcagttttatgatgacacctgtgttgtcccagaaaaattcgatggagacatcaaacaagagccaggaatgtatcgggaaggacccacataccaacggcgaggatcacttcagctctggcagtttttggtagctcttctggatgacccttcaaattctcattttattgcctggactggtcgaggcatggaatttaaactgattgagcctgaagaggtggcccgacgttggggcattcagaaaaacaggccagctatgaactatgataaacttagccgttcactccgctattactatgagaaaggaattatgcaaaaggtggctggagagagatatgtctacaagtttgtgtgtgatccagaagcccttttctccatggcctttccagataatcagcgtccactgctgaagacagacatggaacgtcacatcaacgaggaggacacagtgcctctttctcactttgatgagagcatggcctacatgccggaagggggctgctgcaacccccacccctacaacgaaggctacgtgtattagtaatgaactagtccgtaacttgaaagtatttcgatttcttggctttatatatcttgtggaaaggacgagtcgctcgcattggtaaagtgtac

SEQ ID NO: 2397 - DNA, 1466 bp, Homo sapiens
  source 1..1466: mol_type = genomic DNA
accgccaccatggatggattttatgaccagcaagtgccttacatggtcaccaatagtcagcgtgggagaaattgtaacgagaaaccaacaaatgtcaggaaaagaaaattcattaacagagatctggctcatgattcagaagaactctttcaagatctaagtcaattacaggaaacatggcttgcagaagctcaggtacctgacaatgatgagcagtttgtaccagactatcaggctgaaagtttggcttttcatggcctgccactgaaaatcaagaaagaaccccacagtccatgttcagaaatcagctctgcctgcagtcaagaacagccctttaaattcagctatggagaaaagtgcctgtacaatgtcagtgcctatgatcagaagccacaagtgggaatgaggccctccaacccccccacaccatccagcacgccagtgtccccactgcatcatgcatctccaaactcaactcatacaccgaaacctgaccgggccttcccagctcacctccctccatcgcagtccataccagatagcagctaccccatggaccacagatttcgccgccagctttctgaaccctgtaactcctttcctcctttgccgacgatgccaagggaaggacgtcctatgtaccaacgccagatgtctgagccaaacatccccttcccaccacaaggctttaagcaggagtaccacgacccagtgtatgaacacaacaccatggttggcagtgcggccagccaaagctttccccctcctctgatgattaaacaggaacccagagattttgcatatgactcaggctgtatgtttgaaaagggccccaggcagttttatgatgacacctgtgttgtcccagaaaaattcgatggagacatcaaacaagagccaggaatgtatcgggaaggacccacataccaacggcgaggatcacttcagctctggcagtttttggtagctcttctggatgacccttcaaattctcattttattgcctggactggtcgaggcatggaatttaaactgattgagcctgaagaggtggcccgacgttggggcattcagaaaaacaggccagctatgaactatgataaacttagccgttcactccgctattactatgagaaaggaattatgcaaaaggtggctggagagagatatgtctacaagtttgtgtgtgatccagaagcccttttctccatggcctttccagataatcagcgtccactgctgaagacagacatggaacgtcacatcaacgaggaggacacagtgcctctttctcactttgatgagagcatggcctacatgccggaagggggctgctgcaacccccacccctacaacgaaggctacgtgtattagtaatgaactagtccgtaacttgaaagtatttcgatttcttggctttatatatcttgtggaaaggacgaaccaccgacatctcagttctcgtc

SEQ ID NO: 2398 - DNA, 1481 bp, Homo sapiens
  source 1..1481: mol_type = genomic DNA
accgccaccatggatggattttatgaccagcaagtgccttacatggtcaccaatagtcagcgtgggagaaattgtaacgagaaaccaacaaatgtcaggaaaagaaaattcattaacagagatctggctcatgattcagaagaactctttcaagatctaagtcaattacaggaaacatggcttgcagaagtggcttttcatggcctgccactgaaaatcaagaaagaaccccacagtccatgttcagaaatcagctctgcctgcagtcaagaacagccctttaaattcagctatggagaaaagtgcctgtacaatgtcagtgcctatgatcagaagccacaagtgggaatgaggccctccaacccccccacaccatccagcacgccagtgtccccactgcatcatgcatctccaaactcaactcatacaccgaaacctgaccgggccttcccagctcacctccctccatcgcagtccataccagatagcagctaccccatggaccacagatttcgccgccagctttctgaaccctgtaactcctttcctcctttgccgacgatgccaagggaaggacgtcctatgtaccaacgccagatgtctgagccaaacatccccttcccaccacaaggctttaagcaggagtaccacgacccagtgtatgaacacaacaccatggttggcagtgcggccagccaaagctttccccctcctctgatgattaaacaggaacccagagattttgcatatgactcagaagtgcctagctgccactccatttatatgaggcaagaaggcttcctggctcatcccagcagaacagaaggctgtatgtttgaaaagggccccaggcagttttatgatgacacctgtgttgtcccagaaaaattcgatggagacatcaaacaagagccaggaatgtatcgggaaggacccacataccaacggcgaggatcacttcagctctggcagtttttggtagctcttctggatgacccttcaaattctcattttattgcctggactggtcgaggcatggaatttaaactgattgagcctgaagaggtggcccgacgttggggcattcagaaaaacaggccagctatgaactatgataaacttagccgttcactccgctattactatgagaaaggaattatgcaaaaggtggctggagagagatatgtctacaagtttgtgtgtgatccagaagcccttttctccatggcctttccagataatcagcgtccactgctgaagacagacatggaacgtcacatcaacgaggaggacacagtgcctctttctcactttgatgagagcatggcctacatgccggaagggggctgctgcaacccccacccctacaacgaaggctacgtgtattagtaatgaactagtccgtaacttgaaagtatttcgatttcttggctttatatatcttgtggaaaggacgaccaagcaacgaccaaacgactaac

SEQ ID NO: 2399 - DNA, 1361 bp, Homo sapiens
  source 1..1361: mol_type = genomic DNA
accgccaccatgcttcaagatttaagtgcaagtgtcttctttccaccttgttcacaacacagaacgttagtggcttttcatggcctgccactgaaaatcaagaaagaaccccacagtccatgttcagaaatcagctctgcctgcagtcaagaacagccctttaaattcagctatggagaaaagtgcctgtacaatgtcagtgcctatgatcagaagccacaagtgggaatgaggccctccaacccccccacaccatccagcacgccagtgtccccactgcatcatgcatctccaaactcaactcatacaccgaaacctgaccgggccttcccagctcacctccctccatcgcagtccataccagatagcagctaccccatggaccacagatttcgccgccagctttctgaaccctgtaactcctttcctcctttgccgacgatgccaagggaaggacgtcctatgtaccaacgccagatgtctgagccaaacatccccttcccaccacaaggctttaagcaggagtaccacgacccagtgtatgaacacaacaccatggttggcagtgcggccagccaaagctttccccctcctctgatgattaaacaggaacccagagattttgcatatgactcagaagtgcctagctgccactccatttatatgaggcaagaaggcttcctggctcatcccagcagaacagaaggctgtatgtttgaaaagggccccaggcagttttatgatgacacctgtgttgtcccagaaaaattcgatggagacatcaaacaagagccaggaatgtatcgggaaggacccacataccaacggcgaggatcacttcagctctggcagtttttggtagctcttctggatgacccttcaaattctcattttattgcctggactggtcgaggcatggaatttaaactgattgagcctgaagaggtggcccgacgttggggcattcagaaaaacaggccagctatgaactatgataaacttagccgttcactccgctattactatgagaaaggaattatgcaaaaggtggctggagagagatatgtctacaagtttgtgtgtgatccagaagcccttttctccatggcctttccagataatcagcgtccactgctgaagacagacatggaacgtcacatcaacgaggaggacacagtgcctctttctcactttgatgagagcatggcctacatgccggaagggggctgctgcaacccccacccctacaacgaaggctacgtgtattagtaatgaactagtccgtaacttgaaagtatttcgatttcttggctttatatatcttgtggaaaggacgactatcttacagaagaatgaccatg

SEQ ID NO: 2400 - DNA, 1415 bp, Homo sapiens
  source 1..1415: mol_type = genomic DNA
accgccaccatgcttcaagatttaagtgcaagtgtcttctttccaccttgttcacaacacagaacgttagctcaggtacctgacaatgatgagcagtttgtaccagactatcaggctgaaagtttggcttttcatggcctgccactgaaaatcaagaaagaaccccacagtccatgttcagaaatcagctctgcctgcagtcaagaacagccctttaaattcagctatggagaaaagtgcctgtacaatgtcagtgcctatgatcagaagccacaagtgggaatgaggccctccaacccccccacaccatccagcacgccagtgtccccactgcatcatgcatctccaaactcaactcatacaccgaaacctgaccgggccttcccagctcacctccctccatcgcagtccataccagatagcagctaccccatggaccacagatttcgccgccagctttctgaaccctgtaactcctttcctcctttgccgacgatgccaagggaaggacgtcctatgtaccaacgccagatgtctgagccaaacatccccttcccaccacaaggctttaagcaggagtaccacgacccagtgtatgaacacaacaccatggttggcagtgcggccagccaaagctttccccctcctctgatgattaaacaggaacccagagattttgcatatgactcagaagtgcctagctgccactccatttatatgaggcaagaaggcttcctggctcatcccagcagaacagaaggctgtatgtttgaaaagggccccaggcagttttatgatgacacctgtgttgtcccagaaaaattcgatggagacatcaaacaagagccaggaatgtatcgggaaggacccacataccaacggcgaggatcacttcagctctggcagtttttggtagctcttctggatgacccttcaaattctcattttattgcctggactggtcgaggcatggaatttaaactgattgagcctgaagaggtggcccgacgttggggcattcagaaaaacaggccagctatgaactatgataaacttagccgttcactccgctattactatgagaaaggaattatgcaaaaggtggctggagagagatatgtctacaagtttgtgtgtgatccagaagcccttttctccatggcctttccagataatcagcgtccactgctgaagacagacatggaacgtcacatcaacgaggaggacacagtgcctctttctcactttgatgagagcatggcctacatgccggaagggggctgctgcaacccccacccctacaacgaaggctacgtgtattagtaatgaactagtccgtaacttgaaagtatttcgatttcttggctttatatatcttgtggaaaggacgacacactcttcaggttactgttctg

SEQ ID NO: 2401 - DNA, 1124 bp, Homo sapiens
  source 1..1124: mol_type = genomic DNA
accgccaccatgaactacccatccaccagccccggatctctggttaaacacatctgtgccatctgtggagacagatcctcaggaaagcactacggggtatacagttgtgaaggctgcaaagggttcttcaagaggacgataaggaaggacctcatctacacgtgtcgggataataaagactgcctcattgacaagcgtcagcgcaaccgctgccagtactgtcgctatcagaagtgccttgtcatgggcatgaagagggaagctgtgcaagaagaaagacagaggagccgagagcgagctgagagtgaggcagaatgtgctaccagtggtcatgaagacatgcctgtggagaggattctagaagctgaacttgctgttgaaccaaagacagaatcctatggtgacatgaatatggagaactcgacaaatgaccctgttaccaacatatgtcatgctgctgacaagcagcttttcaccctcgttgaatgggccaagcgtattccccacttctctgacctcaccttggaggaccaggtcattttgcttcgggcagggtggaatgaattgctgattgcctctttctcccaccgctcagtttccgtgcaggatggcatccttctggccacgggtttacatgtccaccggagcagtgcccacagtgctggggtcggctccatctttgacagagtcctaactgagctggtttccaaaatgaaagacatgcagatggacaagtcggaactgggatgcctgcgagccattgtactctttaacccagatgccaagggcctgtccaacccctctgaggtggagactctgcgagagaaggtttatgccacccttgaggcctacaccaagcagaagtatccggaacagccaggcaggtttgccaagctgctgctgcgcctcccagctctgcgttccattggcttgaaatgcctggagcacctcttcttcttcaagctcatcggggacacccccattgacaccttcctcatggagatgttggagaccccgctgcagatcacctagtaatgaactagtccgtaacttgaaagtatttcgatttcttggctttatatatcttgtggaaaggacgatccgatcgctgtcgacttgtatgt

SEQ ID NO: 2402 - DNA, 1640 bp, Homo sapiens
  source 1..1640: mol_type = genomic DNA
accgccaccatgaaagccggctgtagcatcgtggaaaagccagaaggaggtggagggtatcagtttcctgactgggcctacaaaacagagtcatccccaggctcccggcagatccagctgtggcacttcatcctggagctgctgcagaaggaagagttccgccatgtcatcgcctggcagcagggagagtacggggaatttgtcatcaaggatccagatgaggtggcccgcctctggggccgcaggaaatgcaaaccacagatgaattatgacaagctgagccgggccctcagatactattacaacaagaggatccttcataaaacaaaagggaaaagatttacctataaatttaacttcaacaagctggtgatgcccaactacccattcatcaacattcggtcaagtggtgtggttcctcagagtgcaccaccagtgccaacagcctcttcccggttccatttcccacctctggacacccattctccaaccaatgatgtgcagccgggacggttctctgctagctccctaactgcttctggccaggagtccagtaatggtactgatagaaagactgagctttcagagctggaggatggctcagctgctgactggcgccggggtgtggatcccgtgtcctccaggaatgccattggtggaggagggattggccatcagaaacgcaagcctgacataatgcttcctctgtttgctaggccagggatgtaccctgacccccacagtcccttcgctgtctctccaatccctggccgcggaggtgtccttaatgtccccatttcaccagccctctccctgactcccaccatcttctcctatagcccatcaccaggcctgagccctttcaccagcagcagctgcttctccttcaaccctgaggaaatgaaacactaccttcattctcaagcttgttctgtgttcaactaccatctgagtcctcggacttttccccgttacccagggctcatggttccaccactgcagtgccaaatgcatcctgaggagtcaactcagttctccatcaagctgcagcccccaccagttgggcggaagaaccgggagagggttgagagcagcgaggagtcagcaccagtcaccacgcccaccatggcttctattcccccaagaatcaaggtggaacctgcctctgaaaaggatcctgagagcctcaggcagtcggcacgagagaaggaggagcacactcaagaagagggcactgtgccaagcaggaccattgaagaggaaaaaggcaccatctttgcccgtcctgctgcaccacccatctggccctctgtgcccattagcaccccaagtggagaacctctggaggtgactgaagacagtgaggataggcctggcaaagagcccagtgcacctgagaagaaagaagatgcactgatgccccccaagcttcggttgaagcggcgctggaatgatgaccctgaagcccgagagctgagcaagagtggcaagtttctctggaatgggtcaggaccccagggcttggcaacagcagctgctgatgcttagtaatgaactagtccgtaacttgaaagtatttcgatttcttggctttatatatcttgtggaaaggacgagtcatgaggaaactagcgtggcca

SEQ ID NO: 2403 - DNA, 533 bp, Homo sapiens
  source 1..533: mol_type = genomic DNA
accgccaccatgaaagccggctgtagcatcgtggaaaagccagaaggaggtggagggtatcagtttcctgactgggcctacaaaacagagtcatccccaggctcccggcagatccagctgtggcacttcatcctggagctgctgcagaaggaagagttccgccatgtcatcgcctggcagcagggagagtacggggaatttgtcatcaaggatccagatgaggtggcccgcctctggggccgcaggaaatgcaaaccacagatgaattatgacaagctgagccgggccctcagatactattacaacaagaggatccttcataaaacaaaagggaaaagatttacctataaatttaacttcaacaagctggtgatgcccaactacccattcatcaacattcggtcaagtggtaagatacaaactcttttggtagggaattagtaatgaactagtccgtaacttgaaagtatttcgatttcttggctttatatatcttgtggaaaggacgaggattgccagtagaacagtaccgc

SEQ ID NO: 2404 - DNA, 1715 bp, Homo sapiens
  source 1..1715: mol_type = genomic DNA
accgccaccatgtcttgggccgctcgcccgcccttcctccctcagcggcatgccgcagggcagtgtgggccggtgggggtgcgaaaagaaatgcattgtggggtcgcgtcccggtggcggcggcgacggccctggctggatcccgcagcggcggcggcggcggcggtggcaggcggagaacaacaaaccccggagccggagccaggggaggctggacgggacgggatgggcgacagcgggcgggactcccgaagcccagacagctcctccccaaatccccttccccagggagtccctcccccttctcctcctgggccacccctacccccttcaacagctccatcccttggaggctctggggccccacccccacccccgatgccaccacccccactgggctctccctttccagtcatcagttcttccatggggtcccctggtctgccccctccagctcccccaggattctccgggcctgtcagcagcccccagattaactcaacagtgtcactccctgggggtgggtctggcccccctgaagatgtgaagccaccagtcttaggggtccggggcctgcactgtccaccccctccaggtggccctggggctggcaaacggctatgtgcaatctgcggggacagaagctcaggcaaacactacggggtttacagctgtgagggttgcaagggcttcttcaaacgcaccatccgcaaagaccttacatactcttgccgggacaacaaagactgcacagtggacaagcgccagcggaaccgctgtcagtactgccgctatcagaagtgcctggccactggcatgaagagggaggcggtacaggaggagcgtcagcggggaaaggacaaggatggggatggggagggggctgggggagcccccgaggagatgcctgtggacaggatcctggaggcagagcttgctgtggaacagaagagtgaccagggcgttgagggtcctgggggaaccgggggtagcggcagcagcccaaatgaccctgtgactaacatctgtcaggcagctgacaaacagctattcacgcttgttgagtgggcgaagaggatcccacacttttcctccttgcctctggatgatcaggtcatattgctgcgggcaggctggaatgaactcctcattgcctccttctcacaccgatccattgatgttcgagatggcatcctccttgccacaggtcttcacgtgcaccgcaactcagcccattcagcaggagtaggagccatctttgatcggtccctctccagggtgctgacagagctagtgtccaaaatgcgtgacatgaggatggacaagacagagcttggctgcctgagggcaatcattctgtttaatccagatgccaagggcctctccaaccctagtgaggtggaggtcctgcgggagaaagtgtatgcatcactggagacctactgcaaacagaagtaccctgagcagcagggacggtttgccaagctgctgctacgtcttcctgccctccggtccattggccttaagtgtctagagcatctgtttttcttcaagctcattggtgacacccccatcgacaccttcctcatggagatgcttgaggctccccatcaactggcctagtaatgaactagtccgtaacttgaaagtatttcgatttcttggctttatatatcttgtggaaaggacgagcccttgccaatcgatagaagcaa

SEQ ID NO: 2405 - DNA, 1703 bp, Homo sapiens
  source 1..1703: mol_type = genomic DNA
accgccaccatgtcttgggccgctcgcccgcccttcctccctcagcggcatgccgcagggcagtgtgggccggtgggggtgcgaaaagaaatgcattgtggggtcgcgtcccggtggcggcggcgacggccctggctggatcccgcagcggcggcggcggcggcggtggcaggcggagaacaacaaaccccggagccggagccaggggaggctggacgggacgggatgggcgacagcgggcgggactcccgaagcccagacagctcctccccaaatccccttccccagggagtccctcccccttctcctcctgggccacccctacccccttcaacagctccatcccttggaggctctggggccccacccccacccccgatgccaccacccccactgggctctccctttccagtcatcagttcttccatggggtcccctggtctgccccctccagctcccccaggattctccgggcctgtcagcagcccccagattaactcaacagtgtcactccctgggggtgggtctggcccccctgaagatgtgaagccaccagtcttaggggtccggggcctgcactgtccaccccctccaggtggccctggggctggcaaacggctatgtgcaatctgcggggacagaagctcaggcaaacactacggggtttacagctgtgagggttgcaagggcttcttcaaacgcaccatccgcaaagaccttacatactcttgccgggacaacaaagactgcacagtggacaagcgccagcggaaccgctgtcagtactgccgctatcagaagtgcctggccactggcatgaagagggaggcggtacaggaggagcgtcagcggggaaaggacaaggatggggatggggagggggctgggggagcccccgaggagatgcctgtggacaggatcctggaggcagagcttgctgtggaacagaagagtgaccagggcgttgagggtcctgggggaaccgggggtagcggcagcagcccaaatgaccctgtgactaacatctgtcaggcagctgacaaacagctattcacgcttgttgagtgggcgaagaggatcccacacttttcctccttgcctctggatgatcaggtcatattgctgcgggcaggctggaatgaactcctcattgcctccttctcacaccgatccattgatgttcgagatggcatcctccttgccacaggtcttcacgtgcaccgcaactcagcccattcagcaggagtaggagccatctttgatcgggtgctgacagagctagtgtccaaaatgcgtgacatgaggatggacaagacagagcttggctgcctgagggcaatcattctgtttaatccagatgccaagggcctctccaaccctagtgaggtggaggtcctgcgggagaaagtgtatgcatcactggagacctactgcaaacagaagtaccctgagcagcagggacggtttgccaagctgctgctacgtcttcctgccctccggtccattggccttaagtgtctagagcatctgtttttcttcaagctcattggtgacacccccatcgacaccttcctcatggagatgcttgaggctccccatcaactggcctagtaatgaactagtccgtaacttgaaagtatttcgatttcttggctttatatatcttgtggaaaggacgacccgccgttgtttgcccgaccatt

SEQ ID NO: 2406 - DNA, 1556 bp, Homo sapiens
  source 1..1556: mol_type = genomic DNA
accgccaccatggagcggaggatgaaagccggatacttggaccagcaagtgccctacaccttcagcagcaaatcgcccggaaatgggagcttgcgcgaagcgctgatcggcccgctggggaagctcatggacccgggctccctgccgcccctcgactctgaagatctcttccaggatctaagtcacttccaggagacgtggctcgctgaagctcaggtaccagacagtgatgagcagtttgttcctgatttccattcagaaaacctagctttccacagccccaccaccaggatcaagaaggagccccagagtccccgcacagacccggccctgtcctgcagcaggaagccgccactcccctaccaccatggcgagcagtgcctttactccagtgcctatgacccccccagacaaatcgccatcaagtcccctgcccctggtgcccttggacagtcgcccctacagccctttccccgggcagagcaacggaatttcctgagatcctctggcacctcccagccccaccctggccatgggtacctcggggaacatagctccgtcttccagcagcccctggacatttgccactccttcacatctcagggagggggccgggaacccctcccagccccctaccaacaccagctgtcggagccctgcccaccctatccccagcagagctttaagcaagaataccatgatcccctgtatgaacaggcgggccagccagccgtggaccagggtggggtcaatgggcacaggtacccaggggcgggggtggtgatcaaacaggaacagacggacttcgcctacgactcagatgtcaccgggtgcgcatcaatgtacctccacacagagggcttctctgggccctctccaggtgacggggccatgggctatggctatgagaaacctctgcgaccattcccagatgatgtctgcgttgtccctgagaaatttgaaggagacatcaagcaggaaggggtcggtgcatttcgagaggggccgccctaccagcgccggggtgccctgcagctgtggcaatttctggtggccttgctggatgacccaacaaatgcccatttcattgcctggacgggccggggaatggagttcaagctcattgagcctgaggaggtcgccaggctctggggcatccagaagaaccggccagccatgaattacgacaagctgagccgctcgctccgatactattatgagaaaggcatcatgcagaaggtggctggtgagcgttacgtgtacaagtttgtgtgtgagcccgaggccctcttctctttggccttcccggacaatcagcgtccagctctcaaggctgagtttgaccggcctgtcagtgaggaggacacagtccctttgtcccacttggatgagagccccgcctacctcccagagctggctggccccgcccagccatttggccccaagggtggctactcttactagtaatgaactagtccgtaacttgaaagtatttcgatttcttggctttatatatcttgtggaaaggacgatggtccgggactgagaagtcctgc

SEQ ID NO: 2407 - DNA, 1439 bp, Homo sapiens
  source 1..1439: mol_type = genomic DNA
accgccaccatggacccgggctccctgccgcccctcgactctgaagatctcttccaggatctaagtcacttccaggagacgtggctcgctgaagctcaggtaccagacagtgatgagcagtttgttcctgatttccattcagaaaacctagctttccacagccccaccaccaggatcaagaaggagccccagagtccccgcacagacccggccctgtcctgcagcaggaagccgccactcccctaccaccatggcgagcagtgcctttactccagtgcctatgacccccccagacaaatcgccatcaagtcccctgcccctggtgcccttggacagtcgcccctacagccctttccccgggcagagcaacggaatttcctgagatcctctggcacctcccagccccaccctggccatgggtacctcggggaacatagctccgtcttccagcagcccctggacatttgccactccttcacatctcagggagggggccgggaacccctcccagccccctaccaacaccagctgtcggagccctgcccaccctatccccagcagagctttaagcaagaataccatgatcccctgtatgaacaggcgggccagccagccgtggaccagggtggggtcaatgggcacaggtacccaggggcgggggtggtgatcaaacaggaacagacggacttcgcctacgactcagatgtcaccgggtgcgcatcaatgtacctccacacagagggcttctctgggccctctccaggtgacggggccatgggctatggctatgagaaacctctgcgaccattcccagatgatgtctgcgttgtccctgagaaatttgaaggagacatcaagcaggaaggggtcggtgcatttcgagaggggccgccctaccagcgccggggtgccctgcagctgtggcaatttctggtggccttgctggatgacccaacaaatgcccatttcattgcctggacgggccggggaatggagttcaagctcattgagcctgaggaggtcgccaggctctggggcatccagaagaaccggccagccatgaattacgacaagctgagccgctcgctccgatactattatgagaaaggcatcatgcagaaggtggctggtgagcgttacgtgtacaagtttgtgtgtgagcccgaggccctcttctctttggccttcccggacaatcagcgtccagctctcaaggctgagtttgaccggcctgtcagtgaggaggacacagtccctttgtcccacttggatgagagccccgcctacctcccagagctggctggccccgcccagccatttggccccaagggtggctactcttactagtaatgaactagtccgtaacttgaaagtatttcgatttcttggctttatatatcttgtggaaaggacgacaacttgttagataagggttatta

SEQ ID NO: 2408 - DNA, 1859 bp, Homo sapiens
  source 1..1859: mol_type = genomic DNA
accgccaccatggaactcttaacattcagggatgtggccatagaattctctccagaagagtggaaatgcctggaccctgcccagcagaatttgtatagagatgtgatgttggagaactacaggaacctgatctccctgggtgttgctatctctaacccagacctggtcatctatctggagcaaagaaaggagccctacaaagtgaagatacatgagacagtagccaaacacccagctgtgtgttctcatttcacccaagactttttgccagtgcaggggatagaagattcgttccacaaacttatattaagaagatatgagaaatgtggacatgagaatttagaattaagaaaaagctgtaaaaggaaggtgcagaaaggaggttataatgaatttaatcaatgcttgtcaactatccagagcaaaatatttcagtgtaatgtacatgtcaaagtatttagtacattttcaaattcaaaccaacgtaggataagacatactggagagaaacactttaaagaatgtggcaagtcatttcagaagttctcagacctaactcaacatcaaggaattcatgctggagagaaaccctacacatgtgaagaatgtggcaaagactttaaatggtatttaatctttaatgaatatgagataattcatactggagagaaacccttcacatgtgaagaatgtggcaacatctttaccacatcctcaaactttgctaaacataaagttcatactggagagaaatcttacaaatatgaagaatgtggcaaagcctttaataggtcctcaacccttactaagcataagagaattcatgctgaagagaaacccttcacatgtgaagaatgtggcaaaatcattacctcatcctcaaatgttgccaaacataagaaaattcataccggagagaaactctacaaatgtcaggaatgtggcaaagtctttaataggtccacaacccttactaaacataacagaattcatactggagagaaaccctacacatgtgaagaatgtggcaaagcctttagtaggtcctcagttctgaatgaacataagagaattcatactggagagaagccctacaaatgtgaacaatgtggcaaagcctttagacaatccgcaacccttaataaacataagagtattcatactggagagaaaccctacacatgtgaagaatgtggaaaagcctttagtcggttcacaacccttaatgaacataagagaattcatactggagagaggccccacaaatgtgaagagtgtggcaaagcctttggatggtccacagacctgaataaacataagataattcatactggagagaaaccttacaaatgtgaagagtgtggcaaagcctttggatggtctgcatacctgagtaaacataagaaaattcatactggagagaaaccttatagatgtgaagagtgtggcaaagcctttttatgttccagagccctgaataaacataagacaattcatactggagagaaaccttacgaatgtgaagagtgtggcaaagcctttggatggtccacatacctgagtaaacataagaaaattcatactggagagaaaccttatagatgtgaagagtgtggcaaagcatttagacgttccagagtcctgaataaatataagacaattcatactggagataaaacccccaaatgtaaaggatgtggcaaagcctttaagtggtcctcataccttaatcaacataataaaatttatactggagagaaactctagtaatgaactagtccgtaacttgaaagtatttcgatttcttggctttatatatcttgtggaaaggacgactcgcgatcacagggatcatactt

SEQ ID NO: 2409 - DNA, 1868 bp, Homo sapiens
  source 1..1868: mol_type = genomic DNA
accgccaccatggacctcgaggaggcggaagagtttaaagaacgctgtactcagtgtgctgctgtctcatggggtcttactgatgaaggcaaatattattgcacttcttgccacaatgttacagagagatatcaggaagttacaaacactgatcttattcctaatacccaaataaaagccctcaaccgggggcttaaaaaaaaaaacaatactgaaaaaggctgggattggtatgtgtgtgaaggtttccagtatattctttatcaacaagcagaagccttaaagaaccttggagtaggcccagagttaaagaacgatgttttacataatttttggaagcgctaccttcagaagagcaagcaggcatattgtaagaacccagtttataccactggaaggaaacctacggtattagaagataatctaagtcattcagactgggctagtgagcctgagctgctaagtgatgtcagctgtcctccttttcttgaaagtggagcggagtctcagtctgacatccacactcgaaaacctttccccgtcagcaaagcatcacaatcagaaacgtctgtctgctctggatctctggatggagttgaatactcacaacgaaaggagaagggaatcgtgaagatgaccatgccacagacacttgccttctgttatctgtccttactttggcagagagaagcaataacactttcagatcttttgaggtttgttgaagaggaccatattccttacataaatgcttttcagcattttccagaacagatgaaattatatggacgtgacagaggaatctttggtatagagtcttggcctgactacgaggacatctacaaaaaaacagtagaagttggaacatttttagatttgcctcgttttccagacataactgaagactgctatcttcatcccaacatactgtgtatgaaatacttgatggaagtcaacctccctgatgaaatgcatagcttaacttgccacgtggtaaaaatgactggaatgggagaagtggattttctgacatttgatcctatagctaaaatggcaaaaactgttaagtacgatgtacaagctgtagctatcattgtggtggtattgaaactgctctttctattggatgacagtttcgagtggtctttgtctaatcttgctgaaaagcataatgaaaagaacaaaaaagataagccatggtttgatttcagaaagtggtaccaaattatgaagaaagcttttgatgagaaaaaacaaaaatgggaagaagcaagggccaagtacctgtggaaaagtgaaaagccactctactactcatttgtcgacaaaccagtagcatataaaaaaagagaaatggtggtgaatctacagaaacaatttagcacactggtcgagtcaacagcaactgctggaaaaaaaagcccttcaagttttcagttcaactggactgaagaggacactgatagaacgtgtttccatggacacagccttcagggagtcctgaaagagaaaggccaatcactgctgactaagaattcattatattggcttagtacacagaaattctgcagatgctattgtacacatgtgacaacctatgaagaatcaaattattctctgagttatcagtttatactaaatctcttctccttcctgctcagaataaagacttcccttctccatgaagaagtgagcttagttgagaagaaactttttgagaaaaaatacagtgtaaaaagaaagaaatcaagatccaagaaagtgagacgacattagtaatgaactagtccgtaacttgaaagtatttcgatttcttggctttatatatcttgtggaaaggacgagtcggtcgctcttcagttgttctt

SEQ ID NO: 2410 - DNA, 1454 bp, Homo sapiens
  source 1..1454: mol_type = genomic DNA
accgccaccatgagtgatttcagtgaagaattaaaagggcctgtgacagatgatgaagaagtggaaacatctgtgctcagtggtgcaggaatgcattttccttggcttcaaacatacgtagaaactgtggccattggagggaaaaggaggaaggattttgctcagacaacaagtgcttgtttaagttttatccaagaagctctgctgaagcaccaatggcagcaagctgcagaatacatgtacagttattttcagaccttggaagattcagatagctacaaaaggcaggctgcacctgagattatttggaagctcggaagtgaaattctattttatcatcccaaaagcaacatggagagtttcaatacttttgctaaccggatgaaaaatattggcgtcatgaattatttaaagatctccttacaacatgcattataccttctgcatcatggaatgcttaaagatgctaagagaaatctgagtgaggcagagacatggagacatggtgaaaatacgtcttcccgggaaatattaatcaaccttattcaggcctataaagggcttttacagtattatacctggtctgaaaagaagatggaattgtcaaagcttgataaggatgattatgcttacaatgcagtagcccaggatgtgttcaaccacagctggaagacatctgcaaatatttctgcattgattaaaattcctggagtttgggacccttttgtgaagagttatgtagaaatgctggaattctatggggatcgagatggagcccaagaggtactcaccaattatgcatatgatgaaaagtttccatcaaatccaaatgcccatatctacttatacaactttctaaagagacagaaggcaccaagatcaaaattgataagtgtgcttaagattttgtatcagattgtaccatctcataaattgatgttggaattccatacattacttagaaaatcagaaaaagaagaacaccgtaaactggggttggaggtattatttggagtcttagattttgccggatgcactaagaatataactgcttggaaatacttggcaaaatatctgaaaaatatcttaatgggaaaccaccttgcgtgggttcaagaagagtggaactccaggaaaaactggtggccaggctttcatttcagctacttttgggcaaaaagtgattggaaggaagatacagctttggcctgtgagaaagcttttgtggctggtttactgttaggaaaaggttgtagatatttccggtatattttaaagcaagatcaccaaatcttagggaagaaaattaagcggatgaagagatctgtgaaaaaatacagtattgtaaatccaagactctagtaatgaactagtccgtaacttgaaagtatttcgatttcttggctttatatatcttgtggaaaggacgaatacctcaagaacccttgtgaggt

SEQ ID NO: 2411 - DNA, 1112 bp, Homo sapiens
  source 1..1112: mol_type = genomic DNA
accgccaccatggagagtttcaatacttttgctaaccggatgaaaaatattggcgtcatgaattatttaaagatctccttacaacatgcattataccttctgcatcatggaatgcttaaagatgctaagagaaatctgagtgaggcagagacatggagacatggtgaaaatacgtcttcccgggaaatattaatcaaccttattcaggcctataaagggcttttacagtattatacctggtctgaaaagaagatggaattgtcaaagcttgataaggatgattatgcttacaatgcagtagcccaggatgtgttcaaccacagctggaagacatctgcaaatatttctgcattgattaaaattcctggagtttgggacccttttgtgaagagttatgtagaaatgctggaattctatggggatcgagatggagcccaagaggtactcaccaattatgcatatgatgaaaagtttccatcaaatccaaatgcccatatctacttatacaactttctaaagagacagaaggcaccaagatcaaaattgataagtgtgcttaagattttgtatcagattgtaccatctcataaattgatgttggaattccatacattacttagaaaatcagaaaaagaagaacaccgtaaactggggttggaggtattatttggagtcttagattttgccggatgcactaagaatataactgcttggaaatacttggcaaaatatctgaaaaatatcttaatgggaaaccaccttgcgtgggttcaagaagagtggaactccaggaaaaactggtggccaggctttcatttcagctacttttgggcaaaaagtgattggaaggaagatacagctttggcctgtgagaaagcttttgtggctggtttactgttaggaaaaggttgtagatatttccggtatattttaaagcaagatcaccaaatcttagggaagaaaattaagcggatgaagagatctgtgaaaaaatacagtattgtaaatccaagactctagtaatgaactagtccgtaacttgaaagtatttcgatttcttggctttatatatcttgtggaaaggacgaggaacggtagcgaagcaactcaag

SEQ ID NO: 2412 - DNA, 1385 bp, Homo sapiens
  source 1..1385: mol_type = genomic DNA
accgccaccatgggagtgttgacattcagggatgtggctgtagaattctccccagaagagtgggaatgcctggactctgctcagcagcgtttgtatagggatgtgatgttagagaactatggaaacctggtctccttgggtcttgctatctttaagccagacttgatgacctgtctggagcaaagaaaagagccttggaaagtgaagagacaggaggcagtagccaaacacccagctggttcttttcattttactgcagagatattgccggatcatgacataaaagattcatttcaaaaagtgattctgagaaaatatggaagctgtgaccttaataatttacatttaaagaaagactaccaaagtgtgggtaattgcaaggggcagaaaagcagttataatggccttcatcaatgtttgtcagctacccatagcaaaacctgtcaatgtaataaatgtggcagaggttttcagttgtgctcaatcttcactgaacataaagacatttttagcagagagaaatgccacaaatgtgaagaatgtggcaaagactgtaggttgttctcagattttactagacataagaaaattcatactgtagagagatgctacaaatgtgaagaatgtggcaaagcgtttaaaaagttttcaaaccttactgaacataagagagttcatactggagagaaaccttacaaatgtgaaggatgtggcaaaacttttacctgctcctcaacccttgttaaacacaagagaaatcatactggagacagaccctacaaatgtgaagaatgtggcaaagcctttaagtgcttctcagaccttactaatcataagagaattcatactggagagaaaccctacaaatgtgaagaatgtaacaaagcctataggtggttctcagaccttgctaaacataagataattcatactggagacaaaccctacacatgtaatgaatgtggaaaagcttttaagtggttctcggcccttagtaaacataagagaattcatactggagagaaaccctacatctgtgaagaatgtggcaaagcctttacccgctcctcaaccctttttaaccacaagagaattcatatggaagagagaccttacaaatgtgaagaatgcagcaaaacctttaagtgcttctcagacctgactaatcataagagaattcacactggagagaaaccctacaaatgtgaagaatgtggcaaagcatcgagctggttctcacacctcatcagacataagagaattcatactagagagaagctccacaagtgttagtaatgaactagtccgtaacttgaaagtatttcgatttcttggctttatatatcttgtggaaaggacgactatggagccatgtaaggcaagtt

SEQ ID NO: 2413 - DNA, 5720 bp, Homo sapiens
  source 1..5720: mol_type = genomic DNA
accgccaccatgggacccggctgcgatttgctgctgcggacagcagctaccatcactgctgccgccatcatgtcagacacggacagcgacgaagattccgctggaggcggcccattttctttagcgggtttccttttcggcaacatcaatggagccgggcagctggagggggaaagcgtcttggatgatgaatgtaagaagcacttggcaggcttgggggctttggggctgggcagcctgatcactgaactcacggcaaatgaagaattgaccgggactgacggtgccttggtaaatgatgaagggtgggttaggagtacagaagatgctgtggactattcagacatcaatgaggtggcagaagatgaaagccgaagataccagcagacgatggggagcttgcagcccctttgccactcagattatgatgaagatgactatgatgctgattgtgaagacattgattgcaagttgatgcctcctccacctccacccccgggaccaatgaagaaggataaggaccaggattctattactggtgagaaagtggacttcagtagttcctctgactcagaatctgagatgggacctcaggaagcaacacaggcagaatctgaagatggaaagctgacccttccattggctgggattatgcagcatgatgccaccaagctgttgccaagtgtcacagaactttttccagaatttcgacctggaaaggtgttacgttttctacgtctttttggaccagggaagaatgtcccatctgtttggcggagtgctcggagaaagaggaagaagaagcaccgtgagctgatacaggaagagcagatccaggaggtggagtgctcagtagaatcagaagtcagccagaagtctttgtggaactacgactacgctccaccaccacctccagagcagtgtctctctgatgatgaaatcacgatgatggctcctgtggagtccaaattttcccaatcaactggagatatagataaagtgacagataccaaaccaagagtggctgagtggcgttatgggcctgcccgactgtggtatgatatgctgggtgtccctgaagatggcagtgggtttgactatggcttcaaactgagaaagacagaacatgaacctgtgataaaatctagaatgatagaggaatttaggaaacttgaggaaaacaatggcactgatcttctggctgatgaaaacttcctgatggtgacacagctgcattgggaggatgatatcatctgggatggggaggatgtcaaacacaaagggacaaaacctcagcgtgcaagcctggcaggctggcttccttctagcatgactaggaatgcgatggcttacaatgttcagcaaggttttgcagccactcttgatgatgacaaaccttggtactccatttttcccattgacaatgaggatctggtatatggacgctgggaggacaatatcatttgggatgctcaggccatgccccggctgttggaacctcctgttttgacacttgatcccaatgatgagaacctcattttggaaattcctgatgagaaggaagaggccacctctaactccccctccaaggagagtaagaaggaatcatctctgaagaagagtcgaattctcttagggaaaacaggagtcatcaaggaggaaccacagcagaacatgtctcagccagaagtgaaagatccatggaatctctccaatgatgagtattattatcccaagcaacagggtcttcgaggcacctttggagggaatattatccagcattcaattcctgctgtggaattacggcagcccttctttcccacccacatggggcccatcaaactccggcagttccatcgcccacctctgaaaaagtactcatttggtgcactttctcagccaggtccccactcagtccaacctttgctaaagcacatcaaaaaaaaggccaagatgagagaacaagagaggcaagcttcaggtggtggagagatgttttttatgcgcacacctcaggacctcacaggcaaagatggtgatcttattcttgcagaatatagtgaggaaaatggacccttaatgatgcaggttggcatggcaaccaagataaagaactattataaacggaaacctggaaaagatcctggagcaccagattgtaaatatggggaaactgtttactgccatacatctcctttcctgggttctctccatcctggccaattgctgcaagcatttgagaacaacctttttcgtgctccaatttatcttcataagatgccagaaactgatttcttgatcattcggacaagacagggttactatattcgggaattagtggatatttttgtggttggccagcagtgtcccttgtttgaagttcctgggcctaactccaaaagggccaatacgcatattcgagactttctacaggtttttatttaccgccttttctggaaaagtaaagatcggccacggaggatacgaatggaagatataaaaaaagcctttccttcccattcagaaagcagcatccggaagaggctaaagctctgcgctgacttcaaacgcacagggatggactcaaactggtgggtgcttaagtctgattttcgtttaccaacggaagaagagatcagagctatggtgtcaccagagcagtgctgtgcttattatagcatgatagctgcagagcaacgactgaaggatgctggctatggtgagaaatccttttttgctccagaagaagaaaatgaggaagatttccagatgaagattgatgatgaagttcgcactgccccttggaacaccacaagggccttcattgctgccatgaagggcaagtgtctgctagaggtgactggggtggcagatcccacggggtgtggtgaaggattctcctatgtgaagattccaaacaaaccaacacagcagaaggatgataaagaaccgcagccagtgaagaagacagtgacaggaacagatgcagaccttcgtcgcctttccctgaaaaatgccaagcaacttctacgtaaatttggtgtgcctgaggaagagattaaaaagttgtcccgctgggaagtgattgatgtggtgcgcacaatgtcaacagaacaggctcgttctggagaggggcccatgagtaaatttgcccgtggatcaaggttttctgtggctgagcatcaagagcgttacaaagaggaatgtcagcgcatctttgacctacagaacaaggttctgtcatcaactgaagtcttatcaactgacacagacagcagctcagctgaagatagtgactttgaagaaatgggaaagaacattgagaacatgttgcagaacaagaaaaccagctctcagctttcacgtgaacgggaggaacaggagcggaaggaactacagcgaatgctactggcagcaggctcagcagcatccggaaacaatcacagagatgatgacacagcttccgtgactagccttaactcttctgccactggacgctgtctcaagatttatcgcacgtttcgagatgaagaggggaaagagtatgttcgctgtgagacagtccgaaaaccagctgtcattgatgcctatgtgcgcatacggactacaaaagatgaggaattcattcgaaaatttgccctttttgatgaacaacatcgggaagagatgcgaaaagaacggcggaggattcaagagcaactgaggcggcttaagaggaaccaggaaaaggagaagcttaagggtcctcctgagaagaagcccaagaaaatgaaggagcgtcctgacctaaaactgaaatgtggggcatgtggtgccattggacacatgaggactaacaaattctgccccctctattatcaaacaaatgcgccaccttccaaccctgttgccatgacagaagaacaggaggaggagttggaaaagacagtcattcataatgataatgaagaacttatcaaggttgaagggaccaaaattgtcttggggaaacagctaattgagagtgcggatgaggttcgcagaaaatctctggttctcaagtttcctaaacagcagcttcctccaaagaagaaacggcgagttggaaccactgttcactgtgactatttgaatagacctcataagtccatccaccggcgccgcacagaccctatggtgacgctgtcgtccatcttggagtctatcatcaatgacatgagagatcttccaaatacataccctttccacactccagtcaatgcaaaggttgtaaaggactactacaaaatcatcactcggccaatggacctacaaacactccgcgaaaacgtgcgtaaacgcctctacccatctcgggaagagttcagagagcatctggagctaattgtgaaaaatagtgcaacctacaatgggccaaaacactcattgactcagatctctcaatccatgctggatctctgtgatgaaaaactcaaagagaaagaagacaaattagctcgcttagagaaagctatcaaccccttgctggatgatgatgaccaagtggcgttttctttcattctggacaacattgtcacccagaaaatgatggcagttccagattcttggccatttcatcacccagttaataagaaatttgttccagattattacaaagtgattgtcaatccaatggatttagagaccatacgtaagaacatctccaagcacaagtatcagagtcgggagagctttctggatgatgtaaaccttattctggccaacagtgttaagtataatggacctgagagtcagtatactaagactgcccaggagattgtgaacgtctgttaccagacattgactgagtatgatgaacatttgactcaacttgagaaggatatttgtactgctaaagaagcagctttggaggaagcagaattagaaagcctggacccaatgaccccagggccctacacgcctcagcctcctgatttgtatgataccaacacatccctcagtatgtctcgagatgcctctgtatttcaagatgagagcaatatgtctgtcttggatattcccagtgccactccagaaaagcaggtaacacaggaaggtgaagatggagatggtgatcttgcagatgaagaggaaggaactgtacaacagcctcaagccagtgtcctgtatgaggatttgcttatgtctgaaggagaagatgatgaggaagatgctgggagtgatgaagaaggagacaatcctttctctgctatccagctgagtgaaagtggaagtgactctgatgtgggatctggtggaataagacccaaacaaccccgcatgcttcaggagaacacaaggatggacatggaaaatgaagaaagcatgatgtcctatgagggagacggtggggaggcttcccatggtttggaggatagcaacatcagttatgggagctatgaggagcctgatcccaagtcgaacacccaagacacaagcttcagcagcatcggtgggtatgaggtatcagaggaggaagaagatgaggaggaggaagagcagcgctctgggccgagcgtactaagccaggtccacctgtcagaggacgaggaggacagtgaggatttccactccattgctggggacagtgacttggactctgatgaatagtaatgaactagtccgtaacttgaaagtatttcgatttcttggctttatatatcttgtggaaaggacgactcgcttgtagtacaatcacgccg

SEQ ID NO: 2414 - DNA, 5789 bp, Homo sapiens
  source 1..5789: mol_type = genomic DNA
accgccaccatgggacccggctgcgatttgctgctgcggacagcagctaccatcactgctgccgccatcatgtcagacacggacagcgacgaagattccgctggaggcggcccattttctttagcgggtttccttttcggcaacatcaatggagccgggcagctggagggggaaagcgtcttggatgatgaatgtaagaagcacttggcaggcttgggggctttggggctgggcagcctgatcactgaactcacggcaaatgaagaattgaccgggactgacggtgccttggtaaatgatgaagggtgggttaggagtacagaagatgctgtggactattcagacatcaatgaggtggcagaagatgaaagccgaagataccagcagacgatggggagcttgcagcccctttgccactcagattatgatgaagatgactatgatgctgattgtgaagacattgattgcaagttgatgcctcctccacctccacccccgggaccaatgaagaaggataaggaccaggattctattactggtgtgtctgaaaatggagaaggcatcatcttgccctccatcattgccccttcctctttggcctcagagaaagtggacttcagtagttcctctgactcagaatctgagatgggacctcaggaagcaacacaggcagaatctgaagatggaaagctgacccttccattggctgggattatgcagcatgatgccaccaagctgttgccaagtgtcacagaactttttccagaatttcgacctggaaaggtgttacgttttctacgtctttttggaccagggaagaatgtcccatctgtttggcggagtgctcggagaaagaggaagaagaagcaccgtgagctgatacaggaagagcagatccaggaggtggagtgctcagtagaatcagaagtcagccagaagtctttgtggaactacgactacgctccaccaccacctccagagcagtgtctctctgatgatgaaatcacgatgatggctcctgtggagtccaaattttcccaatcaactggagatatagataaagtgacagataccaaaccaagagtggctgagtggcgttatgggcctgcccgactgtggtatgatatgctgggtgtccctgaagatggcagtgggtttgactatggcttcaaactgagaaagacagaacatgaacctgtgataaaatctagaatgatagaggaatttaggaaacttgaggaaaacaatggcactgatcttctggctgatgaaaacttcctgatggtgacacagctgcattgggaggatgatatcatctgggatggggaggatgtcaaacacaaagggacaaaacctcagcgtgcaagcctggcaggctggcttccttctagcatgactaggaatgcgatggcttacaatgttcagcaaggttttgcagccactcttgatgatgacaaaccttggtactccatttttcccattgacaatgaggatctggtatatggacgctgggaggacaatatcatttgggatgctcaggccatgccccggctgttggaacctcctgttttgacacttgatcccaatgatgagaacctcattttggaaattcctgatgagaaggaagaggccacctctaactccccctccaaggagagtaagaaggaatcatctctgaagaagagtcgaattctcttagggaaaacaggagtcatcaaggaggaaccacagcagaacatgtctcagccagaagtgaaagatccatggaatctctccaatgatgagtattattatcccaagcaacagggtcttcgaggcacctttggagggaatattatccagcattcaattcctgctgtggaattacggcagcccttctttcccacccacatggggcccatcaaactccggcagttccatcgcccacctctgaaaaagtactcatttggtgcactttctcagccaggtccccactcagtccaacctttgctaaagcacatcaaaaaaaaggccaagatgagagaacaagagaggcaagcttcaggtggtggagagatgttttttatgcgcacacctcaggacctcacaggcaaagatggtgatcttattcttgcagaatatagtgaggaaaatggacccttaatgatgcaggttggcatggcaaccaagataaagaactattataaacggaaacctggaaaagatcctggagcaccagattgtaaatatggggaaactgtttactgccatacatctcctttcctgggttctctccatcctggccaattgctgcaagcatttgagaacaacctttttcgtgctccaatttatcttcataagatgccagaaactgatttcttgatcattcggacaagacagggttactatattcgggaattagtggatatttttgtggttggccagcagtgtcccttgtttgaagttcctgggcctaactccaaaagggccaatacgcatattcgagactttctacaggtttttatttaccgccttttctggaaaagtaaagatcggccacggaggatacgaatggaagatataaaaaaagcctttccttcccattcagaaagcagcatccggaagaggctaaagctctgcgctgacttcaaacgcacagggatggactcaaactggtgggtgcttaagtctgattttcgtttaccaacggaagaagagatcagagctatggtgtcaccagagcagtgctgtgcttattatagcatgatagctgcagagcaacgactgaaggatgctggctatggtgagaaatccttttttgctccagaagaagaaaatgaggaagatttccagatgaagattgatgatgaagttcgcactgccccttggaacaccacaagggccttcattgctgccatgaagggcaagtgtctgctagaggtgactggggtggcagatcccacggggtgtggtgaaggattctcctatgtgaagattccaaacaaaccaacacagcagaaggatgataaagaaccgcagccagtgaagaagacagtgacaggaacagatgcagaccttcgtcgcctttccctgaaaaatgccaagcaacttctacgtaaatttggtgtgcctgaggaagagattaaaaagttgtcccgctgggaagtgattgatgtggtgcgcacaatgtcaacagaacaggctcgttctggagaggggcccatgagtaaatttgcccgtggatcaaggttttctgtggctgagcatcaagagcgttacaaagaggaatgtcagcgcatctttgacctacagaacaaggttctgtcatcaactgaagtcttatcaactgacacagacagcagctcagctgaagatagtgactttgaagaaatgggaaagaacattgagaacatgttgcagaacaagaaaaccagctctcagctttcacgtgaacgggaggaacaggagcggaaggaactacagcgaatgctactggcagcaggctcagcagcatccggaaacaatcacagagatgatgacacagcttccgtgactagccttaactcttctgccactggacgctgtctcaagatttatcgcacgtttcgagatgaagaggggaaagagtatgttcgctgtgagacagtccgaaaaccagctgtcattgatgcctatgtgcgcatacggactacaaaagatgaggaattcattcgaaaatttgccctttttgatgaacaacatcgggaagagatgcgaaaagaacggcggaggattcaagagcaactgaggcggcttaagaggaaccaggaaaaggagaagcttaagggtcctcctgagaagaagcccaagaaaatgaaggagcgtcctgacctaaaactgaaatgtggggcatgtggtgccattggacacatgaggactaacaaattctgccccctctattatcaaacaaatgcgccaccttccaaccctgttgccatgacagaagaacaggaggaggagttggaaaagacagtcattcataatgataatgaagaacttatcaaggttgaagggaccaaaattgtcttggggaaacagctaattgagagtgcggatgaggttcgcagaaaatctctggttctcaagtttcctaaacagcagcttcctccaaagaagaaacggcgagttggaaccactgttcactgtgactatttgaatagacctcataagtccatccaccggcgccgcacagaccctatggtgacgctgtcgtccatcttggagtctatcatcaatgacatgagagatcttccaaatacataccctttccacactccagtcaatgcaaaggttgtaaaggactactacaaaatcatcactcggccaatggacctacaaacactccgcgaaaacgtgcgtaaacgcctctacccatctcgggaagagttcagagagcatctggagctaattgtgaaaaatagtgcaacctacaatgggccaaaacactcattgactcagatctctcaatccatgctggatctctgtgatgaaaaactcaaagagaaagaagacaaattagctcgcttagagaaagctatcaaccccttgctggatgatgatgaccaagtggcgttttctttcattctggacaacattgtcacccagaaaatgatggcagttccagattcttggccatttcatcacccagttaataagaaatttgttccagattattacaaagtgattgtcaatccaatggatttagagaccatacgtaagaacatctccaagcacaagtatcagagtcgggagagctttctggatgatgtaaaccttattctggccaacagtgttaagtataatggacctgagagtcagtatactaagactgcccaggagattgtgaacgtctgttaccagacattgactgagtatgatgaacatttgactcaacttgagaaggatatttgtactgctaaagaagcagctttggaggaagcagaattagaaagcctggacccaatgaccccagggccctacacgcctcaggctaagcctcctgatttgtatgataccaacacatccctcagtatgtctcgagatgcctctgtatttcaagatgagagcaatatgtctgtcttggatattcccagtgccactccagaaaagcaggtaacacaggaaggtgaagatggagatggtgatcttgcagatgaagaggaaggaactgtacaacagcctcaagccagtgtcctgtatgaggatttgcttatgtctgaaggagaagatgatgaggaagatgctgggagtgatgaagaaggagacaatcctttctctgctatccagctgagtgaaagtggaagtgactctgatgtgggatctggtggaataagacccaaacaaccccgcatgcttcaggagaacacaaggatggacatggaaaatgaagaaagcatgatgtcctatgagggagacggtggggaggcttcccatggtttggaggatagcaacatcagttatgggagctatgaggagcctgatcccaagtcgaacacccaagacacaagcttcagcagcatcggtgggtatgaggtatcagaggaggaagaagatgaggaggaggaagagcagcgctctgggccgagcgtactaagccaggtccacctgtcagaggacgaggaggacagtgaggatttccactccattgctggggacagtgacttggactctgatgaatagtaatgaactagtccgtaacttgaaagtatttcgatttcttggctttatatatcttgtggaaaggacgaaacttatttatactagcagaggtc

SEQ ID NO: 2415 - DNA, 5783 bp, Homo sapiens
  source 1..5783: mol_type = genomic DNA
accgccaccatgggacccggctgcgatttgctgctgcggacagcagctaccatcactgctgccgccatcatgtcagacacggacagcgacgaagattccgctggaggcggcccattttctttagcgggtttccttttcggcaacatcaatggagccgggcagctggagggggaaagcgtcttggatgatgaatgtaagaagcacttggcaggcttgggggctttggggctgggcagcctgatcactgaactcacggcaaatgaagaattgaccgggactgacggtgccttggtaaatgatgaagggtgggttaggagtacagaagatgctgtggactattcagacatcaatgaggtggcagaagatgaaagccgaagataccagcagacgatggggagcttgcagcccctttgccactcagattatgatgaagatgactatgatgctgattgtgaagacattgattgcaagttgatgcctcctccacctccacccccgggaccaatgaagaaggataaggaccaggattctattactggtgtgtctgaaaatggagaaggcatcatcttgccctccatcattgccccttcctctttggcctcagagaaagtggacttcagtagttcctctgactcagaatctgagatgggacctcaggaagcaacacaggcagaatctgaagatggaaagctgacccttccattggctgggattatgcagcatgatgccaccaagctgttgccaagtgtcacagaactttttccagaatttcgacctggaaaggtgttacgttttctacgtctttttggaccagggaagaatgtcccatctgtttggcggagtgctcggagaaagaggaagaagaagcaccgtgagctgatacaggaagagcagatccaggaggtggagtgctcagtagaatcagaagtcagccagaagtctttgtggaactacgactacgctccaccaccacctccagagcagtgtctctctgatgatgaaatcacgatgatggctcctgtggagtccaaattttcccaatcaactggagatatagataaagtgacagataccaaaccaagagtggctgagtggcgttatgggcctgcccgactgtggtatgatatgctgggtgtccctgaagatggcagtgggtttgactatggcttcaaactgagaaagacagaacatgaacctgtgataaaatctagaatgatagaggaatttaggaaacttgaggaaaacaatggcactgatcttctggctgatgaaaacttcctgatggtgacacagctgcattgggaggatgatatcatctgggatggggaggatgtcaaacacaaagggacaaaacctcagcgtgcaagcctggcaggctggcttccttctagcatgactaggaatgcgatggcttacaatgttcagcaaggttttgcagccactcttgatgatgacaaaccttggtactccatttttcccattgacaatgaggatctggtatatggacgctgggaggacaatatcatttgggatgctcaggccatgccccggctgttggaacctcctgttttgacacttgatcccaatgatgagaacctcattttggaaattcctgatgagaaggaagaggccacctctaactccccctccaaggagagtaagaaggaatcatctctgaagaagagtcgaattctcttagggaaaacaggagtcatcaaggaggaaccacagcagaacatgtctcagccagaagtgaaagatccatggaatctctccaatgatgagtattattatcccaagcaacagggtcttcgaggcacctttggagggaatattatccagcattcaattcctgctgtggaattacggcagcccttctttcccacccacatggggcccatcaaactccggcagttccatcgcccacctctgaaaaagtactcatttggtgcactttctcagccaggtccccactcagtccaacctttgctaaagcacatcaaaaaaaaggccaagatgagagaacaagagaggcaagcttcaggtggtggagagatgttttttatgcgcacacctcaggacctcacaggcaaagatggtgatcttattcttgcagaatatagtgaggaaaatggacccttaatgatgcaggttggcatggcaaccaagataaagaactattataaacggaaacctggaaaagatcctggagcaccagattgtaaatatggggaaactgtttactgccatacatctcctttcctgggttctctccatcctggccaattgctgcaagcatttgagaacaacctttttcgtgctccaatttatcttcataagatgccagaaactgatttcttgatcattcggacaagacagggttactatattcgggaattagtggatatttttgtggttggccagcagtgtcccttgtttgaagttcctgggcctaactccaaaagggccaatacgcatattcgagactttctacaggtttttatttaccgccttttctggaaaagtaaagatcggccacggaggatacgaatggaagatataaaaaaagcctttccttcccattcagaaagcagcatccggaagaggctaaagctctgcgctgacttcaaacgcacagggatggactcaaactggtgggtgcttaagtctgattttcgtttaccaacggaagaagagatcagagctatggtgtcaccagagcagtgctgtgcttattatagcatgatagctgcagagcaacgactgaaggatgctggctatggtgagaaatccttttttgctccagaagaagaaaatgaggaagatttccagatgaagattgatgatgaagttcgcactgccccttggaacaccacaagggccttcattgctgccatgaagggcaagtgtctgctagaggtgactggggtggcagatcccacggggtgtggtgaaggattctcctatgtgaagattccaaacaaaccaacacagcagaaggatgataaagaaccgcagccagtgaagaagacagtgacaggaacagatgcagaccttcgtcgcctttccctgaaaaatgccaagcaacttctacgtaaatttggtgtgcctgaggaagagattaaaaagttgtcccgctgggaagtgattgatgtggtgcgcacaatgtcaacagaacaggctcgttctggagaggggcccatgagtaaatttgcccgtggatcaaggttttctgtggctgagcatcaagagcgttacaaagaggaatgtcagcgcatctttgacctacagaacaaggttctgtcatcaactgaagtcttatcaactgacacagacagcagctcagctgaagatagtgactttgaagaaatgggaaagaacattgagaacatgttgcagaacaagaaaaccagctctcagctttcacgtgaacgggaggaacaggagcggaaggaactacagcgaatgctactggcagcaggctcagcagcatccggaaacaatcacagagatgatgacacagcttccgtgactagccttaactcttctgccactggacgctgtctcaagatttatcgcacgtttcgagatgaagaggggaaagagtatgttcgctgtgagacagtccgaaaaccagctgtcattgatgcctatgtgcgcatacggactacaaaagatgaggaattcattcgaaaatttgccctttttgatgaacaacatcgggaagagatgcgaaaagaacggcggaggattcaagagcaactgaggcggcttaagaggaaccaggaaaaggagaagcttaagggtcctcctgagaagaagcccaagaaaatgaaggagcgtcctgacctaaaactgaaatgtggggcatgtggtgccattggacacatgaggactaacaaattctgccccctctattatcaaacaaatgcgccaccttccaaccctgttgccatgacagaagaacaggaggaggagttggaaaagacagtcattcataatgataatgaagaacttatcaaggttgaagggaccaaaattgtcttggggaaacagctaattgagagtgcggatgaggttcgcagaaaatctctggttctcaagtttcctaaacagcagcttcctccaaagaagaaacggcgagttggaaccactgttcactgtgactatttgaatagacctcataagtccatccaccggcgccgcacagaccctatggtgacgctgtcgtccatcttggagtctatcatcaatgacatgagagatcttccaaatacataccctttccacactccagtcaatgcaaaggttgtaaaggactactacaaaatcatcactcggccaatggacctacaaacactccgcgaaaacgtgcgtaaacgcctctacccatctcgggaagagttcagagagcatctggagctaattgtgaaaaatagtgcaacctacaatgggccaaaacactcattgactcagatctctcaatccatgctggatctctgtgatgaaaaactcaaagagaaagaagacaaattagctcgcttagagaaagctatcaaccccttgctggatgatgatgaccaagtggcgttttctttcattctggacaacattgtcacccagaaaatgatggcagttccagattcttggccatttcatcacccagttaataagaaatttgttccagattattacaaagtgattgtcaatccaatggatttagagaccatacgtaagaacatctccaagcacaagtatcagagtcgggagagctttctggatgatgtaaaccttattctggccaacagtgttaagtataatggacctgagagtcagtatactaagactgcccaggagattgtgaacgtctgttaccagacattgactgagtatgatgaacatttgactcaacttgagaaggatatttgtactgctaaagaagcagctttggaggaagcagaattagaaagcctggacccaatgaccccagggccctacacgcctcagcctcctgatttgtatgataccaacacatccctcagtatgtctcgagatgcctctgtatttcaagatgagagcaatatgtctgtcttggatattcccagtgccactccagaaaagcaggtaacacaggaaggtgaagatggagatggtgatcttgcagatgaagaggaaggaactgtacaacagcctcaagccagtgtcctgtatgaggatttgcttatgtctgaaggagaagatgatgaggaagatgctgggagtgatgaagaaggagacaatcctttctctgctatccagctgagtgaaagtggaagtgactctgatgtgggatctggtggaataagacccaaacaaccccgcatgcttcaggagaacacaaggatggacatggaaaatgaagaaagcatgatgtcctatgagggagacggtggggaggcttcccatggtttggaggatagcaacatcagttatgggagctatgaggagcctgatcccaagtcgaacacccaagacacaagcttcagcagcatcggtgggtatgaggtatcagaggaggaagaagatgaggaggaggaagagcagcgctctgggccgagcgtactaagccaggtccacctgtcagaggacgaggaggacagtgaggatttccactccattgctggggacagtgacttggactctgatgaatagtaatgaactagtccgtaacttgaaagtatttcgatttcttggctttatatatcttgtggaaaggacgacgtcgaaaccgttcaacggaagga

SEQ ID NO: 2416 - DNA, 1340 bp, Homo sapiens
  source 1..1340: mol_type = genomic DNA
accgccaccatggctaaaagaccgggaccccctggaagccgagaaatgggactgttgacattcagagacatagctatagaattctctctggcggagtggcaatgcctggatcatgctcagcagaatttatatagagatgtgatgttagagaactacagaaacctgttctccctgggtatgactgtctctaagccagacttgatcgcctgtctggagcaaaataaagagccccagaatataaagagaaatgagatggcagccaaacacccagttacatgttctcatttcaaccaagaccttcagccagagcagagcataaaagattcactccaaaaagtaataccaagaacatatggaaaatgtggacatgagaatttacaattaaaaaaatgttgtaaaagagtagatgagtgtgaggtgcacaaaggaggttataatgaccttaaccaatgtttgtcaaatacccaaaacaaaatatttcagactcataaatgtgtcaaagtcttcagtaaattttcaaattccaatagacacaatgcaagatatactggaaagaaacatttgaaatgtaaaaaatatggcaaatcattttgcatgttttcacacctaaatcaacatcagataattcatactaaggagaagtcctacaaatgtgaagaatgtggcaaatcctttaaccactcctcaagcggtactacacataaaagaattcttactggagagaaaccctacagatgtgaggaatgtggcaaagcctttaggtggccctcaaaccttactagacataagagaattcacactggagagaaaccctacgcatgtgaagaatgtggccaagcctttaggcgctcctcaacacttactaaccacaagagaattcatactggagagagaccctacaaatgtgaagaatgtggcaaagcctttagcgtatcctcagccctcatttaccacaagagaattcatactggagagaaaccctacacatgtgaagaatgtggcaaagcctttaactgctcctcgactcttaagacacataagataattcatactggagagaaaccctacacatgtgaagaatgtggcagaacctttaactgctcctcaactgtaaaggcacataagagaattcatactggagagaaaccatacaaatgtgaagaatgtgacaaagcttttaagtggcattcaagtcttgctaaacataagataattcacactggagagaaaccctacaaatgtaaatagtaatgaactagtccgtaacttgaaagtatttcgatttcttggctttatatatcttgtggaaaggacgaacagtccacattattccattaagg

SEQ ID NO: 2417 - DNA, 2495 bp, Homo sapiens
  source 1..2495: mol_type = genomic DNA
accgccaccatgccaccagccacgtatgacactgccggtctcaccatgcccacagcaacactgggtaacctccgaggctatggcatggcatccccaggcctcgcagcccccagcctcacacccccacaactggccactccaaatttgcaacagttctttccccaggccactcgccagtccttgctgggacctcctcctgttggggtccccatgaacccttcccagttcaacctttcaggacggaacccccagaaacaggcccggacctcctcctctaccacccccaatcgaaaggattcttcttctcagacaatgcctgtggaagacaagtcagaccccccagaggggtctgaggaagccgcagagccccggatggacacaccagaagaccaagatttaccgccctgcccagaggacatcgccaaggaaaaacgcactccagcacctgagcctgagccttgtgaggcgtccgagctgccagcaaagagattgaggagctcagaagagcccacagagaaggaacctccagggcagttacaggtgaaggcccagccgcaggcccggatgacagtaccgaaacagacacagacaccagacctgctgcctgaggccctggaagcccaagtgctgccacgattccagccacgggtcctgcaggtccaggcccaggtgcagtcacagactcagccgcggataccatccacagacacccaggtgcagccaaagctgcagaagcaggcgcaaacacagacctctccagagcacttagtgctgcaacagaagcaggtgcagccacagctgcagcaggaggcagagccacagaagcaggtgcagccacaggtacagccacaggcacattcacagggcccaaggcaggtgcagctgcagcaggaggcagagccgctgaagcaggtgcagccacaggtgcagccccaggcacattcacagcccccaaggcaggtgcagctgcagctgcagaagcaggtccagacacagacatatccacaggtccacacacaggcacagccaagcgtccagccacaggagcatcctccagcgcaggtgtcagtacagccaccagagcagacccatgagcagcctcacacccagccgcaggtgtcgttgctggctccagagcaaacaccagttgtggttcatgtctgcgggctggagatgccacctgatgcagtagaagctggtggaggcatggaaaagaccttgccagagcctgtgggcacccaagtcagcatggaagagattcagaatgagtcggcctgtggcctagatgtgggagaatgtgaaaacagagcgagagagatgccaggggtatggggcgccgggggctccctgaaggtcaccattctgcagagcagtgacagccgggcctttagcactgtacccctgacacctgtcccccgccccagtgactccgtctcctccacccctgcggctaccagcactccctctaagcaggccctccagttcttctgctacatctgcaaggccagctgctccagccagcaggagttccaggaccacatgtcggagcctcagcaccagcagcggctaggggagatccagcacatgagccaagcctgcctcctgtccctgctgcccgtgccccgggacgtcctggagacagaggatgaggagcctccaccaaggcgctggtgcaacacctgccagctctactacatgggggacctgatccaacaccgcaggacacaggaccacaagattgccaaacaatccttgcgacccttctgcaccgtttgcaaccgctacttcaaaacccctcgcaagtttgtggagcacgtgaagtcccaggggcataaggacaaagccaaggagctgaagtcgcttgagaaagaaattgctggccaagatgaggaccacttcattacagtggacgctgtgggttgcttcgagggtgatgaagaagaggaagaggatgatgaggatgaagaagagatcgaggttgaggaggaactctgcaagcaggtgaggtccagagatatatccagagaggagtggaagggctcggagacctacagccccaatactgcatatggtgtggacttcctggtgcccgtgatgggctatatctgccgcatctgccacaagttctatcacagcaactcaggggcacagctctcccactgcaagtccctgggccactttgagaacctgcagaaatacaaggcggccaagaaccccagccccaccacccgacctgtgagccgccggtgcgcaatcaacgcccggaacgctttgacagccctgttcacctccagcggccgcccaccctcccagcccaacacccaggacaaaacacccagcaaggtgacggctcgaccctcccagcccccactacctcggcgctcaacccgcctcaaaacctagtaatgaactagtccgtaacttgaaagtatttcgatttcttggctttatatatcttgtggaaaggacgaggcgcgcccatcttctcgctaccg

SEQ ID NO: 2418 - DNA, 2630 bp, Homo sapiens
  source 1..2630: mol_type = genomic DNA
accgccaccatgttcagccagcagcagcagcagcagctccagcaacagcagcagcagctccagcagttacagcagcagcagctccagcagcagcaattgcagcagcagcagttactgcagctccagcagctgctccagcagtccccaccacaggccccgttgcccatggctgtcagccgggggctccccccgcagcagccacagcagccgcttctgaatctccagggcaccaactcagcctccctcctcaacggctccatgctgcagagagctttgcttttacagcagttgcaaggactggaccagtttgcaatgccaccagccacgtatgacactgccggtctcaccatgcccacagcaacactgggtaacctccgaggctatggcatggcatccccaggcctcgcagcccccagcctcacacccccacaactggccactccaaatttgcaacagttctttccccaggccactcgccagtccttgctgggacctcctcctgttggggtccccatgaacccttcccagttcaacctttcaggacggaacccccagaaacaggcccggacctcctcctctaccacccccaatcgaaaggattcttcttctcagacaatgcctgtggaagacaagtcagaccccccagaggggtctgaggaagccgcagagccccggatggacacaccagaagaccaagatttaccgccctgcccagaggacatcgccaaggaaaaacgcactccagcacctgagcctgagccttgtgaggcgtccgagctgccagcaaagagattgaggagctcagaagagcccacagagaaggaacctccagggcagttacaggtgaaggcccagccgcaggcccggatgacagtaccgaaacagacacagacaccagacctgctgcctgaggccctggaagcccaagtgctgccacgattccagccacgggtcctgcaggtccaggcccaggtgcagtcacagactcagccgcggataccatccacagacacccaggtgcagccaaagctgcagaagcaggcgcaaacacagacctctccagagcacttagtgctgcaacagaagcaggtgcagccacagctgcagcaggaggcagagccacagaagcaggtgcagccacaggtccacacacaggcacagccaagcgtccagccacaggagcatcctccagcgcaggtgtcagtacagccaccagagcagacccatgagcagcctcacacccagccgcaggtgtcgttgctggctccagagcaaacaccagttgtggttcatgtctgcgggctggagatgccacctgatgcagtagaagctggtggaggcatggaaaagaccttgccagagcctgtgggcacccaagtcagcatggaagagattcagaatgagtcggcctgtggcctagatgtgggagaatgtgaaaacagagcgagagagatgccaggggtatggggcgccgggggctccctgaaggtcaccattctgcagagcagtgacagccgggcctttagcactgtacccctgacacctgtcccccgccccagtgactccgtctcctccacccctgcggctaccagcactccctctaagcaggccctccagttcttctgctacatctgcaaggccagctgctccagccagcaggagttccaggaccacatgtcggagcctcagcaccagcagcggctaggggagatccagcacatgagccaagcctgcctcctgtccctgctgcccgtgccccgggacgtcctggagacagaggatgaggagcctccaccaaggcgctggtgcaacacctgccagctctactacatgggggacctgatccaacaccgcaggacacaggaccacaagattgccaaacaatccttgcgacccttctgcaccgtttgcaaccgctacttcaaaacccctcgcaagtttgtggagcacgtgaagtcccaggggcataaggacaaagccaaggagctgaagtcgcttgagaaagaaattgctggccaagatgaggaccacttcattacagtggacgctgtgggttgcttcgagggtgatgaagaagaggaagaggatgatgaggatgaagaagagatcgaggttgaggaggaactctgcaagcaggtgaggtccagagatatatccagagaggagtggaagggctcggagacctacagccccaatactgcatatggtgtggacttcctggtgcccgtgatgggctatatctgccgcatctgccacaagttctatcacagcaactcaggggcacagctctcccactgcaagtccctgggccactttgagaacctgcagaaatacaaggcggccaagaaccccagccccaccacccgacctgtgagccgccggtgcgcaatcaacgcccggaacgctttgacagccctgttcacctccagcggccgcccaccctcccagcccaacacccaggacaaaacacccagcaaggtgacggctcgaccctcccagcccccactacctcggcgctcaacccgcctcaaaacctagtaatgaactagtccgtaacttgaaagtatttcgatttcttggctttatatatcttgtggaaaggacgatgagatcgatcgttatcggaccac

SEQ ID NO: 2419 - DNA, 2798 bp, Homo sapiens
  source 1..2798: mol_type = genomic DNA
accgccaccatgttcagccagcagcagcagcagcagctccagcaacagcagcagcagctccagcagttacagcagcagcagctccagcagcagcaattgcagcagcagcagttactgcagctccagcagctgctccagcagtccccaccacaggccccgttgcccatggctgtcagccgggggctccccccgcagcagccacagcagccgcttctgaatctccagggcaccaactcagcctccctcctcaacggctccatgctgcagagagctttgcttttacagcagttgcaaggactggaccagtttgcaatgccaccagccacgtatgacactgccggtctcaccatgcccacagcaacactgggtaacctccgaggctatggcatggcatccccaggcctcgcagcccccagcctcacacccccacaactggccactccaaatttgcaacagttctttccccaggccactcgccagtccttgctgggacctcctcctgttggggtccccatgaacccttcccagttcaacctttcaggacggaacccccagaaacaggcccggacctcctcctctaccacccccaatcgaaaggattcttcttctcagacaatgcctgtggaagacaagtcagaccccccagaggggtctgaggaagccgcagagccccggatggacacaccagaagaccaagatttaccgccctgcccagaggacatcgccaaggaaaaacgcactccagcacctgagcctgagccttgtgaggcgtccgagctgccagcaaagagattgaggagctcagaagagcccacagagaaggaacctccagggcagttacaggtgaaggcccagccgcaggcccggatgacagtaccgaaacagacacagacaccagacctgctgcctgaggccctggaagcccaagtgctgccacgattccagccacgggtcctgcaggtccaggcccaggtgcagtcacagactcagccgcggataccatccacagacacccaggtgcagccaaagctgcagaagcaggcgcaaacacagacctctccagagcacttagtgctgcaacagaagcaggtgcagccacagctgcagcaggaggcagagccacagaagcaggtgcagccacaggtacagccacaggcacattcacagggcccaaggcaggtgcagctgcagcaggaggcagagccgctgaagcaggtgcagccacaggtgcagccccaggcacattcacagcccccaaggcaggtgcagctgcagctgcagaagcaggtccagacacagacatatccacaggtccacacacaggcacagccaagcgtccagccacaggagcatcctccagcgcaggtgtcagtacagccaccagagcagacccatgagcagcctcacacccagccgcaggtgtcgttgctggctccagagcaaacaccagttgtggttcatgtctgcgggctggagatgccacctgatgcagtagaagctggtggaggcatggaaaagaccttgccagagcctgtgggcacccaagtcagcatggaagagattcagaatgagtcggcctgtggcctagatgtgggagaatgtgaaaacagagcgagagagatgccaggggtatggggcgccgggggctccctgaaggtcaccattctgcagagcagtgacagccgggcctttagcactgtacccctgacacctgtcccccgccccagtgactccgtctcctccacccctgcggctaccagcactccctctaagcaggccctccagttcttctgctacatctgcaaggccagctgctccagccagcaggagttccaggaccacatgtcggagcctcagcaccagcagcggctaggggagatccagcacatgagccaagcctgcctcctgtccctgctgcccgtgccccgggacgtcctggagacagaggatgaggagcctccaccaaggcgctggtgcaacacctgccagctctactacatgggggacctgatccaacaccgcaggacacaggaccacaagattgccaaacaatccttgcgacccttctgcaccgtttgcaaccgctacttcaaaacccctcgcaagtttgtggagcacgtgaagtcccaggggcataaggacaaagccaaggagctgaagtcgcttgagaaagaaattgctggccaagatgaggaccacttcattacagtggacgctgtgggttgcttcgagggtgatgaagaagaggaagaggatgatgaggatgaagaagagatcgaggttgaggaggaactctgcaagcaggtgaggtccagagatatatccagagaggagtggaagggctcggagacctacagccccaatactgcatatggtgtggacttcctggtgcccgtgatgggctatatctgccgcatctgccacaagttctatcacagcaactcaggggcacagctctcccactgcaagtccctgggccactttgagaacctgcagaaatacaaggcggccaagaaccccagccccaccacccgacctgtgagccgccggtgcgcaatcaacgcccggaacgctttgacagccctgttcacctccagcggccgcccaccctcccagcccaacacccaggacaaaacacccagcaaggtgacggctcgaccctcccagcccccactacctcggcgctcaacccgcctcaaaacctagtaatgaactagtccgtaacttgaaagtatttcgatttcttggctttatatatcttgtggaaaggacgaagaagacctcatcgtgttgtgccc

SEQ ID NO: 2420 - DNA, 2558 bp, Homo sapiens
  source 1..2558: mol_type = genomic DNA
accgccaccatgttcagccagcagcagcagcagcagctccagcaacagcagcagcagctccagcagttacagcagcagcagctccagcagcagcaattgcagcagcagcagttactgcagctccagcagctgctccagcagtccccaccacaggccccgttgcccatggctgtcagccgggggctccccccgcagcagccacagcagccgcttctgaatctccagggcaccaactcagcctccctcctcaacggctccatgctgcagagagctttgcttttacagcagttgcaaggtaacctccgaggctatggcatggcatccccaggcctcgcagcccccagcctcacacccccacaactggccactccaaatttgcaacagttctttccccaggccactcgccagtccttgctgggacctcctcctgttggggtccccatgaacccttcccagttcaacctttcaggacggaacccccagaaacaggcccggacctcctcctctaccacccccaatcgaaaggattcttcttctcagacaatgcctgtggaagacaagtcagaccccccagaggggtctgaggaagccgcagagccccggatggacacaccagaagaccaagatttaccgccctgcccagaggacatcgccaaggaaaaacgcactccagcacctgagcctgagccttgtgaggcgtccgagctgccagcaaagagattgaggagctcagaagagcccacagagaaggaacctccagggcagttacaggtgaaggcccagccgcaggcccggatgacagtaccgaaacagacacagacaccagacctgctgcctgaggccctggaagcccaagtgctgccacgattccagccacgggtcctgcaggtccaggcccaggtgcagtcacagactcagccgcggataccatccacagacacccaggtgcagccaaagctgcagaagcaggcgcaaacacagacctctccagagcacttagtgctgcaacagaagcaggtgcagccacagctgcagcaggaggcagagccacagaagcaggtgcagccacaggtccacacacaggcacagccaagcgtccagccacaggagcatcctccagcgcaggtgtcagtacagccaccagagcagacccatgagcagcctcacacccagccgcaggtgtcgttgctggctccagagcaaacaccagttgtggttcatgtctgcgggctggagatgccacctgatgcagtagaagctggtggaggcatggaaaagaccttgccagagcctgtgggcacccaagtcagcatggaagagattcagaatgagtcggcctgtggcctagatgtgggagaatgtgaaaacagagcgagagagatgccaggggtatggggcgccgggggctccctgaaggtcaccattctgcagagcagtgacagccgggcctttagcactgtacccctgacacctgtcccccgccccagtgactccgtctcctccacccctgcggctaccagcactccctctaagcaggccctccagttcttctgctacatctgcaaggccagctgctccagccagcaggagttccaggaccacatgtcggagcctcagcaccagcagcggctaggggagatccagcacatgagccaagcctgcctcctgtccctgctgcccgtgccccgggacgtcctggagacagaggatgaggagcctccaccaaggcgctggtgcaacacctgccagctctactacatgggggacctgatccaacaccgcaggacacaggaccacaagattgccaaacaatccttgcgacccttctgcaccgtttgcaaccgctacttcaaaacccctcgcaagtttgtggagcacgtgaagtcccaggggcataaggacaaagccaaggagctgaagtcgcttgagaaagaaattgctggccaagatgaggaccacttcattacagtggacgctgtgggttgcttcgagggtgatgaagaagaggaagaggatgatgaggatgaagaagagatcgaggttgaggaggaactctgcaagcaggtgaggtccagagatatatccagagaggagtggaagggctcggagacctacagccccaatactgcatatggtgtggacttcctggtgcccgtgatgggctatatctgccgcatctgccacaagttctatcacagcaactcaggggcacagctctcccactgcaagtccctgggccactttgagaacctgcagaaatacaaggcggccaagaaccccagccccaccacccgacctgtgagccgccggtgcgcaatcaacgcccggaacgctttgacagccctgttcacctccagcggccgcccaccctcccagcccaacacccaggacaaaacacccagcaaggtgacggctcgaccctcccagcccccactacctcggcgctcaacccgcctcaaaacctagtaatgaactagtccgtaacttgaaagtatttcgatttcttggctttatatatcttgtggaaaggacgacctattgcgatctttatagaatct

SEQ ID NO: 2421 - DNA, 2966 bp, Homo sapiens
  source 1..2966: mol_type = genomic DNA
accgccaccatgtacatccgccaactgcgcgccccctctcaccgcagccccgcgcggggccccaggatcgcaggaccgcggcggccgcagggagccaccatgttcagccagcagcagcagcagcagctccagcaacagcagcagcagctccagcagttacagcagcagcagctccagcagcagcaattgcagcagcagcagttactgcagctccagcagctgctccagcagtccccaccacaggccccgttgcccatggctgtcagccgggggctccccccgcagcagccacagcagccgcttctgaatctccagggcaccaactcagcctccctcctcaacggctccatgctgcagagagctttgcttttacagcagttgcaaggactggaccagtttgcaatgccaccagccacgtatgacactgccggtctcaccatgcccacagcaacactgggtaacctccgaggctatggcatggcatccccaggcctcgcagcccccagcctcacacccccacaactggccactccaaatttgcaacagttctttccccaggccactcgccagtccttgctgggacctcctcctgttggggtccccatgaacccttcccagttcaacctttcaggacggaacccccagaaacaggcccggacctcctcctctaccacccccaatcgaaaggattcttcttctcagacaatgcctgtggaagacaagtcagaccccccagaggggtctgaggaagccgcagagccccggatggacacaccagaagaccaagatttaccgccctgcccagaggacatcgccaaggaaaaacgcactccagcacctgagcctgagccttgtgaggcgtccgagctgccagcaaagagattgaggagctcagaagagcccacagagaaggaacctccagggcagttacaggtgaaggcccagccgcaggcccggatgacagtaccgaaacagacacagacaccagacctgctgcctgaggccctggaagcccaagtgctgccacgattccagccacgggtcctgcaggtccaggcccaggtgcagtcacagactcagccgcggataccatccacagacacccaggtgcagccaaagctgcagaagcaggcgcaaacacagacctctccagagcacttagtgctgcaacagaagcaggtgcagccacagctgcagcaggaggcagagccacagaagcaggtgcagccacaggtacagccacaggcacattcacagggcccaaggcaggtgcagctgcagcaggaggcagagccgctgaagcaggtgcagccacaggtgcagccccaggcacattcacagcccccaaggcaggtgcagctgcagctgcagaagcaggtccagacacagacatatccacaggtccacacacaggcacagccaagcgtccagccacaggagcatcctccagcgcaggtgtcagtacagccaccagagcagacccatgagcagcctcacacccagccgcaggtgtcgttgctggctccagagcaaacaccagttgtggttcatgtctgcgggctggagatgccacctgatgcagtagaagctggtggaggcatggaaaagaccttgccagagcctgtgggcacccaagtcagcatggaagagattcagaatgagtcggcctgtggcctagatgtgggagaatgtgaaaacagagcgagagagatgccaggggtatggggcgccgggggctccctgaaggtcaccattctgcagagcagtgacagccgggcctttagcactgtacccctgacacctgtcccccgccccagtgactccgtctcctccacccctgcggctaccagcactccctctaagcaggccctccagttcttctgctacatctgcaaggccagctgctccagccagcaggagttccaggaccacatgtcggagcctcagcaccagcagcggctaggggagatccagcacatgagccaagcctgcctcctgtccctgctgcccgtgccccgggacgtcctggagacagaggatgaggagcctccaccaaggcgctggtgcaacacctgccagctctactacatgggggacctgatccaacaccgcaggacacaggaccacaagccacccacaccacgaagagatgtgtttgcccacgttccagtgcaggggtggagcacagcccggcttgttacagatatgattgccaaacaatccttgcgacccttctgcaccgtttgcaaccgctacttcaaaacccctcgcaagtttgtggagcacgtgaagtcccaggggcataaggacaaagccaaggagctgaagtcgcttgagaaagaaattgctggccaagatgaggaccacttcattacagtggacgctgtgggttgcttcgagggtgatgaagaagaggaagaggatgatgaggatgaagaagagatcgaggttgaggaggaactctgcaagcaggtgaggtccagagatatatccagagaggagtggaagggctcggagacctacagccccaatactgcatatggtgtggacttcctggtgcccgtgatgggctatatctgccgcatctgccacaagttctatcacagcaactcaggggcacagctctcccactgcaagtccctgggccactttgagaacctgcagaaatacaaggcggccaagaaccccagccccaccacccgacctgtgagccgccggtgcgcaatcaacgcccggaacgctttgacagccctgttcacctccagcggccgcccaccctcccagcccaacacccaggacaaaacacccagcaaggtgacggctcgaccctcccagcccccactacctcggcgctcaacccgcctcaaaacctagtaatgaactagtccgtaacttgaaagtatttcgatttcttggctttatatatcttgtggaaaggacgacaatcgtcgccgtccagtgcataa

SEQ ID NO: 2422 - DNA, 1697 bp, Homo sapiens
  source 1..1697: mol_type = genomic DNA
accgccaccatgttagagaactacagaaacctggtcttcgtgggtattgctgcctctaagccagacctgatcacctgtctggagcaaggaaaagaaccttggaatgtgaagagacatgagatggtagctgaacccccagttgtatgttcttattttgcccgagacctttggccaaagcagggcaaaaaaaattatttccaaaaagtgatactgagaagatataaaaaatgtggatgtgaaaatttacagttaagaaaatactgtaaaagcatggatgagtgtaaggtgcacaaagaatgttacaatggacttaaccagtgtttgacgactacccagaacaaaatatttcaatgtgacaaatatgtgaaagtctttcataaattttcaaattcaaacagacatacgataagacatactggaaagaaatctttcaaatgtaaagaatgtgaaaagtcattttgcatgctttcacacttagctcaacataaaagaattcatagtggagagaaaccctacaaatgtaaagaatgtgggaaagcctataatgagacctcaaacctttctacacataaaagaattcatactggaaagaaaccctacaaatgcgaagagtgtggaaaagcctttaaccggctctcacaccttactacacataagataattcatactggaaagaaaccctacaaatgtgaggagtgtggcaaagcttttaaccaatctgcaaaccttactacacataagagaattcatactggagagaaaccctacaaatgtgaagaatgtggcagagcttttagccagtcctcaacccttactgcacataagataattcatgctggagagaaaccttacaaatgtgaagaatgtggcaaagcttttagccagtcctcaacccttactacacataagataattcatactggagagaaattctacaaatgtgaagaatgtggtaaggcctttagccagttatcccaccttactacacataagagaattcattctggagagaaaccctacaagtgtgaagaatgtggcaaagcttttaaacaatcctcaacccttactacacataagagaattcatgctggagagaaattctacaaatgtgaagtatgtagcaaagcctttagccggttctcacaccttactacacataagagaattcatactggagagaagccctacaaatgtgaagaatgtggcaaagcttttaacctatcgtcacaacttactacacataagataattcatactggagagaaaccctacaaatgtgaagaatgtggcaaagcttttaaccagtcctcaactctttctaaacataaggtaattcatactggagagaagccctacaaatatgaagaatgtggcaaagcttttaaccagtcctcacaccttactacacataagatgattcatactggagagaaaccctacaagtgtgaagaatgtggcaaagcctttaacaactcctctattcttaacagacataagatgattcatactggagagaaactctacaaacctgaaagttgtaacaatgcttgtgacaacattgcaaagatttccaaatataaaagaaattgtgctggtgagaaatagtaatgaactagtccgtaacttgaaagtatttcgatttcttggctttatatatcttgtggaaaggacgatgttgcatgtcataatcgcccaag

SEQ ID NO: 2423 - DNA, 1415 bp, Homo sapiens
  source 1..1415: mol_type = genomic DNA
accgccaccatgggagagagactctttgagagtgcagaaggtagtcagtgtggagaaactttcacccaggttccggaagacatgctgaacaagaaaactcttcctggagtaaaatcatgtgaaagtggtacatgtggagaaatcttcatgggatattcatcctttaataggaacatcagaactgacactggacaccaaccacataagtgtcagaaatttttagagaagccatataaacataaacaacgtaggaaagccttgagccatagccactgctttcgaacacatgaaaggcctcacactagagagaaaccttttgattgtaaggaatgtgaaaaatctttcatttctcctgcaagcattcgaagatatatggtaacgcacagtggagatggaccttataaatgtaagttttgtgggaaagccttggattgtctcagtttataccttacccatgaacgaactcacactggagagaaacgatatgaatgtaaacaatgtggtaaagccttcagttggcacagttctgttcgaatccatgaaagaactcacactggggagaagccatatgaatgtaaggagtgtgggaaatcattcaatttttccagttcctttcgcagacatgaaaggacacacacaggagagaagccgtacaaatgtaaggaatgtgggaaagccttcaattgtcccagttcttttcacaggcatgaaaggactcacacaggagaaaaaccctatgaatgtaaactatatgggaaagcattatctcgccttataagctttcgaagacacatgagaatgcacactggagagaggcctcataaatgtaagatatgtgggaaagccttttactctcccagttcatttcaaaggcatgaaagaagtcacactggagagaaaccctacaaatgcaagcaatgtgggaaagccttcacttgttccacttcgtttcaatatcatgaaaggactcacactggagagaaacccgatgggtgtaagcaatgtgggaaagccttcagatctgccaagtacattcgaatacatggaaggactcacactggtgagaaaccctatgaatgtaagcaatgtgggaaagcatttcattgtgtcagctcctttcatagacatgaaaggactcacgctggagaaaaaccttatgaatgtaagcattgtgggaaagccttcacttgttccatatatattagaatacatgaaagaattcacactggagagaaaccttaccaatgtaaggaatgtgggaaagccttcattcgttccagttactgtcgaaaacatgaaagaactcacactattaatatatagtaatgaactagtccgtaacttgaaagtatttcgatttcttggctttatatatcttgtggaaaggacgaacctttcgaatatgttcgatgaga

SEQ ID NO: 2424 - DNA, 2447 bp, Homo sapiens
  source 1..2447: mol_type = genomic DNA
accgccaccatggctactcaagctgatttgatggagttggacatggccatggaaccagacagaaaagcggctgttagtcactggcagcaacagtcttacctggactctggaatccattctggtgccactaccacagctccttctctgagtggtaaaggcaatcctgaggaagaggatgtggatacctcccaagtcctgtatgagtgggaacagggattttctcagtccttcactcaagaacaagtagctgatattgatggacagtatgcaatgactcgagctcagagggtacgagctgctatgttccctgagacattagatgagggcatgcagatcccatctacacagtttgatgctgctcatcccactaatgtccagcgtttggctgaaccatcacagatgctgaaacatgcagttgtaaacttgattaactatcaagatgatgcagaacttgccacacgtgcaatccctgaactgacaaaactgctaaatgacgaggaccaggtggtggttaataaggctgcagttatggtccatcagctttctaaaaaggaagcttccagacacgctatcatgcgttctcctcagatggtgtctgctattgtacgtaccatgcagaatacaaatgatgtagaaacagctcgttgtaccgctgggaccttgcataacctttcccatcatcgtgagggcttactggccatctttaagtctggaggcattcctgccctggtgaaaatgcttggttcaccagtggattctgtgttgttttatgccattacaactctccacaaccttttattacatcaagaaggagctaaaatggcagtgcgtttagctggtgggctgcagaaaatggttgccttgctcaacaaaacaaatgttaaattcttggctattacgacagactgccttcaaattttagcttatggcaaccaagaaagcaagctcatcatactggctagtggtggaccccaagctttagtaaatataatgaggacctatacttacgaaaaactactgtggaccacaagcagagtgctgaaggtgctatctgtctgctctagtaataagccggctattgtagaagctggtggaatgcaagctttaggacttcacctgacagatccaagtcaacgtcttgttcagaactgtctttggactctcaggaatctttcagatgctgcaactaaacaggaagggatggaaggtctccttgggactcttgttcagcttctgggttcagatgatataaatgtggtcacctgtgcagctggaattctttctaacctcacttgcaataattataagaacaagatgatggtctgccaagtgggtggtatagaggctcttgtgcgtactgtccttcgggctggtgacagggaagacatcactgagcctgccatctgtgctcttcgtcatctgaccagccgacaccaagaagcagagatggcccagaatgcagttcgccttcactatggactaccagttgtggttaagctcttacacccaccatcccactggcctctgataaaggctactgttggattgattcgaaatcttgccctttgtcccgcaaatcatgcacctttgcgtgagcagggtgccattccacgactagttcagttgcttgttcgtgcacatcaggatacccagcgccgtacgtccatgggtgggacacagcagcaatttgtggagggggtccgcatggaagaaatagttgaaggttgtaccggagcccttcacatcctagctcgggatgttcacaaccgaattgttatcagaggactaaataccattccattgtttgtgcagctgctttattctcccattgaaaacatccaaagagtagctgcaggggtcctctgtgaacttgctcaggacaaggaagctgcagaagctattgaagctgagggagccacagctcctctgacagagttacttcactctaggaatgaaggtgtggcgacatatgcagctgctgttttgttccgaatgtctgaggacaagccacaagattacaagaaacggctttcagttgagctgaccagctctctcttcagaacagagccaatggcttggaatgagactgctgatcttggacttgatattggtgcccagggagaaccccttggatatcgccaggatgatcctagctatcgttcttttcactctggtggatatggccaggatgccttgggtatggaccccatgatggaacatgagatgggtggccaccaccctggtgctgactatccagttgatgggctgccagatctggggcatgcccaggacctcatggatgggctgcctccaggtgacagcaatcagctggcctggtttgatactgacctgtagtaatgaactagtccgtaacttgaaagtatttcgatttcttggctttatatatcttgtggaaaggacgaactatggctcgacgtggagccgtc

SEQ ID NO: 2425 - DNA, 2426 bp, Homo sapiens
  source 1..2426: mol_type = genomic DNA
accgccaccatggagttggacatggccatggaaccagacagaaaagcggctgttagtcactggcagcaacagtcttacctggactctggaatccattctggtgccactaccacagctccttctctgagtggtaaaggcaatcctgaggaagaggatgtggatacctcccaagtcctgtatgagtgggaacagggattttctcagtccttcactcaagaacaagtagctgatattgatggacagtatgcaatgactcgagctcagagggtacgagctgctatgttccctgagacattagatgagggcatgcagatcccatctacacagtttgatgctgctcatcccactaatgtccagcgtttggctgaaccatcacagatgctgaaacatgcagttgtaaacttgattaactatcaagatgatgcagaacttgccacacgtgcaatccctgaactgacaaaactgctaaatgacgaggaccaggtggtggttaataaggctgcagttatggtccatcagctttctaaaaaggaagcttccagacacgctatcatgcgttctcctcagatggtgtctgctattgtacgtaccatgcagaatacaaatgatgtagaaacagctcgttgtaccgctgggaccttgcataacctttcccatcatcgtgagggcttactggccatctttaagtctggaggcattcctgccctggtgaaaatgcttggttcaccagtggattctgtgttgttttatgccattacaactctccacaaccttttattacatcaagaaggagctaaaatggcagtgcgtttagctggtgggctgcagaaaatggttgccttgctcaacaaaacaaatgttaaattcttggctattacgacagactgccttcaaattttagcttatggcaaccaagaaagcaagctcatcatactggctagtggtggaccccaagctttagtaaatataatgaggacctatacttacgaaaaactactgtggaccacaagcagagtgctgaaggtgctatctgtctgctctagtaataagccggctattgtagaagctggtggaatgcaagctttaggacttcacctgacagatccaagtcaacgtcttgttcagaactgtctttggactctcaggaatctttcagatgctgcaactaaacaggaagggatggaaggtctccttgggactcttgttcagcttctgggttcagatgatataaatgtggtcacctgtgcagctggaattctttctaacctcacttgcaataattataagaacaagatgatggtctgccaagtgggtggtatagaggctcttgtgcgtactgtccttcgggctggtgacagggaagacatcactgagcctgccatctgtgctcttcgtcatctgaccagccgacaccaagaagcagagatggcccagaatgcagttcgccttcactatggactaccagttgtggttaagctcttacacccaccatcccactggcctctgataaaggctactgttggattgattcgaaatcttgccctttgtcccgcaaatcatgcacctttgcgtgagcagggtgccattccacgactagttcagttgcttgttcgtgcacatcaggatacccagcgccgtacgtccatgggtgggacacagcagcaatttgtggagggggtccgcatggaagaaatagttgaaggttgtaccggagcccttcacatcctagctcgggatgttcacaaccgaattgttatcagaggactaaataccattccattgtttgtgcagctgctttattctcccattgaaaacatccaaagagtagctgcaggggtcctctgtgaacttgctcaggacaaggaagctgcagaagctattgaagctgagggagccacagctcctctgacagagttacttcactctaggaatgaaggtgtggcgacatatgcagctgctgttttgttccgaatgtctgaggacaagccacaagattacaagaaacggctttcagttgagctgaccagctctctcttcagaacagagccaatggcttggaatgagactgctgatcttggacttgatattggtgcccagggagaaccccttggatatcgccaggatgatcctagctatcgttcttttcactctggtggatatggccaggatgccttgggtatggaccccatgatggaacatgagatgggtggccaccaccctggtgctgactatccagttgatgggctgccagatctggggcatgcccaggacctcatggatgggctgcctccaggtgacagcaatcagctggcctggtttgatactgacctgtagtaatgaactagtccgtaacttgaaagtatttcgatttcttggctttatatatcttgtggaaaggacgaccagaccttcatatattacaagat

SEQ ID NO: 2426 - DNA, 2030 bp, Homo sapiens
  source 1..2030: mol_type = genomic DNA
accgccaccatggactcagtctcctttgaggatgtggccgtgaacttcaccctggaggagtgggctttgctggattcttcacagaaaaagctctatgaagatgtgatgcaggagaccttcaaaaacctggtttgtctaggaaaaaagtgggaagaccaggacattgaagatgaccacagaaaccaggggaaaaatcgaagatgtcatatggttgagagactctgtgaaagtagaagaggtagcaaatgtggagaaaccactagccagatgccaaatgttaatatcaacaaggaaacttttactggagcaaaaccacatgaatgcagcttttgtggaagagacttcattcatcattcgtcccttaataggcacatgagatctcacactggacagaaaccaaatgagtatcaggaatatgaaaagcaaccatgtaaatgtaaagcagttgggaaaaccttcagttatcaccactgctttcgcaaacatgaaagaactcacactggagtgaagccctatgaatgtaaacagtgtgggaaagcctttatatattaccagccatttcaaagacatgaaaggactcatgctggacagaaaccctatgaatgtaagcaatgtggaaaaacctttatatattaccagtcttttcaaaaacatgctcatactggaaagaaaccctatgaatgtaaacagtgtgggaaagcctttatatgttaccaatcttttcaaagacacaaaaggactcacactggagagaaaccctatgaatgtaagcaatgtggtaaggctttcagttgtcccacatactttcgaactcatgaaagaactcacactggagaaaaaccctacaaatgtaaagaatgtggtaaagccttcagttttctcagttcttttcgaaggcataaaaggactcatagtggagagaaaccctatgaatgtaaagaatgtggaaaagccttcttttattctgcaagctttcgagcacatgtaataatacacactggggctcgaccttataaatgtaaagaatgtgggaaagccttcaactcttctaattcctgtcgagtgcatgaaagaactcatattggagaaaaaccatatgaatgtaaacgatgtggcaaatcattcagttggtccatttctcttcgattgcatgaaagaactcatactggagagaaaccttatgagtgtaaacagtgtcataaaaccttcagtttttcaagttcccttcgagaacacgaaacaactcacactggagagaaaccctatgaatgtaaacaatgtggtaaaaccttcagtttttcaagttcccttcaaagacatgaaaggactcacaatgcagagaaaccctatgaatgtaaacagtgtgggaaagccttcaggtgttcaagttattttcgaattcatgaaaggtcacacactggagagaaaccctatgaatgtaaacagtgtggaaaagttttcattcgttccagttcctttcgactgcatgaaagaacacacactggagagaaaccctatgaatgtaaactatgcggtaaaaccttcagtttttcaagttcccttcgagaacatgaaaaaattcacactggaaataagccttttgagtgtaagcaatgtggtaaggccttccttcgttccagtcaaattcgattgcatgaaaggactcacactggagagaaaccgtatcaatgtaaacaatgtggaaaagccttcatttcttccagtaaatttcgaatgcatgagagaactcacacgggagagaaaccctatcgatgtaaacaatgtgggaaagccttcagattttcaagttctgttcgaattcatgaaaggtctcacactggagagaaaccttatgaatgcaaacaatgtggaaaagccttcatttcttccagtcactttcgactgcatgaaaggactcatatgggagagaaagtctagtaatgaactagtccgtaacttgaaagtatttcgatttcttggctttatatatcttgtggaaaggacgaggttactagcggaccggtaaatat

SEQ ID NO: 2427 - DNA, 1748 bp, Homo sapiens
  source 1..1748: mol_type = genomic DNA
accgccaccatgcccgttgacttggggcaggccctaggcctgctgccatcgctggcgaaggccgaggactcccagttctcagaatcagatgctgcccttcaagaggaactctccagccctgagaccgcacgccagcttttcaggcagttccgttaccaggtgatgtctgggcctcatgagaccttgaagcaacttcggaagctctgtttccagtggctacagccagaggttcacaccaaagagcagatcctagagatcctcatgttggagcagtttctgaccatcctgcctggggagatccagatgtgggtgcggaaacagtgtccaggaagtggagaagaggcagtgacccttgtggaaagcttgaagggggacccccagagactgtggcaatggatcagtatccaggttctaggacaggacatcttatcagagaagatggaatctccaagctgccaagtgggggaagtggagccccatcttgaagtggtgcctcaggagttgggacttgagaattcatcctcagggcctggggagcttctgagccacatcgtgaaagaggaatctgacacagaagcagaactagccctggctgcctcccagcctgcccgactggaggaaaggctgatcagagaccaggacctcggagcctcactgctcccagcagcacctcaggaacagtggagacaactggattccactcaaaaggagcaatactgggatctcatgctggagacctatgggaaaatggtctcaggaggcatttcccatcccaaatctgacctgactaattcaatagaatttggggaagagctggcaggaatataccttcatgtcaatgagaagatcccaagacccacctgcataggagatagacaagagaatgacaaggagaacctaaatttggagaatcacagggaccaggagctcctgcatgcttcctgtcaagcttcaggagaggttccttctcaggcttccttgaggggcttcttcactgaggatgagccaggatgctttggagaaggagagaatctccctgaggctctgcaaaacattcaggatgagggaacaggggaacagctgtctcctcaagaaaggatttctgagaaacaactaggtcagcatttgcctaatcctcattcaggagaaatgtccaccatgtggcttgaggagaagagagagacctcccagaaggggcagccaagagcccccatggcccagaagctccccacctgcagggagtgtgggaagaccttttataggaattctcagcttatttttcaccaaagaactcacaccggagagacatactttcagtgcaccatctgcaaaaaagcctttctgcggagttcagactttgtgaagcatcagagaactcacacgggagagaagccctgtaaatgtgattactgtgggaaaggctttagtgacttctcaggattgcgccaccacgagaaaatccacacaggagagaaaccctataaatgtcctatctgtgagaaaagtttcattcagagatcaaactttaatagacatcagagggttcacactggagagaaaccttataaatgttcgcactgtgggaaaagtttcagctggagctcgagccttgacaaacatcaaagatcccacttaggaaagaagccctttcaatagtaatgaactagtccgtaacttgaaagtatttcgatttcttggctttatatatcttgtggaaaggacgagatcttggttcgtccgcactaccg

SEQ ID NO: 2428 - DNA, 1751 bp, Homo sapiens
  source 1..1751: mol_type = genomic DNA
accgccaccatgcccgttgacttggggcaggccctaggcctgctgccatcgctggcgaaggccgaggactcccagttctcagaatcagatgctgcccttcaagaggaactctccagccctgagaccgcacgccagcttttcaggcagttccgttaccaggtgatgtctgggcctcatgagaccttgaagcaacttcggaagctctgtttccagtggctacagccagaggttcacaccaaagagcagatcctagagatcctcatgttggagcagtttctgaccatcctgcctggggagatccagatgtgggtgcggaaacagtgtccaggaagtggagaagaggcagtgacccttgtggaaagcttgaagggggacccccagagactgtggcaatggatcagtatccaggttctaggacaggacatcttatcagagaagatggaatctccaagctgccaagtgggggaagtggagccccatcttgaagtggtgcctcaggagttgggacttgagaattcatcctcagggcctggggagcttctgagccacatcgtgaaagaggaatctgacacagaagcagaactagccctggctgcctcccagcctgcccgactggaggaaaggctgatcagagaccaggacctcggagcctcactgctcccagcagcacctcaggaacagtggagacaactggattccactcaaaaggagcaatactgggatctcatgctggagacctatgggaaaatggtctcaggagcaggcatttcccatcccaaatctgacctgactaattcaatagaatttggggaagagctggcaggaatataccttcatgtcaatgagaagatcccaagacccacctgcataggagatagacaagagaatgacaaggagaacctaaatttggagaatcacagggaccaggagctcctgcatgcttcctgtcaagcttcaggagaggttccttctcaggcttccttgaggggcttcttcactgaggatgagccaggatgctttggagaaggagagaatctccctgaggctctgcaaaacattcaggatgagggaacaggggaacagctgtctcctcaagaaaggatttctgagaaacaactaggtcagcatttgcctaatcctcattcaggagaaatgtccaccatgtggcttgaggagaagagagagacctcccagaaggggcagccaagagcccccatggcccagaagctccccacctgcagggagtgtgggaagaccttttataggaattctcagcttatttttcaccaaagaactcacaccggagagacatactttcagtgcaccatctgcaaaaaagcctttctgcggagttcagactttgtgaagcatcagagaactcacacgggagagaagccctgtaaatgtgattactgtgggaaaggctttagtgacttctcaggattgcgccaccacgagaaaatccacacaggagagaaaccctataaatgtcctatctgtgagaaaagtttcattcagagatcaaactttaatagacatcagagggttcacactggagagaaaccttataaatgttcgcactgtgggaaaagtttcagctggagctcgagccttgacaaacatcaaagatcccacttaggaaagaagccctttcaatagtaatgaactagtccgtaacttgaaagtatttcgatttcttggctttatatatcttgtggaaaggacgactcaggttcgaagagttacgtatc

SEQ ID NO: 2429 - DNA, 1478 bp, Homo sapiens
  source 1..1478: mol_type = genomic DNA
accgccaccatggcagccatgcctctgaaagctcaataccaggagatggtgaccttcgaggatgtggctgtgcacttcaccaagacagaatggactggcctttctcctgcccagagggccctgtacagaagtgtgatgttggagaattttgggaacctgactgctttggggtacccagttcccaaacctgcactgatctcacttttggagagaggggacatggcttggggcctggaagcacaggatgatcccccagcagagaggaccaaaaacgtctgtaaagatgttgagaccaacattgacagtgagtccacattaatccagggaatttctgaagaaagagatgggatgatgtcacatggtcagctgaagagtgtccctcagagaactgacttcccagaaacacgtaatgtggaaaagcaccaggacatccccacagtgaaaaatatccaaggaaaggttccaagaatcccctgtgcaaggaaacctttcatatgtgaggagtgtgggaaatccttcagctacttttcttactatgctagacaccagagaatccacactggggagaaaccttttgagtgtagtgagtgtggaaaagcctttaatggtaattcttcgttaattcggcaccagaggattcacactggagagagaccctatcagtgtgaggagtgtgggcgagcctttaatgataatgcaaatctgatcaggcatcagagaatccacagtggggacagaccctattactgtacagagtgtgggaatagtttcacgagtagttccgagtttgttatacatcagagaatccacactggggagaaaccctatgagtgtaatgagtgtggcaaagcttttgttggtaattcacccctacttcggcatcagaaaatccacactggagagaaaccctatgagtgtaatgagtgtggcaaaagctttggaaggacttcccatctaagccaacatcagcgtattcacacaggggaaaagccttattcttgtaaagtatgtggacaagccttcaattttcatacaaaactaactcggcaccagagaattcacagtgaggagaaaccctttgactgtgtagattgtggaaaagccttcagtgctcaggaacaattaaaaaggcatctgagaattcatactcaggagtcttcctatgtatgtgatgagtgtggaaaagccttgactagcaaaagaaatcttcatcagcatcaaagaatccatactggagagaaaccctatgagtgtagcaagtatgagaaggcctttgggacttcttcccagctaggtcaccttgagcatgtctactctggagagaagcctgtgctggacatttgtcgttttggcctcccagaattttttacccccttttactggtagtaatgaactagtccgtaacttgaaagtatttcgatttcttggctttatatatcttgtggaaaggacgacgtgagcttgaccttacgaggtct

SEQ ID NO: 2430 - DNA, 1661 bp, Homo sapiens
  source 1..1661: mol_type = genomic DNA
accgccaccatgggacaccttgaaaatacttcagtggttttcccacgagctattttctctctctgtgaaaaggaaaccaggaaattgactctgtgcctgttttcaagaagcagttccgccgagcatcctggggcctccaagcctccgataagctcctccagtatgacatcacgcatcttgctacgccagcaactcatgcgtgagcagatgcaggagcaggagcgcagggagcagcagcagaagctgcaggcggcccagttcatgcaacagagagtgcccgtgagtcagacaccagccataaacgtcagtgtgcccaccacccttccctctgccacgcaggtgccgatggaagtccttaaggtgcagacccacctcgaaaaccccaccaagtaccacatacagcaagcccaacggcagcaggtaaagcagtacctttctaccactttagcaaataaacatgccaaccaagtcctgagcttgccatgtccaaaccagcctggcgatcatgtcatgccaccggtgccggggagcagcgcacccaacagccccatggctatgcttacgcttaactccaactgtgaaaaagagggattttataagtttgaagagcaaaacagggcagagagcgagtgcccaggcatgaacacacattcacgagcgtcctgtatgcagatggatgatgtaatcgatgacatcattagcctagaatcaagttataatgaggaaatcttgggcttgatggatcctgctttgcaaatggcaaatacgttgcctgtctcgggaaacttgattgatctttatggaaaccaaggtctgcccccaccaggcctcaccatcagcaactcctgtccagccaaccttcccaacataaaaagggagctcacagagtctgaagcaagagcactggccaaagagaggcagaaaaaggacaatcacaacctgattgaacgaagaagaagatttaacataaatgaccgcattaaagaactaggtactttgattcccaagtcaaatgatccagacatgcgctggaacaagggaaccatcttaaaagcatccgtggactatatccgaaagttgcaacgagaacagcaacgcgcaaaagaacttgaaaaccgacagaagaaactggagcacgccaaccggcatttgttgctcagaatacaggaacttgaaatgcaggctcgagctcatggactttcccttattccatccacgggtctctgctctccagatttggtgaatcggatcatcaagcaagaacccgttcttgagaactgcagccaagacctccttcagcatcatgcagacctaacctgtacaacaactctcgatctcacggatggcaccatcaccttcaacaacaacctcggaactgggactgaggccaaccaagcctatagtgtccccacaaaaatgggatccaaactggaagacatcctgatggacgacaccctttctcccgtcggtgtcactgatccactcctttcctcagtgtcccccggagcttccaaaacaagcagccggaggagcagtatgagcatggaagagacggagcacacttgttagtaatgaactagtccgtaacttgaaagtatttcgatttcttggctttatatatcttgtggaaaggacgacgttgccacaatactatatccttg

SEQ ID NO: 2431 - DNA, 1616 bp, Homo sapiens
  source 1..1616: mol_type = genomic DNA
accgccaccatggaggcgcttagagttcagatgttcatgccatgctcctttgaaagcttgtatctcagttccgccgagcatcctggggcctccaagcctccgataagctcctccagtatgacatcacgcatcttgctacgccagcaactcatgcgtgagcagatgcaggagcaggagcgcagggagcagcagcagaagctgcaggcggcccagttcatgcaacagagagtgcccgtgagtcagacaccagccataaacgtcagtgtgcccaccacccttccctctgccacgcaggtgccgatggaagtccttaaggtgcagacccacctcgaaaaccccaccaagtaccacatacagcaagcccaacggcagcaggtaaagcagtacctttctaccactttagcaaataaacatgccaaccaagtcctgagcttgccatgtccaaaccagcctggcgatcatgtcatgccaccggtgccggggagcagcgcacccaacagccccatggctatgcttacgcttaactccaactgtgaaaaagagggattttataagtttgaagagcaaaacagggcagagagcgagtgcccaggcatgaacacacattcacgagcgtcctgtatgcagatggatgatgtaatcgatgacatcattagcctagaatcaagttataatgaggaaatcttgggcttgatggatcctgctttgcaaatggcaaatacgttgcctgtctcgggaaacttgattgatctttatggaaaccaaggtctgcccccaccaggcctcaccatcagcaactcctgtccagccaaccttcccaacataaaaagggagctcacagagtctgaagcaagagcactggccaaagagaggcagaaaaaggacaatcacaacctgattgaacgaagaagaagatttaacataaatgaccgcattaaagaactaggtactttgattcccaagtcaaatgatccagacatgcgctggaacaagggaaccatcttaaaagcatccgtggactatatccgaaagttgcaacgagaacagcaacgcgcaaaagaacttgaaaaccgacagaagaaactggagcacgccaaccggcatttgttgctcagaatacaggaacttgaaatgcaggctcgagctcatggactttcccttattccatccacgggtctctgctctccagatttggtgaatcggatcatcaagcaagaacccgttcttgagaactgcagccaagacctccttcagcatcatgcagacctaacctgtacaacaactctcgatctcacggatggcaccatcaccttcaacaacaacctcggaactgggactgaggccaaccaagcctatagtgtccccacaaaaatgggatccaaactggaagacatcctgatggacgacaccctttctcccgtcggtgtcactgatccactcctttcctcagtgtcccccggagcttccaaaacaagcagccggaggagcagtatgagcatggaagagacggagcacacttgttagtaatgaactagtccgtaacttgaaagtatttcgatttcttggctttatatatcttgtggaaaggacgattcgcgcggacacctggacaggtg

SEQ ID NO: 2432 - DNA, 1664 bp, Homo sapiens
  source 1..1664: mol_type = genomic DNA
accgccaccatgcagtccgaatcggggatcgtgccggatttcgaagtcggggaggagtttcatgaagagcccaaaacctattacgaactcaaaagtcaaccgctgaagagcagcagttccgccgagcatcctggggcctccaagcctccgataagctcctccagtatgacatcacgcatcttgctacgccagcaactcatgcgtgagcagatgcaggagcaggagcgcagggagcagcagcagaagctgcaggcggcccagttcatgcaacagagagtgcccgtgagtcagacaccagccataaacgtcagtgtgcccaccacccttccctctgccacgcaggtgccgatggaagtccttaaggtgcagacccacctcgaaaaccccaccaagtaccacatacagcaagcccaacggcagcaggtaaagcagtacctttctaccactttagcaaataaacatgccaaccaagtcctgagcttgccatgtccaaaccagcctggcgatcatgtcatgccaccggtgccggggagcagcgcacccaacagccccatggctatgcttacgcttaactccaactgtgaaaaagagggattttataagtttgaagagcaaaacagggcagagagcgagtgcccaggcatgaacacacattcacgagcgtcctgtatgcagatggatgatgtaatcgatgacatcattagcctagaatcaagttataatgaggaaatcttgggcttgatggatcctgctttgcaaatggcaaatacgttgcctgtctcgggaaacttgattgatctttatggaaaccaaggtctgcccccaccaggcctcaccatcagcaactcctgtccagccaaccttcccaacataaaaagggagctcacagagtctgaagcaagagcactggccaaagagaggcagaaaaaggacaatcacaacctgattgaacgaagaagaagatttaacataaatgaccgcattaaagaactaggtactttgattcccaagtcaaatgatccagacatgcgctggaacaagggaaccatcttaaaagcatccgtggactatatccgaaagttgcaacgagaacagcaacgcgcaaaagaacttgaaaaccgacagaagaaactggagcacgccaaccggcatttgttgctcagaatacaggaacttgaaatgcaggctcgagctcatggactttcccttattccatccacgggtctctgctctccagatttggtgaatcggatcatcaagcaagaacccgttcttgagaactgcagccaagacctccttcagcatcatgcagacctaacctgtacaacaactctcgatctcacggatggcaccatcaccttcaacaacaacctcggaactgggactgaggccaaccaagcctatagtgtccccacaaaaatgggatccaaactggaagacatcctgatggacgacaccctttctcccgtcggtgtcactgatccactcctttcctcagtgtcccccggagcttccaaaacaagcagccggaggagcagtatgagcatggaagagacggagcacacttgttagtaatgaactagtccgtaacttgaaagtatttcgatttcttggctttatatatcttgtggaaaggacgatcaatagtgtgaggtaatcaagga

SEQ ID NO: 2433 - DNA, 1682 bp, Homo sapiens
  source 1..1682: mol_type = genomic DNA
accgccaccatgcagtccgaatcggggatcgtgccggatttcgaagtcggggaggagtttcatgaagagcccaaaacctattacgaactcaaaagtcaaccgctgaagagcagcagttccgccgagcatcctggggcctccaagcctccgataagctcctccagtatgacatcacgcatcttgctacgccagcaactcatgcgtgagcagatgcaggagcaggagcgcagggagcagcagcagaagctgcaggcggcccagttcatgcaacagagagtgcccgtgagtcagacaccagccataaacgtcagtgtgcccaccacccttccctctgccacgcaggtgccgatggaagtccttaaggtgcagacccacctcgaaaaccccaccaagtaccacatacagcaagcccaacggcagcaggtaaagcagtacctttctaccactttagcaaataaacatgccaaccaagtcctgagcttgccatgtccaaaccagcctggcgatcatgtcatgccaccggtgccggggagcagcgcacccaacagccccatggctatgcttacgcttaactccaactgtgaaaaagagggattttataagtttgaagagcaaaacagggcagagagcgagtgcccaggcatgaacacacattcacgagcgtcctgtatgcagatggatgatgtaatcgatgacatcattagcctagaatcaagttataatgaggaaatcttgggcttgatggatcctgctttgcaaatggcaaatacgttgcctgtctcgggaaacttgattgatctttatggaaaccaaggtctgcccccaccaggcctcaccatcagcaactcctgtccagccaaccttcccaacataaaaagggagctcacagcgtgtatttttcccacagagtctgaagcaagagcactggccaaagagaggcagaaaaaggacaatcacaacctgattgaacgaagaagaagatttaacataaatgaccgcattaaagaactaggtactttgattcccaagtcaaatgatccagacatgcgctggaacaagggaaccatcttaaaagcatccgtggactatatccgaaagttgcaacgagaacagcaacgcgcaaaagaacttgaaaaccgacagaagaaactggagcacgccaaccggcatttgttgctcagaatacaggaacttgaaatgcaggctcgagctcatggactttcccttattccatccacgggtctctgctctccagatttggtgaatcggatcatcaagcaagaacccgttcttgagaactgcagccaagacctccttcagcatcatgcagacctaacctgtacaacaactctcgatctcacggatggcaccatcaccttcaacaacaacctcggaactgggactgaggccaaccaagcctatagtgtccccacaaaaatgggatccaaactggaagacatcctgatggacgacaccctttctcccgtcggtgtcactgatccactcctttcctcagtgtcccccggagcttccaaaacaagcagccggaggagcagtatgagcatggaagagacggagcacacttgttagtaatgaactagtccgtaacttgaaagtatttcgatttcttggctttatatatcttgtggaaaggacgaattagatagacgtattaaccttcc

SEQ ID NO: 2434 - DNA, 1175 bp, Homo sapiens
  source 1..1175: mol_type = genomic DNA
accgccaccatgctggaaatgctagaatataatcactatcaggtgcagacccacctcgaaaaccccaccaagtaccacatacagcaagcccaacggcagcagggattttataagtttgaagagcaaaacagggcagagagcgagtgcccaggcatgaacacacattcacgagcgtcctgtatgcagatggatgatgtaatcgatgacatcattagcctagaatcaagttataatgaggaaatcttgggcttgatggatcctgctttgcaaatggcaaatacgttgcctgtctcgggaaacttgattgatctttatggaaaccaaggtctgcccccaccaggcctcaccatcagcaactcctgtccagccaaccttcccaacataaaaagggagctcacagagtctgaagcaagagcactggccaaagagaggcagaaaaaggacaatcacaacctgattgaacgaagaagaagatttaacataaatgaccgcattaaagaactaggtactttgattcccaagtcaaatgatccagacatgcgctggaacaagggaaccatcttaaaagcatccgtggactatatccgaaagttgcaacgagaacagcaacgcgcaaaagaacttgaaaaccgacagaagaaactggagcacgccaaccggcatttgttgctcagaatacaggaacttgaaatgcaggctcgagctcatggactttcccttattccatccacgggtctctgctctccagatttggtgaatcggatcatcaagcaagaacccgttcttgagaactgcagccaagacctccttcagcatcatgcagacctaacctgtacaacaactctcgatctcacggatggcaccatcaccttcaacaacaacctcggaactgggactgaggccaaccaagcctatagtgtccccacaaaaatgggatccaaactggaagacatcctgatggacgacaccctttctcccgtcggtgtcactgatccactcctttcctcagtgtcccccggagcttccaaaacaagcagccggaggagcagtatgagcatggaagagacggagcacacttgttagtaatgaactagtccgtaacttgaaagtatttcgatttcttggctttatatatcttgtggaaaggacgacctacgagatttgcttatagattt

SEQ ID NO: 2435 - DNA, 1508 bp, Homo sapiens
  source 1..1508: mol_type = genomic DNA
accgccaccatgacatcacgcatcttgctacgccagcaactcatgcgtgagcagatgcaggagcaggagcgcagggagcagcagcagaagctgcaggcggcccagttcatgcaacagagagtgcccgtgagtcagacaccagccataaacgtcagtgtgcccaccacccttccctctgccacgcaggtgccgatggaagtccttaaggtgcagacccacctcgaaaaccccaccaagtaccacatacagcaagcccaacggcagcaggtaaagcagtacctttctaccactttagcaaataaacatgccaaccaagtcctgagcttgccatgtccaaaccagcctggcgatcatgtcatgccaccggtgccggggagcagcgcacccaacagccccatggctatgcttacgcttaactccaactgtgaaaaagagggattttataagtttgaagagcaaaacagggcagagagcgagtgcccaggcatgaacacacattcacgagcgtcctgtatgcagatggatgatgtaatcgatgacatcattagcctagaatcaagttataatgaggaaatcttgggcttgatggatcctgctttgcaaatggcaaatacgttgcctgtctcgggaaacttgattgatctttatggaaaccaaggtctgcccccaccaggcctcaccatcagcaactcctgtccagccaaccttcccaacataaaaagggagctcacagagtctgaagcaagagcactggccaaagagaggcagaaaaaggacaatcacaacctgattgaacgaagaagaagatttaacataaatgaccgcattaaagaactaggtactttgattcccaagtcaaatgatccagacatgcgctggaacaagggaaccatcttaaaagcatccgtggactatatccgaaagttgcaacgagaacagcaacgcgcaaaagaacttgaaaaccgacagaagaaactggagcacgccaaccggcatttgttgctcagaatacaggaacttgaaatgcaggctcgagctcatggactttcccttattccatccacgggtctctgctctccagatttggtgaatcggatcatcaagcaagaacccgttcttgagaactgcagccaagacctccttcagcatcatgcagacctaacctgtacaacaactctcgatctcacggatggcaccatcaccttcaacaacaacctcggaactgggactgaggccaaccaagcctatagtgtccccacaaaaatgggatccaaactggaagacatcctgatggacgacaccctttctcccgtcggtgtcactgatccactcctttcctcagtgtcccccggagcttccaaaacaagcagccggaggagcagtatgagcatggaagagacggagcacacttgttagtaatgaactagtccgtaacttgaaagtatttcgatttcttggctttatatatcttgtggaaaggacgacatgaaaggcagtgtaatctaagg

SEQ ID NO: 2436 - DNA, 1361 bp, Homo sapiens
  source 1..1361: mol_type = genomic DNA
accgccaccatgctggaaatgctagaatataatcactatcaggtgcagacccacctcgaaaaccccaccaagtaccacatacagcaagcccaacggcagcaggtaaagcagtacctttctaccactttagcaaataaacatgccaaccaagtcctgagcttgccatgtccaaaccagcctggcgatcatgtcatgccaccggtgccggggagcagcgcacccaacagccccatggctatgcttacgcttaactccaactgtgaaaaagagggattttataagtttgaagagcaaaacagggcagagagcgagtgcccaggcatgaacacacattcacgagcgtcctgtatgcagatggatgatgtaatcgatgacatcattagcctagaatcaagttataatgaggaaatcttgggcttgatggatcctgctttgcaaatggcaaatacgttgcctgtctcgggaaacttgattgatctttatggaaaccaaggtctgcccccaccaggcctcaccatcagcaactcctgtccagccaaccttcccaacataaaaagggagctcacagcgtgtatttttcccacagagtctgaagcaagagcactggccaaagagaggcagaaaaaggacaatcacaacctgattgaacgaagaagaagatttaacataaatgaccgcattaaagaactaggtactttgattcccaagtcaaatgatccagacatgcgctggaacaagggaaccatcttaaaagcatccgtggactatatccgaaagttgcaacgagaacagcaacgcgcaaaagaacttgaaaaccgacagaagaaactggagcacgccaaccggcatttgttgctcagaatacaggaacttgaaatgcaggctcgagctcatggactttcccttattccatccacgggtctctgctctccagatttggtgaatcggatcatcaagcaagaacccgttcttgagaactgcagccaagacctccttcagcatcatgcagacctaacctgtacaacaactctcgatctcacggatggcaccatcaccttcaacaacaacctcggaactgggactgaggccaaccaagcctatagtgtccccacaaaaatgggatccaaactggaagacatcctgatggacgacaccctttctcccgtcggtgtcactgatccactcctttcctcagtgtcccccggagcttccaaaacaagcagccggaggagcagtatgagcatggaagagacggagcacacttgttagtaatgaactagtccgtaacttgaaagtatttcgatttcttggctttatatatcttgtggaaaggacgacccacccgcatttgttactctcag

SEQ ID NO: 2437 - DNA, 971 bp, Homo sapiens
  source 1..971: mol_type = genomic DNA
accgccaccatgagttcgtacttcgtgaacccgctgtactccaagtacaaggcggcggctgcggcggcggcggcggcgggcgaggccatcaatcccacttactacgactgtcacttcgcgcccgaggtcggcggccgtcacgccgccgccgcagcagccctgcagctctatggcaacagcgccgccggcttcccgcacgcgcccccgcaggcgcacgcgcacccgcacccgtccccgccgccctccgggactgggtgcggcggtagggaaggccggggccaggagtacttccaccccggcgggggcagcccggccgctgcctaccaggccgccccccctcctcctccgcatcctccgcctccgccgccacctcccccctgcggcgggattgcctgtcacggggagcccgcgaagttttacggatacgataacttacagagacagccgatttttacgacccagcaagaggccgagctggtacaatatcctgactgtaaatcgtccagtggtaatattggcgaggacccagaccacttaaatcagagctcgtctccttctcaaatgtttccgtggatgagaccacaagctcctggtagacgaagaggaagacaaacctacagtcgcttccaaactctagagttggaaaaggaatttctttttaacccctatctgaccaggaaaagaagaatcgaggtttcccacgccctagccctcaccgagagacaggtaaaaatctggttccagaacaggagaatgaaatggaaaaaggaaaacaacaaggacaaatttcccgtttcccggcaggaggtgaaggacggggaaacgaaaaaggaagcccaagagctggaggaagacagagccgaaggcctgacaaattagtaatgaactagtccgtaacttgaaagtatttcgatttcttggctttatatatcttgtggaaaggacgagtcatttcattagtcccgttagag

SEQ ID NO: 2438 - DNA, 422 bp, Homo sapiens
  source 1..422: mol_type = genomic DNA
accgccaccatgtttccgtggatgagaccacaagcagctcctggtagacgaagaggaagacaaacctacagtcgcttccaaactctagagttggaaaaggaatttctttttaacccctatctgaccaggaaaagaagaatcgaggtttcccacgccctagccctcaccgagagacaggtaaaaatctggttccagaacaggagaatgaaatggaaaaaggaaaacaacaaggacaaatttcccgtttcccggcaggaggtgaaggacggggaaacgaaaaaggaagcccaagagctggaggaagacagagccgaaggcctgacaaattagtaatgaactagtccgtaacttgaaagtatttcgatttcttggctttatatatcttgtggaaaggacgatgaactaaccaatccagaatcaag

SEQ ID NO: 2439 - DNA, 974 bp, Homo sapiens
  source 1..974: mol_type = genomic DNA
accgccaccatgagttcgtacttcgtgaacccgctgtactccaagtacaaggcggcggctgcggcggcggcggcggcgggcgaggccatcaatcccacttactacgactgtcacttcgcgcccgaggtcggcggccgtcacgccgccgccgcagcagccctgcagctctatggcaacagcgccgccggcttcccgcacgcgcccccgcaggcgcacgcgcacccgcacccgtccccgccgccctccgggactgggtgcggcggtagggaaggccggggccaggagtacttccaccccggcgggggcagcccggccgctgcctaccaggccgccccccctcctcctccgcatcctccgcctccgccgccacctcccccctgcggcgggattgcctgtcacggggagcccgcgaagttttacggatacgataacttacagagacagccgatttttacgacccagcaagaggccgagctggtacaatatcctgactgtaaatcgtccagtggtaatattggcgaggacccagaccacttaaatcagagctcgtctccttctcaaatgtttccgtggatgagaccacaagcagctcctggtagacgaagaggaagacaaacctacagtcgcttccaaactctagagttggaaaaggaatttctttttaacccctatctgaccaggaaaagaagaatcgaggtttcccacgccctagccctcaccgagagacaggtaaaaatctggttccagaacaggagaatgaaatggaaaaaggaaaacaacaaggacaaatttcccgtttcccggcaggaggtgaaggacggggaaacgaaaaaggaagcccaagagctggaggaagacagagccgaaggcctgacaaattagtaatgaactagtccgtaacttgaaagtatttcgatttcttggctttatatatcttgtggaaaggacgaaaacactatcccaacagacactgc

SEQ ID NO: 2440 - DNA, 2150 bp, Homo sapiens
  source 1..2150: mol_type = genomic DNA
accgccaccatgcccagcctcagaactcgccgtgaggaggcagagatggagctctcagttccaggaccatccccctggacccctgcagcccaggcccgtgtgagagatgctcctgctgtgacccaccctggatctgcagcctgtggtaccccctgctgtagtgatactgagctggaagccatctgccctcactatcagcagccagattgtgacaccaggactgaagacaaggagtttcttcacaaggaagacattcatgaagatttggaatcacaggcagaaatatcagaaaactatgctggtgatgtttcccaggtacccgagcttggagatctgtgtgatgatgtatcagaaagagactggggagtccccgaaggcaggaggctgccacagtccctctcccaggagggggacttcacaccagctgccatggggctccttaggggccccttaggggagaaagatctggactgtaatggttttgacagtcgcttcagtctgagcccaaacctgatggcatgtcaggaaatccctacagaagagaggccacatccatatgacatgggtggccagagtttccagcacagtgtggacctaactggtcatgagggggttcccacagctgaaagtccactcatatgtaatgagtgtgggaaaaccttccaaggaaatcctgaccttattcagcgtcaaatagtccacactggggaggcttcctttatgtgtgatgattgtgggaaaaccttcagccagaactcagttcttaaaaaccgtcatcgatctcatatgagtgagaaagcttaccagtgcagcgaatgtgggaaagccttccgagggcactcagacttttctaggcatcagagtcaccacagcagtgagaggccttatatgtgtaatgaatgtggaaaagccttcagccagaactcgagccttaaaaagcaccaaaagtctcacatgagtgagaagccctatgaatgcaatgaatgtgggaaggcttttaggcggagctcaaacctcatccaacatcaaagaatccattctggggagaaaccgtatgtgtgcagtgagtgtgggaaggccttcaggcgaagctcaaacctcatcaaacaccacaggactcacacaggagagaagccttttgagtgtggcgagtgtgggaaagccttcagccagagtgcacacctgaggaagcaccagagggtccacactggagagaagccttatgagtgtaatgattgtggcaagcccttcagtcgggtctccaacctcattaagcaccacagggttcacactggagagaagccctataagtgcagtgactgtgggaaagcatttagtcagagctccagccttattcagcatcggagaattcacactggagaaaagcctcacgtgtgtaatgtatgtggaaaagcctttagttatagctcagtgctccgaaagcaccagatcatccacacgggagagaagccgtacagatgcagtgtctgtgggaaggccttcagccacagctcagccctcattcagcaccagggcgtgcacacaggcgacaagccctacgcctgccacgagtgtgggaagacctttggtcgcagctccaacctcatccttcaccagcgagtccacactggagagaagccctatgaatgtactgaatgtggaaaaaccttcagccagagctcaaccctcattcagcatcagaggattcataatgggctgaagccccatgaatgtaaccagtgtggtaaagccttcaaccgaagctcaaatctcattcaccaccagaaagttcatactggggaaaaaccctacacctgtgttgaatgtggtaagggcttcagccagagctcacacctcattcagcatcagataatccacacgggcgagcgcccctacaaatgcagtgagtgtgggaaagccttcagtcagcgttcggtcctcatccagcaccagaggattcacactggggtgaagccctatgactgtgctgcttgtgggaaagccttcagccagcgatcaaagttgatcaaacaccagttgattcacaccagggaatagtaatgaactagtccgtaacttgaaagtatttcgatttcttggctttatatatcttgtggaaaggacgaaccgagccaagcccggctgacgag

SEQ ID NO: 2441 - DNA, 2090 bp, Homo sapiens
  source 1..2090: mol_type = genomic DNA
accgccaccatgaacctgactgaggattatatggtttttgaggacgtggccatacatttctcccaggaggagtggggaattcttaatgacgttcagagacacctgcacagcgatgtgatgctggagaactttgcacttttgtcctcagtaggttgttggcatggagccaaggatgaggaggcaccttccaagcaatgtgtttctgtaggagtgtcacaggtcacaactttaaagccagctttgtccacccagaaggcccagccctgtgagacatgtagctcacttctgaaggacattctacacctggctgagcatgacggaacacaccccaagcgtacagccaagctttacctgcaccaaaaggagcatcttagagagaagctcaccagaagtgatgaagggaggccttcgtttgtgaatgacagtgttcacctggcaaagaggaacctcacatgcatgcagggtggcaaggattttactggtgattcagatcttcaacaacaggctcttcacagtgggtggaagccacacagggacactcatggtgtggaggcctttcaaagtggacagaataattacagctgcacccaatgtgggaaagacttttgccaccaacatacactgtttgagcaccagaaaatccacacagaggaaaggccttatgagtgcagtgaatgtggcaaattgtttaggtacaactccgaccttattaaacatcagcgaaatcatactggagaaaggccttataagtgtagtgaatgtggaaaagccttcagcctcaaatacaatgttgttcaacaccagaaaattcacactggagaaaggccttatgagtgcagtgaatgtgggaaagcttttcttagaaagtctcacctacttcagcaccagaggattcacaccaggccaaggccttatgtgtgtagtgaatgtgggaaggccttccttacacaggctcaccttgttggtcaccagaaaattcatactggagaacggccttatggatgcaatgaatgtgggaaatactttatgtacagttcagcactcattagacatcagaaagttcacactggagaaaggcctttttattgctgtgaatgtgggaaattctttatggacagctgcacactcattattcaccagagagttcatactggagaaaaaccttatgaatgcaacgaatgtgggaaattctttagataccgttccacactcattagacatcagaaagttcacactggagaaaagccttatgagtgtagtgaatgtgggaagttctttatggacacttccacactcattattcatcagagagttcatactggagaaaagccttatgaatgcaacaaatgtgggaaattctttaggtattgcttcacactgaatagacatcagagagttcactctggagagaggccttatgaatgcagtgaatgtggcaaattctttgtggacagctgtacactgaagagtcatcagagagttcacactggagaaagaccttttgaatgcagcatttgtgggaaatcctttagatgtcgctccacacttgatacacatcagagaattcacactggtgaaaggccttatgagtgtagtgaatgtgggaaattctttaggcacaactcaaatcatattagacatcggagaaatcactttggagaaaggtcttttgagtgcactgagtgtgggagagtttttagccaaaattcccacctcattcggcaccaaaaagttcacactagggaaagaacttacaaatgcagcaaatgtgggaaattttttatggacagctccacactcattagtcatgagagagttcatactggagaaaagccttatgagtgcagtgaatgtgggaaagtctttagatacaactccagcctcattaaacatcggagaattcacactggagagagaccttatcagtgcagtgaatgtggaagagtctttaaccaaaattctcatctcattcagcaccagaaagttcacaccagatagtaatgaactagtccgtaacttgaaagtatttcgatttcttggctttatatatcttgtggaaaggacgaagtctttgaatgagggcggtccgt

SEQ ID NO: 2442 - DNA, 2096 bp, Homo sapiens
  source 1..2096: mol_type = genomic DNA
accgccaccatgcttatggatgctggacaggattatatggtttttgaggacgtggccatacatttctcccaggaggagtggggaattcttaatgacgttcagagacacctgcacagcgatgtgatgctggagaactttgcacttttgtcctcagtaggttgttggcatggagccaaggatgaggaggcaccttccaagcaatgtgtttctgtaggagtgtcacaggtcacaactttaaagccagctttgtccacccagaaggcccagccctgtgagacatgtagctcacttctgaaggacattctacacctggctgagcatgacggaacacaccccaagcgtacagccaagctttacctgcaccaaaaggagcatcttagagagaagctcaccagaagtgatgaagggaggccttcgtttgtgaatgacagtgttcacctggcaaagaggaacctcacatgcatgcagggtggcaaggattttactggtgattcagatcttcaacaacaggctcttcacagtgggtggaagccacacagggacactcatggtgtggaggcctttcaaagtggacagaataattacagctgcacccaatgtgggaaagacttttgccaccaacatacactgtttgagcaccagaaaatccacacagaggaaaggccttatgagtgcagtgaatgtggcaaattgtttaggtacaactccgaccttattaaacatcagcgaaatcatactggagaaaggccttataagtgtagtgaatgtggaaaagccttcagcctcaaatacaatgttgttcaacaccagaaaattcacactggagaaaggccttatgagtgcagtgaatgtgggaaagcttttcttagaaagtctcacctacttcagcaccagaggattcacaccaggccaaggccttatgtgtgtagtgaatgtgggaaggccttccttacacaggctcaccttgttggtcaccagaaaattcatactggagaacggccttatggatgcaatgaatgtgggaaatactttatgtacagttcagcactcattagacatcagaaagttcacactggagaaaggcctttttattgctgtgaatgtgggaaattctttatggacagctgcacactcattattcaccagagagttcatactggagaaaaaccttatgaatgcaacgaatgtgggaaattctttagataccgttccacactcattagacatcagaaagttcacactggagaaaagccttatgagtgtagtgaatgtgggaagttctttatggacacttccacactcattattcatcagagagttcatactggagaaaagccttatgaatgcaacaaatgtgggaaattctttaggtattgcttcacactgaatagacatcagagagttcactctggagagaggccttatgaatgcagtgaatgtggcaaattctttgtggacagctgtacactgaagagtcatcagagagttcacactggagaaagaccttttgaatgcagcatttgtgggaaatcctttagatgtcgctccacacttgatacacatcagagaattcacactggtgaaaggccttatgagtgtagtgaatgtgggaaattctttaggcacaactcaaatcatattagacatcggagaaatcactttggagaaaggtcttttgagtgcactgagtgtgggagagtttttagccaaaattcccacctcattcggcaccaaaaagttcacactagggaaagaacttacaaatgcagcaaatgtgggaaattttttatggacagctccacactcattagtcatgagagagttcatactggagaaaagccttatgagtgcagtgaatgtgggaaagtctttagatacaactccagcctcattaaacatcggagaattcacactggagagagaccttatcagtgcagtgaatgtggaagagtctttaaccaaaattctcatctcattcagcaccagaaagttcacaccagatagtaatgaactagtccgtaacttgaaagtatttcgatttcttggctttatatatcttgtggaaaggacgaagtattagtgctgcctacggctcg

SEQ ID NO: 2443 - DNA, 2195 bp, Homo sapiens
  source 1..2195: mol_type = genomic DNA
accgccaccatgaataaatccctggggccagtgtcattcaaggacgtggctgtggacttcacccaggaggaatggcagcagctggatcctgagcagaagataacttacagggatgtgatgctggagaactacagcaatctagtttctgtggggtatcacattatcaaaccggatgttatcagcaagttggagcaaggagaagagccatggatagtagaaggagaattcctacttcagagctatccagatgaagtctggcaaactgatgacctaatagagagaatccaggaagaggaaaataaaccttcaaggcaaactgtgttcattgagaccctgattgaagagagaggtaatgttcctggtaaaacttttgatgtagaaacgaaccctgttccttcaagaaaaatagcctataaaaatagcctctgtgactcatgtgaaaagtgtttaacgtctgtttcagaatatattagtagtgatggaagctatgcaagaatgaaagctgatgaatgtagtggatgtgggaaatcactcctccatattaagcttgagaaaactcatccaggagatcaagcttatgaatttaatcaaaatggggaaccttatactctaaatgaagaaagtctttatcagaaaattcgtattttggagaaaccttttgaatatattgaatgccagaaagccttccaaaaggacactgtttttgttaatcacatggaagaaaagccctataagtggaatggatctgaaatagcctttctccagatgtcggacctcactgtacatcagacatctcatatggaaatgaagccctatgaatgcagtgaatgtgggaaatccttctgtaaaaagtcaaaatttattatacatcagaggactcacacaggagagaaaccttacgaatgtaatcagtgtgggaaatccttctgccagaagggaacccttactgtgcatcagagaacacacacaggggagaagccctatgaatgtaatgaatgtgggaagaacttttaccagaagttacacctcattcagcatcagagaactcactcaggagagaagccctatgaatgtagttattgtggaaaatccttttgccagaagacacacctcacacaacatcagagaacacattcaggagagagaccttatgtttgtcatgactgtgggaaaaccttctcgcagaagtcagcacttaatgaccatcagaaaattcacacaggtgtgaaactctacaagtgtagtgaatgtgggaaatgcttctgccgcaagtctactctcacgacccacctgaggacccacacaggagagaaaccgtatgaatgtaatgagtgtggaaaattcttctctcggttgtcatatctcactgtacattatagaactcattcaggagagaaaccctatgaatgtaatgaatgtggaaaaaccttctacctgaattcagccctcatgagacatcagagagtgcacacaggagagaaaccttacgaatgtaatgaatgtggaaagttattctcccagttgtcatacctcactatccatcatagaactcattcaggagtaaaaccctatgaatgtagtgaatgtgggaaaaccttctaccagaactcagccctttgtagacatcggagaatacacaaaggagagaagccctatgaatgctatatatgtggaaaattcttctctcagatgtcatacctcactatacatcatagaattcattcaggagagaagccctatgaatgtagtgaatgtgggaaaaccttctgccagaattcagcccttaatcgacatcagagaacacacacaggagagaaagcctacgaatgttatgaatgtgggaagtgcttctctcagatgtcctatctcactatacatcatcgaattcattcaggagagaaaccctttgaatgtaatgagtgtggaaaagccttctctcggatgtcatacctcactgtacattatagaactcattcaggagagaaaccctatgagtgtactgaatgtggaaaaaaattctaccacaaatcagcattcaacagccatcagagaattcataggagaggcaatatgaatgtaatagatgtgggaaggcttctctagtaatgaactagtccgtaacttgaaagtatttcgatttcttggctttatatatcttgtggaaaggacgatatctctttcgtgcttcctcaacc

SEQ ID NO: 2444 - DNA, 2081 bp, Homo sapiens
  source 1..2081: mol_type = genomic DNA
accgccaccatgaataaatccctggggccagtgtcattcaaggacgtggctgtggacttcacccaggaggaatggcagcagctggatcctgagcagaagataacttacagggatgtgatgctggagaactacagcaatctagtttctgtggggtatcacattatcaaaccggatgttatcagcaagttggagcaaggagaagagccatggatagtagaaggagaattcctacttcagagctatccagatgaagtctggcaaactgatgacctaatagagagaatccaggaagaggaaaataaaccttcaaggcaaactgtgttcattgagaccctgattgaagagagagaatatattagtagtgatggaagctatgcaagaatgaaagctgatgaatgtagtggatgtgggaaatcactcctccatattaagcttgagaaaactcatccaggagatcaagcttatgaatttaatcaaaatggggaaccttatactctaaatgaagaaagtctttatcagaaaattcgtattttggagaaaccttttgaatatattgaatgccagaaagccttccaaaaggacactgtttttgttaatcacatggaagaaaagccctataagtggaatggatctgaaatagcctttctccagatgtcggacctcactgtacatcagacatctcatatggaaatgaagccctatgaatgcagtgaatgtgggaaatccttctgtaaaaagtcaaaatttattatacatcagaggactcacacaggagagaaaccttacgaatgtaatcagtgtgggaaatccttctgccagaagggaacccttactgtgcatcagagaacacacacaggggagaagccctatgaatgtaatgaatgtgggaagaacttttaccagaagttacacctcattcagcatcagagaactcactcaggagagaagccctatgaatgtagttattgtggaaaatccttttgccagaagacacacctcacacaacatcagagaacacattcaggagagagaccttatgtttgtcatgactgtgggaaaaccttctcgcagaagtcagcacttaatgaccatcagaaaattcacacaggtgtgaaactctacaagtgtagtgaatgtgggaaatgcttctgccgcaagtctactctcacgacccacctgaggacccacacaggagagaaaccgtatgaatgtaatgagtgtggaaaattcttctctcggttgtcatatctcactgtacattatagaactcattcaggagagaaaccctatgaatgtaatgaatgtggaaaaaccttctacctgaattcagccctcatgagacatcagagagtgcacacaggagagaaaccttacgaatgtaatgaatgtggaaagttattctcccagttgtcatacctcactatccatcatagaactcattcaggagtaaaaccctatgaatgtagtgaatgtgggaaaaccttctaccagaactcagccctttgtagacatcggagaatacacaaaggagagaagccctatgaatgctatatatgtggaaaattcttctctcagatgtcatacctcactatacatcatagaattcattcaggagagaagccctatgaatgtagtgaatgtgggaaaaccttctgccagaattcagcccttaatcgacatcagagaacacacacaggagagaaagcctacgaatgttatgaatgtgggaagtgcttctctcagatgtcctatctcactatacatcatcgaattcattcaggagagaaaccctttgaatgtaatgagtgtggaaaagccttctctcggatgtcatacctcactgtacattatagaactcattcaggagagaaaccctatgagtgtactgaatgtggaaaaaaattctaccacaaatcagcattcaacagccatcagagaattcataggagaggcaatatgaatgtaatagatgtgggaaggcttctctagtaatgaactagtccgtaacttgaaagtatttcgatttcttggctttatatatcttgtggaaaggacgactaccacattatgctgcggagatg

SEQ ID NO: 2445 - DNA, 782 bp, Homo sapiens
  source 1..782: mol_type = genomic DNA
accgccaccatggaagcagaaaggaggcgccaggctgagaagccaaagaaggggcgagtcggcagcaacctgttgcctgagagacacccggccactgggaccccgaccaccacggtggactcgagtgctccaccctgcagaaggctccctggtgcaggaggggggagatcaaggttctccccgcaaggaggacagaggggccgcccgcactcccggcgccgccaccgcaccaccttcagcccagtgcagttggaacagctggagtcagcctttgggaggaaccagtaccccgacatctgggcccgagagagtcttgcccgggacactggcctcagtgaggcccgaatccaggtctggttccagaaccgcagagctaagcaacggaagcaagagcgctcactgcttcagcctctggcccatctgtctcctgccgccttttccagcttcttgccagagtccactgcttgcccctattcttacgcagcaccaccaccaccagtgacctgcttccctcacccctacagccatgccctcccttcccagccctccacaggaggcgcctttgctttgtcacaccagtctgaggactggtaccctaccttgcacccagcccctgccggccatctgccctgccccccaccccctcccatgctccccctcagccttgagccatccaagtcctggaactagtaatgaactagtccgtaacttgaaagtatttcgatttcttggctttatatatcttgtggaaaggacgagtagtgttgcgactcggtatcctt

SEQ ID NO: 2446 - DNA, 1808 bp, Homo sapiens
  source 1..1808: mol_type = genomic DNA
accgccaccatggcacaagtggactcccaggacaggtggggagaggcgtctcctctcagcagcttgactgaggaagctcatgacacccagatgctgagcatgaacttagagagtgacgatgaagatggtggggaggccgaaaaagagggcaccgctgacccggtggcctgtccaaggggcagctccccagtaacacacgaaaatcctgacttgccatggccccatccactgggcaaagaggaagagaaattctctgactcctccagtgctgggggcatggggcagaaaccagtggaaatgtctgggaaagccagttggagcagagatgtgacaaagatcaacgagacccagggttccccgggagcaagcagagctctgggttcccttcccagtggtctcgcacacaaattgttaggtcagatgcaacctcttggggaccgactacctgcgggtgatgatggatactcgggggcaaaccaggacgcagtcttggatgtcccacccagcttccccagcaatggaaagtatctctgtgcgcacaaaagtgtagacacgtccgcagggaactcttctctgttgtgtttccccaggccggggagcaactgggaccttcccacgcaagagacacatacaccagcccaggcgtcggccaccccagccagcctggctgccgcggtcctggcaaaagcgcggaacagcaggaaagtacagaaccaggcgggccggcgcgagggcggagaggctgaggcgcgtccctacaggtgcctgcggggcgggcgggcctttcagaagcccagcaagccgctgagccccgcggagacgcgcggcggcgccgccaagcgctacgcgtgcgagctatgcgggaaggcctactcccaccgcggcacactccagcagcacaggcgcctgcacacgggcgagcggccctaccagtgctccttctgcgacaaggcctacacctggtcctccgaccaccggaagcacatccgcacccacacaggcgagaaaccctacccgtgtccagactgcgggaaggccttcgtgcgctcttcggacctgcgcaaacaccagcgcaacatgcacagcaacaataagcccttcccgtgctccgagtgcggcctgaccttcaacaagccgctgtcgctgctgcgccaccagcgcacgcacctgggcgccaagcccttccgctgccccgcctgcgaccgggagttcgctgtggccagccgcatggtggagcaccagcgcgtgcactcgggcgagcggcccttcccctgccccacctgcggcaagtgcttcaccaagtcctccaatctgtccgagcaccagacgctgcacaccggccagaggcctttcaagtgcgctgactgcggcgtggccttcgcgcagccctcgcgcctcgtgcgccaccagcgcatccacactggcgagaggccctttccttgcacgcagtgtggccaggcctttgcccgctcttcgaccctgaagcggcaccaacagatccactccggggagaagggattcctctgtgccgagtgcggcagggccttccgcattgcctctgagttggcccagcacatacgaatgcacaacggagagaggccctaccagtgtgaggactgcggccaggccttcaccaggtccaatcacctccaacgacaccgagccaagcacggcacctgcaagaaggagcccatcccttcctcctctgacgagtagtaatgaactagtccgtaacttgaaagtatttcgatttcttggctttatatatcttgtggaaaggacgaggcgatccgttatacaagcaccac

SEQ ID NO: 2447 - DNA, 1619 bp, Homo sapiens
  source 1..1619: mol_type = genomic DNA
accgccaccatgacaaaggcccaggaatcactgaccctggaggatgtggctgtggacttcacctgggaggagtggcagttcctgagccctgctcagaaggacctgtaccgggatgtgatgttggagaactacagcaaccttgtgtcagtggggtatcaagccggcaaacctgatgccctcaccaagttggaacaaggagaaccactatggacactagaagatgaaatccacagtccagcccacccagaaattgagaaagctgatgatcatctgcagcagcccttgcaaaaccaaaaaatactgaagaggacgggacaacgctatgaacacggaagaactttgaaatcatatttaggtttaaccaaccagagcagaagatacaacagaaaggagcctgctgagtttaatggagatggagcttttctccatgataatcatgaacaaatgcctacggaaattgaattccctgaaagtagaaaacccatcagcaccaagtcacaattccttaaacatcagcaaacacacaacatagagaaagcccatgaatgcactgactgtgggaaagctttcctcaagaagtctcagctcactgagcataagagaattcatacaggaaagaaaccccacgtgtgtagcttgtgtgggaaagccttctacaagaagtacaggctcactgaacacgagagagctcacagaggagagaaaccccacgggtgtagcttgtgtgggaaagccttctacaagaggtacaggctcactgaacacgagagagctcacaaaggagagaaaccatacgggtgcagtgaatgtgggaaagccttccccaggaaatctgagcttactgaacatcaaaggattcacacgggaattaagccccatcaatgcagcgaatgtgggagagctttctccagaaaatcactactcgttgtacatcagcgaactcatacaggagagaagcctcatacatgcagtgaatgtggaaaaggcttcattcagaagggcaatctcaacatacatcaacgaactcacactggagagaaaccttatggatgcattgactgtggcaaggccttcagccagaagtcttgccttgtagcacatcagagatatcatacaggaaagactccctttgtatgtcctgaatgtgggcaaccctgttcacagaagtcaggactcattagacatcagaaaattcactcaggagagaaaccctataaatgcagtgactgtgggaaagccttccttacaaagacaatgctcattgtacatcacagaactcacacgggagagagaccctatggctgtgatgagtgtgagaaagcttacttctatatgtcttgccttgttaaacataagagaatacactcaagggagaaacggggggattcagtgaaggtggaaaatccttccacagcaagtcacagcttaagtcctagtgaacatgtgcaggggaaaagccctgttaatatggtaactgtggcaatggtggcagggcagtgtgagtttgcccacatcctgcattcatagtaatgaactagtccgtaacttgaaagtatttcgatttcttggctttatatatcttgtggaaaggacgaacccgtgaatgttctgcctgactt

SEQ ID NO: 2448 - DNA, 4085 bp, Homo sapiens
  source 1..4085: mol_type = genomic DNA
accgccaccatgagatcgttcttgcagcaagatgttaataagacaaaatctagactaaatgtgttaaatgggcttgccaacaatatggatgatttgaagataaacaccgatattactggtgctaaagaagaactcctagatgacaacaattttatctcagacaaagagagcggagttcataagccaaaagattgtcaaacatcatttcagaaaaataatacgttgactctgcctgaagaactgtcaaaggacaaatctgaaaacgccttaagtggaggccagtctagtctatttatacatgctggtgctcctactgtttctagtgaaaactttatcttgcctaaaggagctgctgttaatggaccagtttcacactcctccttaactaagacttccaatatgaataaaggcagtgtttcattaaccactggacagcctgtggatcagccaacaacagaatcttgttcaactttgaaggtagcagctgatcttcagctgtctacaccacagaaagcaagtcaacaccaagttttatttttgttatcagatgtagcacatgctaagaatcccacccattccaataaaaaactacctacctctgcttcagttggttgtgacattcagaattcagtagggagtaatataaagtcagatggcactttaataaatcaagtagaggtgggtgaggatggtgaagatttattggtgaaagatgattgtgtcaatacagtaacgggaatttcctcaggtacagatggatttaggtcagaaaatgatacaaactgggatccccaaaaagagttcattcaatttcttatgactaatgaggaaacagtagataaagctccacctcattctaaaataggtctagaaaaaaaaagaaagcgaaaaatggatgtaagcaagataactcgttataccgaggattgctttagtgattctaattgtgtacccaataaatcaaaaatgcaagaagtagactttctagaacaaaatgaagagctacaagcagtagactcacagaaatatgcattatcaaaagtgaagcctgaatcaactgatgaagacttagaatctgtggatgccttccaacatctaatttataacccagataagtgtggagaagagagttcacctgttcatactagcacttttctttcaaataccttaaaaaagaaatgtgaagagagtgattctgagtcacctgctactttcagtaccgaagagccatcattctacccctgtacaaagtgcaatgtgaattttagggagaagaagcacctccacaggcatatgatgtatcatttagatgggaatagtcactttcgccatcttaatgtcccaaggccatatgcttgtagagaatgtggacggacatttcgagatcgcaattcacttctaaaacatatgattattcaccaggagagaagacagaagttgatggaggaaattcgtgaattgaaagaacttcaggatgaaggaagaagtgcacgattacagtgtcctcagtgtgtgtttggtaccaattgccctaaaacatttgtgcaacatgctaaaacccatgaaaaagataaaaggtactactgctgtgaagagtgtaacttcatggcagtgacagaaaatgaattggaatgccatcgaggcattgcacatggggcagtggtaaaatgccctatggtcacttctgatattgcccagagaaaaacacaaaaaaagactttcatgaaagactctgtagtaggatcatccaaaaaatcagctacctacatatgtaagatgtgtccttttactacttcagccaaaagtgttttaaaaaagcacacggagtacttgcattcatcatcatgtgttgattcatttggtagtcctcttggacttgataaaagaaaaaatgacatccttgaagaacctgtagatagtgatagcactaaaacattaactaaacaacagtcaaccacatttccaaagaactctgctttaaaacaagatgtgaagcgaacatttggatcaacctcacaatcaagtagtttttcaaaaattcataagcggccacacagaatacagaaagctcggaaaagcattgcccaatcaggtgtaaacatgtgcaatcaaaacagctctcctcataagaatgttacaattaaaagcagcgttgaccaaaaacctaagtatttccatcaagcagcaaaagaaaagtctaatgccaaggcaaatagccactatttgtatagacacaaatatgaaaactataggatgatcaaaaaatcaggtgaatcatatcctgtgcatttcaaaaaagaagaagctagttcattaaattctttacacctgttttcatcatcaagtaattctcacaacaattttatttcagaccctcataagcctgacgccaaaaggcctgaaagcttcaaagatcacagacgtgtagctgtaaagagagtaattaaggaatctaagaaggaaagttctgttggaggggaagacttggatagctatccagattttttgcataaaatgactgttgtcgttttgcaaaaacttaattctgctgaaaagaaagatagttatgaaacagaagatgaaagttcctgggataatgttgagttaggagactacactacacaggccatagaagatgaaacctatagtgatattaatcaagagcatgtaaatttattccctttatttaagagcaaagtggaaggtcaggagcctggagaaaatgctactcttagttatgaccaaaacgatggcttttattttgaatactatgaagatactggaagtaacaactttttgcatgagatacatgatcctcagcatttagaaactgcagatgcttcattgtcaaagcatagttctgtttttcattggactgatttgtctcttgagaagaaatcgtgtccttactgcccagcaacatttgaaacaggtgttgggttatcaaatcatgtcagggggcatcttcacagagcaggattaagctatgaagcccgtcatgttgtatcaccagaacaaatagccacaagtgacaaaatgcagcatttcaaaagaactggcacaggaacacctgttaaacgagttagaaaagctatagagaagtctgaaaccacttctgaacacacttgtcagctctgtggtggttggtttgatactaaaattggattatcaaatcatgttagaggccacttgaaaagacttggaaagacgaaatgggatgctcacaaatctccaatctgtgttctgaatgagatgatgcaaaatgaagaaaaatatgaaaaaatcttaaaggcattgaacagtcgtcgtattattcccagaccatttgtagctcaaaaacttgcatcaagtgatgactttatatctcaaaatgttatacctcttgaagcataccgtaatggcctaaagactgaagctctgtcagtgtctgcatcagaagaagaagggctgaatttcttaaatgaatatgatgaaacaaaaccagaactgcccagtgggaaaaagaatcagtctcttacactcatagaacttcttaaaaataaaaggatgggagaagaaaggaattctgctatttctcctcaaaagatccataatcagacagcaagaaagagattcgttcagaaatgcgttcttccattaaatgaggatagtccgttgatgtatcagccacaaaaaatggacttgactatgcactcagccttagattgtaagcaaaagaaatcaaggtcaagatctggaagcaagaagaaaatgctaacattacctcatggtgctgacgaggtttacattctccgatgcaggttttgtggcctagtctttcgaggacccttgtctgttcaggaagactggattaagcacttacaacgacatattgtaaacgctaatcttccacggactggagctggcatggtggaagtcacgtcactacttaaaaagcctgcctccattacagaaacttcattttctctactaatggccgaagcagcttcatagtaatgaactagtccgtaacttgaaagtatttcgatttcttggctttatatatcttgtggaaaggacgagatcgaacacagacgtccacgctt

SEQ ID NO: 2449 - DNA, 419 bp, Homo sapiens
  source 1..419: mol_type = genomic DNA
accgccaccatgttaataagacaaaatctagccttagattgtaagcaaaagaaatcaaggtcaagatctggaagcaagaagaaaatgctaacattacctcatggtgctgacgaggtttacattctccgatgcaggttttgtggcctagtctttcgaggacccttgtctgttcaggaagactggattaagcacttacaacgacatattgtaaacgctaatcttccacggactggagctggcatggtggaagtcacgtcactacttaaaaagcctgcctccattacagaaacttcattttctctactaatggccgaagcagcttcatagtaatgaactagtccgtaacttgaaagtatttcgatttcttggctttatatatcttgtggaaaggacgaattcagatagaatgttactttgtc

SEQ ID NO: 2450 - DNA, 1349 bp, Homo sapiens
  source 1..1349: mol_type = genomic DNA
accgccaccatgctttcagaacagacagcagcgctggggacaggatgggaatcaatgaatgtacagctggatggagcagagccccaggtggaaaggggaagccaggaagagcggccatggagaacagtaccaggacctctggagcacctgtgctgtgaccttgaagaggagccacagtcccttcaggagaaggctcagtctgctccctgggttcctgcaattccccaggaggggaacactggagactgggagatggcagctgcacttcttgcggctggatcacaggtgagctctgcttcccttggcgtctcctgtggtcccatcactgctgcctttgtattgctttcgcatcagcccattgatgagttggctcacatgatcatcaatggatttccaattcccaaactggacatgctttctcaactagaaggaggagaagaacaatgggtccctgacccccaggacttagaggagagggacattctgagggtcacatatacaggagatggaagtgaacatgagggggatacccctgaactagaagcagaacctcccagaatgttatccagcgtgtctgaagatactgttctctggaacccggagcatgatgagagctgggattccatgcccagcagctccagaggaatgctcctggggcccccttttcttcaggaagatagtttctcaaacctgctgtgtagcacagagatggattccctgttaagaccccacacatgcccccagtgtgggaaacagtttgtatggggttcccaccttgccaggcatcaacaaacacacactggggagagaccctacagctgcctcaagtgtgagaagacctttgggcgaagacatcacctcatcaggcaccagaaaacccacctacatgacaagaccagcaggtgctctgagtgtggtaagaatttccgatgcaactcccatctggccagccaccagagagtgcatgcagaaggcaaatcctgcaaaggccaagaggttggagagagccctggcacaaggaaacggcagcgtgccccaccagtgccaaagtgtcacgtgtgcactgaatgtgggaagagctttggccgaaggcaccaccttgtgagacactggctgacccacactggggagaagcccttccagtgccctcgctgtgagaagagctttggccgaaaacatcacctggacaggcacctgctcacccaccagggacaaagtccccggaacagctgggacagaggaacatctgtcttttagtaatgaactagtccgtaacttgaaagtatttcgatttcttggctttatatatcttgtggaaaggacgattcgggattgagtcgggtaacctg

SEQ ID NO: 2451 - DNA, 1418 bp, Homo sapiens
  source 1..1418: mol_type = genomic DNA
accgccaccatgcaagctgaggacaggtcacaatttgggtctgcagcagaaatgctttcagaacagacagcagcgctggggacaggatgggaatcaatgaatgtacagctggatggagcagagccccaggtggaaaggggaagccaggaagagcggccatggagaacagtaccaggacctctggagcacctgtgctgtgaccttgaagaggagccacagtcccttcaggagaaggctcagtctgctccctgggttcctgcaattccccaggaggggaacactggagactgggagatggcagctgcacttcttgcggctggatcacagggcctggtaaccatcaaggatgtgtcactgtgcttctctcaggaggagtggcggagcctggacccctctcagacagacttttatggagaatatgtcatgcaggaaaactgtgggatagtagtctctctgagatttccaattcccaaactggacatgctttctcaactagaaggaggagaagaacaatgggtccctgacccccaggacttagaggagagggacattctgagggtcacatatacaggagatggaagtgaacatgagggggatacccctgaactagaagcagaacctcccagaatgttatccagcgtgtctgaagatactgttctctggaacccggagcatgatgagagctgggattccatgcccagcagctccagaggaatgctcctggggcccccttttcttcaggaagatagtttctcaaacctgctgtgtagcacagagatggattccctgttaagaccccacacatgcccccagtgtgggaaacagtttgtatggggttcccaccttgccaggcatcaacaaacacacactggggagagaccctacagctgcctcaagtgtgagaagacctttgggcgaagacatcacctcatcaggcaccagaaaacccacctacatgacaagaccagcaggtgctctgagtgtggtaagaatttccgatgcaactcccatctggccagccaccagagagtgcatgcagaaggcaaatcctgcaaaggccaagaggttggagagagccctggcacaaggaaacggcagcgtgccccaccagtgccaaagtgtcacgtgtgcactgaatgtgggaagagctttggccgaaggcaccaccttgtgagacactggctgacccacactggggagaagcccttccagtgccctcgctgtgagaagagctttggccgaaaacatcacctggacaggcacctgctcacccaccagggacaaagtccccggaacagctgggacagaggaacatctgtcttttagtaatgaactagtccgtaacttgaaagtatttcgatttcttggctttatatatcttgtggaaaggacgagaacggcagtccagtttccctttc

SEQ ID NO: 2452 - DNA, 1376 bp, Homo sapiens
  source 1..1376: mol_type = genomic DNA
accgccaccatgctttcagaacagacagcagcgctggggacaggatgggaatcaatgaatgtacagctggatggagcagagccccaggtggaaaggggaagccaggaagagcggccatggagaacagtaccaggacctctggagcacctgtgctgtgaccttgaagaggagccacagtcccttcaggagaaggctcagtctgctccctgggttcctgcaattccccaggaggggaacactggagactgggagatggcagctgcacttcttgcggctggatcacagggcctggtaaccatcaaggatgtgtcactgtgcttctctcaggaggagtggcggagcctggacccctctcagacagacttttatggagaatatgtcatgcaggaaaactgtgggatagtagtctctctgagatttccaattcccaaactggacatgctttctcaactagaaggaggagaagaacaatgggtccctgacccccaggacttagaggagagggacattctgagggtcacatatacaggagatggaagtgaacatgagggggatacccctgaactagaagcagaacctcccagaatgttatccagcgtgtctgaagatactgttctctggaacccggagcatgatgagagctgggattccatgcccagcagctccagaggaatgctcctggggcccccttttcttcaggaagatagtttctcaaacctgctgtgtagcacagagatggattccctgttaagaccccacacatgcccccagtgtgggaaacagtttgtatggggttcccaccttgccaggcatcaacaaacacacactggggagagaccctacagctgcctcaagtgtgagaagacctttgggcgaagacatcacctcatcaggcaccagaaaacccacctacatgacaagaccagcaggtgctctgagtgtggtaagaatttccgatgcaactcccatctggccagccaccagagagtgcatgcagaaggcaaatcctgcaaaggccaagaggttggagagagccctggcacaaggaaacggcagcgtgccccaccagtgccaaagtgtcacgtgtgcactgaatgtgggaagagctttggccgaaggcaccaccttgtgagacactggctgacccacactggggagaagcccttccagtgccctcgctgtgagaagagctttggccgaaaacatcacctggacaggcacctgctcacccaccagggacaaagtccccggaacagctgggacagaggaacatctgtcttttagtaatgaactagtccgtaacttgaaagtatttcgatttcttggctttatatatcttgtggaaaggacgatttccgatactggcagcgggaaca

SEQ ID NO: 2453 - DNA, 4238 bp, Homo sapiens
  source 1..4238: mol_type = genomic DNA
accgccaccatgagcctggagcgcgagcttcgccagctgagcaaggcgaaagccaaggcgcagagggccgggcagcggcgcgaagaggccgcgctgtgccaccagctgggggagctcctggccggccatggccgctacgccgaggctctggagcagcactggcaggagctgcagcttcgggagcgcgctgacgaccctctgggctgtgccgtggcccaccgcaagatcggagagcgcctggccgagatggaggactacccggctgccttgcagcaccagcaccagtacctggagctggcacattccctgcgcaaccacacggagctgcagagggcctgggccaccatcggccgcacccacctggacatctatgaccactgccagtcgagggatgctttgctgcaggcacaggctgcctttgagaagagcttggctattgtggatgaggagctggaggggacactggcccagggagagctgaatgagatgaggacccgcctctatctcaacctgggcctcacctttgagagcctgcagcagacagccctgtgcaacgattacttcaggaagagcatcttccttgcggagcagaaccacctttacgaggacctattccgcgcccgctacaacctgggcaccatccactggcgcgcgggccagcactcccaggctatgcgctgcttggagggtgcccgggagtgtgcgcacaccatgaggaagcggttcatggagagcgagtgctgcgtggttattgcacaggtcctccaagacctgggagactttttggctgccaagcgagccctgaagaaggcctacaggctgggctcccagaagcctgtgcagagggcagccatctgtcagaacctccagcatgtgctggcagtggtccggctgcagcaacagctggaagaggctgagggcagagaccctcagggtgccatggtcatctgtgagcagctaggggacctcttctccaaggcaggagactttcccagggcagctgaggcttaccagaagcagctgcgttttgctgagctgctggacagaccgggtgctgagcgggccatcatccacgtgtccctggccaccacactgggagacatgaaggaccaccatggggccgtgcgccactatgaggaggaactgaggctgcgcagcggcaacgtgctggaggaggccaagacctggctgaacattgcactgtcccgcgaggaggccggcgatgcctacgagctgctggccccgtgcttccagaaagcgctcagctgtgcccagcaggcccagcgtccccagctgcagaggcaggtcttgcagcatctccataccgtgcagctgaggctgcagccccaggaggcccctgagaccgaaaccagactacgggagctcagtgtagctgaagatgaagatgaggaggaggaggcggaggaggcggcagccacagcggagagcgaagccctggaggccggcgaggtggagctctcagagggcgaggacgacaccgatggcctgaccccgcagctggaggaggacgaggagcttcagggccacctgggccggcggaaggggagcaagtggaaccggcgaaacgacatgggggagaccctgctgcaccgagcctgcatcgagggccagctgcgccgcgtccaggaccttgtgaggcagggccacccccttaaccctcgggactactgtggctggacacctctgcacgaggcctgcaactacgggcatctagaaattgtccgcttcctgctggaccacggggccgcagtggacgacccaggtggccagggctgcgaaggcatcacccccctccacgatgccctcaactgtggccacttcgaggtggctgagctgctgcttgaacggggggcgtccgtcaccctccgcactcgaaagggcctcagcccgctggagacgctgcagcagtgggtgaagctgtaccgcagggacctggacctggagacgcggcagaaggccagggccatggagatgctgctccaggcggctgcctcgggccaagatccccacagctcccaggccttccacaccccaagcagccttctgtttgaccccgagacctctcctcctttgagcccctgcccagaacccccctctaatagcactagactcccagaggcctctcaggcccatgtcagggtctccccagggcaggcggcaccagccatggccaggcctcggaggagcaggcatgggccagccagcagcagcagcagctcagaaggcgaggacagcgcaggccccgcacggccgtcccagaagaggcctcggtgctcggccacagcacaacgggtggcagcctggacgcctggccccgccagcaacagggaagcagccacagccagcaccagccgggcagcctaccaggcagccatccggggtgtgggcagtgctcagagccggctggggcctggcccaccgcggggccacagcaaagcccttgccccccaggcagcgctcatcccggaggaggagtgcctggccggggactggctggagctggacatgcccctgacccgcagccgccggccccgcccccggggcactggagacaaccgcaggcccagtagtacctctgggtcggacagtgaggagagcaggccccgtgcccgagccaagcaggtccgcctgacctgcatgcagagttgcagtgcgccagttaacgcagggcccagcagcctggcttcagaacctccagggagccccagcacccccagggtctcagagcccagtggggacagctctgcggcaggccagcccttgggtccggccccgccccctcccatccgggttcgagttcaagttcaggatcatctcttcctcatccctgtcccacacagcagtgacacccactctgtggcctggctggccgagcaggcggcccagcgctactaccagacctgcgggctgctgcccaggctcaccctacggaaagagggggccctgctggccccacaggacctcatccctgatgtgctgcagagcaatgacgaggtgttggctgaggtgacttcgtgggacctgcccccgttgactgaccgctaccgcagggcctgccagagcctggggcaaggggagcaccaacaggtgctgcaggccgtggagctccagggcttgggcctctcgttcagcgcctgctccctggccctggaccaggcccagcttacacccctgctgcgggccctcaagctgcacacagcactccgggagctgcgcctggcagggaaccggctgggggacaagtgtgtggctgagctggtggctgccctgggcaccatgcccagcctggccctccttgacctctcctccaatcacctgggtcccgaaggcctgcgccagcttgccatggggctcccaggccaagccaccttgcagagtttggaggagctggacttaagcatgaaccccctgggggacggctgtggccagtccctggcctccctcctgcacgcctgccccttactcagcaccctgcgcctgcaggcgtgtggcttcggccccagcttctttctgagccaccagacagcactgggtagtgctttccaagatgctgagcacctgaagaccctgtccctgtcctacaacgccctgggagcccctgccctggccaggaccctgcagagcctgcccgccggcaccctcctgcacttagagctcagctccgtggcagccggcaagggtgattcggacctcatggagcctgtattccgatacctggccaaggaaggctgtgctctagcccacctgaccctgtctgcaaaccacctgggggacaaggctgttagagacctgtgcagatgtctctctctgtgcccctcactcatctcactggatctgtctgccaaccctgagatcagctgtgccagcttggaagagctcctgtccaccctccaaaagcggccccaaggccttagcttccttggcctgtcaggctgcgccgtccagggtcccctgggcctgggcctgtgggacaagatagccgcgcagctccgggaactgcagctgtgcagcagacgcctctgcgctgaggacagggacgccctgcgccagctgcagcccagtcggccgggccccggcgagtgcacgctggaccacggctccaagctcttctttcggcgcctctagtaatgaactagtccgtaacttgaaagtatttcgatttcttggctttatatatcttgtggaaaggacgacaacgactgctggttggctcagac

SEQ ID NO: 2454 - DNA, 1085 bp, Homo sapiens
  source 1..1085: mol_type = genomic DNA
accgccaccatgaccatggaatctggagccgagaaccagcagagtggagatgcagctgtaacagaagctgaaaaccaacaaatgacagttcaagcccagccacagattgccacattagcccaggtatctatgccagcagctcatgcaacatcatctgctcccaccgtaactctagtacagctgcccaatgggcagacagttcaagtccatggagtcattcaggcggcccagccatcagttattcagtctccacaagtccaaacagttcagatttcaactattgcagaaagtgaagattcacaggagtcagtggatagtgtaactgattcccaaaagcgaagggaaattctttcaaggaggccttcctacaggaaaattttgaatgacttatcttctgatgcaccaggagtgccaaggattgaagaagagaagtctgaagaggagacttcagcacctgccatcaccactgtaacggtgccaactccaatttaccaaactagcagtggacagtatattgccattacccagggaggagcaatacagctggctaacaatggtaccgatggggtacagggcctgcaaacattaaccatgaccaatgcagcagccactcagccgggtactaccattctacagtatgcacagaccactgatggacagcagatcttagtgcccagcaaccaagttgttgttcaagctgcctctggagacgtacaaacataccagattcgcacagcacccactagcactattgcccctggagttgttatggcatcctccccagcacttcctacacagcctgctgaagaagcagcacgaaagagagaggtccgtctaatgaagaacagggaagcagctcgagagtgtcgtagaaagaagaaagaatatgtgaaatgtttagaaaacagagtggcagtgcttgaaaatcaaaacaagacattgattgaggagctaaaagcacttaaggacctttactgccacaaatcagattagtaatgaactagtccgtaacttgaaagtatttcgatttcttggctttatatatcttgtggaaaggacgatttagttcatcgactgctgttaat

SEQ ID NO: 2455 - DNA, 1517 bp, Homo sapiens
  source 1..1517: mol_type = genomic DNA
accgccaccatgaagggcaactacgagtctctcatctccatggattatgctataaatcaacctgatgtcttatctcagattcaaccagaaggggaacataatacagaggaccaggcagggccagaggaaagtgagattcccacagaccccagtgaagagcctggtatttcaacatcagatattctgtcttggattaaacaagaagaagagcctcaggttggggccccaccggagtccaaggagagtgacgtgtacaaaagcacttatgctgatgaagagcttgtcatcaaagctgaaggccttgctagatcctcgttgtgccctgaggttccagtccctttctcttctccaccagcagcagcaaaggatgctttttcagatgtggctttcaaaagccagcagtctacatccatgacaccttttggacgtccagccactgacctgcctgaagcctctgagggacaagtgacttttactcagttgggtagctatcccctcccacctccagttggcgagcaggtgttctcatgccaccactgtggcaagaatctcagccaagacatgttgctgacccaccaatgtagccatgctactgagcaccccttaccctgtgcccagtgccctaagcactttactccacaggcggacctcagcagcacctcccaggaccatgccagcgagacaccccccacctgcccacactgtgccaggacttttactcacccatcaagacttacctaccatcttcgggtccataacagcactgagcgtcctttcccctgtcctgattgccccaagcgctttgctgaccaggctcgactcaccagccaccggagagctcatgcaagcgaaaggcccttccgctgtgcccagtgcggcaggagcttcagcttgaaaatcagcctcctgctccaccagcggggtcatgcacaagagcgccctttctcctgccctcagtgtggcattgacttcaacggccactcggccctgatccgccaccagatgatccacacaggcgagcgtccttacccctgcactgactgcagtaagagcttcatgcgcaaggagcacctgctgaaccaccggcggctgcacacaggcgagcggcccttcagttgtcctcactgtggcaagagcttcatccgcaagcaccacctaatgaaacaccagcgcatccacaccggggagcggccctacccctgctcctactgtggcaggagcttccgctacaaacagacactcaaggaccacctccgttcaggccacaatggaggctgtgggggtgatagtgacccatcaggtcagccacccaacccaccaggtcccctcataactgggcttgaaacttctggcctgggtgtcaacactgaaggtctagagaccaaccagtggtatggggaagggagtggagggggagttttgtagtaatgaactagtccgtaacttgaaagtatttcgatttcttggctttatatatcttgtggaaaggacgagctctagggattccgaccgcgaag

SEQ ID NO: 2456 - DNA, 1820 bp, Homo sapiens
  source 1..1820: mol_type = genomic DNA
accgccaccatgggcacgactgggctggagagtctgagtctgggggaccgcggagctgcccccaccgtcacctctagtgagcgcctagtcccagacccgccgaatgacctccgcaaagaagatgttgctatggaattggaaagagtgggagaagatgaggaacaaatgatgataaaaagaagcagtgaatgtaatcccttgctacaagaacccatcgcttctgctcagtttggtgctactgcaggaacagaatgccgtaagtctgtcccatgtggatgggaaagagttgtgaagcaaaggttatttgggaagacagcaggaagatttgatgtgtactttatcagcccacaaggactgaagttcagatccaaaagttcacttgctaattatcttcacaaaaatggagagacttctcttaagccagaagattttgattttactgtactttctaaaaggggtatcaagtcaagatataaagactgcagcatggcagccctgacatcccatctacaaaaccaaagtaacaattcaaactggaacctcaggacccgaagcaagtgcaaaaaggatgtgtttatgccgccaagtagtagttcagagttgcaggagagcagaggactctctaactttacttccactcatttgcttttgaaagaagatgagggtgttgatgatgttaacttcagaaaggttagaaagcccaaaggaaaggtgactattttgaaaggaatcccaattaagaaaactaaaaaaggatgtaggaagagctgttcaggttttgttcaaagtgatagcaaaagagaatctgtgtgtaataaagcagatgctgaaagtgaacctgttgcacaaaaaagtcagcttgatagaactgtctgcatttctgatgctggagcatgtggtgagaccctcagtgtgaccagtgaagaaaacagccttgtaaaaaaaaaagaaagatcattgagttcaggatcaaatttttgttctgaacaaaaaacttctggcatcataaacaaattttgttcagccaaagactcagaacacaacgagaagtatgaggatacctttttagaatctgaagaaatcggaacaaaagtagaagttgtggaaaggaaagaacatttgcatactgacattttaaaacgtggctctgaaatggacaacaactgctcaccaaccaggaaagacttcactggtgagaaaatatttcaagaagataccatcccacgaacacagatagaaagaaggaaaacaagcctgtatttttccagcaaatataacaaagaagctcttagccccccacgacgtaaagcctttaagaaatggacacctcctcggtcaccttttaatctcgttcaagaaacactttttcatgatccatggaagcttctcatcgctactatatttctcaatcggacctcaggcaaaatggcaatacctgtgctttggaagtttctggagaagtatccttcagctgaggtagcaagaaccgcagactggagagatgtgtcagaacttcttaaacctcttggtctctacgatcttcgggcaaaaaccattgtcaagttctcagatgaatacctgacaaagcagtggaagtatccaattgagcttcatgggattggtaaatatggcaacgactcttaccgaattttttgtgtcaatgagtggaagcaggtgaggctcactcccatccataattcagcacatttggtctctgaggcaaaatagtaatgaactagtccgtaacttgaaagtatttcgatttcttggctttatatatcttgtggaaaggacgacattgtcgcaatccgttctggtcg

SEQ ID NO: 2457 - DNA, 1724 bp, Homo sapiens
  source 1..1724: mol_type = genomic DNA
accgccaccatgggcacgactgggctggagagtctgagtctgggggaccgcggagctgcccccaccgtcacctctagtgagcgcctagtcccagacccgccgaatgacctccgcaaagaagatgttgctatggaattggaaagagtgggagaagatgaggaacaaatgatgataaaaagaagcagtgaatgtaatcccttgctacaagaacccatcgcttctgctcagtttggtgctactgcaggaacagaatgccgtaagtctgtcccatgtggatgggaaagagttgtgaagcaaaggttatttgggaagacagcaggaagatttgatgtgtactttatcagcccacaaggactgaagttcagatccaaaagttcacttgctaattatcttcacaaaaatggagagacttctcttaagccagaagattttgattttactgtactttctaaaaggggtatcaagtcaagatataaagactgcagcatggcagccctgacatcccatctacaaaaccaaagtaacaattcaaactggaacctcaggacccgaagcaagtgcaaaaaggatgtgtttatgccgccaagtagtagttcagagttgcaggagagcagaggactctctaactttacttccactcatttgcttttgaaagaagatgagggtgttgatgatgttaacttcagaaaggttagaaagcccaaaggaaaggtgactattttgaaaggaatcccaattaagaaaactaaaaaaggatgtaggaagagctgttcaggttttgttcaaagtgatagcaaaagagaatctgtgtgtaataaagcagatgctgaaagtgaacctgttgcacaaaaaagtcagcttgatagaactgtctgcatttctgatgctggagcatgtggtgagaccctcagtgtgaccagtgaagaaaacagccttgtaaaaaaaaaagaaagatcattgagttcaggatcaaatttttgttctgaacaaaaaacttctggcatcataaacaaattttgttcagccaaagactcagaacacaacgagaagtatgaggatacctttttagaatctgaagaaatcggaacaaaagtagaagttgtggaaaggaaagaacatttgcatactgacattttaaaacgtggctctgaaatggacaacaactgctcaccaaccaggaaagacttcactggtgagaaaatatttcaagaagataccatcccacgaacacagatagaaagaaggaaaacaagcctgtatttttccagcaaatataacaaagaagctcttagccccccacgacgtaaagcctttaagaaatggacacctcctcggtcaccttttaatctcgttcaagaaacactttttcatgatccatggaagcttctcatcgctactatatttctcaatcggacctcaggcaaaatggcaatacctgtgctttggaagtttctggagaagtatccttcagctgaggtagcaagaaccgcagactggagagatgtgtcagaacttcttaaacctcttggtctctacgatcttcgggcaaaaaccattgtcaagttctcagatgaatacctgacaaagcagtggaagtatccaattgagcttcatgggattggtgcaccctagtaatgaactagtccgtaacttgaaagtatttcgatttcttggctttatatatcttgtggaaaggacgaccctaccaagcatctagttaacga

SEQ ID NO: 2458 - DNA, 890 bp, Homo sapiens
  source 1..890: mol_type = genomic DNA
accgccaccatgggcacgactgggctggagagtctgagtctgggggaccgcggagctgcccccaccgtcacctctagtgagcgcctagtcccagacccgccgaatgacctccgcaaagaagatgttgctatggaattggaaagagtgggagaagatgaggaacaaatgatgataaaaagaagcagtgaatgtaatcccttgctacaagaacccatcgcttctgctcagtttggtgctactgcaggaacagaatgccaagataccatcccacgaacacagatagaaagaaggaaaacaagcctgtatttttccagcaaatataacaaagaagctcttagccccccacgacgtaaagcctttaagaaatggacacctcctcggtcaccttttaatctcgttcaagaaacactttttcatgatccatggaagcttctcatcgctactatatttctcaatcggacctcaggcaaaatggcaatacctgtgctttggaagtttctggagaagtatccttcagctgaggtagcaagaaccgcagactggagagatgtgtcagaacttcttaaacctcttggtctctacgatcttcgggcaaaaaccattgtcaagttctcagatgaatacctgacaaagcagtggaagtatccaattgagcttcatgggattggtaaatatggcaacgactcttaccgaattttttgtgtcaatgagtggaagcaggtgcaccctgaagaccacaaattaaataaatatcatgactggctttgggaaaatcatgaaaaattaagtctatcttagtaatgaactagtccgtaacttgaaagtatttcgatttcttggctttatatatcttgtggaaaggacgatgcgtgacatcacgggatgattag

SEQ ID NO: 2459 - DNA, 1844 bp, Homo sapiens
  source 1..1844: mol_type = genomic DNA
accgccaccatgggcacgactgggctggagagtctgagtctgggggaccgcggagctgcccccaccgtcacctctagtgagcgcctagtcccagacccgccgaatgacctccgcaaagaagatgttgctatggaattggaaagagtgggagaagatgaggaacaaatgatgataaaaagaagcagtgaatgtaatcccttgctacaagaacccatcgcttctgctcagtttggtgctactgcaggaacagaatgccgtaagtctgtcccatgtggatgggaaagagttgtgaagcaaaggttatttgggaagacagcaggaagatttgatgtgtactttatcagcccacaaggactgaagttcagatccaaaagttcacttgctaattatcttcacaaaaatggagagacttctcttaagccagaagattttgattttactgtactttctaaaaggggtatcaagtcaagatataaagactgcagcatggcagccctgacatcccatctacaaaaccaaagtaacaattcaaactggaacctcaggacccgaagcaagtgcaaaaaggatgtgtttatgccgccaagtagtagttcagagttgcaggagagcagaggactctctaactttacttccactcatttgcttttgaaagaagatgagggtgttgatgatgttaacttcagaaaggttagaaagcccaaaggaaaggtgactattttgaaaggaatcccaattaagaaaactaaaaaaggatgtaggaagagctgttcaggttttgttcaaagtgatagcaaaagagaatctgtgtgtaataaagcagatgctgaaagtgaacctgttgcacaaaaaagtcagcttgatagaactgtctgcatttctgatgctggagcatgtggtgagaccctcagtgtgaccagtgaagaaaacagccttgtaaaaaaaaaagaaagatcattgagttcaggatcaaatttttgttctgaacaaaaaacttctggcatcataaacaaattttgttcagccaaagactcagaacacaacgagaagtatgaggatacctttttagaatctgaagaaatcggaacaaaagtagaagttgtggaaaggaaagaacatttgcatactgacattttaaaacgtggctctgaaatggacaacaactgctcaccaaccaggaaagacttcactggtgagaaaatatttcaagaagataccatcccacgaacacagatagaaagaaggaaaacaagcctgtatttttccagcaaatataacaaagaagctcttagccccccacgacgtaaagcctttaagaaatggacacctcctcggtcaccttttaatctcgttcaagaaacactttttcatgatccatggaagcttctcatcgctactatatttctcaatcggacctcaggcaaaatggcaatacctgtgctttggaagtttctggagaagtatccttcagctgaggtagcaagaaccgcagactggagagatgtgtcagaacttcttaaacctcttggtctctacgatcttcgggcaaaaaccattgtcaagttctcagatgaatacctgacaaagcagtggaagtatccaattgagcttcatgggattggtaaatatggcaacgactcttaccgaattttttgtgtcaatgagtggaagcaggtgcaccctgaagaccacaaattaaataaatatcatgactggctttgggaaaatcatgaaaaattaagtctatcttagtaatgaactagtccgtaacttgaaagtatttcgatttcttggctttatatatcttgtggaaaggacgacgcgacgaaaggcaacgcgtaaat

SEQ ID NO: 2460 - DNA, 1826 bp, Homo sapiens
  source 1..1826: mol_type = genomic DNA
accgccaccatgggcacgactgggctggagagtctgagtctgggggaccgcggagctgcccccaccgtcacctctagtgagcgcctagtcccagacccgccgaatgacctccgcaaagaagatgttgctatggaattggaaagagtgggagaagatgaggaacaaatgatgataaaaagaagcagtgaatgtaatcccttgctacaagaacccatcgcttctgctcagtttggtgctactgcaggaacagaatgccgtaagtctgtcccatgtggatgggaaagagttgtgaagcaaaggttatttgggaagacagcaggaagatttgatgtgtactttatcagcccacaaggactgaagttcagatccaaaagttcacttgctaattatcttcacaaaaatggagagacttctcttaagccagaagattttgattttactgtactttctaaaaggggtatcaagtcaagatataaagactgcagcatggcagccctgacatcccatctacaaaaccaaagtaacaattcaaactggaacctcaggacccgaagcaagtgcaaaaaggatgtgtttatgccgccaagtagtagttcagagttgcaggagagcagaggactctctaactttacttccactcatttgcttttgaaagaagatgagggtgttgatgatgttaacttcagaaaggttagaaagcccaaaggaaaggtgactattttgaaaggaatcccaattaagaaaactaaaaaaggatgtaggaagagctgttcaggttttgttcaaagtgatagcaaaagagaatctgtgtgtaataaagcagatgctgaaagtgaacctgttgcacaaaaaagtcagcttgatagaactgtctgcatttctgatgctggagcatgtggtgagaccctcagtgtgaccagtgaagaaaacagccttgtaaaaaaaaaagaaagatcattgagttcaggatcaaatttttgttctgaacaaaaaacttctggcatcataaacaaattttgttcagccaaagactcagaacacaacgagaagtatgaggatacctttttagaatctgaagaaatcggaacaaaagtagaagttgtggaaaggaaagaacatttgcatactgacattttaaaacgtggctctgaaatggacaacaactgctcaccaaccaggaaagacttcactgaagataccatcccacgaacacagatagaaagaaggaaaacaagcctgtatttttccagcaaatataacaaagaagctcttagccccccacgacgtaaagcctttaagaaatggacacctcctcggtcaccttttaatctcgttcaagaaacactttttcatgatccatggaagcttctcatcgctactatatttctcaatcggacctcaggcaaaatggcaatacctgtgctttggaagtttctggagaagtatccttcagctgaggtagcaagaaccgcagactggagagatgtgtcagaacttcttaaacctcttggtctctacgatcttcgggcaaaaaccattgtcaagttctcagatgaatacctgacaaagcagtggaagtatccaattgagcttcatgggattggtaaatatggcaacgactcttaccgaattttttgtgtcaatgagtggaagcaggtgcaccctgaagaccacaaattaaataaatatcatgactggctttgggaaaatcatgaaaaattaagtctatcttagtaatgaactagtccgtaacttgaaagtatttcgatttcttggctttatatatcttgtggaaaggacgaaccggaaatgcctaacagaactct

SEQ ID NO: 2461 - DNA, 1670 bp, Homo sapiens
  source 1..1670: mol_type = genomic DNA
accgccaccatggctcttcctcagggtctattgacattcagggacgtggccatagaattctctcaggaggagtggaaatgcctggaccctgctcagaggactttatacagggacgtgatgctggagaattataggaacctcgtctccctggatatctcttccaaatgcatgttgaagacgttgtcgtcaacagggcaaggcaatacagaagtgatccacacagggacattgcacagacaagcaagtcatcacattggagaattttgtttccatgaaattgagaaagacattcatggcttcgagtttcagtggaaagaagatgaaacaaatggccatgcagcacccatgacagaaatcaaagagttggctggtagtacaggccaacatgatcaaaggcatgctggaaacaagcgtattaaagatcagcttggatcaagctttcatttgcatctgcctgaaccgcacatatttcagtctgaagggaaaattggtaatcaagttgagaagtctatcaacaatgcttcctcagtttcaacatcccaaagaatttgttgtaggcccaaaacccatatttctaataagtatggaaataattccctccattcttcattactcacacaaaaatgggaagtacacatgagagaaaaatcttttgaatgtatacagagcttcaaatcctttaattgcagctcactcttaaaaaaacatcagataattcacttagaagagaaacaatgtaaatgtgatgtatgtggcaaggtctttaatcagaagcgataccttgcctgccatcgtagatgtcacactggtgagaaaccttacaagtgtaatgagtgtggcaagacctttggtcataattcatccctcttcattcacaaagcgcttcatactggagagaaaccttatgaatgtgaagaatgtgacaaagttttcagtcgcaaatcacaccttgaaagacataagaggattcatactggagagaaaccatacaaatgtaaggtttgtgatgaggctttcgcatataattcatatctggcaaaacatactatacttcacactggagagaaaccttacacatgtaatgaatgtggcaaagtttttaatcgactatcaacccttgcacgccatcatagacttcatactggagagaaaccttacaaatgtgaagagtgtgacaaagttttcagtcgcaaatcacaccttgaaagacataggaggattcatagtggagagaaaccttacaaatgtgaagaatgttgcaaagttttcagtcgcaaatcaaacctggaaagacacaggaggattcatactggagagaaaccatacaaatgtaaggtttgtgacaaggctttccagagggattcacacctggcacaacatcagagagttcatactggagagaaaccttacaagtgtaatgagtgtggcaagaccttcggtcagacatcatcgcttataatccatcgtaggcttcatactggagagaaaccttacaagtgtaatgagtgtggcaagaccttcagtcagatgtcatcccttgtataccatcataggcttcatagtggagagaagccttagtaatgaactagtccgtaacttgaaagtatttcgatttcttggctttatatatcttgtggaaaggacgattgtcgtgaaagtagactactttg

SEQ ID NO: 2462 - DNA, 485 bp, Homo sapiens
  source 1..485: mol_type = genomic DNA
accgccaccatggctcttcctcagggtctattgacattcagggacgtggccatagaattctctcaggaggagtggaaatgcctggaccctgctcagaggactttatacagggacgtgatgctggagaattataggaacctcgtctccctggagttttggtctgtcatcccggctaaagtacagtggtgtcatctccgctcactgcaacctccacttcccaggttcaagcaattctcctgcctcagccttccaagtacctgggactacagatatctcttccaaatgcatgttgaagacgttgtcgtcaacagggcaaggcaatacagaagtgatccacacagggacattgcacagacaagcaagtcatcacattggagaattttgtttccatagtaatgaactagtccgtaacttgaaagtatttcgatttcttggctttatatatcttgtggaaaggacgagcgcggctgacggtacacggtagg

SEQ ID NO: 2463 - DNA, 1613 bp, Homo sapiens
  source 1..1613: mol_type = genomic DNA
accgccaccatggctgaggactggctggactgcccggccctgggccctggctggaagcgccgcgaagtctttcgcaagtcaggggccacctgtggacgctcagacacctattaccagagccccacaggagacaggatccgaagcaaagttgagctgactcgatacctgggccctgcgtgtgatctcaccctcttcgacttcaaacaaggcatcttgtgctatccagcccccaaggcccatcccgtggcggttgccagcaagaagcgaaagaagccttcaaggccagccaagactcggaaacgtcaggttggaccccagagtggtgaggtcaggaaggaggccccgagggatgagaccaaggctgacactgacacagccccagcttcattccctgctcctgggtgctgtgagaactgtggaatcagcttctcaggggatggcacccaaaggcagcggctcaaaacgttgtgcaaagactgtcgagcacagagaattgccttcaaccgggaacagagaatgtttaagcgtgtgggctgtggggagtgtgcagcctgccaggtaacagaagactgtggggcctgctccacctgcctcctgcagctgccccatgatgtggcatcggggctgttctgcaagtgtgaacggagacgctgcctccggattgtggaaaggagccgagggtgtggagtatgccggggctgtcagacccaagaggattgtggccattgccccatctgccttcgccctccccgccctggtctcaggcgccagtggaaatgtgtccagcgacgttgcctacggggtaaacatgcccgccgcaagggaggctgtgactccaagatggctgccaggcggcgccccggagcccagccactgcctccaccacccccatcacagtccccagagcccacagagccgcaccccagagccctggccccctcgccacctgccgagttcatctattactgtgtagacgaggacgagctaaagcggctgctgcccagtgtctggtcagagtctgaggatggggcaggatcgcccccaccttaccgtcgtcgaaagaggcccagctctgcccgacggcaccatcttggccctaccttgaagcccaccttggctacacgcacagcccaaccagaccatacccaggctccaacgaagcaggaagcaggtggtggctttgtgctgcccccgcctggcactgaccttgtgtttttacgggaaggcgcaagcagtcctgtgcaggtgccgggccctgttgcagcttccacagaagccctgttgcaggcagtagacccaggcctgccttctgtgaagcaagagccacctgacccagaggaggacaaggaggagaacaaggatgattctgcctccaaattggccccagaggaagaggcaggaggggctggcacacccgtgatcacggagattttcagcctgggtggaacccgcttccgagatacagcagtctggttgccaaggtccaaagaccttaaaaaacctggagctagaaagcagtagtaatgaactagtccgtaacttgaaagtatttcgatttcttggctttatatatcttgtggaaaggacgaaggctttcgtagtagttctgaatt

SEQ ID NO: 2464 - DNA, 2069 bp, Homo sapiens
  source 1..2069: mol_type = genomic DNA
accgccaccatggctgaggactggctggactgcccggccctgggccctggctggaagcgccgcgaagtctttcgcaagtcaggggccacctgtggacgctcagacacctattaccagagccccacaggagacaggatccgaagcaaagttgagctgactcgatacctgggccctgcgtgtgatctcaccctcttcgacttcaaacaaggcatcttgtgctatccagcccccaaggcccatcccgtggcggttgccagcaagaagcgaaagaagccttcaaggccagccaagactcggaaacgtcaggttggaccccagagtggtgaggtcaggaaggaggccccgagggatgagaccaaggctgacactgacacagccccagcttcattccctgctcctgggtgctgtgagaactgtggaatcagcttctcaggggatggcacccaaaggcagcggctcaaaacgttgtgcaaagactgtcgagcacagagaattgccttcaaccgggaacagagaatgtttaagcgtgtgggctgtggggagtgtgcagcctgccaggtaacagaagactgtggggcctgctccacctgcctcctgcagctgccccatgatgtggcatcggggctgttctgcaagtgtgaacggagacgctgcctccggattgtggaaaggagccgagggtgtggagtatgccggggctgtcagacccaagaggattgtggccattgccccatctgccttcgccctccccgccctggtctcaggcgccagtggaaatgtgtccagcgacgttgcctacggggtaaacatgcccgccgcaagggaggctgtgactccaagatggctgccaggcggcgccccggagcccagccactgcctccaccacccccatcacagtccccagagcccacagagccgcaccccagagccctggccccctcgccacctgccgagttcatctattactgtgtagacgaggacgagctacagccctacacgaaccgccggcagaaccgcaagtgcggggcctgtgcagcctgcctacggcggatggactgtggccgctgcgacttctgctgcgacaagcccaaattcgggggcagcaaccagaagcgccagaagtgtcgttggcgccaatgcctgcagtttgccatgaagcggctgctgcccagtgtctggtcagagtctgaggatggggcaggatcgcccccaccttaccgtcgtcgaaagaggcccagctctgcccgacggcaccatcttggccctaccttgaagcccaccttggctacacgcacagcccaaccagaccatacccaggctccaacgaagcaggaagcaggtggtggctttgtgctgcccccgcctggcactgaccttgtgtttttacgggaaggcgcaagcagtcctgtgcaggtgccgggccctgttgcagcttccacagaagccctgttgcaggaggcccagtgctctggcctgagttgggttgtggccttaccccaggtgaagcaagagaaggcggatacccaggacgagtggacaccaggcacagctgtcctgacttctcccgtattggtgcctggctgccctagcaaggcagtagacccaggcctgccttctgtgaagcaagagccacctgacccagaggaggacaaggaggagaacaaggatgattctgcctccaaattggccccagaggaagaggcaggaggggctggcacacccgtgatcacggagattttcagcctgggtggaacccgcttccgagatacagcagtctggttgccaagtctgcagggcaggcactcgggaagggaagatggatgtaaagtgtgggagaccgaggacacagtggagcccacgagcacgagctggaacccacgaggatggcctggaacccatgtcagtctctcaccacctccagcttcgatgatgtgggtgtcctgcagaagaagctggtgcccttcctcacagagttagtaatgaactagtccgtaacttgaaagtatttcgatttcttggctttatatatcttgtggaaaggacgattgcatctttcgggaatcaagtaa

SEQ ID NO: 2465 - DNA, 1712 bp, Homo sapiens
  source 1..1712: mol_type = genomic DNA
accgccaccatggctgaggactggctggactgcccggccctgggccctggctggaagcgccgcgaagtctttcgcaagtcaggggccacctgtggacgctcagacacctattaccagagccccacaggagacaggatccgaagcaaagttgagctgactcgatacctgggccctgcgtgtgatctcaccctcttcgacttcaaacaaggcatcttgtgctatccagcccccaaggcccatcccgtggcggttgccagcaagaagcgaaagaagccttcaaggccagccaagactcggaaacgtcaggttggaccccagagtggtgaggtcaggaaggaggccccgagggatgagaccaaggctgacactgacacagccccagcttcattccctgctcctgggtgctgtgagaactgtggaatcagcttctcaggggatggcacccaaaggcagcggctcaaaacgttgtgcaaagactgtcgagcacagagaattgccttcaaccgggaacagagaatgtttaagcgtgtgggctgtggggagtgtgcagcctgccaggtaacagaagactgtggggcctgctccacctgcctcctgcagctgccccatgatgtggcatcggggctgttctgcaagtgtgaacggagacgctgcctccggattgtggaaaggagccgagggtgtggagtatgccggggctgtcagacccaagaggattgtggccattgccccatctgccttcgccctccccgccctggtctcaggcgccagtggaaatgtgtccagcgacgttgcctacggggtaaacatgcccgccgcaagggaggctgtgactccaagatggctgccaggcggcgccccggagcccagccactgcctccaccacccccatcacagtccccagagcccacagagccgcagccctacacgaaccgccggcagaaccgcaagtgcggggcctgtgcagcctgcctacggcggatggactgtggccgctgcgacttctgctgcgacaagcccaaattcgggggcagcaaccagaagcgccagaagtgtcgttggcgccaatgcctgcagtttgccatgaagcggctgctgcccagtgtctggtcagagtctgaggatggggcaggatcgcccccaccttaccgtcgtcgaaagaggcccagctctgcccgacggcaccatcttggccctaccttgaagcccaccttggctacacgcacagcccaaccagaccatacccaggctccaacgaagcaggaagcaggtggtggctttgtgctgcccccgcctggcactgaccttgtgtttttacgggaaggcgcaagcagtcctgtgcaggtgccgggccctgttgcagcttccacagaagccctgttgcaggcagtagacccaggcctgccttctgtgaagcaagagccacctgacccagaggaggacaaggaggagaacaaggatgattctgcctccaaattggccccagaggaagaggcaggaggggctggcacacccgtgatcacggagattttcagcctgggtggaacccgcttccgagatacagcagtctggttgccaaggtccaaagaccttaaaaaacctggagctagaaagcagtagtaatgaactagtccgtaacttgaaagtatttcgatttcttggctttatatatcttgtggaaaggacgacacgctgccggcatcatagaagct

SEQ ID NO: 2466 - DNA, 1994 bp, Homo sapiens
  source 1..1994: mol_type = genomic DNA
accgccaccatggctgaggactggctggactgcccggccctgggccctggctggaagcgccgcgaagtctttcgcaagtcaggggccacctgtggacgctcagacacctattaccagagccccacaggagacaggatccgaagcaaagttgagctgactcgatacctgggccctgcgtgtgatctcaccctcttcgacttcaaacaaggcatcttgtgctatccagcccccaaggcccatcccgtggcggttgccagcaagaagcgaaagaagccttcaaggccagccaagactcggaaacgtcaggttggaccccagagtggtgaggtcaggaaggaggccccgagggatgagaccaaggctgacactgacacagccccagcttcattccctgctcctgggtgctgtgagaactgtggaatcagcttctcaggggatggcacccaaaggcagcggctcaaaacgttgtgcaaagactgtcgagcacagagaattgccttcaaccgggaacagagaatgtttaagcgtgtgggctgtggggagtgtgcagcctgccaggtaacagaagactgtggggcctgctccacctgcctcctgcagctgccccatgatgtggcatcggggctgttctgcaagtgtgaacggagacgctgcctccggattgtggaaaggagccgagggtgtggagtatgccggggctgtcagacccaagaggattgtggccattgccccatctgccttcgccctccccgccctggtctcaggcgccagtggaaatgtgtccagcgacgttgcctacggcaccttgctcaccgcctgcgtcgccgtcatcagagatgtcagcgacgcactcccctggctgtggctcccccaactggtaaacatgcccgccgcaagggaggctgtgactccaagatggctgccaggcggcgccccggagcccagccactgcctccaccacccccatcacagtccccagagcccacagagccgcaccccagagccctggccccctcgccacctgccgagttcatctattactgtgtagacgaggacgagctacagccctacacgaaccgccggcagaaccgcaagtgcggggcctgtgcagcctgcctacggcggatggactgtggccgctgcgacttctgctgcgacaagcccaaattcgggggcagcaaccagaagcgccagaagtgtcgttggcgccaatgcctgcagtttgccatgaagcggctgctgcccagtgtctggtcagagtctgaggatggggcaggatcgcccccaccttaccgtcgtcgaaagaggcccagctctgcccgacggcaccatcttggccctaccttgaagcccaccttggctacacgcacagcccaaccagaccatacccaggctccaacgaagcaggaagcaggtggtggctttgtgctgcccccgcctggcactgaccttgtgtttttacgggaaggcgcaagcagtcctgtgcaggtgccgggccctgttgcagcttccacagaagccctgttgcaggaggcccagtgctctggcctgagttgggttgtggccttaccccaggtgaagcaagagaaggcggatacccaggacgagtggacaccaggcacagctgtcctgacttctcccgtattggtgcctggctgccctagcaaggcagtagacccaggcctgccttctgtgaagcaagagccacctgacccagaggaggacaaggaggagaacaaggatgattctgcctccaaattggccccagaggaagaggcaggaggggctggcacacccgtgatcacggagattttcagcctgggtggaacccgcttccgagatacagcagtctggttgccaaggtccaaagaccttaaaaaacctggagctagaaagcagtagtaatgaactagtccgtaacttgaaagtatttcgatttcttggctttatatatcttgtggaaaggacgattagactgactgtttggagctgtc

SEQ ID NO: 2467 - DNA, 1751 bp, Homo sapiens
  source 1..1751: mol_type = genomic DNA
accgccaccatggctgaggactggctggactgcccggccctgggccctggctggaagcgccgcgaagtctttcgcaagtcaggggccacctgtggacgctcagacacctattaccagagccccacaggagacaggatccgaagcaaagttgagctgactcgatacctgggccctgcgtgtgatctcaccctcttcgacttcaaacaaggcatcttgtgctatccagcccccaaggcccatcccgtggcggttgccagcaagaagcgaaagaagccttcaaggccagccaagactcggaaacgtcaggttggaccccagagtggtgaggtcaggaaggaggccccgagggatgagaccaaggctgacactgacacagccccagcttcattccctgctcctgggtgctgtgagaactgtggaatcagcttctcaggggatggcacccaaaggcagcggctcaaaacgttgtgcaaagactgtcgagcacagagaattgccttcaaccgggaacagagaatgtttaagcgtgtgggctgtggggagtgtgcagcctgccaggtaacagaagactgtggggcctgctccacctgcctcctgcagctgccccatgatgtggcatcggggctgttctgcaagtgtgaacggagacgctgcctccggattgtggaaaggagccgagggtgtggagtatgccggggctgtcagacccaagaggattgtggccattgccccatctgccttcgccctccccgccctggtctcaggcgccagtggaaatgtgtccagcgacgttgcctacggggtaaacatgcccgccgcaagggaggctgtgactccaagatggctgccaggcggcgccccggagcccagccactgcctccaccacccccatcacagtccccagagcccacagagccgcaccccagagccctggccccctcgccacctgccgagttcatctattactgtgtagacgaggacgagctaaagcggctgctgcccagtgtctggtcagagtctgaggatggggcaggatcgcccccaccttaccgtcgtcgaaagaggcccagctctgcccgacggcaccatcttggccctaccttgaagcccaccttggctacacgcacagcccaaccagaccatacccaggctccaacgaagcaggaagcaggtggtggctttgtgctgcccccgcctggcactgaccttgtgtttttacgggaaggcgcaagcagtcctgtgcaggtgccgggccctgttgcagcttccacagaagccctgttgcaggaggcccagtgctctggcctgagttgggttgtggccttaccccaggtgaagcaagagaaggcggatacccaggacgagtggacaccaggcacagctgtcctgacttctcccgtattggtgcctggctgccctagcaaggcagtagacccaggcctgccttctgtgaagcaagagccacctgacccagaggaggacaaggaggagaacaaggatgattctgcctccaaattggccccagaggaagaggcaggaggggctggcacacccgtgatcacggagattttcagcctgggtggaacccgcttccgagatacagcagtctggttgccaaggtccaaagaccttaaaaaacctggagctagaaagcagtagtaatgaactagtccgtaacttgaaagtatttcgatttcttggctttatatatcttgtggaaaggacgagtcccgggagtaaatgtttaagta

SEQ ID NO: 2468 - DNA, 1754 bp, Homo sapiens
  source 1..1754: mol_type = genomic DNA
accgccaccatggctgaggactggctggactgcccggccctgggccctggctggaagcgccgcgaagtctttcgcaagtcaggggccacctgtggacgctcagacacctattaccagagccccacaggagacaggatccgaagcaaagttgagctgactcgatacctgggccctgcgtgtgatctcaccctcttcgacttcaaacaaggcatcttgtgctatccagcccccaaggcccatcccgtggcggttgccagcaagaagcgaaagaagccttcaaggccagccaagactcggaaacgtcaggttggaccccagagtggtgaggtcaggaaggaggccccgagggatgagaccaaggctgacactgacacagccccagcttcattccctgctcctgggtgctgtgagaactgtggaatcagcttctcaggggatggcacccaaaggcagcggctcaaaacgttgtgcaaagactgtcgagcacagagaattgccttcaaccgggaacagagaatgtttaagcgtgtgggctgtggggagtgtgcagcctgccaggtaacagaagactgtggggcctgctccacctgcctcctgcagctgccccatgatgtggcatcggggctgttctgcaagtgtgaacggagacgctgcctccggattgtggaaaggagccgagggtgtggagtatgccggggctgtcagacccaagaggattgtggccattgccccatctgccttcgccctccccgccctggtctcaggcgccagtggaaatgtgtccagcgacgttgcctacggggtaaacatgcccgccgcaagggaggctgtgactccaagatggctgccaggcggcgccccggagcccagccactgcctccaccacccccatcacagtccccagagcccacagagccgcaccccagagccctggccccctcgccacctgccgagttcatctattactgtgtagacgaggacgagctacagccctacacgaaccgccggcagaaccgcaagtgcggggcctgtgcagcctgcctacggcggatggactgtggccgctgcgacttctgctgcgacaagcccaaattcgggggcagcaaccagaagcgccagaagtgtcgttggcgccaatgcctgcagtttgccatgaagcggctgctgcccagtgtctggtcagagtctgaggatggggcaggatcgcccccaccttaccgtcgtcgaaagaggcccagctctgcccgacggcaccatcttggccctaccttgaagcccaccttggctacacgcacagcccaaccagaccatacccaggctccaacgaagcaggaagcaggtggtggctttgtgctgcccccgcctggcactgaccttgtgtttttacgggaaggcgcaagcagtcctgtgcaggtgccgggccctgttgcagcttccacagaagccctgttgcaggcagtagacccaggcctgccttctgtgaagcaagagccacctgacccagaggaggacaaggaggagaacaaggatgattctgcctccaaattggccccagaggaagaggcaggaggggctggcacacccgtggaaccaaccacccaaccccagtattctggtaattttgacaatgatctatatgaaatttatttgattgacatttagtaatgaactagtccgtaacttgaaagtatttcgatttcttggctttatatatcttgtggaaaggacgaccgatctccacggcgttgattacc

SEQ ID NO: 2469 - DNA, 1772 bp, Homo sapiens
  source 1..1772: mol_type = genomic DNA
accgccaccatggctgaggactggctggactgcccggccctgggccctggctggaagcgccgcgaagtctttcgcaagtcaggggccacctgtggacgctcagacacctattaccagagccccacaggagacaggatccgaagcaaagttgagctgactcgatacctgggccctgcgtgtgatctcaccctcttcgacttcaaacaaggcatcttgtgctatccagcccccaaggcccatcccgtggcggttgccagcaagaagcgaaagaagccttcaaggccagccaagactcggaaacgtcaggttggaccccagagtggtgaggtcaggaaggaggccccgagggatgagaccaaggctgacactgacacagccccagcttcattccctgctcctgggtgctgtgagaactgtggaatcagcttctcaggggatggcacccaaaggcagcggctcaaaacgttgtgcaaagactgtcgagcacagagaattgccttcaaccgggaacagagaatgtttaagagccgagggtgtggagtatgccggggctgtcagacccaagaggattgtggccattgccccatctgccttcgccctccccgccctggtctcaggcgccagtggaaatgtgtccagcgacgttgcctacggggtaaacatgcccgccgcaagggaggctgtgactccaagatggctgccaggcggcgccccggagcccagccactgcctccaccacccccatcacagtccccagagcccacagagccgcaccccagagccctggccccctcgccacctgccgagttcatctattactgtgtagacgaggacgagctacagccctacacgaaccgccggcagaaccgcaagtgcggggcctgtgcagcctgcctacggcggatggactgtggccgctgcgacttctgctgcgacaagcccaaattcgggggcagcaaccagaagcgccagaagtgtcgttggcgccaatgcctgcagtttgccatgaagcggctgctgcccagtgtctggtcagagtctgaggatggggcaggatcgcccccaccttaccgtcgtcgaaagaggcccagctctgcccgacggcaccatcttggccctaccttgaagcccaccttggctacacgcacagcccaaccagaccatacccaggctccaacgaagcaggaagcaggtggtggctttgtgctgcccccgcctggcactgaccttgtgtttttacgggaaggcgcaagcagtcctgtgcaggtgccgggccctgttgcagcttccacagaagccctgttgcaggaggcccagtgctctggcctgagttgggttgtggccttaccccaggtgaagcaagagaaggcggatacccaggacgagtggacaccaggcacagctgtcctgacttctcccgtattggtgcctggctgccctagcaaggcagtagacccaggcctgccttctgtgaagcaagagccacctgacccagaggaggacaaggaggagaacaaggatgattctgcctccaaattggccccagaggaagaggcaggaggggctggcacacccgtgatcacggagattttcagcctgggtggaacccgcttccgagatacagcagtctggttgccaaggtccaaagaccttaaaaaacctggagctagaaagcagtagtaatgaactagtccgtaacttgaaagtatttcgatttcttggctttatatatcttgtggaaaggacgatagaccttcccgtccgtagcgagc

SEQ ID NO: 2470 - DNA, 1709 bp, Homo sapiens
  source 1..1709: mol_type = genomic DNA
accgccaccatggctgaggactggctggactgcccggccctgggccctggctggaagcgccgcgaagtctttcgcaagtcaggggccacctgtggacgctcagacacctattaccagagccccacaggagacaggatccgaagcaaagttgagctgactcgatacctgggccctgcgtgtgatctcaccctcttcgacttcaaacaaggcatcttgtgctatccagcccccaaggcccatcccgtggcggttgccagcaagaagcgaaagaagccttcaaggccagccaagactcggaaacgtcaggttggaccccagagtggtgaggtcaggaaggaggccccgagggatgagaccaaggctgacactgacacagccccagcttcattccctgctcctgggtgctgtgagaactgtggaatcagcttctcaggggatggcacccaaaggcagcggctcaaaacgttgtgcaaagactgtcgagcacagagaattgccttcaaccgggaacagagaatgtttaagcgtgtgggctgtggggagtgtgcagcctgccaggtaacagaagactgtggggcctgctccacctgcctcctgcagctgccccatgatgtggcatcggggctgttctgcaagtgtgaacggagacgctgcctccggattgtggaaaggagccgagggtgtggagtatgccggggctgtcagacccaagaggattgtggccattgccccatctgccttcgccctccccgccctggtctcaggcgccagtggaaatgtgtccagcgacgttgcctacggggtaaacatgcccgccgcaagggaggctgtgactccaagatggctgccaggcggcgccccggagcccagccactgcctccaccacccccatcacagtccccagagcccacagagccgcaccccagagccctggccccctcgccacctgccgagttcatctattactgtgtagacgaggacgagctaaagcggctgctgcccagtgtctggtcagagtctgaggatggggcaggatcgcccccaccttaccgtcgtcgaaagaggcccagctctgcccgacggcaccatcttggccctaccttgaagcccaccttggctacacgcacagcccaaccagaccatacccaggctccaacgaagcaggaagcaggtggtggctttgtgctgcccccgcctggcactgaccttgtgtttttacgggaaggcgcaagcagtcctgtgcaggtgccgggccctgttgcagcttccacagaagccctgttgcaggcagtagacccaggcctgccttctgtgaagcaagagccacctgacccagaggaggacaaggaggagaacaaggatgattctgcctccaaattggccccagaggaagaggcaggaggggctggcacacccgtgatcacggagattttcagcctgggtggaacccgcttccgagatacagcagtctggttgccaagggcaggcactcgggaagggaagatggatgtaaagtgtgggagaccgaggacacagtggagcccacgagcacgagctggaacccacgaggatggcctggaacccatgtcagtctctcaccacctccagcttcgatagtaatgaactagtccgtaacttgaaagtatttcgatttcttggctttatatatcttgtggaaaggacgagaagacggagcttagggttgggcg

SEQ ID NO: 2471 - DNA, 1919 bp, Homo sapiens
  source 1..1919: mol_type = genomic DNA
accgccaccatggctgaggactggctggactgcccggccctgggccctggctggaagcgccgcgaagtctttcgcaagtcaggggccacctgtggacgctcagacacctattaccagagccccacaggagacaggatccgaagcaaagttgagctgactcgatacctgggccctgcgtgtgatctcaccctcttcgacttcaaacaaggcatcttgtgctatccagcccccaaggcccatcccgtggcggttgccagcaagaagcgaaagaagccttcaaggccagccaagactcggaaacgtcaggttggaccccagagtggtgaggtcaggaaggaggccccgagggatgagaccaaggctgacactgacacagccccagcttcattccctgctcctgggtgctgtgagaactgtggaatcagcttctcaggggatggcacccaaaggcagcggctcaaaacgttgtgcaaagactgtcgagcacagagaattgccttcaaccgggaacagagaatgtttaagcgtgtgggctgtggggagtgtgcagcctgccaggtaacagaagactgtggggcctgctccacctgcctcctgcagctgccccatgatgtggcatcggggctgttctgcaagtgtgaacggagacgctgcctccggattgtggaaaggagccgagggtgtggagtatgccggggctgtcagacccaagaggattgtggccattgccccatctgccttcgccctccccgccctggtctcaggcgccagtggaaatgtgtccagcgacgttgcctacggggtaaacatgcccgccgcaagggaggctgtgactccaagatggctgccaggcggcgccccggagcccagccactgcctccaccacccccatcacagtccccagagcccacagagccgcaccccagagccctggccccctcgccacctgccgagttcatctattactgtgtagacgaggacgagctacagccctacacgaaccgccggcagaaccgcaagtgcggggcctgtgcagcctgcctacggcggatggactgtggccgctgcgacttctgctgcgacaagcccaaattcgggggcagcaaccagaagcgccagaagtgtcgttggcgccaatgcctgcagtttgccatgaagcggctgctgcccagtgtctggtcagagtctgaggatggggcaggatcgcccccaccttaccgtcgtcgaaagaggcccagctctgcccgacggcaccatcttggccctaccttgaagcccaccttggctacacgcacagcccaaccagaccatacccaggctccaacgaagcaggaagcaggtggtggctttgtgctgcccccgcctggcactgaccttgtgtttttacgggaaggcgcaagcagtcctgtgcaggtgccgggccctgttgcagcttccacagaagccctgttgcaggaggcccagtgctctggcctgagttgggttgtggccttaccccaggtgaagcaagagaaggcggatacccaggacgagtggacaccaggcacagctgtcctgacttctcccgtattggtgcctggctgccctagcaaggcagtagacccaggcctgccttctgtgaagcaagagccacctgacccagaggaggacaaggaggagaacaaggatgattctgcctccaaattggccccagaggaagaggcaggaggggctggcacacccgtgatcacggagattttcagcctgggtggaacccgcttccgagatacagcagtctggttgccaaggtccaaagaccttaaaaaacctggagctagaaagcagtagtaatgaactagtccgtaacttgaaagtatttcgatttcttggctttatatatcttgtggaaaggacgaaaccaagtatcaacctactttccc

SEQ ID NO: 2472 - DNA, 1862 bp, Homo sapiens
  source 1..1862: mol_type = genomic DNA
accgccaccatggctgaggactggctggactgcccggccctgggccctggctggaagcgccgcgaagtctttcgcaagtcaggggccacctgtggacgctcagacacctattaccagagccccacaggagacaggatccgaagcaaagttgagctgactcgatacctgggccctgcgtgtgatctcaccctcttcgacttcaaacaaggcatcttgtgctatccagcccccaaggcccatcccgtggcggttgccagcaagaagcgaaagaagccttcaaggccagccaagactcggaaacgtcaggttggaccccagagtggtgaggtcaggaaggaggccccgagggatgagaccaaggctgacactgacacagccccagcttcattccctgctcctgggtgctgtgagaactgtggaatcagcttctcaggggatggcacccaaaggcagcggctcaaaacgttgtgcaaagactgtcgagcacagagaattgccttcaaccgggaacagagaatgtttaagcgtgtgggctgtggggagtgtgcagcctgccaggtaacagaagactgtggggcctgctccacctgcctcctgcagctgccccatgatgtggcatcggggctgttctgcaagtgtgaacggagacgctgcctccggattgtggaaaggagccgagggtgtggagtatgccggggctgtcagacccaagaggattgtggccattgccccatctgccttcgccctccccgccctggtctcaggcgccagtggaaatgtgtccagcgacgttgcctacggggtaaacatgcccgccgcaagggaggctgtgactccaagatggctgccaggcggcgccccggagcccagccactgcctccaccacccccatcacagtccccagagcccacagagccgcagccctacacgaaccgccggcagaaccgcaagtgcggggcctgtgcagcctgcctacggcggatggactgtggccgctgcgacttctgctgcgacaagcccaaattcgggggcagcaaccagaagcgccagaagtgtcgttggcgccaatgcctgcagtttgccatgaagcggctgctgcccagtgtctggtcagagtctgaggatggggcaggatcgcccccaccttaccgtcgtcgaaagaggcccagctctgcccgacggcaccatcttggccctaccttgaagcccaccttggctacacgcacagcccaaccagaccatacccaggctccaacgaagcaggaagcaggtggtggctttgtgctgcccccgcctggcactgaccttgtgtttttacgggaaggcgcaagcagtcctgtgcaggtgccgggccctgttgcagcttccacagaagccctgttgcaggcagtagacccaggcctgccttctgtgaagcaagagccacctgacccagaggaggacaaggaggagaacaaggatgattctgcctccaaattggccccagaggaagaggcaggaggggctggcacacccgtgatcacggagattttcagcctgggtggaacccgcttccgagatacagcagtctggttgccaagtctgcagggcaggcactcgggaagggaagatggatgtaaagtgtgggagaccgaggacacagtggagcccacgagcacgagctggaacccacgaggatggcctggaacccatgtcagtctctcaccacctccagcttcgatgatgtgggtgtcctgcagaagaagctggtgcccttcctcacagagttagtaatgaactagtccgtaacttgaaagtatttcgatttcttggctttatatatcttgtggaaaggacgatgattgagtggacgggaaggattt

SEQ ID NO: 2473 - DNA, 1805 bp, Homo sapiens
  source 1..1805: mol_type = genomic DNA
accgccaccatggctgaggactggctggactgcccggccctgggccctggctggaagcgccgcgaagtctttcgcaagtcaggggccacctgtggacgctcagacacctattaccagagccccacaggagacaggatccgaagcaaagttgagctgactcgatacctgggccctgcgtgtgatctcaccctcttcgacttcaaacaaggcatcttgtgctatccagcccccaaggcccatcccgtggcggttgccagcaagaagcgaaagaagccttcaaggccagccaagactcggaaacgtcaggttggaccccagagtggtgaggtcaggaaggaggccccgagggatgagaccaaggctgacactgacacagccccagcttcattccctgctcctgggtgctgtgagaactgtggaatcagcttctcaggggatggcacccaaaggcagcggctcaaaacgttgtgcaaagactgtcgagcacagagaattgccttcaaccgggaacagagaatgtttaagagccgagggtgtggagtatgccggggctgtcagacccaagaggattgtggccattgccccatctgccttcgccctccccgccctggtctcaggcgccagtggaaatgtgtccagcgacgttgcctacggggtaaacatgcccgccgcaagggaggctgtgactccaagatggctgccaggcggcgccccggagcccagccactgcctccaccacccccatcacagtccccagagcccacagagccgcaccccagagccctggccccctcgccacctgccgagttcatctattactgtgtagacgaggacgagctaccctacacgaaccgccggcagaaccgcaagtgcggggcctgtgcagcctgcctacggcggatggactgtggccgctgcgacttctgctgcgacaagcccaaattcgggggcagcaaccagaagcgccagaagtgtcgttggcgccaatgcctgcagtttgccatgaagcggctgctgcccagtgtctggtcagagtctgaggatggggcaggatcgcccccaccttaccgtcgtcgaaagaggcccagctctgcccgacggcaccatcttggccctaccttgaagcccaccttggctacacgcacagcccaaccagaccatacccaggctccaacgaagcaggaagcaggtggtggctttgtgctgcccccgcctggcactgaccttgtgtttttacgggaaggcgcaagcagtcctgtgcaggtgccgggccctgttgcagcttccacagaagccctgttgcaggaggcccagtgctctggcctgagttgggttgtggccttaccccaggtgaagcaagagaaggcggatacccaggacgagtggacaccaggcacagctgtcctgacttctcccgtattggtgcctggctgccctagcaaggcagtagacccaggcctgccttctgtgaagcaagagccacctgacccagaggaggacaaggaggagaacaaggatgattctgcctccaaattggccccagaggaagaggcaggaggggctggcacacccgtgatcacggagattttcagcctgggtggaacccgcttccgagatacagcagtctggttgccaaggtattaccaccttgctcttgactggaaatgcaactgtggttaccacctgtgctgcaggtccgtcctggttccctagtaatgaactagtccgtaacttgaaagtatttcgatttcttggctttatatatcttgtggaaaggacgatcggatgcggagggcgcatgtaat

SEQ ID NO: 2474 - DNA, 881 bp, Homo sapiens
  source 1..881: mol_type = genomic DNA
accgccaccatggagcggaagagcccgagcgggaagaagttccgcagcaagccgcagctggcgcgctacctgggcggctccatggacctgagcaccttcgacttccgcacgggcaagatgctgatgagcaagatgaacaagagccgccagcgcgtgcgctacgactcctccaaccaggtcaagggcaagcccgacctgaacacggcgctgcccgtgcgccagacggcgtccatcttcaagcagccggtgaccaagattaccaaccaccccagcaacaaggtcaagagcgacccgcagaaggcggtggaccagccgcgccagctcttctgggagaagaagctgagcggcctgaacgccttcgacattgctgaggagctggtcaagaccatggacctccccaagggcctgcagggggtgggacctggctgcacggatgagacgctgctgtcggccatcgccagcgccctgcacactagcaccatgcccatcacgggacagctctcggccgccgtggagaagaaccccggcgtatggctcaacaccacgcagcccctgtgcaaagccttcatggtgaccgacgaggacatcaggaagcaggaagagctggtgcagcaggtgcggaagcggctggaggaggcgctgatggccgacatgctggcgcacgtggaggagctggcccgtgacggggaggcgccgctggacaaggcctgcgctgaggacgacgacgaggaagacgaggaggaggaggaggaggagcccgacccggacccggagatggagcacgtctagtaatgaactagtccgtaacttgaaagtatttcgatttcttggctttatatatcttgtggaaaggacgaacgatgtcgcaattccactcgcga

SEQ ID NO: 2475 - DNA, 977 bp, Homo sapiens
  source 1..977: mol_type = genomic DNA
accgccaccatggagcggaagaggtgggagtgcccggcgctcccgcagggctgggagagggaagaagtgcccagaaggtcggggctgtcggccggccacagggatgtcttttactatagcccgagcgggaagaagttccgcagcaagccgcagctggcgcgctacctgggcggctccatggacctgagcaccttcgacttccgcacgggcaagatgctgatgagcaagatgaacaagagccgccagcgcgtgcgctacgactcctccaaccaggtcaagggcaagcccgacctgaacacggcgctgcccgtgcgccagacggcgtccatcttcaagcagccggtgaccaagattaccaaccaccccagcaacaaggtcaagagcgacccgcagaaggcggtggaccagccgcgccagctcttctgggagaagaagctgagcggcctgaacgccttcgacattgctgaggagctggtcaagaccatggacctccccaagggcctgcagggggtgggacctggctgcacggatgagacgctgctgtcggccatcgccagcgccctgcacactagcaccatgcccatcacgggacagctctcggccgccgtggagaagaaccccggcgtatggctcaacaccacgcagcccctgtgcaaagccttcatggtgaccgacgaggacatcaggaagcaggaagagctggtgcagcaggtgcggaagcggctggaggaggcgctgatggccgacatgctggcgcacgtggaggagctggcccgtgacggggaggcgccgctggacaaggcctgcgctgaggacgacgacgaggaagacgaggaggaggaggaggaggagcccgacccggacccggagatggagcacgtctagtaatgaactagtccgtaacttgaaagtatttcgatttcttggctttatatatcttgtggaaaggacgacgcgttcccgtgaaggaaagagga

SEQ ID NO: 2476 - DNA, 1010 bp, Homo sapiens
  source 1..1010: mol_type = genomic DNA
accgccaccatgcgcgcgcacccggggggaggccgctgctgcccggagcaggaggagggggagagtgcggcgggcggcagcggcgctggcggcgactccgccatagagcaggggggccagggcagcgcgctcgccccgtccccggtgagcggcgtgcgcagggaaggcgctcggggcggcggccgtggccgggggcggtggaagcaggcgggccggggcggcggcgtctgtggccgtggccggggccggggccgtggccggggacggggacggggccggggccggggccgcggccgtcccccgagtggcggcagcggccttggcggcgacggcggcggctgcggcggcggcggcagcggtggcggcggcgccccccggcgggagccggtccctttcccgtcggggagcgcggggccggggcccaggggaccccgggccacggagagcgggaagaggatggattgcccggccctcccccccggatggaagaaggaggaagtgatccgaaaatctgggctaagtgctggcaagagcgatgtctactacttcagtccaagtggtaagaagttcagaagcaagcctcagttggcaaggtacctgggaaatactgttgatctcagcagttttgacttcagaactggaaagatgatgcctagtaaattacagaagaacaaacagagactgcgaaacgatcctctcaatcaaaataagctgcgctggaacactcatcgtcctgcaccatggcatgcgctttcaagactctgcttgctcatacgctgtttgctctgcttggaatgtgcttacccccttccccttcatctggtgaactcctactcatccaagacccagcttcattgtctccatctctgggaagcctgccctgcatactccaggcagaaccaatcctttcctccatagtaatgaactagtccgtaacttgaaagtatttcgatttcttggctttatatatcttgtggaaaggacgactttctgttaccaccaaacaaacg

SEQ ID NO: 2477 - DNA, 1337 bp, Homo sapiens
  source 1..1337: mol_type = genomic DNA
accgccaccatgcgcgcgcacccggggggaggccgctgctgcccggagcaggaggagggggagagtgcggcgggcggcagcggcgctggcggcgactccgccatagagcaggggggccagggcagcgcgctcgccccgtccccggtgagcggcgtgcgcagggaaggcgctcggggcggcggccgtggccgggggcggtggaagcaggcgggccggggcggcggcgtctgtggccgtggccggggccggggccgtggccggggacggggacggggccggggccggggccgcggccgtcccccgagtggcggcagcggccttggcggcgacggcggcggctgcggcggcggcggcagcggtggcggcggcgccccccggcgggagccggtccctttcccgtcggggagcgcggggccggggcccaggggaccccgggccacggagagcgggaagaggatggattgcccggccctcccccccggatggaagaaggaggaagtgatccgaaaatctgggctaagtgctggcaagagcgatgtctactacttcagtccaagtggtaagaagttcagaagcaagcctcagttggcaaggtacctgggaaatactgttgatctcagcagttttgacttcagaactggaaagatgatgcctagtaaattacagaagaacaaacagagactgcgaaacgatcctctcaatcaaaataagggtaaaccagacttgaatacaacattgccaattagacaaacagcatcaattttcaaacaaccggtaaccaaagtcacaaatcatcctagtaataaagtgaaatcagacccacaacgaatgaatgaacagccacgtcagcttttctgggagaagaggctacaaggacttagtgcatcagatgtaacagaacaaattataaaaaccatggaactacccaaaggtcttcaaggagttggtccaggtagcaatgatgagacccttttatctgctgttgccagtgctttgcacacaagctctgcgccaatcacagggcaagtctccgctgctgtggaaaagaaccctgctgtttggcttaacacatctcaacccctctgcaaagcttttattgtcacagatgaagacatcaggaaacaggaagagcgagtacagcaagtacgcaagaaattggaagaagcactgatggcagacatcttgtcgcgagctgctgatacagaagagatggatattgaaatggacagtggagatgaagcctagtaatgaactagtccgtaacttgaaagtatttcgatttcttggctttatatatcttgtggaaaggacgaatacaggatagatgaagcacttct

SEQ ID NO: 2478 - DNA, 7622 bp, Homo sapiens
  source 1..7622: mol_type = genomic DNA
accgccaccatggaggtgcttcagtgtgatggctgtgatttccgagccccgtcttatgaagatctcaaggcacacattcaggatgtccacacggcatttctgcagccaactgatgttgctgaggacaatgtgaatgagctacgatgtgggtccgtgaatgccagtaatcagacagaggtggagttttcttctataaaggatgaatttgccattgcagaagatttatcaggtcaaaatgcaacttcattggggaccggaggttactatggccacagtccaggatattatggtcagcatattgccgctaatcccaaaccaacaaacaagttttttcaatgcaagttctgtgtacgctacttcaggtcaaaaaacctcctcatagaacacactagaaaggtccatggagctcaagctgaagggagttcatcaggaccccctgtcccgggatccttaaattataatatcatgatgcacgagggatttggaaaggtcttctcttgccagttttgcacatacaagtcaccaagaagggcaagaataattaagcatcagaagatgtatcacaaaaacaatttgaaggagaccactgctcccccacctgctcctgctccaatgccagaccctgtggttccgcccgtatcactgcaggacccctgcaaggaactgccagcagaggttgtggagcgcagcatcttagagtctatggtcaagcctttgaccaaatctcgaggcaacttttgttgtgagtggtgcagctaccagaccccccgccgagaacgctggtgtgaccacatgatgaagaaacaccgcagtatggtcaagatcctttccagtctcagacagcaacaagaaggaactaatctacctgatgtgccgaacaagagtgcccccagccccacttccaactccacctatctgaccatgaatgctgcaagccgggagatacccaatactaccgtctccaacttcaggggctccatgggcaactccatcatgagacccaattcttcagcttccaagttttcgcccatgtcttaccctcagatgaagccgaagtcacctcacaattctggtctagttaacttgacagagagatcccgttatggaatgactgacatgaccaattcttctgctgacctggaaactaacagcatgctaaatgactctagttctgatgaagagttaaatgaaatagacagtgagaatggtttaagtgctatggatcaccagacatcaggcctgtctgcagagcagctgatgggctcagatggcaacaaattattggagaccaaggggattccatttagaagattcatgaataggttccagtgccccttttgtcctttcctcaccatgcatcgacgtagcatctctcgtcacatagaaaacatccacttatctggaaagacagctgtctacaaatgtgacgaatgtccgtttacttgcaagagctcgttgaaacttggggctcacaaacagtgtcacacgggtacaacgtcagattgggatgctgtgaattcccagagtgaaagcatttcttcctcactgaatgaaggtgtggtgtcttatgagagctcaagcatcaatggtagaaagtcaggagtcatgttggatcccttgcagcagcaacagccaccgcagccaccaccaccgccgccgccaccaccaccatcacagccacagccactgcagcagccacagccaccacagctgcagccaccacatcaggtgccaccccagccacaaacacagccaccaccaacgcagcagccacagccacccacacaagccgcacctctgcacccatacaaatgcaccatgtgtaattactccaccacaactctgaaagggctaagagtccatcagcagcataaacattcattctgtgacaacttgccaaaattcgaggggcagccctcaagcctaccattggaaaatgagacagacagccacccctcttccagcaacactgtgaagaaaagtcagacctcaattcttgggttgtcctccaagaacaattttgtagctaaagcctctaggaagctcgccaatgactttcctctagatttgtcacccgtgaagaagagaaccaggattgacgagatagcaagcaaccttcagagcaaaattaaccaaaccaaacagcaggaagatgcagtgatcaatgttgaggatgatgaagaggaagaggaagacaacgaagtcgagatagaggttgagttggacagggaggaagaaccgacagaacccatcatagaggttcccacttccttttctgcccaacagatatgggtaagagataccagtgagccccagaaagagcccaacttcagaaacatcacccacgattacaatgccaccaatggggctgagattgagctcaccctttctgaagatgaagaggattattatggctcctcaacaaacttgaaagatcaccaagtttccaatactgctctgctgaatacccaaactcccatctatgggactgagcacaatagtgaaaacacagactttggtgactctggaaggctttactattgtaaacactgtgactttaacaacaaatctgcccggagtgttagcacccactaccaacgaatgcacccatacattaaattcagctttaggtacatcttggaccccaatgatcacagtgcagtgtacaggtgcctggaatgctacatcgattacaccaacttcgaagatctccagcagcattatggcgagcaccacccagaagccatgaatgtactcaactttgatcactcggacctgatctaccggtgtcggttttgttcatacacgagcccgaatgttagaagcctgatgccacattaccaaagaatgcatcccacggtgaagatcaacaacgcgatgatattttcaagctatgtcgtggagcagcaggaagggctgaatacagaatcccagaccctgagggagattctgaattcggctcccaagaacatggcgacttccacacctgtggctcgtggtggtggtttgccagctacgttcaacaaaaacactcctaagacctttactcctgaatgtgaaaatcagaaggaccctttggtcaacactgttgttgtttatgattgtgatgtttgttcgtttgcaagccccaacatgcattctgtcttggttcattatcagaagaaacaccccgaagaaaaggcttcctactttaggatccagaaaactatgcgaatggtgtctgtggacaggggctctgccctttctcaattatcatttgaggtgggtgctccaatgtctcccaaaatgtccaacatgggttccccaccccccccacaacccccgccaccagacctcagtactgagctttactactgcaaacactgttcctacagcaatcggtcagttgtgggagtgcttgtccactaccagaaaagacacccagaaataaaggttactgccaaatatatcagacaggctcctcccacagctgcaatgatgagaggggtcgaagggccccaaggctccccccggccacccgcccccatacaacagctgaaccgaagcagctctgagagagatggccctcctgtggagaatgagatgttcttttgccagcactgtgattatgggaaccggacggtcaaaggggtactcattcattatcagaagaagcaccgagacttcaaggccaatgcagatgtgatccggcagcatacggccaccattcgaagcctctgcgaccgaaatcagaagaagcctgccagctgcgtgcttgtctccccctctaatctggagcgggacaaaacgaaactccgagcactcaaatgtaggcagtgctcatatacctccccctacttctatgcactgaggaagcatatcaagaaagaccaccccgccctgaaagccacagtcacgtccatcatgcgatgggcatttctagatggcttgatagaagctggctaccactgcgagtggtgcatctactcccatacggagcccaacggtttgctcctgcattaccaacggaggcatccagaacactatgttgattacacctacatggctactaaactgtgggctgggccagacccatcccctccctctctcacaatgccagccgaagccaaaacctacagatgcagggactgtgttttcgaagctgtttccatctgggacatcactaatcactaccaagcattccacccctgggccatgaatggtgatgagtcagtgctactggacatcatcaaggagaaagatgctgtggagaagcccattctttcatccgaagagttggcaggccctgtgaattgtgaaaacagtatacccacccctttcccggagcaggaagctgaatgtccagaggatgcaagactgtcccctgagaaaagcctgcagctagcttcagccaaccccgccatatcctccaccccataccagtgcacggtatgccaatctgagtataacaacttgcacggccttctcactcattatgggaagaagcaccctggcatgaaagtgaaggctgctgactttgcccaggacattgacatcaacccaggtgccgtctacaaatgcaggcattgcccatacatcaacacccgcatccacggcgtactgacccactaccagaagcgacacccgtccatcaaggtgaccgctgaggactttgtgcacgacgtagagcagtctgctgacatatcccagaatgacgtggaggagacgagcaggatcttcaagcaagggtatggcgcctaccggtgcaaactgtgtccgtacacacacggcactttggagaaactaaaaatccactacgagaagtatcacaatcagcctgaatttgatgtcttttcccagtcgcccccgaagctgccagtccccctcgagcccgagatgaccactgaagtgagcccttcccaagtctccatcactgaggaggaggtgggagaggagcccgtgtccacttctcacttctctacctcccacctggtctcccacactgtgttccggtgccagctctgcaagtacttctgctccacgaggaaggggatcgccaggcactaccgcatcaagcacaataatgtccgagcccagccagaaggcaagaacaacctcttcaagtgtgccctgtgtgcctacaccaaccccatccgcaaaggtctggcagcccactaccagaagcgccacgacattgatgcgtattacactcactgcttggcagcctccaggaccatcagcgacaagcccaacaaagtgatcatcccatccccgcccaaggacgactcccctcagctgagcgaggaactccggcgggcagtggagaagaaaaagtgctccttgtgctctttccagtcgttcagcaagaagggcatcgtgtcccattacatgaaacgccacccaggggtgttcccaaagaagcagcacgccagcaagttggggggctacttcacggccgtctatgcagatgagcatgagaagcccacactgatggaagaagaggagagaggcaactttgagaaagccgaggtggagggtgaagctcaggaaatcgagtggctcccattccgctgcatcaaatgcttcaagctgtcctttagcactgcagagctgctgtgcatgcattacactgaccaccacagtcgggacctaaagagggacttcatcattctgggcaacggcccccgcttgcagaactccacctaccagtgtaagcactgtgatagcaaactgcaaagcacagccgagctgacctcacacttgaacattcacaatgaggaattccagaagcgtgccaaacgtcaggagaggaggaaacagcttttgagcaagcagaaatatgcagatggtgcttttgcagatttcaaacaagagaggccttttggtcacttagaagaggtgccaaagatcaaggagaggaaagtggtgggctacaaatgtaaattctgtgtggaagtgcacccaacgctccgagccatctgcaatcacctccgaaagcacgtccagtatggcaatgtcccagctgtgtcagctgctgtgaaggggctgcgttctcatgagaggagccacctggccctggccatgtttacccgcgaggacaagtacagctgccagtattgctcgtttgtttctgctttcaggcacaatttggatcgccatatgcaaacccaccacggacaccataaaccattccgatgcaaactctgctccttcaagtcctcctataacagccggctgaaaacacatatactcaaagctcatgctggtgagcatgcctacaagtgttcttggtgctcattctccaccatgacaatcagccagctgaaggaacactccctcaaggtccacggaaaagccctgaccctccccaggccacggatcgtcagtctcctctcctcacactcccaccactcctcccaaaaagctaccccggctgaagaagtggaagactccaatgactcatcatattcagagcccccagatgttcagcagcagttgaaccactatcagtcagctgccctggcaaggaacaacagccgtgttagccctgtgcctctttctggggctgctgctggcactgagcagaaaactgaagccgtgcttcactgcgaattctgtgaattctcctccggctacatccagagcatcaggcgtcattaccgggacaagcatggtgggaagaagcttttcaagtgcaaagactgctccttttacacaggctttaaatctgcttttactatgcacgtggaagctgggcactcagcagttcccgaggagggccccaaagatcttcgctgtcctctctgcctctatcacaccaaatacaagcgcaacatgattgaccacatcgtgctgcaccgagaagagcgtgttgtccccattgaagtttgccggtccaaactgtccaaatacttgcagggagtagttttccgctgtgataagtgtaccttcacctgctccagtgatgagagcctccagcaacatatagaaaagcacaatgaactgaaaccttacaaatgccagctctgctactatgagaccaagcacacggaggaactggacagccaccttcgggatgagcataaggtaagccgtaactttgagctggttggacgggttaacttggatcagctggaacagatgaaggagaaaatggagagctccagcagcgatgatgaggacaaggaagaagaaatgaacagcaaggctgaagacagagagctgatgagattttctgaccacggggctgctcttaacactgagaagcgttttccatgtgaattttgtggacgggcgttttcacagggctctgagtgggaaagacatgtgctgagacacggcatggcattgaatgacaccaagcaggtgagcagagaagaaatccacccaaaagagatcatggagaacagtgttaaaatgccctccatagaggaaaaggaagatgacgaggccattgggatagacttttccctaaagaatgaaacagtagccatctgtgtagtaactgccgacaaatctctcctggagaatgcagaggccaaaaaagaatagtaatgaactagtccgtaacttgaaagtatttcgatttcttggctttatatatcttgtggaaaggacgaggattgctagctcgctatgccggg

SEQ ID NO: 2479 - DNA, 1178 bp, Homo sapiens
  source 1..1178: mol_type = genomic DNA
accgccaccatggaaagcctcagagggaatactgctcagggtcctacaaatgaagaagactataaaaacgaaggccaattatcaaggcaaacaaaatgtcctgcacagaagaaatcctcttttgagaacacagtggtcagaaaagtgtcagtgacactcaaagaaattttcacaggggaggaaggccctgaatccagtgaatttagtctaagcccaaaccttgacgcacaacagaaaattccaaagggacatggatccccaatatctaggaaaaactccaaagataattcagacttaattaaacaccaaagacttttctcacaaagaaaaccttgtaaatgcaatgaatgtgaaaaagcctttagttaccaatcagaccttcttgtacacagtagaattcatggtggagaaaagccttttgaatgcaacaaatgtgggaaatctttcagccgaagtacacaccttattgaacatcaaagaactcacactggagagaaaccttatgaatgcaatgaatgtggaaaagcttttagccggagcacacatcttagtctacatcagagaatccatactggagaaaaaccatatgaatgtagtgaatgtggaaaagcctttagccgaagcactaaccttagtcagcatcagcgaactcatactcaagaaaggccttacaaatgtaatgaatgtgggaaagccttcggtgaccgttcaaccataattcagcatcaacgaatacacactggagagaatccctatgaatgcagtaaatgtggaaaagctttcagttggatctcatcgcttactgaacatcagagaacacacactggggagaacccctatgagtgcagtgaatgtgggaaagtgttcagtcgaagctcgtctcttacagaacatcagagaatccacagtggagaaaagcctcacgagtgtagagtgtgtggaaagggcttcagtcgaagctcatcccttattattcatcagagaactcataccggggagaagccgtacaaatgtaatgactgtggaaaagccttctgtcagagttcaactctgatcagacatcagcaccttcatactaaagagtagtaatgaactagtccgtaacttgaaagtatttcgatttcttggctttatatatcttgtggaaaggacgacgcttgaagttcttcgtgctctcc

SEQ ID NO: 2480 - DNA, 1667 bp, Homo sapiens
  source 1..1667: mol_type = genomic DNA
accgccaccatgctggagacctgtgggcttctggtcgcactgggtgacagcacaaaacctgagaccgtagagcctatcccttctcatctggccttgcctgaggaagtctcactccaggaacagctggcacagggagtcccaagatactcctatttggggcaggccatggatcaagatgggccatctgaaatgcaggaatactttttgagaccagggacagacccacagagtgagaaactccatgggaaaatgagccttgaacacgaaggtttggcgacagctgatggtatttgttcaatgatgatacagaaccaagtctcaccagaagatgctctctatggatttgactcatatggaccagttacagattccttgattcatgaaggggaaaattcctataaattcgaggaaatgtttaatgagaattgcttccttgttcagcatgagcagattctccctcgtgtgaagccctatgattgcccagaatgtgggaaagccttcggcaagagcaaacacctccttcagcatcacatcatccatactggggagaagccctataaatgcctggagtgtgggaaagacttcaaccgcaggtcacacctcacacggcaccagcggactcacaatggagataagccctttgtgtgcagtgaatgtggaaggaccttcaatcgcgggtcgcaccttacacggcaccagcgggttcacagtggagagaagccttttgtgtgcaatgaatgtggaaaggcctttacctaccgctccaattttgtcttgcataacaagagccacaatgagaagaaacccttcgcatgcagcgaatgtggaaaaggcttttatgagagtacagccctcattcaacacttcattatccatactggggagaggccctttaagtgccttgagtgtgggaaggccttcaactgcaggtcacacctcaagcagcatgagcggattcacactggtgagaagccctttgtgtgcagtcaatgtggaaaggccttcactcactattccacctatgtcctgcatgaaagagcccacactggagaaaagccttttgagtgcaaagaatgtgggaaagcctttagcattcgaaaagacctcattcgacacttcaacatccacactggagagaagccctatgagtgtttacagtgtggaaaggcttttacccgcatgtcagggctcacaaggcaccagtggattcatactggagagaagccgtatgtatgcatccaatgtgggaaagccttttgtcggaccacaaacctgattcgacactttagcatccacactggagagaagccctatgaatgcgtggagtgcgggaaggccttcaaccgcaggtcacccctcacaaggcaccagcggattcacactgcagagaagtcccacgaacccatccagagtgggaacgtttcttgtgagagcacagatctcattcaacactccatcatccacactgagagtagcccagtgagtgcagtgaatatggaaacgccttcaattgccgctcattcctcctcactcgacatcaacggattcatagtggaagaaaccctaccattgtagtaatgaactagtccgtaacttgaaagtatttcgatttcttggctttatatatcttgtggaaaggacgaagacaatgtcgttcgcggtatgag

SEQ ID NO: 2481 - DNA, 1724 bp, Homo sapiens
  source 1..1724: mol_type = genomic DNA
accgccaccatggcccatgagttggtgatgttcagagatgtggctatagatgtctctcaggaggaatgggaatgcctgaacccagcgcagaggaatttgtacaaggaggtgatgttggagaattatagcaacttggtgtcacttggactttctgtttctaagccagccgtaatctcctcattggagcaagggaaggagccctggatggttgtgagggaagagacaggaagatggtgcccagacttggcatccagagatgagccccagaagttatctccaaaaagggatatttatgaaacagaattatcccagtgggttaacatggaagaatttaaaagccatagtcctgagagatcaattttcagcgctatctgggaaggcaactgtcattttgagcaacatcagggacaagaggagggttattttagacaacttatgattaaccatgaaaacatgcccatttttagccaacatactttactcactcaagaattttatgatagagagaaaatctctgaatgtaaaaagtgtagaaaaatcttcagttaccatttattttttagtcaccacaaaagaactcattctaaagaactttctgaatgtaaagaatgcacagaaattgttaatacaccatgcctttttaaacaacagacaattcaaaatggtgacaaatgcaatgagtgtaaagaatgttggaaggcctttgttcattgctcacaacttaaacatctaagaattcataatggtgaaaaacgctatgaatgtaacgaatgtgggaaggcctttaattatggctcagaacttactctacatcaaagaattcacactggtgagaaaccttatgaatgtaaagaatgtgggaaggcctttagacagcgatcacagcttactcaacatcagagacttcatactggtgaaaaaccctatgaatgtaagcaatgtgggaaggcttttattcgtggctttcaacttactgaacacctgcgactccatactggagagaaaccttatgaatgtaaagaatgtggaaagacttttaggcatcgctcacatcttactatacatcagagaattcatactggtgagaaaccctatgaatgtcgggaatgtgggaaggcctttagctatcactcaagcttctcacaccatcagaaaattcattctggcaagaaaccttatgaatgtcatgaatgtgggaaggctttttgtgatggcttacaactaaccctacatcagaggattcatactggtgagaaaccctatgagtgtaaggaatgtgggaagacttttagacagtgttcacacctcaaaagacatcagagaattcatactggtgagaaacctcatgaatgcatgatatgtggtaaggcctttagacttcattcacaccttattcaacatcaaagaattcatactggtgagaaaccctatgaatgtaaggaatgtgggaaggcctttagctatcattcaagcttctcacaccatcagagaattcattctggaaagaaaccttatcaatgcgggaaggcgtttaatcatagattacaacttaacttacatcagactcttcatactggcgagaagccagtcaggtttcctctcctccctccccatcctagtctagcatcatagtaatgaactagtccgtaacttgaaagtatttcgatttcttggctttatatatcttgtggaaaggacgaacaggcatctggaaagcggctctg

SEQ ID NO: 2482 - DNA, 1793 bp, Homo sapiens
  source 1..1793: mol_type = genomic DNA
accgccaccatggcccatgagttggtgatgttcagagatgtggctatagatgtctctcaggaggaatgggaatgcctgaacccagcgcagaggaatttgtacaaggaggtgatgttggagaattatagcaacttggtgtcacttggactttctgtttctaagccagccgtaatctcctcattggagcaagggaaggagccctggatggttgtgagggaagagacaggaagatggtgcccaggtacatggaaaacttggggatttcacaataatttcttggacaataatgaggctacagacataaatgcagacttggcatccagagatgagccccagaagttatctccaaaaagggatatttatgaaacagaattatcccagtgggttaacatggaagaatttaaaagccatagtcctgagagatcaattttcagcgctatctgggaaggcaactgtcattttgagcaacatcagggacaagaggagggttattttagacaacttatgattaaccatgaaaacatgcccatttttagccaacatactttactcactcaagaattttatgatagagagaaaatctctgaatgtaaaaagtgtagaaaaatcttcagttaccatttattttttagtcaccacaaaagaactcattctaaagaactttctgaatgtaaagaatgcacagaaattgttaatacaccatgcctttttaaacaacagacaattcaaaatggtgacaaatgcaatgagtgtaaagaatgttggaaggcctttgttcattgctcacaacttaaacatctaagaattcataatggtgaaaaacgctatgaatgtaacgaatgtgggaaggcctttaattatggctcagaacttactctacatcaaagaattcacactggtgagaaaccttatgaatgtaaagaatgtgggaaggcctttagacagcgatcacagcttactcaacatcagagacttcatactggtgaaaaaccctatgaatgtaagcaatgtgggaaggcttttattcgtggctttcaacttactgaacacctgcgactccatactggagagaaaccttatgaatgtaaagaatgtggaaagacttttaggcatcgctcacatcttactatacatcagagaattcatactggtgagaaaccctatgaatgtcgggaatgtgggaaggcctttagctatcactcaagcttctcacaccatcagaaaattcattctggcaagaaaccttatgaatgtcatgaatgtgggaaggctttttgtgatggcttacaactaaccctacatcagaggattcatactggtgagaaaccctatgagtgtaaggaatgtgggaagacttttagacagtgttcacacctcaaaagacatcagagaattcatactggtgagaaacctcatgaatgcatgatatgtggtaaggcctttagacttcattcacaccttattcaacatcaaagaattcatactggtgagaaaccctatgaatgtaaggaatgtgggaaggcctttagctatcattcaagcttctcacaccatcagagaattcattctggaaagaaaccttatcaatgcgggaaggcgtttaatcatagattacaacttaacttacatcagactcttcatactggcgagaagccagtcaggtttcctctcctccctccccatcctagtctagcatcatagtaatgaactagtccgtaacttgaaagtatttcgatttcttggctttatatatcttgtggaaaggacgattggctggagaatgtctgaaatca

SEQ ID NO: 2483 - DNA, 590 bp, Homo sapiens
  source 1..590: mol_type = genomic DNA
accgccaccatgaattccagcttgaccgcccagaggcgcggcagtgacgccgagttgggaccctgggtgatggctgcgaggtccaaggacgcggcgccgtcccaacgcgacggacttttgcccgtgaaagtggaggaagactcacccggaagttgggagcccaactatcccgcggcttcgccggaccccgaaacttctcgactgcactttaggcagctgcgttaccaggaggtggctggaccggaagaggcgctgagccggctccgagaactctgtcgtcggtggctgagacccgagctgctctccaaggagcagatcctggagctgctggtgctggagcagttcctcaccatcctgcccgaggagcttcaagcctgggtgcgagagcactgcccagagagcggggaggaggcggtggccgtggtgcgggctctgcagcgagcgctcgatggaacctcatcccaggtttggaaagcagagtggagaacaaagagttagtaatgaactagtccgtaacttgaaagtatttcgatttcttggctttatatatcttgtggaaaggacgatagttctaccctatgctcgatgat

SEQ ID NO: 2484 - DNA, 734 bp, Homo sapiens
  source 1..734: mol_type = genomic DNA
accgccaccatgtctgcaaaattgggaaagtcatcatcactcctaacacaaacttcagaggagtgtaatgggattctgacagagaagatggaagaggaagagcagacctgtgatccagactctagcctccactggagcagcagctacagcccagagaccttccgccagcaattcaggcagtttggctaccaggattcacctgggccccatgaggctctgagccggctctgggaactttgtcatctctggctgaggccggaagtgcacaccaaggagcagatcctggagctgctggtgctggagcagttcctggccatcctcccaaaagagcttcaggcctgggtgcagaagcatcatccagagaatggagaggaaactgtgactatgctggaggatgtggagagagagcttgatggaccaaagcagatcttttttggacgaaggaaggacatgattgcagagaagctagcaccttcagaaatcactgaggaattgccaagtagccagctcatgcccgtgaagaagcagctccagggagcatcatgggagcttcagtccttaagaccacatggtgagggggcaggattcagttcatgttggaaggtgtgggggccctctgctcaccacacacatctcagctagtaatgaactagtccgtaacttgaaagtatttcgatttcttggctttatatatcttgtggaaaggacgatggacgtggtacgcgccgcatagt

SEQ ID NO: 2485 - DNA, 1109 bp, Homo sapiens
  source 1..1109: mol_type = genomic DNA
accgccaccatgtctgcaaaattgggaaagtcatcatcactcctaacacaaacttcagaggagtgtaatgggattctgacagagaagatggaagaggaagagcagacctgtgatccagactctagcctccactggagcagcagctacagcccagagaccttccgccagcaattcaggcagtttggctaccaggattcacctgggccccatgaggctctgagccggctctgggaactttgtcatctctggctgaggccggaagtgcacaccaaggagcagatcctggagctgctggtgctggagcagttcctggccatcctcccaaaagagcttcaggcctgggtgcagaagcatcatccagagaatggagaggaaactgtgactatgctggaggatgtggagagagagcttgatggaccaaagcagatcttttttggacgaaggaaggacatgattgcagagaagctagcaccttcagaaatcactgaggaattgccaagtagccagctcatgcccgtgaagaagcagctccagggagcatcatgggagcttcagtccttaagaccacatgatgaagacatcaaaactacaaatgtgaaatctgcttcaaggcaaaagacttctttaggcatagaactgcattgcaatgtttccaatatccttcatatgaatggctcccagagttccacatatagaggaacctatgaacaagatggtaggtttgaaaagagacaaggaaacccttcttggaaaaaacaacagaaatgtgatgaatgtggcaaaatctttagtcagagctcagcccttattttacatcagagaatccacagtggaaagaaaccttatgcatgtgacgagtgtgcaaaggcattcagccgaagcgcaattctgattcagcatcgacgaacccatactggtgagaagccctacaagtgtcatgactgtggcaaagcctttagtcagagctcaaatctttttagacataggaaaagacacattagaaaaaaagtcccatagtaatgaactagtccgtaacttgaaagtatttcgatttcttggctttatatatcttgtggaaaggacgagaaaccacaatgtgcgggagtccc

SEQ ID NO: 2486 - DNA, 1103 bp, Homo sapiens
  source 1..1103: mol_type = genomic DNA
accgccaccatgtctgcaaaattgggaaagtcatcatcactcctaacacaaacttcagaggagtgtaatgggattctgacagagaagatggaagaggaagagcagacctgtgatccagactctagcctccactggagcagcagctacagcccagagaccttccgccagcaattcaggcagtttggctaccaggattcacctgggccccatgaggctctgagccggctctgggaactttgtcatctctggctgaggccggaagtgcacaccaaggagcagatcctggagctgctggtgctggagcagttcctggccatcctcccaaaagagcttcaggcctgggtgcagaagcatcatccagagaatggagaggaaactgtgactatgctggaggatgtggagagagagcttgatggaccaaagcagatcttttttggacgaaggaaggacatgattgcagagaagctagcaccttcagaaatcactgaggaattgccaagtagccagctcatgcccgtgaagaagcagctccagggagcatcatgggagcttcagtccttaagaccacatgatgaagacatcaaaactacaaatgtgaaatctgcttcaaggcaaaagacttctttaggcatagaactgcattgcaatgtttccaatatccttcatatgaatggctcccagagttccacatatagaggaacctatgaacaagatggtaggtttgaaaagagacaaggaaacccttcttggaaaaaacaacagaaatgtgatgaatgtggcaaaatctttagtcagagctcagcccttattttacatcagagaatccacagtggaaagaaaccttatgcatgtgacgagtgtgcaaaggcattcagccgaagcgcaattctgattcagcatcgacgaacccatactgattcaaaatatgaacatgcgattgcagaggcccaaaagaatatgtacttcaagactaggctgaagtgccccaggtcactttcaggaggcagatagtaatgaactagtccgtaacttgaaagtatttcgatttcttggctttatatatcttgtggaaaggacgagagttgtaagcccgagaagttgct

SEQ ID NO: 2487 - DNA, 1706 bp, Homo sapiens
  source 1..1706: mol_type = genomic DNA
accgccaccatggctgtggaatctggagtgatttcaaccctgatacctcaggatcctccggaacaagaactaatactagtgaaagtagaagataacttttcctgggatgagaaatttaagcagaatgggagtactcaatcctgccaagaattgtttcgtcagcaattcagaaaattttgctaccaggagacacctgggccccgggaggctctgagccgactccaggaactttgctatcagtggctaatgccagagttgcacacaaaggagcagatcttagaactgctggtactggagcagttcctgagcattctgcctgaggagctgcagatctgggttcagcaacataatccagaaagcggcgaggaagctgtgaccctgttggaggatttagagagggagtttgatgacccagggcagcaggtcccagctagtccacagggaccagcagtgccatggaaggatttaacatgtctcagagcatcccaagagtcaacagacatccacctccagcccttaaagacacagctgaaatcctggaaaccatgcctttcccctaaaagtgattgtgagaacagtgaaacagcaacaaaagagggcatctcagaagaaaaatcacagggactccctcaggaaccttcatttcgaggaattagtgagcatgaaagcaatttagtgtggaagcaaggaagtgctacaggggagaaactaagatctccttcccaagggggcagttttagtcaagtgatcttcacaaacaaatctctaggaaagagagacctttatgatgaggctgaaagatgcttgattctaactacagactctataatgtgtcagaaagttcctccagaagagagaccttatagatgtgatgtatgtgggcacagcttcaagcagcattcctctctaacacaacatcagagaatccatactggagaaaagccctataaatgtaaccagtgtgggaaggcctttagtttgaggtcctatcttattattcatcagagaattcatagtggtgagaaagcatatgaatgtagtgaatgtgggaaagctttcaatcagagctcagccctcattagacatcggaaaatccatactggtgagaaagcttgtaaatgtaatgagtgtggcaaagcattcagtcaaagttcatatctcattatacatcaaagaattcacactggtgagaaaccttatgagtgtaatgaatgtgggaaaacctttagccagagctcaaaactcattagacatcagcgaattcacacaggagagagaccctatgaatgtaatgaatgtggaaaagctttcaggcagagctcagagctgattactcatcagagaatacatagtggagagaaaccctatgaatgtagtgaatgtggaaaagctttcagtttgagctcaaaccttatcagacatcagagaattcatagtggggaggaaccttatcagtgtaatgaatgtggcaaaactttcaaaaggagctcagcccttgttcagcatcagagaattcattctggggatgaagcttatatatgtaatgaatgtgggaaggctttcaggcacagatcggtccttatgcgccatcaaagagtccacactataaagtagtaatgaactagtccgtaacttgaaagtatttcgatttcttggctttatatatcttgtggaaaggacgactagtgctagtgtataccgtgctc

SEQ ID NO: 2488 - DNA, 3557 bp, Homo sapiens
  source 1..3557: mol_type = genomic DNA
accgccaccatgtcccggcgaaagcaaagcaaaccccggcagatcaaacggccgcttgaagatgccattgaagatgaggaagaagaatgtccatcagaggaaacagacatcatctccaaaggagactttccattggaggaaagcttttccacagaatttgggcctgaaaatctgagctgcgaagaagtggaatacttttgtaacaaaggtgatgatgaaggaatccaggagacagcagaatcagatggggacacacagtcagagaaaccggggcaacctggagttgagacagacgactgggatggaccaggagagctggaggtgtttcagaaagatggggaacgaaaaattcagagtcgacagcaacttccagtgggaacaacctgggggccgtttcctgggaagatggacttgaataataattctttgaagacaaaggctcaggtcccaatggtgctgactgctggtcccaagtggttgctggatgtgacttggcaaggagtggaagacaacaaaaacaactgcattgtgtacagcaaagggggtcagctttggtgtacaactacgaaggccatctctgagggtgaagagctaattgcctttgtggtggattttgactcaaggctacaagctgccagtcagatgactctcacagaagggatgtaccctgcacgcctgctggactcaattcagctgcttcctcagcaagctgccatggcttctattttgcccacagctattgtcaataaggatatattcccttgcaagtcctgtggcatctggtatcggagtgagcggaatctgcaggcccatttgatgtactactgcagtgggaggcaaagagaagctgctccggtgtcagaggaaaatgaagacagtgcccatcagatttccagcctgtgccccttcccacagtgcaccaagagcttttcaaatgctcgagctctagaaatgcacctgaattcacacagtggagtgaaaatggaagaattcctgccccctggtgctagtctaaaatgcaccgtctgtagctacactgctgattccgtgatcaactttcaccaacacctgttctcccatctcactcaagctgccttccgatgtaatcactgccatttcggcttccagactcagagggagttattgcagcaccaggagctccatgtccctagcggcaaacttcccagagaaagtgacatggaacactctccaagtgcaactgaagacagcttacagccagccacagacttattgaccagaagcgaacttccccagagccaaaaggccatgcagactaaagatgcgagctctgacacagagctggacaagtgtgagaaaaagactcagctctttctcacgaaccagagaccagagatacagcctacaacaaataaacaaagcttttcttacacaaaaataaagtctgagccctctagcccaagacttgcctcatctccagttcagcctaatattgggccttctttccctgtgggccctttcctatctcagttttctttcccccaagatatcaccatggtccctcaagcttcagagatcttagctaagatgtctgaactggtgcatcggcgactgaggcatggcagtagtagctaccctcccgtcatttacagccctttgatgcccaagggggctacttgttttgagtgtaacataacattcaataatttggataattatctagtgcacaaaaagcattattgcagcagccgatggcagcagatggctaagtccccagagttccctagtgtgtcagaaaagatgcctgaagctttgagtcccaacactggccaaacctccataaaccttctcaacccagctgctcattctgctgatcctgagaatccacttcttcaaacatcttgcatcaattcttccactgtcttagatttaattgggccaaatgggaagggccatgacaaggacttttccactcaaactaagaagctctccacctccagtaacaatgatgacaaaattaatggaaaacctgttgatgtgaaaaatcccagtgtccccttagtggatggggaaagtgacccaaataagactacctgtgaagcttgcaacattaccttcagccggcacgaaacatacatggtccacaaacagtattactgtgctacacgccacgaccctccactgaagaggtctgcttccaacaaagtgcctgccatgcagagaaccatgcgcacacgcaagcgcagaaagatgtatgagatgtgcctacctgagcaggaacaaaggcctccactggttcagcagagatttcttgacgtagccaacctcaataatccttgtacctccactcaagaacccacagaagggctaggagagtgctaccacccaagatgtgatatctttccaggaattgtctctaaacacttggaaacttctctgacgatcaacaagtgtgttccagtttccaaatgtgatactactcattccagtgtttcctgcctagagatggacgtgcccatagatctcagcaaaaagtgtttatctcagtctgagcggacgaccacgtctcccaaaaggctgctggactatcacgagtgcactgtgtgcaagatcagtttcaataaggtagaaaactatctggcccacaagcagaatttctgcccggttactgcacatcagcgtaatgacctgggtcaactggacggcaaagtgtttccgaatccagaaagcgaacgaaacagccctgatgtcagctacgaaagaagcataataaaatgtgagaaaaatgggaatttgaagcagccttcccccaatggaaacttattttcatcccacctagcaaccctgcaaggcttgaaggtctttagtgaagctgctcagctcattgctacaaaagaagaaaacagacatttgtttcttccacaatgcctttaccctggagcaataaagaaagcaaaaggagccgaccagctttctccatattatggaatcaagccaagtgattatatttctggttctcttgtcatccataacactgacatcgagcaaagcagaaatgcagaaaatgaatctcctaaaggccaggcttcctcaaatgggtgtgctgcgctgaagaaagattctctgccattgttgcccaaaaatcgaggaatggtaatagtgaatggtggactgaaacaagatgagagacctgctgccaacccacagcaagagaacatttcccagaatcctcagcacgaagacgaccacaaatctccctcgtggatctctgagaacccattagctgccaatgagaatgtctcaccaggaattccctcagcagaggaacagttgtctagtatagcaaaaggtgtgaatggttccagccaggctccaaccagtgggaaatattgccggctatgtgatatccagttcaacaacctttcaaactttataactcacaagaagttttattgctcatcacatgcagcagaacatgtcaaatagtaatgaactagtccgtaacttgaaagtatttcgatttcttggctttatatatcttgtggaaaggacgatgtcccgtatggccactgcaagta

SEQ ID NO: 2489 - DNA, 3122 bp, Homo sapiens
  source 1..3122: mol_type = genomic DNA
accgccaccatgtccaggcggaaacagagcaacccccggcagatcaagcgttccctcggagacatggaggccagagaggaggtgcagttggtgggtgccagccacatggagcaaaaggccacggcacctgaagccccgagccctcccagcgcagatgttaactcacccccaccgctgccgccccccacatccccaggaggccccaaggagctggaaggacaggaaccagaacccaggcccacggaggaagagccgggcagtccctggagcgggccagacgagctggagccggtggtgcaggatgggcagaggcgcatacgggcccgactcagcctcgccacgggcctgtcctggggcccgttccatgggagtgtccagaccagagcctcatcccccaggcaggcggagccgagcccagccctgaccctgctgctggtggacgaggcctgctggctgaggacgctgccccaggccctgactgaggccgaggccaacacagagatccacaggaaggatgacgcactctggtgcagggtcaccaagccggtgcctgcggggggactcctgagcgtgctcctcacggccgagccccacagcacccccggccaccctgtgaagaaggagccagcagagcccacgtgcccggcccctgcacacgacctccagctcctgccccagcaggccgggatggcctccatccttgccaccgcagtgatcaacaaagacgtcttcccctgcaaggactgtggcatctggtaccgcagcgagcgcaacctgcaggcgcacctgctctactactgcgccagccgccagggcaccggctccccggccgcagccgccacagacgagaagcccaaagagacctaccccaacgagcgcgtctgccccttcccccagtgccgcaagagctgccccagcgccagctccctggagatccacatgcgcagccacagcggagagcggcccttcgtgtgcctgatctgcctgtcggccttcaccaccaaggccaactgcgagcggcacctcaaggtgcacacggacacgctgagcggtgtctgccacagctgtggcttcatctccaccacaagggacatcctctacagccacttggtcaccaaccacatggtctgccagcctggctccaagggtgagatctactcgccaggggccggacacccagcaaccaagctgcccccagacagtctgggcagcttccagcagcagcacacggccctgcaaggccccctggcctccgcggacctgggcctggcgcccaccccatcgccaggactggacagaaaggccctggccgaggccaccaacggagaggccagagcggagcctctggcccagaatggaggcagcagcgagcccccggcggcccccaggagcatcaaggtggaggcggtggaggagccggaggcggcccccatcctgggccccggagagcctgggccccaggccccgtcgcggacgccgtcgccgcgcagccccgccccggccagggtcaaggccgagctgtccagccccacgccgggctccagcccggtgcccggcgagctgggcctggccggggccctgttccttccgcagtacgtgttcgggcccgacgcggcgccccccgcctcggagatcctggccaagatgtccgagctggtgcacagccggctgcagcagggcgcgggcgcgggcgccggcggcgcgcagaccgggctcttccccggggcccccaagggcgctacgtgcttcgagtgcgagatcaccttcagcaacgtcaacaactactacgtgcacaagcgcctctactgttcaggccgccgtgcgcccgaggacgcgcctgccgcgcgcaggcccaaggcgccccccggcccggcccgcgcgccccccggccagcccgccgaacccgacgcgccgcgctcgtccccgggccccggagcgcgcgaggagggggctgggggcgcggccacgcccgaggacggcgcgggcggccggggcagcgagggcagccagagcccgggtagctccgtggacgacgcggaggacgaccccagccgcacgctgtgcgaggcctgcaacatccgcttcagccgccacgagacctacaccgtgcacaagcggtactactgcgcctcgcgccacgacccgccgccgcgccgaccggccgcgcccccgggaccccctgggccggccgcgcccccggccccctctcccgccgcgcctgtgcgcacgcgcagacgccgcaagctctacgagctgcacgcggccggcgccccgccccccccgccgcccggccacgcccccgcgcccgagtcgccgcggcccggaagcggaagcggaagcggccccggcctcgcccctgcgcgctcgcccggccccgcggccgacggccccatcgacctgagcaagaagccgcggcgcccgctccccggagccccggcaccggcgctggccgactaccacgagtgcacggcctgccgcgtgagcttccacagcctcgaggcctacctggcgcacaagaagtactcgtgccccgctgcgccaccgcccggcgcgctcggcctgcccgccgccgcctgcccctactgccccccgaacggcccggtgcgcggggacctgctggagcatttccgcctggcgcacggcctgctgctcggcgcgcccctggccggcccgggggtcgaggcccggacgccggccgaccgcggcccctcgcccgctcccgcccccgccgcctccccgcagcccgggtcccgtggcccccgggacggcctcggcccggagccccaggagccgccgcccggcccgcccccgtccccggccgccgcgcccgaggccgtgccgcccccgccggcgcccccctcctactcggacaagggcgtccagactcccagcaagggcacgccggcgccgctgcccaacggcaaccaccggtactgccgtctttgcaacatcaagttcagcagcctgtccaccttcatcgcccacaagaagtattactgctcctcgcacgccgccgagcacgtgaagtagtaatgaactagtccgtaacttgaaagtatttcgatttcttggctttatatatcttgtggaaaggacgagagacaaggcgggttctatctggc

SEQ ID NO: 2490 - DNA, 3767 bp, Homo sapiens
  source 1..3767: mol_type = genomic DNA
accgccaccatgctacgctccactggcttcttccgggccattgactgcccctattggtctggggcgcccggggggccctgccggcggccctactgccacttccggcaccgcggggcccggggctccggcgcgcccggtgacggcggagaggcgccccccgcagcagggctgggttacgacccctacaaccctgagctgcccaagccccccgcgcagagggagaatggcaccctgggcctgggggaggagccgcgcccggatgtgctggagttggagctggtcaaccaggccatcgaggccgtgcgcagtgaggtggagctggagcagcggcgctaccgggagctgctggagacgacccgtgagcaccgctccgccgaggcccccgccctggcgccccgcggccccaacgccagccccactgtgggcccggacgaggatgccttcccactggccttcgactacagccccggcagccacggcctattaagccctgatgccggctaccagcccaccccactggccgcccctgccgagccgggcagcaagtactcgctggcgtccctggacaggggtcagggcagaggtggagggggtggcggtgccctggaatacgtccccaaggctgtgagccagccccggcggcacagccgccccgttcccagtggcaagtacgtggtggacaactccaggccacccacagacctggagtatgaccctctctccaactactcggcccggcacctcagcagggccagctcccgggatgagcgggccgccaagcggccccggggctcccgcggcagtgagccctacacacctgctcccaagaagctctgtgacccctttggcagttgcgatgcaaggttctcagactcagaagatgaggccgccacggtcccaggtaacgagcccaccacggccagcacccccaaagccagggccgaccctgagatcaaggccaccgggcagccaccctccaaagagggcctggaggccgaggggggcggcctgcgggagaccaaggagacggccgtgcagtgcgacgtgggggacctccagccgcccccagccaagcccgcctccccagcccaggtccagtcctcacaggatgggggctgccccaaggagggaaaacccaagaagaaaaaaaccggggccccacctgcccccagctgcaaagacggggcccaggggaaggacaagaccaaggacaagggccgagggcggcctgtggagaagccccgtgcggacaagaagggcccgcaggccagcagcccccggcgcaaggcagagcggccggaagggaccaagaagaagccatcttcggccactcctgtggccacctcagggaaagggaggcctgaccggccagcgcggcggccgagccccacaagcggggactcccgaccggcggccggcagaggcccaccccgccccctccagctgcccgacaggaagagcaccaaggccccgtcggggaagctagtggagcggaaagcccgctcactagacgagggcgcctcccaggacgcccccaagctgaagaagcgggccctgagccacgccgacctctttggggacgagagtgaggacgaggccgcagggccaggggtgccgagcgtgtggccctctgccctccccagcctcagctcggactcagactccgactcagactccagcctgggcttcccggaggcgcaggggccgcccaagcggctcaaggcctccccgcccccctcccccgccccatcctcctcctcctcctcctcctcctccacctccagcgcgggggcggatgtggactactcggccctggagaaggaggtggactttgactccgaccccatggaggagtgcctgcggatcttcaacgagtccaccagcgtcaagacggaggacagaggccggctggcccggcagccccccaaggaagagaagagtgaggagaaggggctttcgggtctgaccactctgttccccgggcagaagaggaggatctcccacctttccaagcaaggccaggaggtggagcccccgaggaggggtcccgcggtgcccccggcccggcccccgacggcgcaggaggtgtgctacctgcgggcccagcaggcgcagagggcatcggcgagcttgctgcaggcccccgccaggctggcagagaagtcgccctccgtccacatttccgcccctggcgagaagaggaggatcgcccacatccccaacccccgcctggctgcagcccccacaggtgccaagaggacccttgcggccagcggcagccagtcctccaacggccctgagccaggtggccagcagctgaaaacacgcacattgtcggggatggcgtccaagactaccaccaccatcatccctaagcgaatcgcccacagtccatccttacagagtttaaagaaacccattatccccaaagagtttgggggcaaagtccccaccgtcatccgccagcgctatctcaacctgttcatcgaggagtgtctcaagttctgtacctccaaccaggaggccatagagaaggcactgaacgaggagaaggtggcctatgaccgcagccccagcaagaacatctacctgaatgtggccgtgaacaccctcaagaagctcaggggcctggcccccagcgctgtgcccggcctcagcaaaaccagtggccgcagggttgtgtcccacgaggtggtgttggggggcaggttggccgccaagaccagcttctcgctcagccgtccaagcagcccccgggtggaggacctgaaaggggctgccctgtacagccgcctcagggagtacctgctcacccaggaccagctcaaggagaacggctaccccttcccgcacccagagcggcccgggggcgcaatcatcttcacagctgaggagaagaggcccaaggactcttcctgcaggacctgctgccgctgtggcaccgagtacctcgtgtcctcttcaggccgctgcatccgggacgaggagtgttattaccactggggacggctgcgccggaaccgggtggccggaggctgggagacccagtacatgtgctgctcggctgccgccggctctgtcggctgccaagtcgcaaagcaacacgtgcaggatggccggaaggagcgccttgagggcttcgtgaagacctttgagaaagagctctcaggagacacccacccggggatctacgccctggactgcgagatgtcctacaccacatatggcctggagctgacgcgcgtcacggtggtcgacacggacgtgcacgtggtttatgacaccttcgtgaagcctgacaacgagatcgtggactacaacaccaggttttcgggggtgacggaggctgaccttgccgacacaagtgtcacgctgcgtgacgtccaggccgttctgctgagcatgttcagcgctgacaccatcctcatcggacacagcctggagagcgacctcctggccctgaaggtcatccacagcaccgtggtggacacgtctgtgctcttcccccaccgcctgggcctcccctacaagcggtccctgcggaacctcatggccgactacctcagacagatcatccaggacaatgtggatgggcacagctccagcgaggacgccggcgcctgcatgcacctggtgatctggaaggttcgagaagacgccaagaccaagcgatagtaatgaactagtccgtaacttgaaagtatttcgatttcttggctttatatatcttgtggaaaggacgagtggagctatatcatctgataagt

SEQ ID NO: 2491 - DNA, 2186 bp, Homo sapiens
  source 1..2186: mol_type = genomic DNA
accgccaccatgaagcacctgaagcggtggtggtcggccggcggcggcctcctgcacctcaccctcctgctgagcttggcggggctccgcgtagacctagatctttacctgctgctgccgccgcccaccctgctgcaggacgagctgctgttcctgggcggcccggccagctccgcctacgcgctcagccccttctcggcctcgggagggtgggggcgcgcgggccacttgcaccccaagggccgggagctggaccctgccgcgccgcccgagggccagctgctccgggaggtgcgcgcgctcggggtccccttcgtccctcgcaccagcgtggatgcatggctggtgcacagcgtggctgccgggagcgcggacgaggcccacgggctgctcggcgccgccgccgcctcgtccaccggaggagccggcgccagcgtggacggcggcagccaggctgtgcaggggggcggcggggacccccgagcggctcggagtggccccttggacgccggggaagaggagaaggcacccgcggaaccgacggctcaggtgccggacgctggcggatgtgcgagcgaggagaatggggtactaagagaaaagcacgaagctgtggatcatagttcccagcatgaggaaaatgaagaaagggtgtcagcccagaaggagaactcacttcagcagaatgatgatgatgaaaacaaaatagcagagaaacctgactgggaggcagaaaagaccactgaatctagaaatgagagacatctgaatgggacagatacttctttctctctggaagacttattccagttgctttcatcacagcctgaaaattcactggagggcatctcattgggagatattcctcttccaggcagtatcagtgatggcatgaattcttcagcacattatcatgtaaacttcagccaggctataagtcaggatgtgaatcttcatgaggccatcttgctttgtcccaacaatacatttagaagagatccaacagcaaggacttcacagtcacaagaaccatttctgcagttaaattctcataccaccaatcctgagcaaacccttcctggaactaatttgacaggatttctttcaccggttgacaatcatatgaggaatctaacaagccaagacctactgtatgaccttgacataaatatatttgatgagataaacttaatgtcattggccacagaagacaactttgatccaatcgatgtttctcagctttttgatgaaccagattctgattctggcctttctttagattcaagtcacaataatacctctgtcatcaagtctaattcctctcactctgtgtgtgatgaaggtgctataggttattgcactgaccatgaatctagttcccatcatgacttagaaggtgctgtaggtggctactacccagaacccagtaagctttgtcacttggatcaaagtgattctgatttccatggagatcttacatttcaacacgtatttcataaccacacttaccacttacagccaactgcaccagaatctacttctgaaccttttccgtggcctgggaagtcacagaagataaggagtagataccttgaagacacagatagaaacttgagccgtgatgaacagcgtgctaaagctttgcatatccctttttctgtagatgaaattgtcggcatgcctgttgattctttcaatagcatgttaagtagatattatctgacagacctacaagtctcacttatccgtgacatcagacgaagagggaaaaataaagttgctgcgcagaactgtcgtaaacgcaaattggacataattttgaatttagaagatgatgtatgtaacttgcaagcaaagaaggaaactcttaagagagagcaagcacaatgtaacaaagctattaacataatgaaacagaaactgcatgacctttatcatgatatttttagtagattaagagatgaccaaggtaggccagtcaatcccaaccactatgctctccagtgtacccatgatggaagtatcttgatagtacccaaagaactggtggcctcaggccacaaaaaggaaacccaaaagggaaagagaaagtagtaatgaactagtccgtaacttgaaagtatttcgatttcttggctttatatatcttgtggaaaggacgacattagcaatacctcgttagtacg

SEQ ID NO: 2492 - DNA, 1850 bp, Homo sapiens
  source 1..1850: mol_type = genomic DNA
accgccaccatggatttgattgacatactttggaggcaagatatagatcttggagtaagtcgagaagtatttgacttcagtcagcgacggaaagagtatgagctggaaaaacagaaaaaacttgaaaaggaaagacaagaacaactccaaaaggagcaagagaaagcctttttcgctcagttacaactagatgaagagacaggtgaatttctcccaattcagccagcccagcacatccagtcagaaaccagtggatctgccaactactcccaggttgcccacattcccaaatcagatgctttgtactttgatgactgcatgcagcttttggcgcagacattcccgtttgtagatgacaatgagtcacttgttcctgatattcccggtcacatcgagagcccagtcttcattgctactaatcaggctcagtcacctgaaacttctgttgctcaggtagcccctgttgatttagacggtatgcaacaggacattgagcaagtttgggaggagctattatccattcctgagttacagtgtcttaatattgaaaatgacaagctggttgagactaccatggttccaagtccagaagccaaactgacagaagttgacaattatcatttttactcatctataccctcaatggaaaaagaagtaggtaactgtagtccacattttcttaatgcttttgaggattccttcagcagcatcctctccacagaagaccccaaccagttgacagtgaactcattaaattcagatgccacagtcaacacagattttggtgatgaattttattctgctttcatagctgagcccagtatcagcaacagcatgccctcacctgctactttaagccattcactctctgaacttctaaatgggcccattgatgtttctgatctatcactttgcaaagctttcaaccaaaaccaccctgaaagcacagcagaattcaatgattctgactccggcatttcactaaacacaagtcccagtgtggcatcaccagaacactcagtggaatcttccagctatggagacacactacttggcctcagtgattctgaagtggaagagctagatagtgcccctggaagtgtcaaacagaatggtcctaaaacaccagtacattcttctggggatatggtacaacccttgtcaccatctcaggggcagagcactcacgtgcatgatgcccaatgtgagaacacaccagagaaagaattgcctgtaagtcctggtcatcggaaaaccccattcacaaaagacaaacattcaagccgcttggaggctcatctcacaagagatgaacttagggcaaaagctctccatatcccattccctgtagaaaaaatcattaacctccctgttgttgacttcaacgaaatgatgtccaaagagcagttcaatgaagctcaacttgcattaattcgggatatacgtaggaggggtaagaataaagtggctgctcagaattgcagaaaaagaaaactggaaaatatagtagaactagagcaagatttagatcatttgaaagatgaaaaagaaaaattgctcaaagaaaaaggagaaaatgacaaaagccttcacctactgaaaaaacaactcagcaccttatatctcgaagttttcagcatgctacgtgatgaagatggaaaaccttattctcctagtgaatactccctgcagcaaacaagagatggcaatgttttccttgttcccaaaagtaagaagccagatgttaagaaaaactagtaatgaactagtccgtaacttgaaagtatttcgatttcttggctttatatatcttgtggaaaggacgagatgtgtgaaagatgctatcgagg

SEQ ID NO: 2493 - DNA, 1871 bp, Homo sapiens
  source 1..1871: mol_type = genomic DNA
accgccaccatggatttgattgacatactttggaggcaagatatagatcttggagtaagtcgagaagtatttgacttcagtcagcgacggaaagagtatgagctggaaaaacagaaaaaacttgaaaaggaaagacaagaacaactccaaaaggagcaagagaaagcctttttcgctcagttacaactagatgaagagacaggtgaatttctcccaattcagccagcccagcacatccagtcagaaaccagtggatctgccaactactcccaggttgcccacattcccaaatcagatgctttgtactttgatgactgcatgcagcttttggcgcagacattcccgtttgtagatgacaatgaggtttcttcggctacgtttcagtcacttgttcctgatattcccggtcacatcgagagcccagtcttcattgctactaatcaggctcagtcacctgaaacttctgttgctcaggtagcccctgttgatttagacggtatgcaacaggacattgagcaagtttgggaggagctattatccattcctgagttacagtgtcttaatattgaaaatgacaagctggttgagactaccatggttccaagtccagaagccaaactgacagaagttgacaattatcatttttactcatctataccctcaatggaaaaagaagtaggtaactgtagtccacattttcttaatgcttttgaggattccttcagcagcatcctctccacagaagaccccaaccagttgacagtgaactcattaaattcagatgccacagtcaacacagattttggtgatgaattttattctgctttcatagctgagcccagtatcagcaacagcatgccctcacctgctactttaagccattcactctctgaacttctaaatgggcccattgatgtttctgatctatcactttgcaaagctttcaaccaaaaccaccctgaaagcacagcagaattcaatgattctgactccggcatttcactaaacacaagtcccagtgtggcatcaccagaacactcagtggaatcttccagctatggagacacactacttggcctcagtgattctgaagtggaagagctagatagtgcccctggaagtgtcaaacagaatggtcctaaaacaccagtacattcttctggggatatggtacaacccttgtcaccatctcaggggcagagcactcacgtgcatgatgcccaatgtgagaacacaccagagaaagaattgcctgtaagtcctggtcatcggaaaaccccattcacaaaagacaaacattcaagccgcttggaggctcatctcacaagagatgaacttagggcaaaagctctccatatcccattccctgtagaaaaaatcattaacctccctgttgttgacttcaacgaaatgatgtccaaagagcagttcaatgaagctcaacttgcattaattcgggatatacgtaggaggggtaagaataaagtggctgctcagaattgcagaaaaagaaaactggaaaatatagtagaactagagcaagatttagatcatttgaaagatgaaaaagaaaaattgctcaaagaaaaaggagaaaatgacaaaagccttcacctactgaaaaaacaactcagcaccttatatctcgaagttttcagcatgctacgtgatgaagatggaaaaccttattctcctagtgaatactccctgcagcaaacaagagatggcaatgttttccttgttcccaaaagtaagaagccagatgttaagaaaaactagtaatgaactagtccgtaacttgaaagtatttcgatttcttggctttatatatcttgtggaaaggacgacctccttagtgtcttgagtatatg

SEQ ID NO: 2494 - DNA, 2330 bp, Homo sapiens
  source 1..2330: mol_type = genomic DNA
accgccaccatgctttctctgaagaaatacttaacggaaggacttctccagttcaccattctgctgagtttgattggggtacgggtggacgtggatacttacctgacctcacagcttcccccactccgggagatcatcctggggcccagttctgcctatactcagacccagttccacaacctgaggaataccttggatggctatggtatccaccccaagagcatagacctggacaattacttcactgcccggcggctcctcagtcaggtgagggccctggacaggttccaggtgccaaccactgaggtaaatgcctggctggttcaccgagacccagaggggtctgtctctggcagtcagcccaactcaggcctcgccctcgagagttccagtggcctccaagatgtgacaggcccagacaacggggtgcgagaaagcgaaacggagcagggattcggtgaagatttggaggatttgggggctgtagcccccccagtcagtggagacttaaccaaagaggacatagatctgattgacatcctttggcgacaggatattgatctgggggctgggcgtgaggtttttgactatagtcaccgccagaaggagcaggatgtggagaaggagctgcgagatggaggcgagcaggacacctgggcaggcgagggcgcggaagctctggcacggaacctgctagtggatggagagactggggagagcttccctgcacagtttccagcagacatttccagcataacagaagcagtgcctagtgagagtgagccccctgctcttcaaaacaacctcttgtctcctcttctgaccgggacagagtcaccatttgatttggaacagcagtggcaagatctcatgtccatcatggaaatgcaggccatggaagtgaacacatcagcaagtgaaatcctgtacagtgcccctcctggagacccactgagcaccaactacagccttgcccccaacactcccatcaatcagaatgtcagcctgcatcaggcgtccctggggggctgcagccaggacttcttactcttcagccccgaggtggaaagcctgcctgtggccagtagctccacgctgctcccgttggcccccagcaattctaccagcctcaactccaccttcggctccaccaacctgacagggctcttctttccaccccagctcaatggcacagccaatgacacagcaggcccagagctgcctgaccctttggggggtctgttagatgaagctatgttggatgagatcagccttatggacctggccattgaagaaggctttaaccctgtgcaggcctcccagctggaggaggaatttgactctgactcaggcctttccttagactcgagccatagcccttcttccctaagcagctctgaaggcagttcttcctcttcttcctcctcctcttcctcttcttcctctgcttcttcctctgcctcttcctccttttctgaggaaggtgcggttggctacagctctgactctgagaccctggatctggaagaggccgagggtgctgtgggctaccagcctgagtattccaagttctgccgcatgagctaccaggatccagctcagctctcatgcctgccctacctggagcacgtgggccacaaccacacatacaacatggcacccagtgccctggactcagccgacctgccaccacccagtgccctcaagaaaggcagcaaggagaagcaggctgacttcctggacaagcagatgagccgggatgagcaccgagcccgagccatgaagatccctttcaccaatgacaaaatcatcaacctgcctgtggaggagttcaatgaactgctgtccaaataccagttgagtgaagcccagctgagcctcatccgagacatccggcgccggggcaagaacaagatggcggcgcagaactgccgcaagcgcaagctggacaccatcctgaatctggagcgtgatgtggaggacctgcagcgtgacaaagcccggctgctgcgggagaaagtggagttcctgcgctccctgcgacagatgaagcagaaggtccagagcctgtaccaggaggtgtttgggcggctgcgagatgagaacggacgaccctactcgcccagtcagtatgcgctccagtacgccggggacggcagtgtcctcctcatcccccgcacgatggccgaccagcaggcccggcggcaggagaggaagccaaaggaccggagaaagtagtaatgaactagtccgtaacttgaaagtatttcgatttcttggctttatatatcttgtggaaaggacgaaacgcgaggagcgcagtaaagagt

SEQ ID NO: 2495 - DNA, 2387 bp, Homo sapiens
  source 1..2387: mol_type = genomic DNA
accgccaccatgctttctctgaagaaatacttaacggaaggacttctccagttcaccattctgctgagtttgattggggtacgggtggacgtggatacttacctgacctcacagcttcccccactccgggagatcatcctggggcccagttctgcctatactcagacccagttccacaacctgaggaataccttggatggctatggtatccaccccaagagcatagacctggacaattacttcactgcccggcggctcctcagtcaggtgagggccctggacaggttccaggtgccaaccactgaggtaaatgcctggctggttcaccgagacccagaggggtctgtctctggcagtcagcccaactcaggcctcgccctcgagagttccagtggcctccaagatgtgacaggcccagacaacggggtgcgagaaagcgaaacggagcagggattcggtgaagatttggaggatttgggggctgtagcccccccagtcagtggagacttaaccaaagaggatattgatctgggggctgggcgtgaggtttttgactatagtcaccgccagaaggagcaggatgtggagaaggagctgcgagatggaggcgagcaggacacctgggcaggcgagggcgcggaagctctggcacggaacctgctagtggatggagagactggggagagcttccctgcacaggtgcctagtggggaggaccagacggccctgtccctggaagagtgccttaggctgctggaagccacctgcccctttggggagaatgctgagtttccagcagacatttccagcataacagaagcagtgcctagtgagagtgagccccctgctcttcaaaacaacctcttgtctcctcttctgaccgggacagagtcaccatttgatttggaacagcagtggcaagatctcatgtccatcatggaaatgcaggccatggaagtgaacacatcagcaagtgaaatcctgtacagtgcccctcctggagacccactgagcaccaactacagccttgcccccaacactcccatcaatcagaatgtcagcctgcatcaggcgtccctggggggctgcagccaggacttcttactcttcagccccgaggtggaaagcctgcctgtggccagtagctccacgctgctcccgttggcccccagcaattctaccagcctcaactccaccttcggctccaccaacctgacagggctcttctttccaccccagctcaatggcacagccaatgacacagcaggcccagagctgcctgaccctttggggggtctgttagatgaagctatgttggatgagatcagccttatggacctggccattgaagaaggctttaaccctgtgcaggcctcccagctggaggaggaatttgactctgactcaggcctttccttagactcgagccatagcccttcttccctaagcagctctgaaggcagttcttcctcttcttcctcctcctcttcctcttcttcctctgcttcttcctctgcctcttcctccttttctgaggaaggtgcggttggctacagctctgactctgagaccctggatctggaagaggccgagggtgctgtgggctaccagcctgagtattccaagttctgccgcatgagctaccaggatccagctcagctctcatgcctgccctacctggagcacgtgggccacaaccacacatacaacatggcacccagtgccctggactcagccgacctgccaccacccagtgccctcaagaaaggcagcaaggagaagcaggctgacttcctggacaagcagatgagccgggatgagcaccgagcccgagccatgaagatccctttcaccaatgacaaaatcatcaacctgcctgtggaggagttcaatgaactgctgtccaaataccagttgagtgaagcccagctgagcctcatccgagacatccggcgccggggcaagaacaagatggcggcgcagaactgccgcaagcgcaagctggacaccatcctgaatctggagcgtgatgtggaggacctgcagcgtgacaaagcccggctgctgcgggagaaagtggagttcctgcgctccctgcgacagatgaagcagaaggtccagagcctgtaccaggaggtgtttgggcggctgcgagatgagaacggacgaccctactcgcccagtcagtatgcgctccagtacgccggggacggcagtgtcctcctcatcccccgcacgatggccgaccagcaggcccggcggcaggagaggaagccaaaggaccggagaaagtagtaatgaactagtccgtaacttgaaagtatttcgatttcttggctttatatatcttgtggaaaggacgatatctaattactcatcccattaaa

SEQ ID NO: 2496 - DNA, 2420 bp, Homo sapiens
  source 1..2420: mol_type = genomic DNA
accgccaccatgctttctctgaagaaatacttaacggaaggacttctccagttcaccattctgctgagtttgattggggtacgggtggacgtggatacttacctgacctcacagcttcccccactccgggagatcatcctggggcccagttctgcctatactcagacccagttccacaacctgaggaataccttggatggctatggtatccaccccaagagcatagacctggacaattacttcactgcccggcggctcctcagtcaggtgagggccctggacaggttccaggtgccaaccactgaggtaaatgcctggctggttcaccgagacccagaggggtctgtctctggcagtcagcccaactcaggcctcgccctcgagagttccagtggcctccaagatgtgacaggcccagacaacggggtgcgagaaagcgaaacggagcagggattcggtgaagatttggaggatttgggggctgtagcccccccagtcagtggagacttaaccaaagaggacatagatctgattgacatcctttggcgacaggatattgatctgggggctgggcgtgaggtttttgactatagtcaccgccagaaggagcaggatgtggagaaggagctgcgagatggaggcgagcaggacacctgggcaggcgagggcgcggaagctctggcacggaacctgctagtggatggagagactggggagagcttccctgcacaggtgcctagtggggaggaccagacggccctgtccctggaagagtgccttaggctgctggaagccacctgcccctttggggagaatgctgagtttccagcagacatttccagcataacagaagcagtgcctagtgagagtgagccccctgctcttcaaaacaacctcttgtctcctcttctgaccgggacagagtcaccatttgatttggaacagcagtggcaagatctcatgtccatcatggaaatgcaggccatggaagtgaacacatcagcaagtgaaatcctgtacagtgcccctcctggagacccactgagcaccaactacagccttgcccccaacactcccatcaatcagaatgtcagcctgcatcaggcgtccctggggggctgcagccaggacttcttactcttcagccccgaggtggaaagcctgcctgtggccagtagctccacgctgctcccgttggcccccagcaattctaccagcctcaactccaccttcggctccaccaacctgacagggctcttctttccaccccagctcaatggcacagccaatgacacagcaggcccagagctgcctgaccctttggggggtctgttagatgaagctatgttggatgagatcagccttatggacctggccattgaagaaggctttaaccctgtgcaggcctcccagctggaggaggaatttgactctgactcaggcctttccttagactcgagccatagcccttcttccctaagcagctctgaaggcagttcttcctcttcttcctcctcctcttcctcttcttcctctgcttcttcctctgcctcttcctccttttctgaggaaggtgcggttggctacagctctgactctgagaccctggatctggaagaggccgagggtgctgtgggctaccagcctgagtattccaagttctgccgcatgagctaccaggatccagctcagctctcatgcctgccctacctggagcacgtgggccacaaccacacatacaacatggcacccagtgccctggactcagccgacctgccaccacccagtgccctcaagaaaggcagcaaggagaagcaggctgacttcctggacaagcagatgagccgggatgagcaccgagcccgagccatgaagatccctttcaccaatgacaaaatcatcaacctgcctgtggaggagttcaatgaactgctgtccaaataccagttgagtgaagcccagctgagcctcatccgagacatccggcgccggggcaagaacaagatggcggcgcagaactgccgcaagcgcaagctggacaccatcctgaatctggagcgtgatgtggaggacctgcagcgtgacaaagcccggctgctgcgggagaaagtggagttcctgcgctccctgcgacagatgaagcagaaggtccagagcctgtaccaggaggtgtttgggcggctgcgagatgagaacggacgaccctactcgcccagtcagtatgcgctccagtacgccggggacggcagtgtcctcctcatcccccgcacgatggccgaccagcaggcccggcggcaggagaggaagccaaaggaccggagaaagtagtaatgaactagtccgtaacttgaaagtatttcgatttcttggctttatatatcttgtggaaaggacgatggtgcatggtatgcaggtacacc

SEQ ID NO: 2497 - DNA, 1985 bp, Homo sapiens
  source 1..1985: mol_type = genomic DNA
accgccaccatggcggcagcggtgctgacggaccgggcccaggtgtctgtgacctttgatgatgtggctgtgactttcaccaaggaggagtgggggcagctggacctagctcagcggaccctgtaccaggaggtgatgctggaaaactgtgggctcctggtgtctctggggtgtcctgttcccaaagctgagctgatctgccacctagagcatgggcaggagccatggaccaggaaggaagacctctcccaagacacctgtccaggcgacaaaggaaaacctaagaccacagaacctaccacttgtgagccagccttgtcagagggaatctcacttcagggacaagtgacacaaggaaactcagtggactcacagttggggcaagccgaggatcaggatgggctatcagaaatgcaggaaggacacttcagaccaggaatagatccccaggagaagtctcctgggaagatgagccctgaatgtgatggtttagggacagctgatggtgtgtgttcaaggattggacaggagcaagtctctccaggagatagagtccgtagccataactcatgtgagtcaggtaaagatcccatgattcaggaagaggaaaataactttaaatgcagtgaatgtggaaaagtatttaacaagaaacacctccttgctggacatgagaaaattcactctggagttaagccctatgaatgcacagaatgtgggaaaacctttattaagagcacacatctcctgcaacatcacatgatccacactggggagaggccctatgagtgcatggagtgtggaaaggccttcaaccgcaagtcataccttacccagcaccagcggattcacagtggagagaagccttacaagtgcaatgaatgcggaaaggccttcacccaccgctccaattttgtcttgcataacaggagacacactggagaaaaatcctttgtgtgcacagaatgtggccaagtctttcgacataggccaggctttctccggcactatgttgtccacagtggtgagaatccctatgagtgcttggagtgtggcaaggtcttcaaacacaggtcatatctcatgtggcaccagcagactcataccggggagaagccctatgagtgcagtgaatgtgggaaggtcttcttggagagtgcagccctgattcaccactatgtcatccacactggagagaagccctttgagtgcctcgagtgtgggaaggctttcaaccaccgatcctacctcaagaggcaccagcggattcacactggggagaagcccttcgtgtgcagtgaatgtggaaaggccttcacccactgctctacttttatcttgcataaaagggcccacactggagaaaagcctttcgagtgcaaagagtgtgggaaagcctttagcaatcggaaggacctcattcgccacttcagcatccacactggagagaagccctatgagtgcgtggagtgtggaaaggccttcacccgcatgtcgggcctcacgaggcacaagcggattcatagtggagagaagccctatgaatgtgttgagtgtgggaaatcgttttgctggagcacaaacctcattcgacatgccattatccacactggagagaagccctataaatgtagtgaatgtggaaaggccttcagtcgcagctcgtccctcactcagcatcaaaggatgcatactgggaaaaatcccatcagtgtaacagatgtgggaagaccttttacaagtggacaaacctcagttacccttcgagaacttcttttagggaaggactttttgaatgtaaccactgaggcaaatattttgccagaggaaacatcttcctctgcatctgatcaaccataccaaagagaaaccccacaagtgtcttcactgtagtaatgaactagtccgtaacttgaaagtatttcgatttcttggctttatatatcttgtggaaaggacgacgcctttagcactcctctccgcct

SEQ ID NO: 2498 - DNA, 1241 bp, Homo sapiens
  source 1..1241: mol_type = genomic DNA
accgccaccatgtcttcggcgcccgagaagcagcagccaccgcacggcggcggcggcggcggcggcgggggaggcggcgcggccatggaccccgcgtcgtccggcccgtccaaggccaagaagaccaacgccggcatccggcgcccggagaagccgccctattcctacatcgcgctcatcgtcatggccatccagagttcacccaccaagcgcctgacgctgagcgagatctaccagttcctgcagagccgcttccccttcttccggggctcctaccagggctggaagaactccgtgcgccacaacctctcgctcaacgagtgcttcatcaagctacccaagggccttgggcggcccggcaagggccactactggaccatcgacccggccagcgagttcatgttcgaggagggctcctttcggcggcggccgcgcggcttccgaaggaaatgccaggcgctcaagcccatgtacagcatgatgaacgggctcggcttcaaccacctcccggacacctacggcttccagggctcggccggcggcctctcgtgcccgcccaacagcctggcgctggagggcggcctgggcatgatgaacggccacttgccgggcaacgtggacggcatggccctgcccagccactcggtgccccacctgccttccaacggcggccactcgtacatgggcggctgcggcggcgcggcggccggcgagtacccgcaccacgacagctcggtgcccgcctccccgctgctgcccaccggcgccggtggggtcatggagccgcacgccgtctactcgggctcggcggcggcctggccgccctcggcgtccgcggcgctcaacagcggcgcctcttatatcaagcagcagcccctgtccccctgtaaccccgcggccaaccccctgtccggcagcctctccacgcactccctggagcagccgtatctgcaccagaacagccacaacgccccagccgagctgcaaggcatcccgcggtatcactcgcagtcgcccagcatgtgtgaccgaaaggagtttgtcttctctttcaacgccatggcgtcctcttccatgcactcggccggcgggggctcctactaccaccagcaggtcacctaccaagacatcaagccttgcgtgatgtagtaatgaactagtccgtaacttgaaagtatttcgatttcttggctttatatatcttgtggaaaggacgagtgtaatgcagatctaatttagtg

SEQ ID NO: 2499 - DNA, 1436 bp, Homo sapiens
  source 1..1436: mol_type = genomic DNA
accgccaccatgaccaccgagggcgggccgccgccggccccgctccgccgcgcgtgcagcccggtccccggcgcgctccaggccgccctgatgagcccgccgcccgccgccgccgccgccgccgccgccgccccggagaccacctcctcctcctcgtcgtcgtcctccgcctcctgcgcctcgtcctcgtcctcctccaattcggccagcgccccctcggctgcctgcaagagcgcgggcggcggcggcgcgggcgccgggagcgggggcgccaagaaggcgagctcggggctgcggcggcccgagaagccgccctactcgtacatcgcgctcatcgtcatggccatccagagctcgcccagcaagcgcctgacgctcagcgagatctaccagttcctgcaggcgcgcttccccttcttccgcggcgcctaccagggctggaagaactcggtgcgccacaatctctcgctcaacgagtgcttcatcaagctgcctaagggcctcgggcggcccggcaagggccactactggaccatcgacccggccagcgagttcatgttcgaggagggctcgttccgccgccggccgcgcggcttcaggcggaagtgccaggcgctcaagcccatgtaccaccgcgtggtgagcggcttgggcttcggggcgtcgctgctgccccagggcttcgacttccaggcgcccccgtcggcgccgctcggctgccacagccagggcggctacggcggcctcgacatgatgcccgcgggctacgacgccggcgcgggcgcccccagccacgcgcaccctcaccaccaccaccaccaccacgtcccgcacatgtcgcccaacccgggttccacctacatggccagctgcccggtgcccgcgggacccgggggcgtcggtgcggccgggggcggcggcggcggcgactacgggccggacagcagcagcagcccggtaccctcgtccccggccatggcgagcgccatcgaatgccactcgccctacacgagccctgcggcgcactggagctcgcctggcgcctcgccttacctcaagcagccgcctgccctgacgcccagcagcaaccccgccgcctcggcaggcctgcactccagcatgtcctcctactcgctggagcagagctacttgcaccagaacgctcgcgaggacctctcagtgggactgccccgttaccagcatcactctactccagtgtgtgacagaaaagatttcgtcctcaacttcaatgggatttcttctttccatccctcagctagcgggtcgtattatcaccatcaccaccagagcgtctgtcaggatattaagccctgcgtcatgtagtaatgaactagtccgtaacttgaaagtatttcgatttcttggctttatatatcttgtggaaaggacgaatgagtcctagtctgtgcatacag

SEQ ID NO: 2500 - DNA, 1004 bp, Homo sapiens
  source 1..1004: mol_type = genomic DNA
accgccaccatgcattcactaaagaaactgacttttgaagatgtagctattgacttcacccaggaagagtgggccatgatggacacatccaagagaaagctgtacagagatgtgatgctggaaaatatcagtcacctggtgtccctcgggtaccagataagcaaatcctatataattttgcagctggagcaaggaaaagagctgtggagggaaggaagagtatttcttcaagaccagaatccaaacagggaaagtgcccttaagaaaacacacatgatatccatgcatcctatcaccagaaaagacgcatccaccagtatgacaatggagaactctctcattctggaggatccttttgaatgtaatgattcgggagaagattgcactcgcagttccacaataactcagtgtttgttaactcatagtggaaagaaaccctatgtcagcaaacagtgtggaaaatcccttcgtaatcttttgtccactgaaccacataaacaaattcatactaaaggtaaatcatatcagtgtaatctatgtgaaaaggcctatactaattgctttcaccttagacggcacaagatgactcacactggagagaggccatatgcatgtcatctatgtagaaaagccttcactcagtgttctcaccttagaagacacgagaaaactcacacgggacagagaccatataagtgtcatcaatatgggaaagtctttattcaatcctttaaccttcaaagacatgagagaactcaccttggaaaaaagtgttatgaatgtgataaaagtgggaaagcctttagtcaaagctctggctttagaggaaacaaaataattcacactggagagaaaccacatgcttgtcttctatgtgggaaggccttcagtctgtcttccaaccttagatagtaatgaactagtccgtaacttgaaagtatttcgatttcttggctttatatatcttgtggaaaggacgacggactttaagtgtagccgttcgc

SEQ ID NO: 2501 - DNA, 1139 bp, Homo sapiens
  source 1..1139: mol_type = genomic DNA
accgccaccatgctcatgtttgacccagttcctgtcaagcaagaggccatggaccctgtctcagtgtcatacccatctaattacatggaatccatgaagcctaacaagtatggggtcatctactccacaccattgcctgagaagttctttcagaccccagaaggtctgtcgcacggaatacagatggagccagtggacctcacggtgaacaagcggagttcacccccttcggctgggaattcgccctcctctctgaagttcccgtcctcacaccggagagcctcgcctgggttgagcatgccttcttccagcccaccgataaaaaaatactcacccccttctccaggcgtgcagcccttcggcgtgccgctgtccatgccaccagtgatggcagctgccctctcgcggcatggaatacggagcccggggatcctgcccgtcatccagccggtggtggtgcagcccgtcccctttatgtacacaagtcacctccagcagcctctcatggtctccttatcggaggagatggaaaattccagtagtagcatgcaagtacctgtaattgaatcatatgagaagcctatatcacagaaaaaaattaaaatagaacctgggatcgaaccacagaggacagattattatcctgaagaaatgtcaccccccttaatgaactcagtgtcccccccgcaagcattgttgcaagagaatcacccttcggtcatcgtgcagcctgggaagagacctttacctgtggaatccccggatactcaaaggaagcggaggatacacagatgtgattatgatggatgcaacaaagtgtacactaaaagctcccacttgaaagcacacagaagaacacacacaggagaaaaaccctacaaatgtacatgggaagggtgcacatggaagtttgctcggtctgatgaactaacaagacatttccgaaaacatactggaatcaaacctttccagtgcccggactgtgaccgcagcttctcccgttctgaccatcttgccctccataggaaacgccacatgctagtctagtaatgaactagtccgtaacttgaaagtatttcgatttcttggctttatatatcttgtggaaaggacgagtggctttagaagtgacacgcaca

SEQ ID NO: 2502 - DNA, 1004 bp, Homo sapiens
  source 1..1004: mol_type = genomic DNA
accgccaccatgcattcactagagaaagtgacttttgaagatgtagctattgacttcacccaggaagagtgggacatgatggacacatccaagagaaagctgtacagagatgtgatgctggaaaatatcagtcacctggtgtccctcgggtaccagataagcaaatcctatataattttgcagctggagcaaggaaaagagctgtggcgggaaggaagagtatttcttcaagaccagaatccagacagggaaagtgcccttaagaaaaaacacatgatatccatgcatcctatcatcagaaaagacgcatccaccagtatgacaatggagaactctctcattctggaggatccttttgaatataatgattcgggagaagattgcactcacagttccacaataactcagtgtttgttaactcacagtggaaagaaaccctgtgtcagcaaacagtgtggaaaatcccttcgtaatcttttgtcccctaaaccacgtaaacaaattcatactaaaggtaaatcatatcaatgtaatctatgtgaaaaggcctatactaattgcttttaccttagacggcacaagatgactcacactggagagaggccatatgcatgtcatctatgtggaaaagccttcactcagtgttctcaccttagaagacatgagaaaactcacacgggagagagaccatataagtgtcatcaatgtgggaaagcctttattcaatcctttaaccttcgaagacatgagagaactcaccttggacaaaagtgttatgaatgtgataaaagtgggaaagcctttagtcaaagctctggctttagaggaaacaaaataattcacattggagagaaaccacatgcttgtcttctatgtgggaaggccttcagtctgtcctccgaccttagatagtaatgaactagtccgtaacttgaaagtatttcgatttcttggctttatatatcttgtggaaaggacgaattgtagactatgagctggcgtgg

SEQ ID NO: 2503 - DNA, 482 bp, Homo sapiens
  source 1..482: mol_type = genomic DNA
accgccaccatggccaccagggtccggacagcttctatttggggacctttgtcattcatggatgtgtttgtggattttacctgggaggagtggcagctgctagacccagcacagaagtgcctgtacaggagtgtgatgttggagaactatagcaacctggtgtccctagggtaccaacacaccaaacctgatatcatcttcaagttggaacaaggagaagagctgtgtatggtgcaggcccaagttccaaatcagacctgtccaattttgaaggctggaaagtccaaagccaaggtgctggcaggtttggtgtctggtgagggcctgctctgtgcttccaagatgacgccttgttgctgcatcctctggagacacagtctggaaaattagtaatgaactagtccgtaacttgaaagtatttcgatttcttggctttatatatcttgtggaaaggacgagcgatcatctttcgttgacccggt

SEQ ID NO: 2504 - DNA, 683 bp, Homo sapiens
  source 1..683: mol_type = genomic DNA
accgccaccatggccaccagggtccggacagcttctatttgggtcccacctctccaagaacgaaacagttcatgggataggatcagaaagctccaaggtcaggaatccatcttgggccaagggactcctggtctgcaacctctccctggaacacccaggcagaagcagaagagtcgcagaatagagaaagtcctagagtggctgtttatttcccaagagcagccaaaaatcaccaagtcctggggacctttgtcattcatggatgtgtttgtggattttacctgggaggagtggcagctgctagacccagcacagaagtgcctgtacaggagtgtgatgttggagaactatagcaacctggtgtccctagggtaccaacacaccaaacctgatatcatcttcaagttggaacaaggagaagagctgtgtatggtgcaggcccaagttccaaatcagacctgtccaattttgaaggctggaaagtccaaagccaaggtgctggcaggtttggtgtctggtgagggcctgctctgtgcttccaagatgacgccttgttgctgcatcctctggagacacagtctggaaaattagtaatgaactagtccgtaacttgaaagtatttcgatttcttggctttatatatcttgtggaaaggacgacttggccaaaccctaccgacgcat

SEQ ID NO: 2505 - DNA, 308 bp, Homo sapiens
  source 1..308: mol_type = genomic DNA
accgccaccatggccaccagggtccggacagcttctatttggacacagtctggaaaattgatgatcttatggattggcatcaggaaaataaagacaagctgggaagtacggcaaaaagctttgaatgcactacatttggaaaactatgtcttcttagtacaaagtatctttcaagacaaaaacctcataaatgtggcacgcatggaaagagtttagtaatgaactagtccgtaacttgaaagtatttcgatttcttggctttatatatcttgtggaaaggacgacactggatccgtataccggcgtgg

SEQ ID NO: 2506 - DNA, 2945 bp, Homo sapiens
  source 1..2945: mol_type = genomic DNA
accgccaccatggccaccagggtccggacagcttctatttgggtcccacctctccaagaacgaaacagttcatgggataggatcagaaagctccaaggtcaggaatccatcttgggccaagggactcctggtctgcaacctctccctggaacacccaggcagaagcagaagagtcgcagaatagagaaagtcctagagtggctgtttatttcccaagagcagccaaaaatcaccaagtcctggggacctttgtcattcatggatgtgtttgtggattttacctgggaggagtggcagctgctagacccagcacagaagtgcctgtacaggagtgtgatgttggagaactatagcaacctggtgtccctagggtaccaacacaccaaacctgatatcatcttcaagttggaacaaggagaagagctgtgtatggtgcaggcccaagttccaaatcagacctgtccaaacacagtctggaaaattgatgatcttatggattggcatcaggaaaataaagacaagctgggaagtacggcaaaaagctttgaatgcactacatttggaaaactatgtcttcttagtacaaagtatctttcaagacaaaaacctcataaatgtggcacgcatggaaagagtttgaaatatatagatttcactagtgattatgctagaaataatcctaatgggtttcaggtacatggaaaatcattcttccattctaaacatgagcaaactgttattggaataaaatactgtgaaagtattgaatctggaaaaaccgtcaataagaaatcgcaacttatgtgccaacaaatgtatatgggcgaaaaaccctttggatgcagctgttgtgagaaagccttcagcagcaagtcataccttctagtgcatcagcaaactcatgccgaagagaaaccctatggttgtaatgaatgtgggaaagacttcagtagtaaatcatacctcattgtacatcagagaattcatacaggagagaaactacatgaatgcagtgaatgcaggaaaacattcagtttccattcacagcttgttatacatcagagaattcacacaggtgagaatccctatgagtgctgtgaatgtgggaaagtcttcagtaggaaagaccagcttgtttcacaccagaaaactcattcaggacagaaaccatatgtgtgtaatgaatgtgggaaagcttttggtttaaaatcacagctcattatacatgaaagaattcatacaggagagaaaccatatgaatgcaatgaatgtcagaaagcctttaatacaaagtcaaaccttatggtacatcagagaacccatacaggggagaaaccttatgtttgtagtgattgtggaaaagcctttacattcaagtcacagctcattgtacatcaggggattcacacaggagtaaagccctatgggtgtattcagtgtggtaaaggattcagtttgaaatcacagctcattgtacatcagagaagtcacacaggaatgaaaccttatgtatgcaatgaatgtggcaaagccttcaggagcaagtcataccttattatacatacaaggactcatacaggagaaaaactccatgaatgcaacaattgtgggaaagccttcagttttaaatcacagctcattatacatcagaggattcatacaggagagaacccctatgaatgccatgaatgtgggaaagccttcagtcggaaataccagcttatttcacaccagagaactcatgcaggagagaagccttatgaatgcaccgactgtggaaaggcttttggtttaaagtcacagcttattatacaccagagaactcatacaggggagaaaccatttgaatgtagtgagtgtcagaaagcctttaatacaaagtcaaacctgattgtacatcagagaactcatacaggagagaaaccctatagttgtaatgaatgtggaaaagcctttacgttcaaatcacagctcattgtacataaaggagtgcacactggagtaaaaccctatggatgcagtcaatgtgcaaaaacctttagtttgaagtcccagctcattgtacatcagagaagtcacacaggagtaaaaccatatggatgcagtgagtgtgggaaagccttcaggagcaagtcataccttattatacatatgagaactcatacaggagagaaaccacatgagtgcagggaatgcgggaaatcctttagtttcaattcacaactcattgtgcatcagagaattcacacaggagaaaatccctatgaatgcagtgaatgtgggaaagcctttaataggaaagaccagctcatttcacatcagcgaactcatgcaggggaaaagccttatgggtgcagtgaatgtgggaaagcttttagcagcaagtcatacctaattatacacatgagaactcattcaggtgaaaaaccatatgaatgtaatgaatgtgggaaagccttcatttggaaatcactactcattgtacatgagcgaactcatgcaggggtcaacccttataaatgcagtcaatgtgagaaatccttcagtgggaaattacgccttcttgtacaccagagaatgcacacaagagagaaaccatatgaatgcagtgagtgtggaaaagccttcattaggaattctcaactcattgtacatcaaagaactcattcaggagagaaaccctatgggtgcaatgaatgtgggaaaaccttctctcaaaaatcaattctcagtgcacatcagagaacacatacaggagagaagccttgtaagtgcactgaatgtgggaaagccttttgttggaagtcacagctcattatgcatcagagaactcatgtagatgacaaacattagtaatgaactagtccgtaacttgaaagtatttcgatttcttggctttatatatcttgtggaaaggacgagctagtcccacgtgcaggtgtcag

SEQ ID NO: 2507 - DNA, 605 bp, Homo sapiens
  source 1..605: mol_type = genomic DNA
accgccaccatggccaccagggtccggacagcttctatttgggtcccacctctccaagaacgaaacagttcatgggataggatcagaaagctccaaggtcaggaatccatcttgggccaagggactcctggtctgcaacctctccctggaacacccaggcagaagcagaagagtcgcagaatagagaaagtcctagagtggctgtttatttcccaagagcagccaaaaatcaccaagtcctggggtaccaacacaccaaacctgatatcatcttcaagttggaacaaggagaagagctgtgtatggtgcaggcccaagttccaaatcagacctgtccaaacacagtctggaaaattgatgatcttatggattggcatcaggaaaataaagacaagctgggaagtacggcaaaaagctttgaatgcactacatttggaaaactatgtcttcttagtacaaagtatctttcaagacaaaaacctcataaatgtggcacgcatggaaagagtttagtaatgaactagtccgtaacttgaaagtatttcgatttcttggctttatatatcttgtggaaaggacgactagacttgtagtggaatcccttg

SEQ ID NO: 2508 - DNA, 509 bp, Homo sapiens
  source 1..509: mol_type = genomic DNA
accgccaccatggccaccagggtccggacagcttctatttgggtcccacctctccaagaacgaaacagttcatgggataggatcagaaagctccaaggtcaggaatccatcttgggccaagggactcctggtctgcaacctctccctggaacacccaggcagaagcagaagagtcgcagaatagagaaagtcctagagtggctgtttatttcccaagagcagccaaaaatcaccaagtcctggacacagtctggaaaattgatgatcttatggattggcatcaggaaaataaagacaagctgggaagtacggcaaaaagctttgaatgcactacatttggaaaactatgtcttcttagtacaaagtatctttcaagacaaaaacctcataaatgtggcacgcatggaaagagtttagtaatgaactagtccgtaacttgaaagtatttcgatttcttggctttatatatcttgtggaaaggacgaagtgatgtcgtcactcttgtatga

SEQ ID NO: 2509 - DNA, 404 bp, Homo sapiens
  source 1..404: mol_type = genomic DNA
accgccaccatggccaccagggtccggacagcttctatttggggtaccaacacaccaaacctgatatcatcttcaagttggaacaaggagaagagctgtgtatggtgcaggcccaagttccaaatcagacctgtccaaacacagtctggaaaattgatgatcttatggattggcatcaggaaaataaagacaagctgggaagtacggcaaaaagctttgaatgcactacatttggaaaactatgtcttcttagtacaaagtatctttcaagacaaaaacctcataaatgtggcacgcatggaaagagtttagtaatgaactagtccgtaacttgaaagtatttcgatttcttggctttatatatcttgtggaaaggacgatggtagagggccgagagcgtgtcg

SEQ ID NO: 2510 - DNA, 1004 bp, Homo sapiens
  source 1..1004: mol_type = genomic DNA
accgccaccatgcattcactagagaaagtgacttttgaagatgtagctattgacttcacccaggaagagtgggacatgatggacacatccaaaagaaagctgtacagagatgtgatgctggaaaatatcagtcacctggtgtccctcgggtaccagataagcaaatcctatataattttgcagctggagcaaggaaaagagctgtggtgggaaggaagagtatttcttcaagaccagaatccagacagggaaagtgcccttaagaaaaaacacatgatatccatgcatcctatcatcagaaaagacacatccaccagtatgacaatggagaactctctcattctggaggatccttttgaatataatgattcgggagaagattgcactcacagttccacaataactcagtgtttgttaactcacagtggaaagaaaccctgtgtcagcaaacagtgtggaaaatcccttcgtaatcttttgtcccctaaaccacgtaaacaaattcatactaaaggtaaatcatatcaatgtaatctatgtgaaaaggcctatactaattgcttttaccttagacggcacaagatgactcacactggagagaggccatatgcatgtcatctatgtggaaaagccttcactcagtgttctcaccttagaagacatgagaaaactcacacgggagagagaccatataagtgtcatcaatgtgggaaagcctttattcaatcctttaaccttcgaagacatgagagaactcaccttggacaaaagtgttatgaatgtgataaaagtgggaaagcctttagtcaaagctctggctttagaggaaacaaaataattcacattggagagaaaccacctgcttgtcttctatgtgggaaggccttcagtctgtcctccgaccttagatagtaatgaactagtccgtaacttgaaagtatttcgatttcttggctttatatatcttgtggaaaggacgacgctaagccaagattggattcaag

SEQ ID NO: 2511 - DNA, 1142 bp, Homo sapiens
  source 1..1142: mol_type = genomic DNA
accgccaccatgcacctgccgggctgcgcgccagccatggccgacgggagcttctcgcttgccggccacctgctccgcagcccgggcgggagcacctcgcgacttcacagcatcgaggccatcctggggtttaccaaggacgacgggatcctcggcaccttcccggcggagcggggcgcccggggcgcgaaggagcgggataggaggctgggcgcgcggcccgcctgccccaaggcgcccgaggaaggctccgagccctccccgccgccagccccggcgcccgcccccgagtacgaagcccctcgaccctactgccccaaggagcccggggaggcacggccgagcccagggctgcccgtcgggccagccaccggcgaagcgaaactgtcagaggaggaacagcccaagaaaaagcatcggcggaaccgcacgactttcaccacgtaccagctgcatgagctggagcgcgcgttcgagaagtcccactacccggacgtgtacagccgcgaggagctggccggcaaggtcaacctaccagaggtccgggtccaggtgtggttccagaaccgacgggctaagtggcggcggcaggagaagctggaagtgtcctccatgaagctgcaggactcgcccctcctctccttcagccgctccccgccctccgcgacgctgtcgcccctcggggcgggcccgggcagcggtggcgggccggctgggggcgcgctgccgctggagtcctggctcgggccgccgctgccgggcgggggcgccacggcgctgcagagcctgccgggcttcgggccgccggcgcagagcctgcctgccagctacacgccaccgccgccgcctccgcccttcctgaactccccgccgttgggccccggcctgcaacctctcgcgccgccgccgccctcctacccgtgcgggcccggcttcggggacaagttcccgctggacgaggcggacccgcgcaacagcagcatcgcggcgctgcgtctgaaagccaaggagcacatccaggccatcgggaagccgtggcaggccctctagtaatgaactagtccgtaacttgaaagtatttcgatttcttggctttatatatcttgtggaaaggacgaaccgtgctatgactgccgcattat

SEQ ID NO: 2512 - DNA, 1652 bp, Homo sapiens
  source 1..1652: mol_type = genomic DNA
accgccaccatggaccccgcaggggcagcagacccctcagtgcctcccaatcctttgactcacctgagcctgcaggacagatcagagatgcagctgcagagcgaagccgacaggcggagcctcccgggcacttggaccaggtcatccccagagcacaccaccattctgaggggaggcgtgcgcaggtgcctgcagcaacagtgtgaacagactgtgcggatcctgcatgccaaggtggcccagaaatcatacggaaatgagaagcggttcttctgccccccgccctgtgtctacctctcggggcctggctggagggtgaagccagggcaggatcaagctcaccaggcgggggaaacggggcccacggtctgcggttacatgggactggacagcgcgtccggcagcgccactgagacgcagaagctgaatttcgagcagcagccggactccagggaattcggctgcgccaagaccctgtacatctcagatgcagacaagaggaagcactttcggctggtgctgcggctggtgctgcgcgggggccgggagctgggtaccttccacagccgccttatcaaggtcatctcgaagccctcgcagaagaagcagtcgctgaaaaacaccgatctgtgcatatcctccggctcaaaggtctccctcttcaaccgcctgcgctctcagacggtctccacacgctacctctctgtggaggatggggcctttgtggccagtgcacgacagtgggctgccttcacgctccacctggctgatgggcactctgcccaaggagacttcccaccgcgagagggctacgttcgctatggctccctggtgcagctcgtctgcacggtcaccggcatcacactacctcccatgatcatccgtaaagtagcaaaacagtgtgcgctccttgatgtggatgagcccatctcccagctgcacaagtgtgcattccagtttccaggcagtcccccaggagggggtggcacctacttatgccttgccacagagaaggtggtgcaatttcaggcctctccctgccccaaggaggcgaacagggctctgcttaacgacagctcttgctggaccatcatcggcaccgagtcggtggaattttccttcagcaccagcctggcgtgtaccctggagccggtcactccggtgcctctcatcagcaccctagagctgagcggcgggggcgacgtggccacgctggagctccacggagagaacttccacgcggggctcaaggtgtggtttggggacgtggaggcagaaaccatgtacagcccgcggtccctggtgtgcgtggtgccggacgtggcggccttctgcagcgactggcgctggctgcgcgctcccatcacaatccccatgagcctggtgcgcgccgacgggctcttctaccctagtgccttctccttcacctacaccccggaatacagcgtgcggccgggtcaccccggcgtccccgagcccgccaccgacgccgacgcgctcctggagagcatccatcaggagttcacgcgcaccaacttccacctcttcatccagacttagtaatgaactagtccgtaacttgaaagtatttcgatttcttggctttatatatcttgtggaaaggacgataatggaaattagataaccctaag

SEQ ID NO: 2513 - DNA, 1517 bp, Homo sapiens
  source 1..1517: mol_type = genomic DNA
accgccaccatggaccccgcaggggcagcagacccctcagtgcctcccaatcctttgactcacctgagcctgcaggacagatcagagatgcagctgcagagcgaagccgacaggcggagcctcccgggcacttggaccaggtcatccccagagcacaccaccattctgaggggaggcgtgcgcaggtgcctgcagcaacagtgtgaacagactgtgcggatcctgcatgccaaggtggcccagaaatcatacggaaatgagaagcggttcttctgccccccgccctgtgtctacctctcggggcctggctggagggtgaagccagggcaggatcaagctcaccaggcgggggaaacggggcccacggtctgcggttacatgggactggacagcgcgtccggcagcgccactgagacgcagaagctgaatttcgagcagcagccggactccagggaattcggctgcgccaagaccctgtacatctcagatgcagacaagaggaagcactttcggctggtgctgcggctggtgctgcgcgggggccgggagctgggtaccttccacagccgccttatcaaggtcatctcgaagccctcgcagaagaagcagtcgctgaaaaacaccgatctgtgcatatcctccggctcaaaggtctccctcttcaaccgcctgcgctctcagacggtctccacacgctacctctctgtggaggatggggcctttgtggccagtgcacgacagtgggctgccttcacgctccacctggctgatgggcactctgcccaaggagacttcccaccgcgagagggctacgttcgctatggctccctggtgcagctcgtctgcacggtcaccggcatcacactacctcccatgatcatccgtaaagtagcaaaacagtgtgcgctccttgatgtggatgagcccatctcccagctgcacaagtgtgcattccagtttccaggcagtcccccaggagggggtggcacctacttatgccttgccacagagaaggtggtgcaatttcaggcctctccctgccccaaggaggcgaacagggctctgcttaacgacagctcttgctggaccatcatcggcaccgagtcggtggaattttccttcagcaccagcctggcgtgtaccctggagccggtcactccggtgcctctcatcagcaccctagagctgagcggcgggggcgacgtggccacgctggagctccacggagagaacttccacgcggggctcaaggtgtggtttggggacgtggaggcagaaaccatgtacaggtacggggtggagcccgcggtccctggtgtgcgtggtgccggacgtggcggccttctgcagcgactggcgctggctgcgcgctcccatcacaatccccatgagcctggtgcgcgccgacgggctcttctaccctagtaatgaactagtccgtaacttgaaagtatttcgatttcttggctttatatatcttgtggaaaggacgaccgcacagagtagacttcctaccg

SEQ ID NO: 2514 - DNA, 1655 bp, Homo sapiens
  source 1..1655: mol_type = genomic DNA
accgccaccatggaccccgcaggggcagcagacccctcagtgcctcccaatcctttgactcacctgagcctgcaggacagatcagagatgcagctgcagagcgaagccgacaggcggagcctcccgggcacttggaccaggtcatccccagagcacaccaccattctgaggggaggcgtgcgcaggtgcctgcagcaacagtgtgaacagactgtgcggatcctgcatgccaaggtggcccagaaatcatacggaaatgagaagcggttcttctgccccccgccctgtgtctacctctcggggcctggctggagggtgaagccagggcaggatcaagctcaccaggcgggggaaacggggcccacggtctgcggttacatgggactggacagcgcgtccggcagcgccactgagacgcagaagctgaatttcgagcagcagccggactccagggaattcggctgcgccaagaccctgtacatctcagatgcagacaagaggaagcactttcggctggtgctgcggctggtgctgcgcgggggccgggagctgggtaccttccacagccgccttatcaaggtcatctcgaagccctcgcagaagaagcagtcgctgaaaaacaccgatctgtgcatatcctccggctcaaaggtctccctcttcaaccgcctgcgctctcagacggtctccacacgctacctctctgtggaggatggggcctttgtggccagtgcacgacagtgggctgccttcacgctccacctggctgatgggcactctgcccaaggagacttcccaccgcgagagggctacgttcgctatggctccctggtgcagctcgtctgcacggtcaccggcatcacactacctcccatgatcatccgtaaagtagcaaaacagtgtgcgctccttgatgtggatgagcccatctcccagctgcacaagtgtgcattccagtttccaggcagtcccccaggagggggtggcacctacttatgccttgccacagagaaggtggtgcaatttcaggcctctccctgccccaaggaggcgaacagggctctgcttaacgacagctcttgctggaccatcatcggcaccgagtcggtggaattttccttcagcaccagcctggcgtgtaccctggagccggtcactccggtgcctctcatcagcaccctagagctgagcggcgggggcgacgtggccacgctggagctccacggagagaacttccacgcggggctcaaggtgtggtttggggacgtggaggcagaaaccatgtacaggagcccgcggtccctggtgtgcgtggtgccggacgtggcggccttctgcagcgactggcgctggctgcgcgctcccatcacaatccccatgagcctggtgcgcgccgacgggctcttctaccctagtgccttctccttcacctacaccccggaatacagcgtgcggccgggtcaccccggcgtccccgagcccgccaccgacgccgacgcgctcctggagagcatccatcaggagttcacgcgcaccaacttccacctcttcatccagacttagtaatgaactagtccgtaacttgaaagtatttcgatttcttggctttatatatcttgtggaaaggacgagctcaactgagctggttatagtat

SEQ ID NO: 2515 - DNA, 5600 bp, Homo sapiens
  source 1..5600: mol_type = genomic DNA
accgccaccatggaggacacacccccctcactcagctgctccgactgtcagcgccactttcccagcctcccagagctctctcggcaccgagaactgctccatccatctcccaaccaggacagtgaggaggctgacagcatccctcggccctaccgttgtcagcagtgtgggcggggctaccgtcaccccgggagcctggttaaccatcgtcggacccacgagactggccttttcccctgtaccacctgtggcaaggacttctccaatcccatggctctcaagagccatatgaggacacatgctcctgagggccgccgcaggcacaggcccccacgccccaaggaagccactccacacctccagggtgagacggtgtccactgactcctggggccaaaggcttggctctagtgaaggctgggaaaaccagacaaaacatacagaagagacacctgactgtgaatctgtacctgaccccagggcagcttcgggtacgtgggaagatctgcccaccagacaaagagaaggcttggcaagccacccaggtcctgaggatggtgcagacggctggggaccctccactaactctgccagagcccctcctctccccatcccagccagcagccttcttagcaacttggaacagtatctggctgaatcagtagtgaacttcacagggggccaggagcccacccagtcccctcctgctgaggaggagcggcggtacaaatgtagtcagtgtggcaagacctacaagcacgccgggagcctcaccaaccaccgccagagccacacgctgggcatctacccctgtgccatctgtttcaaggagttctctaacctcatggctctgaagaaccactctcgactgcatgcccagtatcggccttaccactgtccccactgcccccgtgtcttccggctcccccgggagctgctggaacaccagcagtcccatgagggtgaaaggcaggagccacgctgggaggagaaagggatgcccaccaccaatgggcacacagatgagagcagccaggaccagctccccagtgcacagatgctgaatggctctgcggagctcagcacctctggggagctggaggacagtggcctggaggaataccggcctttccgctgtggggactgtggccgtacttaccgccatgctgggagcctcatcaaccatcgaaagagccaccagacaggtgtctacccctgctcactctgttctaagcagctgttcaatgcggctgccctcaaaaaccatgtgcgggctcatcacaggcccaggcaaggagttggggaaaatgggcagccatcagtcccaccagctcccctgctgctggctgagaccacccacaaagaggaagaggaccccaccaccaccctggaccatcggccctataagtgcagtgagtgtggtcgtgcttaccgccaccgggggagcctggtgaaccatcgccacagccatcggactggagagtaccagtgctcactctgtccccgcaagtaccccaatctcatggccctgcgcaaccacgtgcgggtacattgcaaggctgctcgccgaagtgcagacatcggggctgagggtgcccccagccacctcaaggtagaactcccgcctgacccagtggaggcagaggcagccccgcacacagatcaggaccatgtgtgcaaacatgaagaagaggccacggacatcaccccagcagcagacaagacagcagcacatatctgtagcatctgtgggctgctctttgaagacgctgagagccttgaacgtcatggcctgactcatggggcaggggaaaaggaaaatagcagaacagagaccacaatgtcacctcctagggcctttgcctgccgagactgtggaaagagctatcgccactcaggcagccttatcaaccacaggcagacccaccagacaggagacttcagttgtggggcctgtgccaagcacttccacaccatggctgccatgaagaaccacttgcgccggcacagtcggcggcggagcaggcggcatcggaagcgggctggcggtgccagcggtgggagagaagccaaactcctggcagcggagagctggacccgggagctagaagacaatgaaggcctggagtctccccaagacccttcaggggaaagtcctcatggggctgaaggcaacctggaaagtgatggggactgtttgcaggctgaatctgaaggggacaaatgtgggcttgagagggatgagacccatttccagggtgataaagagagcggaggcactggggaaggactggaaaggaaggatgccagtttacttgacaacttggacatcccaggtgaggaaggtggtggcactcacttctgcgatagcctcactggggtggatgaagaccagaagccagccactggccaacccaactcctcttcccactctgccaatgctgtcactggctggcaggctggggccgctcacacatgctctgactgtgggcattctttcccccatgccactggcctgctgagccacaggccctgccacccaccaggcatctatcagtgctccctctgcccgaaggagtttgactctctgcctgccctccgcagccacttccagaaccataggcctggggaggcgacctcagcacagcctttcctctgctgcctctgtggcatgatcttccctgggcgggctggctacaggcttcaccggcgccaggcccacagctcctctggcatgactgagggctcagaggaggagggggaagaggaaggagtggcagaggcagcccctgcacgcagtccaccactgcagctctcggaagcagagctgctgaatcagctgcagcgggaggtggaagcgctggacagtgcagggtatgggcacatctgtggctgctgtggtcagacctacgatgacctggggagcctggagcgtcaccaccaaagtcagagttctgggactactgcagacaaggctcccagccccttgggagtggcaggtgatgccatggagatggtcgtggacagtgtcttggaggacatagtgaattctgtctctggagagggtggagatgccaagtctcaagagggagcaggcacccccttgggagacagcctctgcatccagggtggggaaagtttgttggaggctcagccccgccccttccgctgcaaccagtgtggcaagacctatcgccatgggggcagcctggtgaaccaccgcaagatccaccagactggagactttctctgccctgtctgctcccgctgctaccccaacctggctgcctaccgtaatcatctgcggaaccaccctcgctgcaaaggctctgagccccaggttgggcccatcccagaggcagcaggtagcagtgagctgcaggttgggcccatcccagaaggaggcagcaacaagccccagcacatggcagaggaggggccggggcaagcagaagtcgagaagctccaggaagaacttaaagtggagcccctggaggaagtggccagggtgaaagaagaggtgtgggaggagaccactgtgaagggggaggagatagagcccaggctggagactgccgagaagggctgccagactgaagccagctctgagcggcccttcagctgcgaggtgtgtggccgatcctacaagcacgccggcagcctcatcaaccaccggcagagccaccagaccggccactttggctgtcaggcctgctccaagggcttctcaaacctcatgtccctcaagaaccaccggcgcatccatgcagatccccgacgtttccgctgcagcgagtgtgggaaggccttccgcctgcggaaacagctggccagccaccagcgggtccacatggaacggcgtgggggtgggggcacccgaaaggcgactcgggaagatcggcccttccgctgtgggcagtgcgggcggacctatcgccacgccggcagcctcctgaaccaccggcgcagccacgagacgggccagtacagctgccccacctgccccaagacctactccaaccgcatggccctgaaggaccaccagaggctgcactcagagaatcggcggcgacgggctggacggtccaggcgcacagctgtgcgttgcgccctctgtggccgcagcttccctggccggggatctttggagcggcacctgcgggagcatgaggagacagaaagggagccagccaatggccagggaggcctggatggcacagcggccagtgaggcgaacctgactggcagccagggactagagacccaattgggtggtgctgagccagtaccccacttggaggatggagtcccaaggccaggggagcgcagtcagagccccatcagggcagcaagctcagaagccccagagccactgtcctggggtgcagggaaggcaggtgggtggccggtaggtgggggactggggaatcatagtggaggctgggttcctcagttcctaactaggtcagaggagccagaggacagtgtccacaggagtccttgccacgctggtgactgccagctcaatggacctactctgagtcacatggatagctgggacaacagagacaacagctctcagctgcagccagggagccactcctcttgcagccagtgtggcaagacttactgccagtcaggcagcctcttgaaccacaacaccaacaagacagaccgacactattgcctgctctgctccaaggagttcttaaatcctgtggccacaaagagccacagccacaaccacatagacgcccagacctttgcctgtcctgactgtggcaaagcctttgagtcccaccaggaactggccagccacctgcaggctcatgcccggggccacagccaggtgccagcccagatggaggaggccagagatcccaaagccgggactggggaggaccaggtggttctccctggtcaagggaaagcccaggaggccccatcagaaacccccagaggcccaggagagagtgtggagagagccaggggaggacaagcggtgacgtccatggcggctgaggacaaggagcggcccttccgctgcacccagtgcgggcgctcctaccgccatgctggcagcctgctgaaccaccagaaggcccacaccacagggttgtacccgtgctccctctgtcccaaacttctccctaacctgctgtctcttaagaaccacagcaggacccacacggaccccaagcgccactgctgcagcatctgtggcaaggcctttcggacagctgcccggctggagggccacgggcgggtccatgcaccccgggaggggcctttcacctgcccccattgtccccgccacttccgccgccgaatcagcttcgtgcagcaccagcagcagcaccaggaggagtggacggtggccggctccggagccccagtggcaccagtgacgggcagaggggacttgccattgccccctccacccacccccacgaccccactcctggatccttcaccccagtggcctgcagacctcagcttctccctctagtaatgaactagtccgtaacttgaaagtatttcgatttcttggctttatatatcttgtggaaaggacgatgcacgcaacttggctataatgct

SEQ ID NO: 2516 - DNA, 2876 bp, Homo sapiens
  source 1..2876: mol_type = genomic DNA
accgccaccatggctcttcctcagggatctttgacattcagggatgtggctgtagaattctctcaggaggagtggaaatgcctggaccctgttcagaaagctttgtacagggacgtgatgttggagaactacaggaacctcggcttcctgggactctgtcttcctgacctgaatattatctccatgttggagcaagggaaagagccctggactgtggtgagccaagtgaaaatagcgaggaacccaaactgtggggaatgcatgaaaggcgtgatcaccggtatctctcctaaatgtgtgatcaaggaattaccaccaatacagaacagtaacacaggagaaaaattccaagcagtgatgttggaaggacatgaaagctatgacactgaaaatttttacttcagggaaatccggaaaaatctacaggaagttgactttcaatggaaagatggtgaaataaattataaagaagggccgatgacccataaaaacaatcttactggtcaaagagttcgacatagtcaaggggacgtagaaaacaagcatatggaaaatcagcttatattaaggtttcagtccggtctgggtgaattgcagaaatttcaaactgcagagaaaatttatggatgtaatcaaattgagaggacagttaataattgttttttagcttcaccacttcaaagaatttttcctggtgtccaaaccaacatttctaggaaatatgggaatgattttttgcaactttcgttacctacacaagacgagaaaacacatattagggaaaaaccttacataggtaatgagtgtggcaaagccttcagagtgtcttcaagtcttattaatcatcagatgatacatactacagagaaaccttacagatgcaatgagtctggtaaagcctttcatcggggctcactactaacagtacatcagatagtccatacaagagggaaaccataccaatgtgatgtatgtggcaggatcttcagacaaaattcagatcttgtaaatcaccggagaagtcacactggagacaaaccctacatatgtaatgaatgtggcaagtcctttagtaaaagttcccaccttgcagttcatcagagaattcatactggagagaaaccttacaaatgtaatcgatgtgggaagtgctttagtcaaagttcctctcttgcaactcatcagacagttcatactggagacaaaccctacaaatgtaatgaatgtggcaaaacctttaaacggaactcaagcctcactgcacatcatataatccatgcaggaaagaaaccatatacatgtgatgtatgtggcaaggtcttttatcagaattcacaacttgtaaggcaccagataattcatactggagagacaccttacaaatgtaatgaatgtggcaaggtcttctttcaacgttcacgtcttgcagggcaccggagaattcatactggagagaaaccctacaaatgtaatgaatgtggcaaggtcttcagtcaacattcacatcttgcagtgcatcagagagttcatactggagagaaaccttacaaatgtaatgaatgtggcaaagcctttaattggggctcattactaactgtacatcagagaattcataccggagagaaaccttacaaatgtaatgtgtgtggcaaggtctttaattacggtggatacctttcggttcatatgagatgtcatactggagagaaacctctccattgtaataaatgtggcatggtcttcacttactattcatgcctagcacgtcatcaaagaatgcataccggagagaaaccttacaaatgtaatgtgtgtggcaaggtcttcattgacagtggaaacctttcaattcataggcgaagtcataccggagagaaacctttccagtgtaacgaatgcggcaaggtcttcagttactactcatgcctagcacgtcatcggaaaattcataccggagagaaaccttataaatgtaatgattgtggcaaagcctatactcagcgttcaagcctcactaaacatctggtaattcatactggagagaacccttaccactgtaatgaatttggtgaggcttttatccaaagttcaaaacttgcaagatatcacagaaatcctactggggagaaaccacacaaatgtagtgaatgtggtagaacttttagtcataaaacaagtctggtgtaccatcagagaagacatactggagagatgccatacaaatgtattgaatgtgggaaagtctttaactccactacaaccctggcaaggcatcggagaattcatactggagagaaaccttacaaatgtaatgaatgtggcaaggtcttccgttatcgctcaggcctcgcacgtcattggagtattcatactggagagaaaccttacaaatgtaatgagtgtggcaaagcctttagagtacgttcaattctgcttaatcatcagatgatgcatactggagagaaaccttataaatgtaatgaatgtggtaaagcttttatcgaaaggtcaaacttggtttaccatcagagaaaccatactggagagaagccatacaaatgtatggaatgtggcaaggcgtttgggcggcggtcttgcctcactaaacaccaacgaattcattctagtgaaaaaccttataaatgtaatgagtgtggcaaatcttacattagtcgctcaggcctcactaaacatcagataaaacatgctggagagaaccttacaactaaactcaatgtggaaaggccgttagatgttgtcctaacctctgggatccccaaatagtaatgaactagtccgtaacttgaaagtatttcgatttcttggctttatatatcttgtggaaaggacgagaacttgtgccgccgaacaggcta

SEQ ID NO: 2517 - DNA, 2528 bp, Homo sapiens
  source 1..2528: mol_type = genomic DNA
accgccaccatgttggaaggacatgaaagctatgacactgaaaatttttacttcagggaaatccggaaaaatctacaggaagttgactttcaatggaaagatggtgaaataaattataaagaagggccgatgacccataaaaacaatcttactggtcaaagagttcgacatagtcaaggggacgtagaaaacaagcatatggaaaatcagcttatattaaggtttcagtccggtctgggtgaattgcagaaatttcaaactgcagagaaaatttatggatgtaatcaaattgagaggacagttaataattgttttttagcttcaccacttcaaagaatttttcctggtgtccaaaccaacatttctaggaaatatgggaatgattttttgcaactttcgttacctacacaagacgagaaaacacatattagggaaaaaccttacataggtaatgagtgtggcaaagccttcagagtgtcttcaagtcttattaatcatcagatgatacatactacagagaaaccttacagatgcaatgagtctggtaaagcctttcatcggggctcactactaacagtacatcagatagtccatacaagagggaaaccataccaatgtgatgtatgtggcaggatcttcagacaaaattcagatcttgtaaatcaccggagaagtcacactggagacaaaccctacatatgtaatgaatgtggcaagtcctttagtaaaagttcccaccttgcagttcatcagagaattcatactggagagaaaccttacaaatgtaatcgatgtgggaagtgctttagtcaaagttcctctcttgcaactcatcagacagttcatactggagacaaaccctacaaatgtaatgaatgtggcaaaacctttaaacggaactcaagcctcactgcacatcatataatccatgcaggaaagaaaccatatacatgtgatgtatgtggcaaggtcttttatcagaattcacaacttgtaaggcaccagataattcatactggagagacaccttacaaatgtaatgaatgtggcaaggtcttctttcaacgttcacgtcttgcagggcaccggagaattcatactggagagaaaccctacaaatgtaatgaatgtggcaaggtcttcagtcaacattcacatcttgcagtgcatcagagagttcatactggagagaaaccttacaaatgtaatgaatgtggcaaagcctttaattggggctcattactaactgtacatcagagaattcataccggagagaaaccttacaaatgtaatgtgtgtggcaaggtctttaattacggtggatacctttcggttcatatgagatgtcatactggagagaaacctctccattgtaataaatgtggcatggtcttcacttactattcatgcctagcacgtcatcaaagaatgcataccggagagaaaccttacaaatgtaatgtgtgtggcaaggtcttcattgacagtggaaacctttcaattcataggcgaagtcataccggagagaaacctttccagtgtaacgaatgcggcaaggtcttcagttactactcatgcctagcacgtcatcggaaaattcataccggagagaaaccttataaatgtaatgattgtggcaaagcctatactcagcgttcaagcctcactaaacatctggtaattcatactggagagaacccttaccactgtaatgaatttggtgaggcttttatccaaagttcaaaacttgcaagatatcacagaaatcctactggggagaaaccacacaaatgtagtgaatgtggtagaacttttagtcataaaacaagtctggtgtaccatcagagaagacatactggagagatgccatacaaatgtattgaatgtgggaaagtctttaactccactacaaccctggcaaggcatcggagaattcatactggagagaaaccttacaaatgtaatgaatgtggcaaggtcttccgttatcgctcaggcctcgcacgtcattggagtattcatactggagagaaaccttacaaatgtaatgagtgtggcaaagcctttagagtacgttcaattctgcttaatcatcagatgatgcatactggagagaaaccttataaatgtaatgaatgtggtaaagcttttatcgaaaggtcaaacttggtttaccatcagagaaaccatactggagagaagccatacaaatgtatggaatgtggcaaggcgtttgggcggcggtcttgcctcactaaacaccaacgaattcattctagtgaaaaaccttataaatgtaatgagtgtggcaaatcttacattagtcgctcaggcctcactaaacatcagataaaacatgctggagagaaccttacaactaaactcaatgtggaaaggccgttagatgttgtcctaacctctgggatccccaaatagtaatgaactagtccgtaacttgaaagtatttcgatttcttggctttatatatcttgtggaaaggacgagggcgagggcccagcccgatgcaa

SEQ ID NO: 2518 - DNA, 6971 bp, Homo sapiens
  source 1..6971: mol_type = genomic DNA
accgccaccatggcccataacgcgggcgccgcggccgccgccggcacccacagcgccaagagcggcggctccgaggcggctctcaaggagggtggaagcgccgccgcgctgtcctcctcctcctcctcctccgcggcggcagcggcggcatcctcttcctcctcgtcgggcccgggctcggccatggagacggggctgctccccaaccacaaactgaaaaccgttggcgaagcccccgccgcgccgccccaccagcagcaccaccaccaccaccatgcccaccaccaccaccaccatgcccaccacctccaccaccaccacgcactacagcagcagctaaaccagttccagcagcagcagcagcagcagcaacagcagcagcagcagcagcagcaacagcaacatcccatttccaacaacaacagcttgggcggcgcgggcggcggcgcgcctcagcccggccccgacatggagcagccgcaacatggaggcgccaaggacagtgctgcgggcggccaggccgaccccccgggcccgccgctgctgagcaagccgggcgacgaggacgacgcgccgcccaagatgggggagccggcgggcggccgctacgagcacccgggcttgggcgccctgggcacgcagcagccgccggtcgccgtgcccgggggcggcggcggcccggcggccgtcccggagtttaataattactatggcagcgctgcccctgcgagcggcggccccggcggccgcgctgggccttgctttgatcaacatggcggacaacaaagccccgggatggggatgatgcactccgcctccgccgccgccgccggggcccccggcagcatggaccccctgcagaactcccacgaagggtaccccaacagccagtgcaaccattatccgggctacagccggcccggcgcgggcggcggcggcggcggcggcggcggaggaggaggaggcagcggaggaggaggaggaggaggaggagcaggagcaggaggagcaggagcgggagctgtggcggcggcggccgcggcggcggcggcagcagcaggaggcggcggcggcggcggctatgggggctcgtccgcggggtacggggtgctgagctccccccggcagcagggcggcggcatgatgatgggccccgggggcggcggggccgcgagcctcagcaaggcggccgccggctcggcggcggggggcttccagcgcttcgccggccagaaccagcacccgtcgggggccaccccgaccctcaatcagctgctcacctcgcccagccccatgatgcggagctacggcggcagctaccccgagtacagcagccccagcgcgccgccgccgccgccgtcgcagccccagtcccaggcggcggcggcgggggcggcggcgggcggccagcaggcggccgcgggcatgggcttgggcaaggacatgggcgcccagtacgccgctgccagcccggcctgggcggccgcgcaacaaaggagtcacccggcgatgagccccggcacccccggaccgaccatgggcagatcccagggcagcccaatggatccaatggtgatgaagagacctcagttgtatggcatgggcagtaaccctcattctcagcctcagcagagcagtccgtacccaggaggttcctatggccctccaggcccacagcggtatccaattggcatccagggtcggactcccggggccatggccggaatgcagtaccctcagcagcagatgccacctcagtatggacagcaaggtgtgagtggttactgccagcagggccaacagccatattacagccagcagccgcagcccccgcacctcccaccccaggcgcagtatctgccgtcccagtcccagcagaggtaccagccgcagcaggacatgtctcaggaaggctatggaactagatctcaacctcctctggcccccggaaaacctaaccatgaagacttgaacttaatacagcaagaaagaccatcaagtttaccagatctgtctggctccattgatgacctccccacgggaacggaagcaactttgagctcagcagtcagtgcatccgggtccacgagcagccaaggggatcagagcaacccggcgcagtcgcctttctccccacatgcgtcccctcatctctccagcatcccggggggcccatctccctctcctgttggctctcctgtaggaagcaaccagtctcgatctggcccaatctctcctgcaagtatcccaggtagtcagatgcctccgcagccacccgggagccagtcagaatccagttcccatcccgccttgagccagtcaccaatgccacaggaaagaggttttatggcaggcacacaaagaaaccctcagatggctcagtatggacctcaacagacaggaccatccatgtcgcctcatccttctcctgggggccagatgcatgctggaatcagtagctttcagcagagtaactcaagtgggacttacggtccacagatgagccagtatggaccacaaggtaactactccagacccccagcgtatagtggggtgcccagtgcaagctacagcggcccagggcccggtatgggtatcagtgccaacaaccagatgcatggacaagggccaagccagccatgtggtgctgtgcccctgggacgaatgccatcagctgggatgcagaacagaccatttcctggaaatatgagcagcatgacccccagttctcctggcatgtctcagcagggagggccaggaatggggccgccaatgccaactgtgaaccgtaaggcacaggaggcagccgcagcagtgatgcaggctgctgcgaactcagcacaaagcaggcaaggcagtttccccggcatgaaccagagtggacttatggcttccagctctccctacagccagcccatgaacaacagctctagcctgatgaacacgcaggcgccgccctacagcatggcgcccgccatggtgaacagctcggcagcatctgtgggtcttgcagatatgatgtctcctggtgaatccaaactgcccctgcctctcaaagcagacggcaaagaagaaggcactccacagcccgagagcaagtcaaaggatagctacagctctcagggtatttctcagcccccaaccccaggcaacctgccagtcccttccccaatgtcccccagctctgctagcatctcctcatttcatggagatgaaagtgatagcattagcagcccaggctggccaaagactccatcaagccctaagtccagctcctccaccactactggggagaagatcacgaaggtgtacgagctggggaatgagccagagagaaagctctgggtcgaccgatacctcaccttcatggaagagagaggctctcctgtctcaagtctgcctgccgtgggcaagaagcccctggacctgttccgactctacgtctgcgtcaaagagatcgggggtttggcccaggttaataaaaacaagaagtggcgtgagctggcaaccaacctaaacgttggcacctcaagcagtgcagcgagctccctgaaaaagcagtatattcagtacctgtttgcctttgagtgcaagatcgaacgtggggaggagcccccgccggaagtcttcagcaccggggacaccaaaaagcagcccaagctccagccgccatctcctgctaactcgggatccttgcaaggcccacagaccccccagtcaactggcagcaattccatggcagaggttccaggtgacctgaagccacctaccccagcctccacccctcacggccagatgactccaatgcaaggtggaagaagcagtacaatcagtgtgcacgacccattctcagatgtgagtgattcatccttcccgaaacggaactccatgactccaaacgccccctaccagcagggcatgagcatgcccgatgtgatgggcaggatgccctatgagcccaacaaggacccctttgggggaatgagaaaagtgcctggaagcagcgagccctttatgacgcaaggacagatgcccaacagcagcatgcaggacatgtacaaccaaagtccctccggagcaatgtctaacctgggcatggggcagcgccagcagtttccctatggagccagttacgaccgaaggcatgaaccttatgggcagcagtatccaggccaaggccctccctcgggacagccgccgtatggagggcaccagcccggcctgtacccacagcagccgaattacaaacgccatatggacggcatgtacgggcccccagccaagcgccacgagggcgacatgtacaacatgcagtacagcagccagcagcaggagatgtacaaccagtatggaggctcctactcgggcccggaccgcaggcccatccagggccagtacccgtatccctacagcagggagaggatgcagggcccggggcagatccagacacacggaatcccgcctcagatgatgggcggcccgctgcagtcgtcctccagtgaggggcctcagcagaatatgtgggcagcacgcaatgatatgccttatccctaccagaacaggcagggccctggcggccctacacaggcgcccccttacccaggcatgaaccgcacagacgatatgatggtacccgatcagaggataaatcatgagagccagtggccttctcacgtcagccagcgtcagccttatatgtcgtcctcagcctccatgcagcccatcacacgcccaccacagccgtcctaccagacgccaccgtcactgccaaatcacatctccagggcgcccagcccagcgtccttccagcgctccctggagaaccgcatgtctccaagcaagtctccttttctgccgtctatgaagatgcagaaggtcatgcccacggtccccacatcccaggtcaccgggccaccaccccaaccacccccaatcagaagggagatcacctttcctcctggctcagtagaagcatcacaaccagtcttgaaacaaaggcgaaagattacctccaaagatatcgttactcctgaggcgtggcgtgtgatgatgtcccttaaatcaggtcttttggctgagagtacgtgggctttggacactattaatattcttctgtatgatgacagcactgttgctactttcaatctctcccagttgtctggatttctcgaacttttagtcgagtactttagaaaatgcctgattgacatttttggaattcttatggaatatgaagtgggagaccccagccaaaaagcacttgatcacaacgcagcaaggaaggatgacagccagtccttggcagacgattctgggaaagaggaggaagatgctgaatgtattgatgacgacgaggaagacgaggaggatgaggaggaagacagcgagaagacagaaagcgatgaaaagagcagcatcgctctgactgccccggacgccgctgcagacccaaaggagaagcccaagcaagccagtaagttcgacaagctgccaataaagatagtcaaaaagaacaacctgtttgttgttgaccgatctgacaagttggggcgtgtgcaggagttcaatagtggccttctgcactggcagctcggcgggggtgacaccaccgagcacattcagactcactttgagagcaagatggaaattcctcctcgcaggcgcccacctccccccttaagctccgcaggtagaaagaaagagcaagaaggcaaaggcgactctgaagagcagcaagagaaaagcatcatagcaaccatcgatgacgtcctctctgctcggccaggggcattgcctgaagacgcaaaccctgggccccagaccgaaagcagtaagtttccctttggtatccagcaagccaaaagtcaccggaacatcaagctgctggaggacgagcccaggagccgagacgagactcctctgtgtaccatcgcgcactggcaggactcgctggctaagcgatgcatctgtgtgtccaatattgtccgtagcttgtcattcgtgcctggcaatgatgccgaaatgtccaaacatccaggcctggtgctgatcctggggaagctgattcttcttcaccacgagcatccagagagaaagcgagcaccgcagacctatgagaaagaggaggatgaggacaagggggtggcctgcagcaaagatgagtggtggtgggactgcctcgaggtcttgagggataacacgttggtcacgttggccaacatttccgggcagctagacttgtctgcttacacggaaagcatctgcttgccaattttggatggcttgctgcactggatggtgtgcccgtctgcagaggcacaagatccctttccaactgtgggacccaactcggtcctgtcgcctcagagacttgtgctggagaccctctgtaaactcagtatccaggacaataatgtggacctgatcttggccactcctccatttagtcgtcaggagaaattctatgctacattagttaggtacgttggggatcgcaaaaacccagtctgtcgagaaatgtccatggcgcttttatcgaaccttgcccaaggggacgcactagcagcaagggccatagctgtgcagaaaggaagcattggaaacttgataagcttcctagaggatggggtcacgatggcccagtaccagcagagccagcacaacctcatgcacatgcagcccccgcccctggaaccacctagcgtagacatgatgtgcagggcggccaaggctttgctagccatggccagagtggacgaaaaccgctcggaattccttttgcacgagggccggttgctggatatctcgatatcagctgtcctgaactctctggttgcatctgtcatctgtgatgtactgtttcagattgggcagttatagtaatgaactagtccgtaacttgaaagtatttcgatttcttggctttatatatcttgtggaaaggacgagccatgtggttgaagcagtctatt

SEQ ID NO: 2519 - DNA, 6812 bp, Homo sapiens
  source 1..6812: mol_type = genomic DNA
accgccaccatggcccataacgcgggcgccgcggccgccgccggcacccacagcgccaagagcggcggctccgaggcggctctcaaggagggtggaagcgccgccgcgctgtcctcctcctcctcctcctccgcggcggcagcggcggcatcctcttcctcctcgtcgggcccgggctcggccatggagacggggctgctccccaaccacaaactgaaaaccgttggcgaagcccccgccgcgccgccccaccagcagcaccaccaccaccaccatgcccaccaccaccaccaccatgcccaccacctccaccaccaccacgcactacagcagcagctaaaccagttccagcagcagcagcagcagcagcaacagcagcagcagcagcagcagcaacagcaacatcccatttccaacaacaacagcttgggcggcgcgggcggcggcgcgcctcagcccggccccgacatggagcagccgcaacatggaggcgccaaggacagtgctgcgggcggccaggccgaccccccgggcccgccgctgctgagcaagccgggcgacgaggacgacgcgccgcccaagatgggggagccggcgggcggccgctacgagcacccgggcttgggcgccctgggcacgcagcagccgccggtcgccgtgcccgggggcggcggcggcccggcggccgtcccggagtttaataattactatggcagcgctgcccctgcgagcggcggccccggcggccgcgctgggccttgctttgatcaacatggcggacaacaaagccccgggatggggatgatgcactccgcctccgccgccgccgccggggcccccggcagcatggaccccctgcagaactcccacgaagggtaccccaacagccagtgcaaccattatccgggctacagccggcccggcgcgggcggcggcggcggcggcggcggcggaggaggaggaggcagcggaggaggaggaggaggaggaggagcaggagcaggaggagcaggagcgggagctgtggcggcggcggccgcggcggcggcggcagcagcaggaggcggcggcggcggcggctatgggggctcgtccgcggggtacggggtgctgagctccccccggcagcagggcggcggcatgatgatgggccccgggggcggcggggccgcgagcctcagcaaggcggccgccggctcggcggcggggggcttccagcgcttcgccggccagaaccagcacccgtcgggggccaccccgaccctcaatcagctgctcacctcgcccagccccatgatgcggagctacggcggcagctaccccgagtacagcagccccagcgcgccgccgccgccgccgtcgcagccccagtcccaggcggcggcggcgggggcggcggcgggcggccagcaggcggccgcgggcatgggcttgggcaaggacatgggcgcccagtacgccgctgccagcccggcctgggcggccgcgcaacaaaggagtcacccggcgatgagccccggcacccccggaccgaccatgggcagatcccagggcagcccaatggatccaatggtgatgaagagacctcagttgtatggcatgggcagtaaccctcattctcagcctcagcagagcagtccgtacccaggaggttcctatggccctccaggcccacagcggtatccaattggcatccagggtcggactcccggggccatggccggaatgcagtaccctcagcagcagatgccacctcagtatggacagcaaggtgtgagtggttactgccagcagggccaacagccatattacagccagcagccgcagcccccgcacctcccaccccaggcgcagtatctgccgtcccagtcccagcagaggtaccagccgcagcaggacatgtctcaggaaggctatggaactagatctcaacctcctctggcccccggaaaacctaaccatgaagacttgaacttaatacagcaagaaagaccatcaagtttaccagatctgtctggctccattgatgacctccccacgggaacggaagcaactttgagctcagcagtcagtgcatccgggtccacgagcagccaaggggatcagagcaacccggcgcagtcgcctttctccccacatgcgtcccctcatctctccagcatcccggggggcccatctccctctcctgttggctctcctgtaggaagcaaccagtctcgatctggcccaatctctcctgcaagtatcccaggtagtcagatgcctccgcagccacccgggagccagtcagaatccagttcccatcccgccttgagccagtcaccaatgccacaggaaagaggttttatggcaggcacacaaagaaaccctcagatggctcagtatggacctcaacagacaggaccatccatgtcgcctcatccttctcctgggggccagatgcatgctggaatcagtagctttcagcagagtaactcaagtgggacttacggtccacagatgagccagtatggaccacaaggtaactactccagacccccagcgtatagtggggtgcccagtgcaagctacagcggcccagggcccggtatgggtatcagtgccaacaaccagatgcatggacaagggccaagccagccatgtggtgctgtgcccctgggacgaatgccatcagctgggatgcagaacagaccatttcctggaaatatgagcagcatgacccccagttctcctggcatgtctcagcagggagggccaggaatggggccgccaatgccaactgtgaaccgtaaggcacaggaggcagccgcagcagtgatgcaggctgctgcgaactcagcacaaagcaggcaaggcagtttccccggcatgaaccagagtggacttatggcttccagctctccctacagccagcccatgaacaacagctctagcctgatgaacacgcaggcgccgccctacagcatggcgcccgccatggtgaacagctcggcagcatctgtgggtcttgcagatatgatgtctcctggtgaatccaaactgcccctgcctctcaaagcagacggcaaagaagaaggcactccacagcccgagagcaagtcaaagaagtccagctcctccaccactactggggagaagatcacgaaggtgtacgagctggggaatgagccagagagaaagctctgggtcgaccgatacctcaccttcatggaagagagaggctctcctgtctcaagtctgcctgccgtgggcaagaagcccctggacctgttccgactctacgtctgcgtcaaagagatcgggggtttggcccaggttaataaaaacaagaagtggcgtgagctggcaaccaacctaaacgttggcacctcaagcagtgcagcgagctccctgaaaaagcagtatattcagtacctgtttgcctttgagtgcaagatcgaacgtggggaggagcccccgccggaagtcttcagcaccggggacaccaaaaagcagcccaagctccagccgccatctcctgctaactcgggatccttgcaaggcccacagaccccccagtcaactggcagcaattccatggcagaggttccaggtgacctgaagccacctaccccagcctccacccctcacggccagatgactccaatgcaaggtggaagaagcagtacaatcagtgtgcacgacccattctcagatgtgagtgattcatccttcccgaaacggaactccatgactccaaacgccccctaccagcagggcatgagcatgcccgatgtgatgggcaggatgccctatgagcccaacaaggacccctttgggggaatgagaaaagtgcctggaagcagcgagccctttatgacgcaaggacagatgcccaacagcagcatgcaggacatgtacaaccaaagtccctccggagcaatgtctaacctgggcatggggcagcgccagcagtttccctatggagccagttacgaccgaaggcatgaaccttatgggcagcagtatccaggccaaggccctccctcgggacagccgccgtatggagggcaccagcccggcctgtacccacagcagccgaattacaaacgccatatggacggcatgtacgggcccccagccaagcgccacgagggcgacatgtacaacatgcagtacagcagccagcagcaggagatgtacaaccagtatggaggctcctactcgggcccggaccgcaggcccatccagggccagtacccgtatccctacagcagggagaggatgcagggcccggggcagatccagacacacggaatcccgcctcagatgatgggcggcccgctgcagtcgtcctccagtgaggggcctcagcagaatatgtgggcagcacgcaatgatatgccttatccctaccagaacaggcagggccctggcggccctacacaggcgcccccttacccaggcatgaaccgcacagacgatatgatggtacccgatcagaggataaatcatgagagccagtggccttctcacgtcagccagcgtcagccttatatgtcgtcctcagcctccatgcagcccatcacacgcccaccacagccgtcctaccagacgccaccgtcactgccaaatcacatctccagggcgcccagcccagcgtccttccagcgctccctggagaaccgcatgtctccaagcaagtctccttttctgccgtctatgaagatgcagaaggtcatgcccacggtccccacatcccaggtcaccgggccaccaccccaaccacccccaatcagaagggagatcacctttcctcctggctcagtagaagcatcacaaccagtcttgaaacaaaggcgaaagattacctccaaagatatcgttactcctgaggcgtggcgtgtgatgatgtcccttaaatcaggtcttttggctgagagtacgtgggctttggacactattaatattcttctgtatgatgacagcactgttgctactttcaatctctcccagttgtctggatttctcgaacttttagtcgagtactttagaaaatgcctgattgacatttttggaattcttatggaatatgaagtgggagaccccagccaaaaagcacttgatcacaacgcagcaaggaaggatgacagccagtccttggcagacgattctgggaaagaggaggaagatgctgaatgtattgatgacgacgaggaagacgaggaggatgaggaggaagacagcgagaagacagaaagcgatgaaaagagcagcatcgctctgactgccccggacgccgctgcagacccaaaggagaagcccaagcaagccagtaagttcgacaagctgccaataaagatagtcaaaaagaacaacctgtttgttgttgaccgatctgacaagttggggcgtgtgcaggagttcaatagtggccttctgcactggcagctcggcgggggtgacaccaccgagcacattcagactcactttgagagcaagatggaaattcctcctcgcaggcgcccacctccccccttaagctccgcaggtagaaagaaagagcaagaaggcaaaggcgactctgaagagcagcaagagaaaagcatcatagcaaccatcgatgacgtcctctctgctcggccaggggcattgcctgaagacgcaaaccctgggccccagaccgaaagcagtaagtttccctttggtatccagcaagccaaaagtcaccggaacatcaagctgctggaggacgagcccaggagccgagacgagactcctctgtgtaccatcgcgcactggcaggactcgctggctaagcgatgcatctgtgtgtccaatattgtccgtagcttgtcattcgtgcctggcaatgatgccgaaatgtccaaacatccaggcctggtgctgatcctggggaagctgattcttcttcaccacgagcatccagagagaaagcgagcaccgcagacctatgagaaagaggaggatgaggacaagggggtggcctgcagcaaagatgagtggtggtgggactgcctcgaggtcttgagggataacacgttggtcacgttggccaacatttccgggcagctagacttgtctgcttacacggaaagcatctgcttgccaattttggatggcttgctgcactggatggtgtgcccgtctgcagaggcacaagatccctttccaactgtgggacccaactcggtcctgtcgcctcagagacttgtgctggagaccctctgtaaactcagtatccaggacaataatgtggacctgatcttggccactcctccatttagtcgtcaggagaaattctatgctacattagttaggtacgttggggatcgcaaaaacccagtctgtcgagaaatgtccatggcgcttttatcgaaccttgcccaaggggacgcactagcagcaagggccatagctgtgcagaaaggaagcattggaaacttgataagcttcctagaggatggggtcacgatggcccagtaccagcagagccagcacaacctcatgcacatgcagcccccgcccctggaaccacctagcgtagacatgatgtgcagggcggccaaggctttgctagccatggccagagtggacgaaaaccgctcggaattccttttgcacgagggccggttgctggatatctcgatatcagctgtcctgaactctctggttgcatctgtcatctgtgatgtactgtttcagattgggcagttatagtaatgaactagtccgtaacttgaaagtatttcgatttcttggctttatatatcttgtggaaaggacgatcgataagcagaatccgccgaatc

SEQ ID NO: 2520 - DNA, 6851 bp, Homo sapiens
  source 1..6851: mol_type = genomic DNA
accgccaccatggcccataacgcgggcgccgcggccgccgccggcacccacagcgccaagagcggcggctccgaggcggctctcaaggagggtggaagcgccgccgcgctgtcctcctcctcctcctcctccgcggcggcagcggcggcatcctcttcctcctcgtcgggcccgggctcggccatggagacggggctgctccccaaccacaaactgaaaaccgttggcgaagcccccgccgcgccgccccaccagcagcaccaccaccaccaccatgcccaccaccaccaccaccatgcccaccacctccaccaccaccacgcactacagcagcagctaaaccagttccagcagcagcagcagcagcagcaacagcagcagcagcagcagcagcaacagcaacatcccatttccaacaacaacagcttgggcggcgcgggcggcggcgcgcctcagcccggccccgacatggagcagccgcaacatggaggcgccaaggacagtgctgcgggcggccaggccgaccccccgggcccgccgctgctgagcaagccgggcgacgaggacgacgcgccgcccaagatgggggagccggcgggcggccgctacgagcacccgggcttgggcgccctgggcacgcagcagccgccggtcgccgtgcccgggggcggcggcggcccggcggccgtcccggagtttaataattactatggcagcgctgcccctgcgagcggcggccccggcggccgcgctgggccttgctttgatcaacatggcggacaacaaagccccgggatggggatgatgcactccgcctccgccgccgccgccggggcccccggcagcatggaccccctgcagaactcccacgaagggtaccccaacagccagtgcaaccattatccgggctacagccggcccggcgcgggcggcggcggcggcggcggcggcggaggaggaggaggcagcggaggaggaggaggaggaggaggagcaggagcaggaggagcaggagcgggagctgtggcggcggcggccgcggcggcggcggcagcagcaggaggcggcggcggcggcggctatgggggctcgtccgcggggtacggggtgctgagctccccccggcagcagggcggcggcatgatgatgggccccgggggcggcggggccgcgagcctcagcaaggcggccgccggctcggcggcggggggcttccagcgcttcgccggccagaaccagcacccgtcgggggccaccccgaccctcaatcagctgctcacctcgcccagccccatgatgcggagctacggcggcagctaccccgagtacagcagccccagcgcgccgccgccgccgccgtcgcagccccagtcccaggcggcggcggcgggggcggcggcgggcggccagcaggcggccgcgggcatgggcttgggcaaggacatgggcgcccagtacgccgctgccagcccggcctgggcggccgcgcaacaaaggagtcacccggcgatgagccccggcacccccggaccgaccatgggcagatcccagggcagcccaatggatccaatggtgatgaagagacctcagttgtatggcatgggcagtaaccctcattctcagcctcagcagagcagtccgtacccaggaggttcctatggccctccaggcccacagcggtatccaattggcatccagggtcggactcccggggccatggccggaatgcagtaccctcagcagcaggactctggagatgccacatggaaagaaacattctggttgatgccacctcagtatggacagcaaggtgtgagtggttactgccagcagggccaacagccatattacagccagcagccgcagcccccgcacctcccaccccaggcgcagtatctgccgtcccagtcccagcagaggtaccagccgcagcaggacatgtctcaggaaggctatggaactagatctcaacctcctctggcccccggaaaacctaaccatgaagacttgaacttaatacagcaagaaagaccatcaagtttaccagatctgtctggctccattgatgacctccccacgggaacggaagcaactttgagctcagcagtcagtgcatccgggtccacgagcagccaaggggatcagagcaacccggcgcagtcgcctttctccccacatgcgtcccctcatctctccagcatcccggggggcccatctccctctcctgttggctctcctgtaggaagcaaccagtctcgatctggcccaatctctcctgcaagtatcccaggtagtcagatgcctccgcagccacccgggagccagtcagaatccagttcccatcccgccttgagccagtcaccaatgccacaggaaagaggttttatggcaggcacacaaagaaaccctcagatggctcagtatggacctcaacagacaggaccatccatgtcgcctcatccttctcctgggggccagatgcatgctggaatcagtagctttcagcagagtaactcaagtgggacttacggtccacagatgagccagtatggaccacaaggtaactactccagacccccagcgtatagtggggtgcccagtgcaagctacagcggcccagggcccggtatgggtatcagtgccaacaaccagatgcatggacaagggccaagccagccatgtggtgctgtgcccctgggacgaatgccatcagctgggatgcagaacagaccatttcctggaaatatgagcagcatgacccccagttctcctggcatgtctcagcagggagggccaggaatggggccgccaatgccaactgtgaaccgtaaggcacaggaggcagccgcagcagtgatgcaggctgctgcgaactcagcacaaagcaggcaaggcagtttccccggcatgaaccagagtggacttatggcttccagctctccctacagccagcccatgaacaacagctctagcctgatgaacacgcaggcgccgccctacagcatggcgcccgccatggtgaacagctcggcagcatctgtgggtcttgcagatatgatgtctcctggtgaatccaaactgcccctgcctctcaaagcagacggcaaagaagaaggcactccacagcccgagagcaagtcaaagaagtccagctcctccaccactactggggagaagatcacgaaggtgtacgagctggggaatgagccagagagaaagctctgggtcgaccgatacctcaccttcatggaagagagaggctctcctgtctcaagtctgcctgccgtgggcaagaagcccctggacctgttccgactctacgtctgcgtcaaagagatcgggggtttggcccaggttaataaaaacaagaagtggcgtgagctggcaaccaacctaaacgttggcacctcaagcagtgcagcgagctccctgaaaaagcagtatattcagtacctgtttgcctttgagtgcaagatcgaacgtggggaggagcccccgccggaagtcttcagcaccggggacaccaaaaagcagcccaagctccagccgccatctcctgctaactcgggatccttgcaaggcccacagaccccccagtcaactggcagcaattccatggcagaggttccaggtgacctgaagccacctaccccagcctccacccctcacggccagatgactccaatgcaaggtggaagaagcagtacaatcagtgtgcacgacccattctcagatgtgagtgattcatccttcccgaaacggaactccatgactccaaacgccccctaccagcagggcatgagcatgcccgatgtgatgggcaggatgccctatgagcccaacaaggacccctttgggggaatgagaaaagtgcctggaagcagcgagccctttatgacgcaaggacagatgcccaacagcagcatgcaggacatgtacaaccaaagtccctccggagcaatgtctaacctgggcatggggcagcgccagcagtttccctatggagccagttacgaccgaaggcatgaaccttatgggcagcagtatccaggccaaggccctccctcgggacagccgccgtatggagggcaccagcccggcctgtacccacagcagccgaattacaaacgccatatggacggcatgtacgggcccccagccaagcgccacgagggcgacatgtacaacatgcagtacagcagccagcagcaggagatgtacaaccagtatggaggctcctactcgggcccggaccgcaggcccatccagggccagtacccgtatccctacagcagggagaggatgcagggcccggggcagatccagacacacggaatcccgcctcagatgatgggcggcccgctgcagtcgtcctccagtgaggggcctcagcagaatatgtgggcagcacgcaatgatatgccttatccctaccagaacaggcagggccctggcggccctacacaggcgcccccttacccaggcatgaaccgcacagacgatatgatggtacccgatcagaggataaatcatgagagccagtggccttctcacgtcagccagcgtcagccttatatgtcgtcctcagcctccatgcagcccatcacacgcccaccacagccgtcctaccagacgccaccgtcactgccaaatcacatctccagggcgcccagcccagcgtccttccagcgctccctggagaaccgcatgtctccaagcaagtctccttttctgccgtctatgaagatgcagaaggtcatgcccacggtccccacatcccaggtcaccgggccaccaccccaaccacccccaatcagaagggagatcacctttcctcctggctcagtagaagcatcacaaccagtcttgaaacaaaggcgaaagattacctccaaagatatcgttactcctgaggcgtggcgtgtgatgatgtcccttaaatcaggtcttttggctgagagtacgtgggctttggacactattaatattcttctgtatgatgacagcactgttgctactttcaatctctcccagttgtctggatttctcgaacttttagtcgagtactttagaaaatgcctgattgacatttttggaattcttatggaatatgaagtgggagaccccagccaaaaagcacttgatcacaacgcagcaaggaaggatgacagccagtccttggcagacgattctgggaaagaggaggaagatgctgaatgtattgatgacgacgaggaagacgaggaggatgaggaggaagacagcgagaagacagaaagcgatgaaaagagcagcatcgctctgactgccccggacgccgctgcagacccaaaggagaagcccaagcaagccagtaagttcgacaagctgccaataaagatagtcaaaaagaacaacctgtttgttgttgaccgatctgacaagttggggcgtgtgcaggagttcaatagtggccttctgcactggcagctcggcgggggtgacaccaccgagcacattcagactcactttgagagcaagatggaaattcctcctcgcaggcgcccacctccccccttaagctccgcaggtagaaagaaagagcaagaaggcaaaggcgactctgaagagcagcaagagaaaagcatcatagcaaccatcgatgacgtcctctctgctcggccaggggcattgcctgaagacgcaaaccctgggccccagaccgaaagcagtaagtttccctttggtatccagcaagccaaaagtcaccggaacatcaagctgctggaggacgagcccaggagccgagacgagactcctctgtgtaccatcgcgcactggcaggactcgctggctaagcgatgcatctgtgtgtccaatattgtccgtagcttgtcattcgtgcctggcaatgatgccgaaatgtccaaacatccaggcctggtgctgatcctggggaagctgattcttcttcaccacgagcatccagagagaaagcgagcaccgcagacctatgagaaagaggaggatgaggacaagggggtggcctgcagcaaagatgagtggtggtgggactgcctcgaggtcttgagggataacacgttggtcacgttggccaacatttccgggcagctagacttgtctgcttacacggaaagcatctgcttgccaattttggatggcttgctgcactggatggtgtgcccgtctgcagaggcacaagatccctttccaactgtgggacccaactcggtcctgtcgcctcagagacttgtgctggagaccctctgtaaactcagtatccaggacaataatgtggacctgatcttggccactcctccatttagtcgtcaggagaaattctatgctacattagttaggtacgttggggatcgcaaaaacccagtctgtcgagaaatgtccatggcgcttttatcgaaccttgcccaaggggacgcactagcagcaagggccatagctgtgcagaaaggaagcattggaaacttgataagcttcctagaggatggggtcacgatggcccagtaccagcagagccagcacaacctcatgcacatgcagcccccgcccctggaaccacctagcgtagacatgatgtgcagggcggccaaggctttgctagccatggccagagtggacgaaaaccgctcggaattccttttgcacgagggccggttgctggatatctcgatatcagctgtcctgaactctctggttgcatctgtcatctgtgatgtactgtttcagattgggcagttatagtaatgaactagtccgtaacttgaaagtatttcgatttcttggctttatatatcttgtggaaaggacgacgaccaaagggccacgtccggccc

SEQ ID NO: 2521 - DNA, 4721 bp, Homo sapiens
  source 1..4721: mol_type = genomic DNA
accgccaccatgcctccgcagccacccgggagccagtcagaatccagttcccatcccgccttgagccagtcaccaatgccacaggaaagaggttttatggcaggcacacaaagaaaccctcagatggctcagtatggacctcaacagacaggaccatccatgtcgcctcatccttctcctgggggccagatgcatgctggaatcagtagctttcagcagagtaactcaagtgggacttacggtccacagatgagccagtatggaccacaaggtaactactccagacccccagcgtatagtggggtgcccagtgcaagctacagcggcccagggcccggtatgggtatcagtgccaacaaccagatgcatggacaagggccaagccagccatgtggtgctgtgcccctgggacgaatgccatcagctgggatgcagaacagaccatttcctggaaatatgagcagcatgacccccagttctcctggcatgtctcagcagggagggccaggaatggggccgccaatgccaactgtgaaccgtaaggcacaggaggcagccgcagcagtgatgcaggctgctgcgaactcagcacaaagcaggcaaggcagtttccccggcatgaaccagagtggacttatggcttccagctctccctacagccagcccatgaacaacagctctagcctgatgaacacgcaggcgccgccctacagcatggcgcccgccatggtgaacagctcggcagcatctgtgggtcttgcagatatgatgtctcctggtgaatccaaactgcccctgcctctcaaagcagacggcaaagaagaaggcactccacagcccgagagcaagtcaaaggatagctacagctctcagggtatttctcagcccccaaccccaggcaacctgccagtcccttccccaatgtcccccagctctgctagcatctcctcatttcatggagatgaaagtgatagcattagcagcccaggctggccaaagactccatcaagccctaagtccagctcctccaccactactggggagaagatcacgaaggtgtacgagctggggaatgagccagagagaaagctctgggtcgaccgatacctcaccttcatggaagagagaggctctcctgtctcaagtctgcctgccgtgggcaagaagcccctggacctgttccgactctacgtctgcgtcaaagagatcgggggtttggcccaggttaataaaaacaagaagtggcgtgagctggcaaccaacctaaacgttggcacctcaagcagtgcagcgagctccctgaaaaagcagtatattcagtacctgtttgcctttgagtgcaagatcgaacgtggggaggagcccccgccggaagtcttcagcaccggggacaccaaaaagcagcccaagctccagccgccatctcctgctaactcgggatccttgcaaggcccacagaccccccagtcaactggcagcaattccatggcagaggttccaggtgacctgaagccacctaccccagcctccacccctcacggccagatgactccaatgcaaggtggaagaagcagtacaatcagtgtgcacgacccattctcagatgtgagtgattcatccttcccgaaacggaactccatgactccaaacgccccctaccagcagggcatgagcatgcccgatgtgatgggcaggatgccctatgagcccaacaaggacccctttgggggaatgagaaaagtgcctggaagcagcgagccctttatgacgcaaggacagatgcccaacagcagcatgcaggacatgtacaaccaaagtccctccggagcaatgtctaacctgggcatggggcagcgccagcagtttccctatggagccagttacgaccgaaggcatgaaccttatgggcagcagtatccaggccaaggccctccctcgggacagccgccgtatggagggcaccagcccggcctgtacccacagcagccgaattacaaacgccatatggacggcatgtacgggcccccagccaagcgccacgagggcgacatgtacaacatgcagtacagcagccagcagcaggagatgtacaaccagtatggaggctcctactcgggcccggaccgcaggcccatccagggccagtacccgtatccctacagcagggagaggatgcagggcccggggcagatccagacacacggaatcccgcctcagatgatgggcggcccgctgcagtcgtcctccagtgaggggcctcagcagaatatgtgggcagcacgcaatgatatgccttatccctaccagaacaggcagggccctggcggccctacacaggcgcccccttacccaggcatgaaccgcacagacgatatgatggtacccgatcagaggataaatcatgagagccagtggccttctcacgtcagccagcgtcagccttatatgtcgtcctcagcctccatgcagcccatcacacgcccaccacagccgtcctaccagacgccaccgtcactgccaaatcacatctccagggcgcccagcccagcgtccttccagcgctccctggagaaccgcatgtctccaagcaagtctccttttctgccgtctatgaagatgcagaaggtcatgcccacggtccccacatcccaggtcaccgggccaccaccccaaccacccccaatcagaagggagatcacctttcctcctggctcagtagaagcatcacaaccagtcttgaaacaaaggcgaaagattacctccaaagatatcgttactcctgaggcgtggcgtgtgatgatgtcccttaaatcaggtcttttggctgagagtacgtgggctttggacactattaatattcttctgtatgatgacagcactgttgctactttcaatctctcccagttgtctggatttctcgaacttttagtcgagtactttagaaaatgcctgattgacatttttggaattcttatggaatatgaagtgggagaccccagccaaaaagcacttgatcacaacgcagcaaggaaggatgacagccagtccttggcagacgattctgggaaagaggaggaagatgctgaatgtattgatgacgacgaggaagacgaggaggatgaggaggaagacagcgagaagacagaaagcgatgaaaagagcagcatcgctctgactgccccggacgccgctgcagacccaaaggagaagcccaagcaagccagtaagttcgacaagctgccaataaagatagtcaaaaagaacaacctgtttgttgttgaccgatctgacaagttggggcgtgtgcaggagttcaatagtggccttctgcactggcagctcggcgggggtgacaccaccgagcacattcagactcactttgagagcaagatggaaattcctcctcgcaggcgcccacctccccccttaagctccgcaggtagaaagaaagagcaagaaggcaaaggcgactctgaagagcagcaagagaaaagcatcatagcaaccatcgatgacgtcctctctgctcggccaggggcattgcctgaagacgcaaaccctgggccccagaccgaaagcagtaagtttccctttggtatccagcaagccaaaagtcaccggaacatcaagctgctggaggacgagcccaggagccgagacgagactcctctgtgtaccatcgcgcactggcaggactcgctggctaagcgatgcatctgtgtgtccaatattgtccgtagcttgtcattcgtgcctggcaatgatgccgaaatgtccaaacatccaggcctggtgctgatcctggggaagctgattcttcttcaccacgagcatccagagagaaagcgagcaccgcagacctatgagaaagaggaggatgaggacaagggggtggcctgcagcaaagatgagtggtggtgggactgcctcgaggtcttgagggataacacgttggtcacgttggccaacatttccgggcagctagacttgtctgcttacacggaaagcatctgcttgccaattttggatggcttgctgcactggatggtgtgcccgtctgcagaggcacaagatccctttccaactgtgggacccaactcggtcctgtcgcctcagagacttgtgctggagaccctctgtaaactcagtatccaggacaataatgtggacctgatcttggccactcctccatttagtcgtcaggagaaattctatgctacattagttaggtacgttggggatcgcaaaaacccagtctgtcgagaaatgtccatggcgcttttatcgaaccttgcccaaggggacgcactagcagcaagggccatagctgtgcagaaaggaagcattggaaacttgataagcttcctagaggatggggtcacgatggcccagtaccagcagagccagcacaacctcatgcacatgcagcccccgcccctggaaccacctagcgtagacatgatgtgcagggcggccaaggctttgctagccatggccagagtggacgaaaaccgctcggaattccttttgcacgagggccggttgctggatatctcgatatcagctgtcctgaactctctggttgcatctgtcatctgtgatgtactgtttcagattgggcagttatagtaatgaactagtccgtaacttgaaagtatttcgatttcttggctttatatatcttgtggaaaggacgagatgtcttcaaagatcttgacacg

SEQ ID NO: 2522 - DNA, 6959 bp, Homo sapiens
  source 1..6959: mol_type = genomic DNA
accgccaccatggccgcgcaggtcgcccccgccgccgccagcagcctgggcaacccgccgccgccgccgccctcggagctgaagaaagccgagcagcagcagcgggaggaggcggggggcgaggcggcggcggcggcagcggccgagcgcggggaaatgaaggcagccgccgggcaggaaagcgagggccccgccgtggggccgccgcagccgctgggaaaggagctgcaggacggggccgagagcaatgggggtggcggcggcggcggagccggcagcggcggcgggcccggcgcggagccggacctgaagaactcgaacgggaacgcgggccctaggcccgccctgaacaataacctcacggagccgcccggcggcggcggtggcggcagcagcgatggggtgggggcgcctcctcactcagccgcggccgccttgccgcccccagcctacggcttcgggcaaccctacggccggagcccgtctgccgtcgccgccgccgcggccgccgtcttccaccaacaacatggcggacaacaaagccctggcctggcagcgctgcagagcggcggcggcgggggcctggagccctacgcggggccccagcagaactctcacgaccacggcttccccaaccaccagtacaactcctactaccccaaccgcagcgcctaccccccgcccgccccggcctacgcgctgagctccccgagaggtggcactccgggctccggcgcggcggcggctgccggctccaagccgcctccctcctccagcgcctccgcctcctcgtcgtcttcgtccttcgctcagcagcgcttcggggccatggggggaggcggcccctccgcggccggcgggggaactccccagcccaccgccacccccaccctcaaccaactgctcacgtcgcccagctcggcccggggctaccagggctaccccgggggcgactacagtggcgggccccaggacgggggcgccggcaagggcccggcggacatggcctcgcagtgttggggggctgcggcggcggcagctgcggcggcggccgcctcgggaggggcccaacaaaggagccaccacgcgcccatgagccccgggagcagcggcggcggggggcagccgctcgcccggacccctcagccatccagtccaatggatcagatgggcaagatgagacctcagccatatggcgggactaacccatactcgcagcaacagggacctccgtcaggaccgcagcaaggacatgggtacccagggcagccatacgggtcccagaccccgcagcggtacccgatgaccatgcagggccgggcgcagagtgccatgggcggcctctcttatacacagcagattcctccttatggacaacaaggccccagcgggtatggtcaacagggccagactccatattacaaccagcaaagtcctcaccctcagcagcagcagccaccctactcccagcaaccaccgtcccagacccctcatgcccaaccttcgtatcagcagcagccacagtctcaaccaccacagctccagtcctctcagcctccatactcccagcagccatcccagcctccacatcagcagtccccggctccatacccctcccagcagtcgacgacacagcagcacccccagagccagcccccctactcacagccacaggctcagtctccttaccagcagcagcaacctcagcagccagcaccctcgacgctctcccagcaggctgcgtatcctcagccccagtctcagcagtcccagcaaactgcctattcccagcagcgcttccctccaccgcaggagctatctcaagattcatttgggtctcaggcatcctcagccccctcaatgacctccagtaagggagggcaagaagatatgaacctgagccttcagtcaagaccctccagcttgcctgatctatctggttcaatagatgacctccccatggggacagaaggagctctgagtcctggagtgagcacatcagggatttccagcagccaaggagagcagagtaatccagctcagtctcctttctctcctcatacctcccctcacctgcctggcatccgaggcccttccccgtcccctgttggctctcccgccagtgttgctcagtctcgctcaggaccactctcgcctgctgcagtgccaggcaaccagatgccacctcggccacccagtggccagtcggacagcatcatgcatccttccatgaaccaatcaagcattgcccaagatcgaggttatatgcagaggaacccccagatgccccagtacagttccccccagcccggctcagccttatctccgcgtcagccttccggaggacagatacacacaggcatgggctcctaccagcagaactccatggggagctatggtccccaggggggtcagtatggcccacaaggtggctaccccaggcagccaaactataatgccttgcccaatgccaactaccccagtgcaggcatggctggaggcataaaccccatgggtgccggaggtcaaatgcatggacagcctggcatcccaccttatggcacactccctccagggaggatgagtcacgcctccatgggcaaccggccttatggccctaacatggccaatatgccacctcaggttgggtcagggatgtgtcccccaccagggggcatgaaccggaaaacccaagaaactgctgtcgccatgcatgttgctgccaactctatccaaaacaggccgccaggctaccccaatatgaatcaagggggcatgatgggaactggacctccttatggacaagggattaatagtatggctggcatgatcaaccctcagggacccccatattccatgggtggaaccatggccaacaattctgcagggatggcagccagcccagagatgatgggccttggggatgtaaagttaactccagccaccaaaatgaacaacaaggcagatgggacacccaagacagaatccaaatccaagaaatccagttcttctactacaaccaatgagaagatcaccaagttgtatgagctgggtggtgagcctgagaggaagatgtgggtggaccgttatctggccttcactgaggagaaggccatgggcatgacaaatctgcctgctgtgggtaggaaacctctggacctctatcgcctctatgtgtctgtgaaggagattggtggattgactcaggtcaacaagaacaaaaaatggcgggaacttgcaaccaacctcaatgtgggcacatcaagcagtgctgccagctccttgaaaaagcagtatatccagtgtctctatgcctttgaatgcaagattgaacggggagaagaccctcccccagacatctttgcagctgctgattccaagaagtcccagcccaagatccagcctccctctcctgcgggatcaggatctatgcaggggccccagactccccagtcaaccagcagttccatggcagaaggaggagacttaaagccaccaactccagcatccacaccacacagtcagatccccccattgccaggcatgagcaggagcaattcagttgggatccaggatgcctttaatgatggaagtgactccacattccagaagcggaattccatgactccaaaccctgggtatcagcccagtatgaatacctctgacatgatggggcgcatgtcctatgagccaaataaggatccttatggcagcatgaggaaagctccagggagtgatcccttcatgtcctcagggcagggccccaacggcgggatgggtgacccctacagtcgtgctgccggccctgggctaggaaatgtggcgatgggaccacgacagcactatccctatggaggtccttatgacagagtgaggacggagcctggaatagggcctgagggaaacatgagcactggggccccacagccgaatctcatgccttccaacccagactcggggatgtattctcctagccgctaccccccgcagcagcagcagcagcagcagcaacgacatgattcctatggcaatcagttctccacccaaggcaccccttctggcagccccttccccagccagcagactacaatgtatcaacagcaacagcagaattacaagcggccaatggatggcacatatggccctcctgccaagcggcacgaaggggagatgtacagcgtgccatacagcactgggcaggggcagcctcagcagcagcagttgcccccagcccagccccagcctgccagccagcaacaagctgcccagccttcccctcagcaagatgtatacaaccagtatggcaatgcctatcctgccactgccacagctgctactgagcgccgaccagcaggcggcccccagaaccaatttccattccagtttggccgagaccgtgtctctgcaccccctggcaccaatgcccagcaaaacatgccaccacaaatgatgggcggccccatacaggcatcagctgaggttgctcagcaaggcaccatgtggcaggggcgtaatgacatgacctataattatgccaacaggcagagcacgggctctgccccccagggccccgcctatcatggcgtgaaccgaacagatgaaatgctgcacacagatcagagggccaaccacgaaggctcgtggccttcccatggcacacgccagcccccatatggtccctctgcccctgtgccccccatgacaaggccccctccatctaactaccagcccccaccaagcatgcagaatcacattcctcaggtatccagccctgctcccctgccccggccaatggagaaccgcacctctcctagcaagtctccattcctgcactctgggatgaaaatgcagaaggcaggtcccccagtacctgcctcgcacatagcacctgcccctgtgcagccccccatgattcggcgggatatcaccttcccacctggctctgttgaagccacacagcctgtgttgaagcagaggaggcggctcacaatgaaagacattggaaccccggaggcatggcgggtaatgatgtccctcaagtctggtctcctggcagagagcacatgggcattagataccatcaacatcctgctgtatgatgacaacagcatcatgaccttcaacctcagtcagctcccagggttgctagagctccttgtagaatatttccgacgatgcctgattgagatctttggcattttaaaggagtatgaggtgggtgacccaggacagagaacgctactggatcctgggaggttcagcaaggtgtctagtccagctcccatggagggtggggaagaagaagaagaacttctaggtcctaaactagaagaggaagaagaagaggaagtagttgaaaatgatgaggagatagccttttcaggcaaggacaagccagcttcagagaatagtgaggagaagctgatcagtaagtttgacaagcttccagtaaagatcgtacagaagaatgatccatttgtggtggactgctcagataagcttgggcgtgtgcaggagtttgacagtggcctgctgcactggcggattggtgggggggacaccactgagcatatccagacccacttcgagagcaagacagagctgctgccttcccggcctcacgcaccctgcccaccagcccctcggaagcatgtgacaacagcagagggtacaccagggacaacagaccaggaggggcccccacctgatggacctccagaaaaacggatcacagccactatggatgacatgttgtctactcggtctagcaccttgaccgaggatggagctaagagttcagaggccatcaaggagagcagcaagtttccatttggcattagcccagcacagagccaccggaacatcaagatcctagaggacgaaccccacagtaaggatgagaccccactgtgtacccttctggactggcaggattctcttgccaagcgctgcgtctgtgtgtccaataccattcgaagcctgtcatttgtgccaggcaatgactttgagatgtccaaacacccagggctgctgctcatcctgggcaagctgatcctgctgcaccacaagcacccagaacggaagcaggcaccactaacttatgaaaaggaggaggaacaggaccaaggggtgagctgcaacaaagtggagtggtggtgggactgcttggagatgctccgggaaaacaccttggttacactcgccaacatctcggggcagttggacctatctccataccccgagagcatttgcctgcctgtcctggacggactcctacactgggcagtttgcccttcagctgaagcccaggaccccttttccaccctgggccccaatgccgtcctttccccgcagagactggtcttggaaaccctcagcaaactcagcatccaggacaacaatgtggacctgattctggccacaccccccttcagccgcctggagaagttgtatagcactatggtgcgcttcctcagtgaccgaaagaacccggtgtgccgggagatggctgtggtactgctggccaacctggctcagggggacagcctggcagctcgtgccattgcagtgcagaagggcagtatcggcaacctcctgggcttcctagaggacagccttgccgccacacagttccagcagagccaggccagcctcctccacatgcagaacccaccctttgagccaactagtgtggacatgatgcggcgggctgcccgcgcgctgcttgccttggccaaggtggacgagaaccactcagagtttactctgtacgaatcacggctgttggacatctcggtatcaccgttgatgaactcattggtttcacaagtcatttgtgatgtactgtttttgattggccagtcatagtaatgaactagtccgtaacttgaaagtatttcgatttcttggctttatatatcttgtggaaaggacgaccgccggaatacgggagggtctaa

SEQ ID NO: 2523 - DNA, 6308 bp, Homo sapiens
  source 1..6308: mol_type = genomic DNA
accgccaccatggccgcgcaggtcgcccccgccgccgccagcagcctgggcaacccgccgccgccgccgccctcggagctgaagaaagccgagcagcagcagcgggaggaggcggggggcgaggcggcggcggcggcagcggccgagcgcggggaaatgaaggcagccgccgggcaggaaagcgagggccccgccgtggggccgccgcagccgctgggaaaggagctgcaggacggggccgagagcaatgggggtggcggcggcggcggagccggcagcggcggcgggcccggcgcggagccggacctgaagaactcgaacgggaacgcgggccctaggcccgccctgaacaataacctcacggagccgcccggcggcggcggtggcggcagcagcgatggggtgggggcgcctcctcactcagccgcggccgccttgccgcccccagcctacggcttcgggcaaccctacggccggagcccgtctgccgtcgccgccgccgcggccgccgtcttccaccaacaacatggcggacaacaaagccctggcctggcagcgctgcagagcggcggcggcgggggcctggagccctacgcggggccccagcagaactctcacgaccacggcttccccaaccaccagtacaactcctactaccccaaccgcagcgcctaccccccgcccgccccggcctacgcgctgagctccccgagaggtggcactccgggctccggcgcggcggcggctgccggctccaagccgcctccctcctccagcgcctccgcctcctcgtcgtcttcgtccttcgctcagcagcgcttcggggccatggggggaggcggcccctccgcggccggcgggggaactccccagcccaccgccacccccaccctcaaccaactgctcacgtcgcccagctcggcccggggctaccagggctaccccgggggcgactacagtggcgggccccaggacgggggcgccggcaagggcccggcggacatggcctcgcagtgttggggggctgcggcggcggcagctgcggcggcggccgcctcgggaggggcccaacaaaggagccaccacgcgcccatgagccccgggagcagcggcggcggggggcagccgctcgcccggacccctcagccatccagtccaatggatcagatgggcaagatgagacctcagccatatggcgggactaacccatactcgcagcaacagggacctccgtcaggaccgcagcaaggacatgggtacccagggcagccatacgggtcccagaccccgcagcggtacccgatgaccatgcagggccgggcgcagagtgccatgggcggcctctcttatacacagcagattcctccttatggacaacaaggccccagcgggtatggtcaacagggccagactccatattacaaccagcaaagtcctcaccctcagcagcagcagccaccctactcccagcaaccaccgtcccagacccctcatgcccaaccttcgtatcagcagcagccacagtctcaaccaccacagctccagtcctctcagcctccatactcccagcagccatcccagcctccacatcagcagtccccggctccatacccctcccagcagtcgacgacacagcagcacccccagagccagcccccctactcacagccacaggctcagtctccttaccagcagcagcaacctcagcagccagcaccctcgacgctctcccagcaggctgcgtatcctcagccccagtctcagcagtcccagcaaactgcctattcccagcagcgcttccctccaccgcaggagctatctcaagattcatttgggtctcaggcatcctcagccccctcaatgacctccagtaagggagggcaagaagatatgaacctgagccttcagtcaagaccctccagcttgcctgatctatctggttcaatagatgacctccccatggggacagaaggagctctgagtcctggagtgagcacatcagggatttccagcagccaaggagagcagagtaatccagctcagtctcctttctctcctcatacctcccctcacctgcctggcatccgaggcccttccccgtcccctgttggctctcccgccagtgttgctcagtctcgctcaggaccactctcgcctgctgcagtgccaggcaaccagatgccacctcggccacccagtggccagtcggacagcatcatgcatccttccatgaaccaatcaagcattgcccaagatcgaggttatatgcagaggaacccccagatgccccagtacagttccccccagcccggctcagccttatctccgcgtcagccttccggaggacagatacacacaggcatgggctcctaccagcagaactccatggggagctatggtccccaggggggtcagtatggcccacaaggtggctaccccaggcagccaaactataatgccttgcccaatgccaactaccccagtgcaggcatggctggaggcataaaccccatgggtgccggaggtcaaatgcatggacagcctggcatcccaccttatggcacactccctccagggaggatgagtcacgcctccatgggcaaccggccttatggccctaacatggccaatatgccacctcaggttgggtcagggatgtgtcccccaccagggggcatgaaccggaaaacccaagaaactgctgtcgccatgcatgttgctgccaactctatccaaaacaggccgccaggctaccccaatatgaatcaagggggcatgatgggaactggacctccttatggacaagggattaatagtatggctggcatgatcaaccctcagggacccccatattccatgggtggaaccatggccaacaattctgcagggatggcagccagcccagagatgatgggccttggggatgtaaagttaactccagccaccaaaatgaacaacaaggcagatgggacacccaagacagaatccaaatccaagaaatccagttcttctactacaaccaatgagaagatcaccaagttgtatgagctgggtggtgagcctgagaggaagatgtgggtggaccgttatctggccttcactgaggagaaggccatgggcatgacaaatctgcctgctgtgggtaggaaacctctggacctctatcgcctctatgtgtctgtgaaggagattggtggattgactcaggtcaacaagaacaaaaaatggcgggaacttgcaaccaacctcaatgtgggcacatcaagcagtgctgccagctccttgaaaaagcagtatatccagtgtctctatgcctttgaatgcaagattgaacggggagaagaccctcccccagacatctttgcagctgctgattccaagaagtcccagcccaagatccagcctccctctcctgcgggatcaggatctatgcaggggccccagactccccagtcaaccagcagttccatggcagaaggaggagacttaaagccaccaactccagcatccacaccacacagtcagatccccccattgccaggcatgagcaggagcaattcagttgggatccaggatgcctttaatgatggaagtgactccacattccagaagcggaattccatgactccaaaccctgggtatcagcccagtatgaatacctctgacatgatggggcgcatgtcctatgagccaaataaggatccttatggcagcatgaggaaagctccagggagtgatcccttcatgtcctcagggcagggccccaacggcgggatgggtgacccctacagtcgtgctgccggccctgggctaggaaatgtggcgatgggaccacgacagcactatccctatggaggtccttatgacagagtgaggacggagcctggaatagggcctgagggaaacatgagcactggggccccacagccgaatctcatgccttccaacccagactcggggatgtattctcctagccgctaccccccgcagcagcagcagcagcagcagcaacgacatgattcctatggcaatcagttctccacccaaggcaccccttctggcagccccttccccagccagcagactacaatgtatcaacagcaacagcaggtatccagccctgctcccctgccccggccaatggagaaccgcacctctcctagcaagtctccattcctgcactctgggatgaaaatgcagaaggcaggtcccccagtacctgcctcgcacatagcacctgcccctgtgcagccccccatgattcggcgggatatcaccttcccacctggctctgttgaagccacacagcctgtgttgaagcagaggaggcggctcacaatgaaagacattggaaccccggaggcatggcgggtaatgatgtccctcaagtctggtctcctggcagagagcacatgggcattagataccatcaacatcctgctgtatgatgacaacagcatcatgaccttcaacctcagtcagctcccagggttgctagagctccttgtagaatatttccgacgatgcctgattgagatctttggcattttaaaggagtatgaggtgggtgacccaggacagagaacgctactggatcctgggaggttcagcaaggtgtctagtccagctcccatggagggtggggaagaagaagaagaacttctaggtcctaaactagaagaggaagaagaagaggaagtagttgaaaatgatgaggagatagccttttcaggcaaggacaagccagcttcagagaatagtgaggagaagctgatcagtaagtttgacaagcttccagtaaagatcgtacagaagaatgatccatttgtggtggactgctcagataagcttgggcgtgtgcaggagtttgacagtggcctgctgcactggcggattggtgggggggacaccactgagcatatccagacccacttcgagagcaagacagagctgctgccttcccggcctcacgcaccctgcccaccagcccctcggaagcatgtgacaacagcagagggtacaccagggacaacagaccaggaggggcccccacctgatggacctccagaaaaacggatcacagccactatggatgacatgttgtctactcggtctagcaccttgaccgaggatggagctaagagttcagaggccatcaaggagagcagcaagtttccatttggcattagcccagcacagagccaccggaacatcaagatcctagaggacgaaccccacagtaaggatgagaccccactgtgtacccttctggactggcaggattctcttgccaagcgctgcgtctgtgtgtccaataccattcgaagcctgtcatttgtgccaggcaatgactttgagatgtccaaacacccagggctgctgctcatcctgggcaagctgatcctgctgcaccacaagcacccagaacggaagcaggcaccactaacttatgaaaaggaggaggaacaggaccaaggggtgagctgcaacaaagtggagtggtggtgggactgcttggagatgctccgggaaaacaccttggttacactcgccaacatctcggggcagttggacctatctccataccccgagagcatttgcctgcctgtcctggacggactcctacactgggcagtttgcccttcagctgaagcccaggaccccttttccaccctgggccccaatgccgtcctttccccgcagagactggtcttggaaaccctcagcaaactcagcatccaggacaacaatgtggacctgattctggccacaccccccttcagccgcctggagaagttgtatagcactatggtgcgcttcctcagtgaccgaaagaacccggtgtgccgggagatggctgtggtactgctggccaacctggctcagggggacagcctggcagctcgtgccattgcagtgcagaagggcagtatcggcaacctcctgggcttcctagaggacagccttgccgccacacagttccagcagagccaggccagcctcctccacatgcagaacccaccctttgagccaactagtgtggacatgatgcggcgggctgcccgcgcgctgcttgccttggccaaggtggacgagaaccactcagagtttactctgtacgaatcacggctgttggacatctcggtatcaccgttgatgaactcattggtttcacaagtcatttgtgatgtactgtttttgattggccagtcatagtaatgaactagtccgtaacttgaaagtatttcgatttcttggctttatatatcttgtggaaaggacgaggagatagaagctagggcgtttat

SEQ ID NO: 2524 - DNA, 578 bp, Homo sapiens
  source 1..578: mol_type = genomic DNA
accgccaccatgggcgacaacccttttcaaccaaaaagtaattcaaaaatggcagaactgtttatggaatgtgaagaagaggagctggaaccatggcagaagaaagtaaaagaagttgaggatgacgatgatgatgagccaatctttgttggcgagatatcaagttcaaaaccagcaatttcaaatattttgaacagagttaaccccagctcatattcaaggggactaaagaatggtgcactcagtcgaggtattactgctgcattcaagcctacaagtcaacactacacgaatccaacatcaaatccagtgcctgcctcaccaataaattttcatcctgagtctagatcttcagatagttctgttattgttcagcctttttctaaacctgtaagtgtttctaaaactatacggccagctcagggatccattggatgttgtttatcaatatcaacagtacccagttacaattctggactgtcatagtaatgaactagtccgtaacttgaaagtatttcgatttcttggctttatatatcttgtggaaaggacgaaatttgttattggacccgacgctt

SEQ ID NO: 2525 - DNA, 3002 bp, Homo sapiens
  source 1..3002: mol_type = genomic DNA
accgccaccatggcagaactgtttatggaatgtgaagaagaggagctggaaccatggcagaagaaagtaaaagaagttgaggatgacgatgatgatgagccaatctttgttggcgagatatcaagttcaaaaccagcaatttcaaatattttgaacagagttaaccccagctcatattcaaggggactaaagaatggtgcactcagtcgaggtattactgctgcattcaagcctacaagtcaacactacacgaatccaacatcaaatccagtgcctgcctcaccaataaattttcatcctgagtctagatcttcagatagttctgttattgttcagcctttttctaaacctggttatataacaaactcatcacgagttgtgtctaataagtcatcagagttactgtttgacttgacccaggatacaggattatcacattaccaagggggaccaacactttctatggcaggtatgagtgaaagttcatttttatcaaaacgtccttctacttctgaagtaaataatgttaatccaaagaagcctaaacccagcgaaagtgtttctggagcaaattcctcagctgtattaccttcagttaaatctccttcagtgacttcttcccaggctatgctagcaaaaggtacaaatacctcatcaaatcagtctaaaaatggaacaccttttccaagagcttgtccaaagtgcaacattcatttcaatcttttggatcctttgaaaaatcacatgaagtattgttgtccagacatgataaataactttttgggactggctaaaacagaattttcaagtacagtaaataaaaacacaactattgattcagagaaaggaaaattgatcatgttagttaatgacttttattatggaaaacatgaaggagatgtccaggaggaacagaagactcacacaacctttaaatgcttcagttgcttgaaaattctaaaaaataacattaggtttatgaaccacatgaaacaccatttggaacttgagaagcagagcagtgagagctgggaaaaccataccacctgccagcactgctaccgtcagtttcccacaccatttcagttgcagtgtcacatcgaaagtacacatacgccccatgaattttctactatttgtaaaatctgtgaattgtcatttgaaacagaacatgttcttttacaacatatgaaggacaatcataaacctggtgaaatgccatatgtctgccaggtttgtaattatagatcatcatcattttctgatgtagaaactcattttagaacatcccatgaaaacactaagaacttgctatgcccgttttgcctcaaagttattaaaattgcaacaccatatatgcatcattatatgaagcatcagaaaaaaggaatacatcgttgtacaaaatgcaggctgcagtttttgacatgcaaggagaaaatggatcataagactcaacaccatcgaacatttataaaacctaaacaactagaaggattgcctcctggaacaaaagttactattcgagcttcagttggacctctgcaatcaggagcttcacctacaccttccattagtgcaagtgcttctacccttcagctctcacctccaaggactaaaaatataactgctaaaaatcctgcaaaatctaatacaagtaaacctaatacagtcaaatccaacgcaagtaaacctaatacaagtaagcctaatggaagtaaatctaaatacaaaccaaaaatctctaatatgcaaaagaaacaaagcacattggctagtagcaataaaaaaagtaaagtcaatacagcattgaggaatttaaggtatcgtcggggcattcacaaatgcattgagtgttgttccgaaataaaagattttgcaaaccactttcctacgtacgtccactgtagtttttgcagatacaacactagctgtagcaaagcctatgtaaatcatatgatgagctttcatagtaaccgtccaagcaaaaggttttgtatttttaagaagcattcagaaaatctccggggcattactctagtgtgccttaattgtgatttcctaagtgatgtttctggcttagataatatggctacacacttaagtcaacataaaactcatacttgccaagttgtaatgcagaaagtttctgtttgtatcccaacttctgagcacctttctgaattaaaaaaagaagctcccgcaaaggaacaagaacctgtgtctaaggaaattgcaagacctaacatggctgaaagagaaacagaaacatcaaattctgaaagtaaacaagataaagctgcttcttcaaaagaaaaaaatggatgtaatgcaaattcatttgaaggctcatcaacaacaaaaagtgaagaaagcataacagtttcagataaggaaaatgaaacctgtcttgcagaccaggaaactggctcaaaaaacatcgtcagttgtgattcaaatattggtgcagataaagtggaaaagaaaaaacaaatacaacacgtttgtcaggaaatggagttgaagatgtgccaaagttcagaaaacataatcttatctgatcagattaaagatcacaactccagtgaagccagattttcttcaaagaatattaaggatttgcgattagcatcagataatgtaagcattgatcagtttttgagaaaaagacatgaacctgaatctgttagttctgatgttagcgagcaaggcagtattcatttggaacctctgactccatccgaggtacttgagtatgaagccacagagattcttcagaaaggtagtggtgatccttcagccaagactgatgaagtagtgtctgatcaaacagatgacattcctggaggaaataaccctagcacaacagaggcaacagtagacctggaagacgaaaaagaaagaagttagtaatgaactagtccgtaacttgaaagtatttcgatttcttggctttatatatcttgtggaaaggacgatcaagatgcagttacatcctatgc

SEQ ID NO: 2526 - DNA, 2345 bp, Homo sapiens
  source 1..2345: mol_type = genomic DNA
accgccaccatggcagaactgtttatggaatgtgaagaagaggagctggaaccatggcagaagaaagtaaaagaagttgaggatgacgatgatgatgagccaatctttgttggcgagatatcaagttcaaaaccagcaatttcaaatattttgaacagagttaaccccagctcatattcaaggggactaaagaatggtgcactcagtcgaggtattactgctgcattcaagcctacaagtcaacactacacgaatccaacatcaaatccagtgcctgcctcaccaataaattttcatcctgagtctagatcttcagatagttctgttattgttcagcctttttctaaacctggttatataacaaactcatcacgagttgtgtctaataagtcatcagagttactgtttgacttgacccaggatacaggattatcacattaccaagggggaccaacactttctatggcaggtatgagtgaaagttcatttttatcaaaacgtccttctacttctgaagtaaataatgttaatccaaagaagcctaaacccagcgaaagtgtttctggagcaaattcctcagctgtattaccttcagttaaatctccttcagtgacttcttcccaggctatgctagcaaaaggtacaaatacctcatcaaatcagtctaaaaatggaacaccttttccaagagcttgtccaaagtgcaacattcatttcaatcttttggatcctttgaaaaatcacatgaagtattgttgtccagacatgataaataactttttgggactggctaaaacagaattttcaagtacagtaaataaaaacacaactattgattcagagaaaggaaaattgatcatgttagttaatgacttttattatggaaaacatgaaggagatgtccaggaggaacagaagactcacacaacctttaaatgcttcagttgcttgaaaattctaaaaaataacattaggtttatgaaccacatgaaacaccatttggaacttgagaagcagagcagtgagagctgggaaaaccataccacctgccagcactgctaccgtcagtttcccacaccatttcagttgcagtgtcacatcgaaagtacacatacgccccatgaattttctactatttgtaaaatctgtgaattgtcatttgaaacagaacatgttcttttacaacatatgaaggacaatcataaacctggtgaaatgccatatgtctgccaggtttgtaattatagatcatcatcattttctgatgtagaaactcattttagaacatcccatgaaaacactaagaacttgctatgcccgttttgcctcaaagttattaaaattgcaacaccatatatgcatcattatatgaagcatcagaaaaaaggaatacatcgttgtacaaaatgcaggctgcagtttttgacatgcaaggagaaaatggatcataagactcaacaccatcgaacatttataaaacctaaacaactagaaggattgcctcctggaacaaaagttactattcgagcttcagttggacctctgcaatcaggagcttcacctacaccttccattagtgcaagtgcttctacccttcagctctcacctccaaggactaaaaatataactgctaaaaatcctgcaaaatctaatacaagtaaacctaatacagtcaaatccaacgcaagtaaacctaatacaagtaagcctaatggaagtaaatctaaatacaaaccaaaaatctctaatatgcaaaagaaacaaagcacattggctagtagcaataaaaaaagtaaagtcaatacagcattgaggaatttaaggtatcgtcggggcattcacaaatgcattgagtgttgttccgaaataaaagattttgcaaaccactttcctacgtacgtccactgtagtttttgcagatacaacactagctgtagcaaagcctatgtaaatcatatgatgagctttcatagtaaccgtccaagcaaaaggttttgtatttttaagaagcattcagaaaatctccggggcattactctagtgtgccttaattgtgatttcctaagtgatgtttctggcttagataatatggctacacacttaagtcaacataaaactcatacttgccaagttgtaatgcagaaagatgcagaagcagcccagagatttcaaaaaatatccagggtatacctggacagtgtcccccttcgatggacacaactgatgcctgttctctctttccaaggaatgtagtaatgaactagtccgtaacttgaaagtatttcgatttcttggctttatatatcttgtggaaaggacgacaaacaataaggccaataaaccga

SEQ ID NO: 2527 - DNA, 3041 bp, Homo sapiens
  source 1..3041: mol_type = genomic DNA
accgccaccatgggcgacaacccttttcaaccaaaaagtaattcaaaaatggcagaactgtttatggaatgtgaagaagaggagctggaaccatggcagaagaaagtaaaagaagttgaggatgacgatgatgatgagccaatctttgttggcgagatatcaagttcaaaaccagcaatttcaaatattttgaacagagttaaccccagctcatattcaaggggactaaagaatggtgcactcagtcgaggtattactgctgcattcaagcctacaagtcaacactacacgaatccaacatcaaatccagtgcctgcctcaccaataaattttcatcctgagtctagatcttcagatagttctgttattgttcagcctttttctaaacctggttatataacaaactcatcacgagttgtgtctaataagtcatcagagttactgtttgacttgacccaggatacaggattatcacattaccaagggggaccaacactttctatggcaggtatgagtgaaagttcatttttatcaaaacgtccttctacttctgaagtaaataatgttaatccaaagaagcctaaacccagcgaaagtgtttctggagcaaattcctcagctgtattaccttcagttaaatctccttcagtgacttcttcccaggctatgctagcaaaaggtacaaatacctcatcaaatcagtctaaaaatggaacaccttttccaagagcttgtccaaagtgcaacattcatttcaatcttttggatcctttgaaaaatcacatgaagtattgttgtccagacatgataaataactttttgggactggctaaaacagaattttcaagtacagtaaataaaaacacaactattgattcagagaaaggaaaattgatcatgttagttaatgacttttattatggaaaacatgaaggagatgtccaggaggaacagaagactcacacaacctttaaatgcttcagttgcttgaaaattctaaaaaataacattaggtttatgaaccacatgaaacaccatttggaacttgagaagcagagcagtgagagctgggaaaaccataccacctgccagcactgctaccgtcagtttcccacaccatttcagttgcagtgtcacatcgaaagtacacatacgccccatgaattttctactatttgtaaaatctgtgaattgtcatttgaaacagaacatgttcttttacaacatatgaaggacaatcataaacctggtgaaatgccatatgtctgccaggtttgtaattatagatcatcatcattttctgatgtagaaactcattttagaacatcccatgaaaacactaagaacttgctatgcccgttttgcctcaaagttattaaaattgcaacaccatatatgcatcattatatgaagcatcagaaaaaaggaatacatcgttgtacaaaatgcaggctgcagtttttgacatgcaaggagaaaatggatcataagactcaacaccatcgaacatttataaaacctaaacaactagaaggattgcctcctggaacaaaagttactattcgagcttcagttggacctctgcaatcaggagcttcacctacaccttccattagtgcaagtgcttctacccttcagctctcacctccaaggactaaaaatataactgctaaaaatcctgcaaaatctaatacaagtaaacctaatacagtcaaatccaacgcaagtaaacctaatacaagtaagcctaatggaagtaaatctaaatacaaaccaaaaatctctaatatgcaaaagaaacaaagcacattggctagtagcaataaaaaaagtaaagtcaatacagcattgaggaatttaaggtatcgtcggggcattcacaaatgcattgagtgttgttccgaaataaaagattttgcaaaccactttcctacgtacgtccactgtagtttttgcagatacaacactagctgtagcaaagcctatgtaaatcatatgatgagctttcatagtaaccgtccaagcaaaaggttttgtatttttaagaagcattcagaaaatctccggggcattactctagtgtgccttaattgtgatttcctaagtgatgtttctggcttagataatatggctacacacttaagtcaacataaaactcatacttgccaagttgtaatgcagaaagtttctgtttgtatcccaacttctgagcacctttctgaattaaaaaaagaagctcccgcaaaggaacaagaacctgtgtctaaggaaattgcaagacctaacatggctgaaagagaaacagaaacatcaaattctgaaagtaaacaagataaagctgcttcttcaaaagaaaaaaatggatgtaatgcaaattcatttgaaggctcatcaacaacaaaaagtgaagaaagcataacagtttcagataaggaaaatgaaacctgtcttgcagaccaggaaactggctcaaaaaacatcgtcagttgtgattcaaatattggtgcagataaagtggaaaagaaaaaacaaatacaacacgtttgtcaggaaatggagttgaagatgtgccaaagttcagaaaacataatcttatctgatcagattaaagatcacaactccagtgaagccagattttcttcaaagaatattaaggatttgcgattagcatcagataatgtaagcattgatcagtttttgagaaaaagacatgaacctgaatctgttagttctgatgttagcgagcaaggcagtattcatttggaacctctgactccatccgaggtacttgagtatgaagccacagagattcttcagaaaggtagtggtgatccttcagccaagactgatgaagtagtgtctgatcaaacagatgacattcctggaggaaataaccctagcacaacagaggcaacagtagacctggaagacgaaaaagaaagaagttagtaatgaactagtccgtaacttgaaagtatttcgatttcttggctttatatatcttgtggaaaggacgatcgtcagattcaaagggcccggta

SEQ ID NO: 2528 - DNA, 1733 bp, Homo sapiens
  source 1..1733: mol_type = genomic DNA
accgccaccatggaacaatcatgtgaggaagagaaagagcctgaaccacagaagaacatacaagaaaccaaacaagtagatgacgaagatgctgagctcatctttgttggtgtggaacatgtaaatgaagatgctgagctaatctttgttggggtgacttcaaattcaaaaccagtcgtttcaaacattttgaacagagtcaccccgggttcatggtcaaggagaaaaaagtatgatcaccttagaaaagatactgctcgcaaattgcagcctaaaagtcatgagaccgttacatcagaagcagtgaccgtcctgccagcttcccaacttgaatcgagatcaacagatagtcctattattattgagcctttgtctaaacctgattatagaaatagttcaccacaagttgtgcctaataactcttcagaattaccttctcctttgattacattcacagattcattgcatcatccagtaagtacagcactttcagtaggaggtataaatgaaagtcctcgtgtatcaaagcaactttccactttcgaagtaaacagcataaatcccaaaagggctaaactcagggatggaattatagaaggaaattcttcagcttcattcccttcagatacctttcatacaatgaatactcagcaaagtacaccctcaaataatgttcatacctcattaagccatgttcagaatggagcaccttttccagcagcttttccaaaggacaatatccatttcaagcctataaatacaaatcttgatagggcaaatgaattggcaaaaacagacattttgagtctaacaagtcaaaacaagacctttgatcccaagaaagaaaatcccattgtgttacttagtgacttttactatggacagcataaaggagaagggcagccggaacagaagactcacaccacctttaaatgcctcagctgcgtgaaagttctaaaaaatgttaagtttatgaatcacgtgaagcatcatttggaatttgagaagcagaggaacgacagctgggaaaaccacaccacctgccagcactgccaccggcagtttcccactcccttccagctacagtgtcacatcgaaaatgtccacactgcccaggagccctctactgtctgtaaaatctgtgaattgtcatttgaaacagatcaggtcctcttacaacacatgaaggaccatcataagcctggcgaaatgccctatgtgtgccaggtttgccattatagatcgtcggtctttgctgatgtagaaacacattttagaacgtgccatgaaaacacaaagaatttgctttgtcccttttgtctcaaaattttcaaaacagcaacaccatacatgtgtcattataggggccactggggaaagagtgcacaccagtgttccaagtgccggctacagtttttaactttcaaggagaaaatggagcacaagacccagtgtcatcaaatgtttaagaagcctaagcaactagaaggattacctcctgaaacaaaagttactattcaagtgtcgctggaacctcttcagccaggatcagtggatgtagcatccataactgtgagcacatctgactctgaaccatcactccccaggtctaaaagcaaaatttcaaaaaagtcccattagtaatgaactagtccgtaacttgaaagtatttcgatttcttggctttatatatcttgtggaaaggacgattcgtacctatttgctataaagcg

SEQ ID NO: 2529 - DNA, 623 bp, Homo sapiens
  source 1..623: mol_type = genomic DNA
accgccaccatgttcaagagaatggccgaatttgggcctgactccggcgggagagtaaagggtgttactatcgttaaaccaatagtttacggtaatgttgctcggtattttggaaagaaaagagaagaagatgggcacactcatcagtggacagtatatgtgaaaccatatagaaatgaggtaaccctgtatcatttgctaaagctgtttcaatcagacaccaatgcaatgctggggaaaaagacagtggtttcagagttctatgatgaaatgatatttcaagacccaacagcaatgatgcaacaattattgacaacatctcgtcagctaacattaggagcctataagcatgaaacagaatttgcagagcttgaagtgaaaaccagagaaaaattagaagctgctaagaaaaaaacaagctttgagattgcagagcttaaggagagattaaaagcaagtcgtgaaactataaattgtttaaaaaatgaaatcagaaaacttgaagaagatgaccaagcaaaagacatatagtaatgaactagtccgtaacttgaaagtatttcgatttcttggctttatatatcttgtggaaaggacgaaatggatacctcaacctcttacta

SEQ ID NO: 2530 - DNA, 1679 bp, Homo sapiens
  source 1..1679: mol_type = genomic DNA
accgccaccatggcctcaaacgattatacccaacaagcaacccaaagctatggggcctaccccacccagcccgggcagggctattcccagcagagcagtcagccctacggacagcagagttacagtggttatagccagtccacggacacttcaggctatggccagagcagctattcttcttatggccagagccagaacagctatggaactcagtcaactccccagggatatggctcgactggcggctatggcagtagccagagctcccaatcgtcttacgggcagcagtcctcctaccctggctatggccagcagccagctcccagcagcacctcgggaagttacggtagcagttctcagagcagcagctatgggcagccccagagtgggagctacagccagcagcctagctatggtggacagcagcaaagctatggacagcagcaaagctataatccccctcagggctatggacagcagaaccagtacaacagcagcagtggtggtggaggtggaggtggaggtggaggtaactatggccaagatcaatcctccatgagtagtggtggtggcagtggtggcggttatggcaatcaagaccagagtggtggaggtggcagcggtggctatggacagcaggaccgtggaggccgcggcaggggtggcagtggtggcggcggcggcggcggcggtggtggttacaaccgcagcagtggtggctatgaacccagaggtcgtggaggtggccgtggaggcagaggtggcatgggcggaagtgaccgtggtggcttcaataaatttggtggccctcgggaccaaggatcacgtcatgactccgaacaggataattcagacaacaacaccatctttgtgcaaggcctgggtgagaatgttacaattgagtctgtggctgattacttcaagcagattggtattattaagacaaacaagaaaacgggacagcccatgattaatttgtacacagacagggaaactggcaagctgaagggagaggcaacggtctcttttgatgacccaccttcagctaaagcagctattgactggtttgatggtaaagaattctccggaaatcctatcaaggtctcatttgctactcgccgggcagactttaatcggggtggtggcaatggtcgtggaggccgagggcgaggaggacccatgggccgtggaggctatggaggtggtggcagtggtggtggtggccgaggaggatttcccagtggaggtggtggcggtggaggacagcagcgagctggtgactggaagtgtcctaatcccacctgtgagaatatgaacttctcttggaggaatgaatgcaaccagtgtaaggcccctaaaccagatggcccaggagggggaccaggtggctctcacatggggggtaactacggggatgatcgtcgtggtggcagaggaggctatgatcgaggcggctaccggggccgcggcggggaccgtggaggcttccgagggggccggggtggtggggacagaggtggctttggccctggcaagatggattccaggggtgagcacagacaggatcgcagggagaggccgtattagtaatgaactagtccgtaacttgaaagtatttcgatttcttggctttatatatcttgtggaaaggacgagacgctcatgccgtctctctgcga

SEQ ID NO: 2531 - DNA, 1682 bp, Homo sapiens
  source 1..1682: mol_type = genomic DNA
accgccaccatggcctcaaacgattatacccaacaagcaacccaaagctatggggcctaccccacccagcccgggcagggctattcccagcagagcagtcagccctacggacagcagagttacagtggttatagccagtccacggacacttcaggctatggccagagcagctattcttcttatggccagagccagaacacaggctatggaactcagtcaactccccagggatatggctcgactggcggctatggcagtagccagagctcccaatcgtcttacgggcagcagtcctcctaccctggctatggccagcagccagctcccagcagcacctcgggaagttacggtagcagttctcagagcagcagctatgggcagccccagagtgggagctacagccagcagcctagctatggtggacagcagcaaagctatggacagcagcaaagctataatccccctcagggctatggacagcagaaccagtacaacagcagcagtggtggtggaggtggaggtggaggtggaggtaactatggccaagatcaatcctccatgagtagtggtggtggcagtggtggcggttatggcaatcaagaccagagtggtggaggtggcagcggtggctatggacagcaggaccgtggaggccgcggcaggggtggcagtggtggcggcggcggcggcggcggtggtggttacaaccgcagcagtggtggctatgaacccagaggtcgtggaggtggccgtggaggcagaggtggcatgggcggaagtgaccgtggtggcttcaataaatttggtggccctcgggaccaaggatcacgtcatgactccgaacaggataattcagacaacaacaccatctttgtgcaaggcctgggtgagaatgttacaattgagtctgtggctgattacttcaagcagattggtattattaagacaaacaagaaaacgggacagcccatgattaatttgtacacagacagggaaactggcaagctgaagggagaggcaacggtctcttttgatgacccaccttcagctaaagcagctattgactggtttgatggtaaagaattctccggaaatcctatcaaggtctcatttgctactcgccgggcagactttaatcggggtggtggcaatggtcgtggaggccgagggcgaggaggacccatgggccgtggaggctatggaggtggtggcagtggtggtggtggccgaggaggatttcccagtggaggtggtggcggtggaggacagcagcgagctggtgactggaagtgtcctaatcccacctgtgagaatatgaacttctcttggaggaatgaatgcaaccagtgtaaggcccctaaaccagatggcccaggagggggaccaggtggctctcacatggggggtaactacggggatgatcgtcgtggtggcagaggaggctatgatcgaggcggctaccggggccgcggcggggaccgtggaggcttccgagggggccggggtggtggggacagaggtggctttggccctggcaagatggattccaggggtgagcacagacaggatcgcagggagaggccgtattagtaatgaactagtccgtaacttgaaagtatttcgatttcttggctttatatatcttgtggaaaggacgactccctcgagctagcttggatcag

SEQ ID NO: 2532 - DNA, 3494 bp, Homo sapiens
  source 1..3494: mol_type = genomic DNA
accgccaccatgttggagatctgcctgaagctggtgggctgcaaatccaagaaggggctgtcctcgtcctccagctgttatctggaagaagcccttcagcggccagtagcatctgactttgagcctcagggtctgagtgaagccgctcgttggaactccaaggaaaaccttctcgctggacccagtgaaaatgaccccaaccttttcgttgcactgtatgattttgtggccagtggagataacactctaagcataactaaaggtgaaaagctccgggtcttaggctataatcacaatggggaatggtgtgaagcccaaaccaaaaatggccaaggctgggtcccaagcaactacatcacgccagtcaacagtctggagaaacactcctggtaccatgggcctgtgtcccgcaatgccgctgagtatctgctgagcagcgggatcaatggcagcttcttggtgcgtgagagtgagagcagtcctggccagaggtccatctcgctgagatacgaagggagggtgtaccattacaggatcaacactgcttctgatggcaagctctacgtctcctccgagagccgcttcaacaccctggccgagttggttcatcatcattcaacggtggccgacgggctcatcaccacgctccattatccagccccaaagcgcaacaagcccactgtctatggtgtgtcccccaactacgacaagtgggagatggaacgcacggacatcaccatgaagcacaagctgggcgggggccagtacggggaggtgtacgagggcgtgtggaagaaatacagcctgacggtggccgtgaagaccttgaaggaggacaccatggaggtggaagagttcttgaaagaagctgcagtcatgaaagagatcaaacaccctaacctggtgcagctccttggggtctgcacccgggagcccccgttctatatcatcactgagttcatgacctacgggaacctcctggactacctgagggagtgcaaccggcaggaggtgaacgccgtggtgctgctgtacatggccactcagatctcgtcagccatggagtacctggagaagaaaaacttcatccacagagatcttgctgcccgaaactgcctggtaggggagaaccacttggtgaaggtagctgattttggcctgagcaggttgatgacaggggacacctacacagcccatgctggagccaagttccccatcaaatggactgcacccgagagcctggcctacaacaagttctccatcaagtccgacgtctgggcatttggagtattgctttgggaaattgctacctatggcatgtccccttacccgggaattgacctgtcccaggtgtatgagctgctagagaaggactaccgcatggagcgcccagaaggctgcccagagaaggtctatgaactcatgcgagcatgttggcagtggaatccctctgaccggccctcctttgctgaaatccaccaagcctttgaaacaatgttccaggaatccagtatctcagacgaagtggaaaaggagctggggaaacaaggcgtccgtggggctgtgagtaccttgctgcaggccccagagctgcccaccaagacgaggacctccaggagagctgcagagcacagagacaccactgacgtgcctgagatgcctcactccaagggccagggagagagcgatcctctggaccatgagcctgccgtgtctccattgctccctcgaaaagagcgaggtcccccggagggcggcctgaatgaagatgagcgccttctccccaaagacaaaaagaccaacttgttcagcgccttgatcaagaagaagaagaagacagccccaacccctcccaaacgcagcagctccttccgggagatggacggccagccggagcgcagaggggccggcgaggaagagggccgagacatcagcaacggggcactggctttcacccccttggacacagctgacccagccaagtccccaaagcccagcaatggggctggggtccccaatggagccctccgggagtccgggggctcaggcttccggtctccccacctgtggaagaagtccagcacgctgaccagcagccgcctagccaccggcgaggaggagggcggtggcagctccagcaagcgcttcctgcgctcttgctccgcctcctgcgttccccatggggccaaggacacggagtggaggtcagtcacgctgcctcgggacttgcagtccacgggaagacagtttgactcgtccacatttggagggcacaaaagtgagaagccggctctgcctcggaagagggcaggggagaacaggtctgaccaggtgacccgaggcacagtaacgcctccccccaggctggtgaaaaagaatgaggaagctgctgatgaggtcttcaaagacatcatggagtccagcccgggctccagcccgcccaacctgactccaaaacccctccggcggcaggtcaccgtggcccctgcctcgggcctcccccacaaggaagaagctggaaagggcagtgccttagggacccctgctgcagctgagccagtgacccccaccagcaaagcaggctcaggtgcaccagggggcaccagcaagggccccgccgaggagtccagagtgaggaggcacaagcactcctctgagtcgccagggagggacaaggggaaattgtccaggctcaaacctgccccgccgcccccaccagcagcctctgcagggaaggctggaggaaagccctcgcagagcccgagccaggaggcggccggggaggcagtcctgggcgcaaagacaaaagccacgagtctggttgatgctgtgaacagtgacgctgccaagcccagccagccgggagagggcctcaaaaagcccgtgctcccggccactccaaagccacagtccgccaagccgtcggggacccccatcagcccagcccccgttccctccacgttgccatcagcatcctcggccctggcaggggaccagccgtcttccaccgccttcatccctctcatatcaacccgagtgtctcttcggaaaacccgccagcctccagagcggatcgccagcggcgccatcaccaagggcgtggtcctggacagcaccgaggcgctgtgcctcgccatctctaggaactccgagcagatggccagccacagcgcagtgctggaggccggcaaaaacctctacacgttctgcgtgagctatgtggattccatccagcaaatgaggaacaagtttgccttccgagaggccatcaacaaactggagaataatctccgggagcttcagatctgcccggcgacagcaggcagtggtccagcggccactcaggacttcagcaagctcctcagttcggtgaaggaaatcagtgacatagtgcagaggtagtaatgaactagtccgtaacttgaaagtatttcgatttcttggctttatatatcttgtggaaaggacgataagtaatgttacggttagttcca

SEQ ID NO: 2533 - DNA, 3551 bp, Homo sapiens
  source 1..3551: mol_type = genomic DNA
accgccaccatggggcagcagcctggaaaagtacttggggaccaaagaaggccaagcttgcctgccctgcattttatcaaaggagcagggaagaaggaatcatcgaggcatgggggtccacactgcaatgtttttgtggaacatgaagcccttcagcggccagtagcatctgactttgagcctcagggtctgagtgaagccgctcgttggaactccaaggaaaaccttctcgctggacccagtgaaaatgaccccaaccttttcgttgcactgtatgattttgtggccagtggagataacactctaagcataactaaaggtgaaaagctccgggtcttaggctataatcacaatggggaatggtgtgaagcccaaaccaaaaatggccaaggctgggtcccaagcaactacatcacgccagtcaacagtctggagaaacactcctggtaccatgggcctgtgtcccgcaatgccgctgagtatctgctgagcagcgggatcaatggcagcttcttggtgcgtgagagtgagagcagtcctggccagaggtccatctcgctgagatacgaagggagggtgtaccattacaggatcaacactgcttctgatggcaagctctacgtctcctccgagagccgcttcaacaccctggccgagttggttcatcatcattcaacggtggccgacgggctcatcaccacgctccattatccagccccaaagcgcaacaagcccactgtctatggtgtgtcccccaactacgacaagtgggagatggaacgcacggacatcaccatgaagcacaagctgggcgggggccagtacggggaggtgtacgagggcgtgtggaagaaatacagcctgacggtggccgtgaagaccttgaaggaggacaccatggaggtggaagagttcttgaaagaagctgcagtcatgaaagagatcaaacaccctaacctggtgcagctccttggggtctgcacccgggagcccccgttctatatcatcactgagttcatgacctacgggaacctcctggactacctgagggagtgcaaccggcaggaggtgaacgccgtggtgctgctgtacatggccactcagatctcgtcagccatggagtacctggagaagaaaaacttcatccacagagatcttgctgcccgaaactgcctggtaggggagaaccacttggtgaaggtagctgattttggcctgagcaggttgatgacaggggacacctacacagcccatgctggagccaagttccccatcaaatggactgcacccgagagcctggcctacaacaagttctccatcaagtccgacgtctgggcatttggagtattgctttgggaaattgctacctatggcatgtccccttacccgggaattgacctgtcccaggtgtatgagctgctagagaaggactaccgcatggagcgcccagaaggctgcccagagaaggtctatgaactcatgcgagcatgttggcagtggaatccctctgaccggccctcctttgctgaaatccaccaagcctttgaaacaatgttccaggaatccagtatctcagacgaagtggaaaaggagctggggaaacaaggcgtccgtggggctgtgagtaccttgctgcaggccccagagctgcccaccaagacgaggacctccaggagagctgcagagcacagagacaccactgacgtgcctgagatgcctcactccaagggccagggagagagcgatcctctggaccatgagcctgccgtgtctccattgctccctcgaaaagagcgaggtcccccggagggcggcctgaatgaagatgagcgccttctccccaaagacaaaaagaccaacttgttcagcgccttgatcaagaagaagaagaagacagccccaacccctcccaaacgcagcagctccttccgggagatggacggccagccggagcgcagaggggccggcgaggaagagggccgagacatcagcaacggggcactggctttcacccccttggacacagctgacccagccaagtccccaaagcccagcaatggggctggggtccccaatggagccctccgggagtccgggggctcaggcttccggtctccccacctgtggaagaagtccagcacgctgaccagcagccgcctagccaccggcgaggaggagggcggtggcagctccagcaagcgcttcctgcgctcttgctccgcctcctgcgttccccatggggccaaggacacggagtggaggtcagtcacgctgcctcgggacttgcagtccacgggaagacagtttgactcgtccacatttggagggcacaaaagtgagaagccggctctgcctcggaagagggcaggggagaacaggtctgaccaggtgacccgaggcacagtaacgcctccccccaggctggtgaaaaagaatgaggaagctgctgatgaggtcttcaaagacatcatggagtccagcccgggctccagcccgcccaacctgactccaaaacccctccggcggcaggtcaccgtggcccctgcctcgggcctcccccacaaggaagaagctggaaagggcagtgccttagggacccctgctgcagctgagccagtgacccccaccagcaaagcaggctcaggtgcaccagggggcaccagcaagggccccgccgaggagtccagagtgaggaggcacaagcactcctctgagtcgccagggagggacaaggggaaattgtccaggctcaaacctgccccgccgcccccaccagcagcctctgcagggaaggctggaggaaagccctcgcagagcccgagccaggaggcggccggggaggcagtcctgggcgcaaagacaaaagccacgagtctggttgatgctgtgaacagtgacgctgccaagcccagccagccgggagagggcctcaaaaagcccgtgctcccggccactccaaagccacagtccgccaagccgtcggggacccccatcagcccagcccccgttccctccacgttgccatcagcatcctcggccctggcaggggaccagccgtcttccaccgccttcatccctctcatatcaacccgagtgtctcttcggaaaacccgccagcctccagagcggatcgccagcggcgccatcaccaagggcgtggtcctggacagcaccgaggcgctgtgcctcgccatctctaggaactccgagcagatggccagccacagcgcagtgctggaggccggcaaaaacctctacacgttctgcgtgagctatgtggattccatccagcaaatgaggaacaagtttgccttccgagaggccatcaacaaactggagaataatctccgggagcttcagatctgcccggcgacagcaggcagtggtccagcggccactcaggacttcagcaagctcctcagttcggtgaaggaaatcagtgacatagtgcagaggtagtaatgaactagtccgtaacttgaaagtatttcgatttcttggctttatatatcttgtggaaaggacgatcggatatgtctttgtgccatcta

SEQ ID NO: 2534 - DNA, 1337 bp, Homo sapiens
  source 1..1337: mol_type = genomic DNA
accgccaccatgtcaaaaagaccatcttatgccccacctcccaccccagctcctgcaacacaaatgcccagcacaccagggtttgtgggatacaatccatacagtcatctcgcctacaacaactacaggctgggagggaacccgggcaccaacagccgggtcacggcatcctctggtatcacgattccaaaacccccaaagccaccagataagccgctgatgccctacatgaggtacagcagaaaggtctgggaccaagtaaaggcttccaaccctgacctaaagttgtgggagattggcaagattattggtggcatgtggcgagatctcactgatgaagaaaaacaagaatatttaaacgaatacgaagcagaaaagatagagtacaatgaatctatgaaggcctatcataattcccccgcgtaccttgcttacataaatgcaaaaagtcgtgcagaagctgctttagaggaagaaagtcgacagagacaatctcgcatggagaaaggagaaccgtacatgagcattcagcctgctgaagatccagatgattatgatgatggcttttcaatgaagcatacagccaccgcccgtttccagagaaaccaccgcctcatcagtgaaattcttagtgagagtgtggtgccagacgttcggtcagttgtcacaacagctagaatgcaggtcctcaaacggcaggtccagtccttaatggttcatcagcgaaaactagaagctgaacttcttcaaatagaggaacgacaccaggagaagaagaggaaattcctggaaagcacagattcatttaacaatgaacttaaaaggttgtgcggtctgaaagtagaagtggatatggagaaaattgcagctgagattgcacaggcagaggaacaggcccgcaaaaggcaggaggaaagggagaaggaggccgcagagcaagctgagcgcagtcagagcagcatcgttcctgaggaagaacaagcagctaacaaaggcgaggagaagaaagacgacgagaacattccgatggagacagaggagacacaccttgaagaaacaacagagagccaacagaatggtgaagaaggcacgtctactcctgaggacaaggagagtgggcaggagggggtcgacagtatggcagaggaaggaaccagtgatagtaacactggctcggagagcaacagtgcaacagtggaggagccaccaacagatcccataccagaagatgagaaaaaagaatagtaatgaactagtccgtaacttgaaagtatttcgatttcttggctttatatatcttgtggaaaggacgatggtggaggctgactattaactgt

SEQ ID NO: 2535 - DNA, 1565 bp, Homo sapiens
  source 1..1565: mol_type = genomic DNA
accgccaccatggctgcggccgcgctgagggccccgactcaggttactgtgtctccagaaacacatatggacctcacaaagggctgtgtgacctttgaggacatcgccatttacttctcacaggacgagtggggacttcttgatgaggctcagagactcctgtaccttgaagtgatgctggagaactttgcccttgtagcctcactgggttgtggccatggaacagaggatgaagagacaccttctgaccagaatgtttctgtaggagtgtcacagtcaaaggcaggttcatccacacagaagactcaatcctgtgagatgtgtgtcccagtcctgaaagatattttgcatctagctgatctccctgggcagaaaccatacttggttggagaatgtacaaaccatcaccagcaccagaagcatcacagtgcaaagaaatccttgaagagggacatggacagagcctcatatgtgaagtgctgcctattctgtatgtcattgaagccctttcgcaaatgggaggttggaaaggaccttccagccatgttgcggcttctgaggtccctggtctttcctggaggcaagaaacccggcacaattactgaatgtggggaggacattcgcagtcaaaaaagtcattacaagtcaggtgaatgtgggaaggcttccaggcacaaacacactcctgtttaccatccaagagtctacactggaaaaaagctttatgagtgtagcaaatgtgggaaagccttccgtggcaagtactcacttgttcagcaccagagagtccatactggagaaaggccttgggagtgcaatgaatgtggaaaattctttagccaaacctcccacctgaatgatcatcggagaatccacaccggagaaaggccttatgagtgcagcgaatgtggaaaattatttagacaaaactccagccttgttgaccaccagaaaatacacactggagcaaggccttatgagtgtagccagtgtgggaaatcctttagccaaaaagccacccttgttaaacaccaaagagttcacactggagaaaggccttataagtgtggtgaatgtgggaattcctttagtcaaagtgccattcttaatcaacaccgaagaattcacactggagcaaagccttatgagtgtggccagtgtgggaaatcctttagtcaaaaagctaccctcattaaacaccagagagttcacactggagaaaggccttataagtgtggtgactgtgggaaatcctttagtcaaagctccatccttattcaacaccggagaattcatactggagcaaggccttatgagtgtggccagtgtggaaagtcctttagccaaaagtctggtctcattcaacaccaagtggttcacactggagaaaggccttatgagtgcaacaaatgtgggaattcctttagccaatgctccagcctcatacatcaccaaaaatgtcataacacatagtaatgaactagtccgtaacttgaaagtatttcgatttcttggctttatatatcttgtggaaaggacgaaagtttgtttcatccttgtgtcag

SEQ ID NO: 2536 - DNA, 1400 bp, Homo sapiens
  source 1..1400: mol_type = genomic DNA
accgccaccatgctggagaactttgcccttgtagcctcactgggttgtggccatggaacagaggatgaagagacaccttctgaccagaatgtttctgtaggagtgtcacagtcaaaggcaggttcatccacacagaagactcaatcctgtgagatgtgtgtcccagtcctgaaagatattttgcatctagctgatctccctgggcagaaaccatacttggttggagaatgtacaaaccatcaccagcaccagaagcatcacagtgcaaagaaatccttgaagagggacatggacagagcctcatatgtgaagtgctgcctattctgtatgtcattgaagccctttcgcaaatgggaggttggaaaggaccttccagccatgttgcggcttctgaggtccctggtctttcctggaggcaagaaacccggcacaattactgaatgtggggaggacattcgcagtcaaaaaagtcattacaagtcaggtgaatgtgggaaggcttccaggcacaaacacactcctgtttaccatccaagagtctacactggaaaaaagctttatgagtgtagcaaatgtgggaaagccttccgtggcaagtactcacttgttcagcaccagagagtccatactggagaaaggccttgggagtgcaatgaatgtggaaaattctttagccaaacctcccacctgaatgatcatcggagaatccacaccggagaaaggccttatgagtgcagcgaatgtggaaaattatttagacaaaactccagccttgttgaccaccagaaaatacacactggagcaaggccttatgagtgtagccagtgtgggaaatcctttagccaaaaagccacccttgttaaacaccaaagagttcacactggagaaaggccttataagtgtggtgaatgtgggaattcctttagtcaaagtgccattcttaatcaacaccgaagaattcacactggagcaaagccttatgagtgtggccagtgtgggaaatcctttagtcaaaaagctaccctcattaaacaccagagagttcacactggagaaaggccttataagtgtggtgactgtgggaaatcctttagtcaaagctccatccttattcaacaccggagaattcatactggagcaaggccttatgagtgtggccagtgtggaaagtcctttagccaaaagtctggtctcattcaacaccaagtggttcacactggagaaaggccttatgagtgcaacaaatgtgggaattcctttagccaatgctccagcctcatacatcaccaaaaatgtcataacacatagtaatgaactagtccgtaacttgaaagtatttcgatttcttggctttatatatcttgtggaaaggacgagttactagttgtgggtatctctgg

SEQ ID NO: 2537 - DNA, 1526 bp, Homo sapiens
  source 1..1526: mol_type = genomic DNA
accgccaccatggctgcggccgcgctgagggccccgactcagggctgtgtgacctttgaggacatcgccatttacttctcacaggacgagtggggacttcttgatgaggctcagagactcctgtaccttgaagtgatgctggagaactttgcccttgtagcctcactgggttgtggccatggaacagaggatgaagagacaccttctgaccagaatgtttctgtaggagtgtcacagtcaaaggcaggttcatccacacagaagactcaatcctgtgagatgtgtgtcccagtcctgaaagatattttgcatctagctgatctccctgggcagaaaccatacttggttggagaatgtacaaaccatcaccagcaccagaagcatcacagtgcaaagaaatccttgaagagggacatggacagagcctcatatgtgaagtgctgcctattctgtatgtcattgaagccctttcgcaaatgggaggttggaaaggaccttccagccatgttgcggcttctgaggtccctggtctttcctggaggcaagaaacccggcacaattactgaatgtggggaggacattcgcagtcaaaaaagtcattacaagtcaggtgaatgtgggaaggcttccaggcacaaacacactcctgtttaccatccaagagtctacactggaaaaaagctttatgagtgtagcaaatgtgggaaagccttccgtggcaagtactcacttgttcagcaccagagagtccatactggagaaaggccttgggagtgcaatgaatgtggaaaattctttagccaaacctcccacctgaatgatcatcggagaatccacaccggagaaaggccttatgagtgcagcgaatgtggaaaattatttagacaaaactccagccttgttgaccaccagaaaatacacactggagcaaggccttatgagtgtagccagtgtgggaaatcctttagccaaaaagccacccttgttaaacaccaaagagttcacactggagaaaggccttataagtgtggtgaatgtgggaattcctttagtcaaagtgccattcttaatcaacaccgaagaattcacactggagcaaagccttatgagtgtggccagtgtgggaaatcctttagtcaaaaagctaccctcattaaacaccagagagttcacactggagaaaggccttataagtgtggtgactgtgggaaatcctttagtcaaagctccatccttattcaacaccggagaattcatactggagcaaggccttatgagtgtggccagtgtggaaagtcctttagccaaaagtctggtctcattcaacaccaagtggttcacactggagaaaggccttatgagtgcaacaaatgtgggaattcctttagccaatgctccagcctcatacatcaccaaaaatgtcataacacatagtaatgaactagtccgtaacttgaaagtatttcgatttcttggctttatatatcttgtggaaaggacgacgtcacaagtgggcgcatattggc

SEQ ID NO: 2538 - DNA, 770 bp, Homo sapiens
  source 1..770: mol_type = genomic DNA
accgccaccatgagcgcagcgttcccgccgtcgctgatgatgatgcagcgcccgctggggagtagcaccgccttcagcatagactcgctgatcggcagcccgccgcagcccagccccggccatttcgtctacaccggctaccccatgttcatgccctaccggccggtagtgctgccgccgccgccgccgccgccgcccgcgctgccccaggccgcgctgcagccagcgctgccgcccgcacaccctcaccaccagatccccagcctgcccacaggcttctgctccagcctggcgcagggcatggcgctcacctctacgctcatggccacgctccccggcggcttctccgcgtcgccccagcaccaggaggcggcagcggcccgcaagttcgcgccgcagccgctgcccggcggcggtaacttcgacaaggcggaggcgctgcaggctgacgcggaggacggcaaaggcttcctggccaaagagggctcgctgctcgccttctccgcggccgagacggtgcaggcttcgctcggccgcctctgccgctccgcggtgacctggggttccggtcggggctgtccgagggcaagggaaagacgagtcaaaggtggaagacgacccgaagggcaaggaggagagcttctcgctggagagcgatgtggactacagctcggatagtaatgaactagtccgtaacttgaaagtatttcgatttcttggctttatatatcttgtggaaaggacgaattattcactattacggaacaagc

SEQ ID NO: 2539 - DNA, 1193 bp, Homo sapiens
  source 1..1193: mol_type = genomic DNA
accgccaccatgcagcgggccggaggcggtagcgcccctgggggcaacggcgggggcggcggcgggggcccgggcactgccttctccatcgactccctaatcgggccgccgccgccgcgctccggccacttgctgtacaccggctaccccatgttcatgccctaccggccgctcgtgctgccgcaggcgctggcccctgcgccgctgcccgctggcctcccgcccctcgccccgctagcctctttcgccggccgccttaccaacaccttctgcgcggggctgggtcaggctgtgccctcgatggtggcgctgaccaccgcgctgcccagcttcgcggagccgcccgacgctttctacgggccccaggagctcgccgccgccgctgccgccgccgccgccactgccgcccgaaacaaccccgagccaggcggccgacgcccagagggtgggctggaagctgatgagctgctgccggcccgggagaaagtggcagagcccccaccacctccgcctccgcacttctcagagacttttccaagtctgcccgcagaggggaaggtgtacagctcagatgaggagaagctggaggcatcagcaggagacccagcaggcagcgaacaggaggaagagggctcaggcggtgacagcgaggatgacggtttcctggacagttctgcagggggcccaggggctcttctgggacctaaaccgaagctaaagggaagcctggggactggagctgaggagggggcaccggtgacagcaggggtcacagctcctggggggaaaagccgacggcgccgcacagcatttaccagcgagcagcttttggaattggagaaggaatttcattgcaagaaatacctgagcttgacagagcgctctcagatcgcccacgccctcaagctcagtgaggtgcaggtcaagatctggtttcagaatcgacgggccaagtggaagcgcatcaaagctggcaatgtgagcagccgttctggggagcccgtaagaaaccccaagattgttgtccccatacctgtgcatgtcaacaggtttgctgtgcggagccagcaccaacaaatggagcagggggcccggccctagtaatgaactagtccgtaacttgaaagtatttcgatttcttggctttatatatcttgtggaaaggacgacgcaattcgaccgtagactaagta

SEQ ID NO: 2540 - DNA, 641 bp, Homo sapiens
  source 1..641: mol_type = genomic DNA
accgccaccatggtctctagcgaccggcccgtgtcactggaggacgaggtctcccatagtatgaaggagatgattggaggctgttgcgtttgctcagacgagagaggctgggccgagaacccgctggtttattgcgacgggcacggctgcagcgtcgcggtgcatcaagcttgctatggcattgttcaagtacccactggaccgtggttttgcaggaaatgtgaatctcaggagagagcagccagagtgatggtatgcaattcctgttggttagcctcatctgaaaacgtcactcctggatacatagaacatcactgcgcatgtgcatctccccacccccgatgcctggtgtctaacgttcctccagtttctggtgctctgatgcattgcttttgggcttgtcttactacagcagctttcttcggtcctcagtcatttaccacttgtcatatgtcctttctagtttccagggatattcttttttatatttatggctttatgccatttatctcagttgtcatttggcgtttcaagaaggagaggtggtagtaatgaactagtccgtaacttgaaagtatttcgatttcttggctttatatatcttgtggaaaggacgaaaagtgaacctttccgaatggata

SEQ ID NO: 2541 - DNA, 3185 bp, Homo sapiens
  source 1..3185: mol_type = genomic DNA
accgccaccatggtctctagcgaccggcccgtgtcactggaggacgaggtctcccatagtatgaaggagatgattggaggctgttgcgtttgctcagacgagagaggctgggccgagaacccgctggtttattgcgacgggcacggctgcagcgtcgcggtgcatcaagcttgctatggcattgttcaagtacccactggaccgtggttttgcaggaaatgtgaatctcaggagagagcagccagagtgagatgtgaactttgtccccataaggatggagctttaaaaagaacagataatgggggttgggcccatgtggtttgtgccctgtatattccagaggtacaatttgccaatgtttccacaatggaaccaattgttttacagtctgttccgcatgatcgttataataagacttgctacatttgtgatgaacaaggaagagaaagcaaagcagccactggtgcttgcatgacatgtaataaacatggatgtcgacaggctttccatgtaacatgcgctcagtttgccggactgctttgtgaagaagaaggtaatggtgccgataatgtccaatactgtggctactgtaaataccattttagtaagctgaaaaagagcaaacggggatctaataggtcatatgatcaaagtttaagtgattcttcctctcactctcaggataaacatcatgagaaagagaaaaaaaaatataaagagaaggacaaacacaaacagaaacacaagaagcagccagaaccatcacctgcattggttccatccttgactgttactacagaaaaaacttatacaagcactagcaacaactctatatctggatcattgaagcgcttggaagatactactgcacgatttacaaatgcaaatttccaggaagtctctgcacacacctctagtggaaaagatgtttcagagactagagggtcagagggcaaagggaagaaatcttcagctcacagctcaggtcaaaggggaagaaagcctggtggtggaagaaatccaggaacaactgtgtcagcagctagcccttttcctcaaggcagtttttcaggaactccaggcagtgtaaagtcatcttctggaagttcagtgcagtctccccaggatttcctgagctttacagactcagatctgcgtaatgacagttactctcactcccaacagtcatcagcaaccaaagatgtacataaaggagagtctggaagccaggaagggggggtaaatagttttagtaccttaattggcctcccttcaacctcagctgttacttcacagcctaaaagctttgaaaattcacctggagatttgggtaattccagccttcctacagcaggatataagcgggctcaaacttctggcatagaagaagaaactgtaaaggaaaagaaaaggaaaggaaataaacaaagtaagcatgggcctggcagacccaaaggaaacaaaaatcaagagaatgtttctcatctctcagtttcttctgcttcaccaacatcatctgtagcatcagctgcaggaagcataacaagctctagtctgcagaaatctcctacattgctcaggaatggaagtttacagagcctcagtgttggctcatctccagttggttcagaaatttccatgcagtatcggcatgatggagcttgcccaacaactacgttctcagagttgctgaatgcaatacacaacgacagaggtgacagttctacactaacaaagcaagaacttaaattcataggtatttataacagcaatgatgtagcagtatcgtttccaaatgtagtatctggctcgggatctagtactcctgtctccagctctcacttacctcagcagtcttctgggcatttgcaacaagtaggagcgctctctccctcagctgtgtcatctgcagcccctgctgttgctacaactcaggcaaatactctatctggatcttctctcagtcaggcaccatctcatatgtatggcaatagatcaaattcatcaatggcagctcttatagctcagtctgaaaacaatcaaacagatcaagatcttggagacaatagccgcaacctagttggcagaggaagctcaccccgaggaagtctctcgccacgatcccctgtaagcagcttacagattcgctatgatcaaccaggcaacagcagtttggaaaatctgcctccagtagcagccagcatagaacagcttttggagaggcagtggagtgaaggacagcaatttttactagaacagggtactcctagtgacattttaggaatgctgaagtcattacaccaacttcaagttgaaaaccgaagattagaggaacaaattaaaaacttgactgccaaaaaggaacggcttcagttattgaatgcacagctttcagtgccttttccaacaataacagcaaatcctagtccgtctcatcaaatacacacattttcagcacagactgctcctactactgattccttgaacagcagtaagagccctcatataggaaacagctttttacctgataattctcttcctgtattaaatcaggacttaacctccagtggacaaagtaccagcagctcatcagctctttctaccccacctcctgctgggcagagtccggctcaacaaggctcaggagtgagtggagttcagcaggtcaatggcgtgacagtgggggcactagctagtggaatgcagcctgtaacttccaccattcctgccgtgtctgcagtgggtggaataattggagctttgccaggtaaccaactggcaattaatggcattgtaggagctttaaatggggttatgcagactcctgtcacaatgtcccagaaccctacccctctcacccacacaaccgtaccacctaatgcaacacatccaatgccagctacactgactaacagtgcctcaggactaggattactttctgaccagcaacgacaaatacttattcatcaacagcagtttcagcagttgttaaattctcaacagctcacaccagtacacaggcacccccacttcacacagctaccaccaacccatttctcaccatccatggagataatgcaagtcagaaagtagtaatgaactagtccgtaacttgaaagtatttcgatttcttggctttatatatcttgtggaaaggacgatgtccgggcaagaatacgagttga

SEQ ID NO: 2542 - DNA, 3308 bp, Homo sapiens
  source 1..3308: mol_type = genomic DNA
accgccaccatggtctctagcgaccggcccgtgtcactggaggacgaggtctcccatagtatgaaggagatgattggaggctgttgcgtttgctcagacgagagaggctgggccgagaacccgctggtttattgcgacgggcacggctgcagcgtcgcggtgcatcaagcttgctatggcattgttcaagtacccactggaccgtggttttgcaggaaatgtgaatctcaggagagagcagccagagtgagatgtgaactttgtccccataaggatggagctttaaaaagaacagataatgggggttgggcccatgtggtttgtgccctgtatattccagaggtacaatttgccaatgtttccacaatggaaccaattgttttacagtctgttccgcatgatcgttataataagacttgctacatttgtgatgaacaaggaagagaaagcaaagcagccactggtgcttgcatgacatgtaataaacatggatgtcgacaggctttccatgtaacatgcgctcagtttgccggactgctttgtgaagaagaaggtaatggtgccgataatgtccaatactgtggctactgtaaataccattttagtaagctgaaaaagagcaaacggggatctaataggtcatatgatcaaagtttaagtgattcttcctctcactctcaggataaacatcatgagaaagagaaaaaaaaatataaagagaaggacaaacacaaacagaaacacaagaagcagccagaaccatcacctgcattggttccatccttgactgttactacagaaaaaacttatacaagcactagcaacaactctatatctggatcattgaagcgcttggaagatactactgcacgatttacaaatgcaaatttccaggaagtctctgcacacacctctagtggaaaagatgtttcagagactagagggtcagagggcaaagggaagaaatcttcagctcacagctcaggtcaaaggggaagaaagcctggtggtggaagaaatccaggaacaactgtgtcagcagctagcccttttcctcaaggcagtttttcaggaactccaggcagtgtaaagtcatcttctggaagttcagtgcagtctccccaggatttcctgagctttacagactcagatctgcgtaatgacagttactctcactcccaacagtcatcagcaaccaaagatgtacataaaggagagtctggaagccaggaagggggggtaaatagttttagtaccttaattggcctcccttcaacctcagctgttacttcacagcctaaaagctttgaaaattcacctggagatttgggtaattccagccttcctacagcaggatataagcgggctcaaacttctggcatagaagaagaaactgtaaaggaaaagaaaaggaaaggaaataaacaaagtaagcatgggcctggcagacccaaaggaaacaaaaatcaagagaatgtttctcatctctcagtttcttctgcttcaccaacatcatctgtagcatcagctgcaggaagcataacaagctctagtctgcagaaatctcctacattgctcaggaatggaagtttacagagcctcagtgttggctcatctccagttggttcagaaatttccatgcagtatcggcatgatggagcttgcccaacaactacgttctcagagttgctgaatgcaatacacaacggtatttataacagcaatgatgtagcagtatcgtttccaaatgtagtatctggctcgggatctagtactcctgtctccagctctcacttacctcagcagtcttctgggcatttgcaacaagtaggagcgctctctccctcagctgtgtcatctgcagcccctgctgttgctacaactcaggcaaatactctatctggatcttctctcagtcaggcaccatctcatatgtatggcaatagatcaaattcatcaatggcagctcttatagctcagtctgaaaacaatcaaacagatcaagatcttggagacaatagccgcaacctagttggcagaggaagctcaccccgaggaagtctctcgccacgatcccctgtaagcagcttacagattcgctatgatcaaccaggcaacagcagtttggaaaatctgcctccagtagcagccagcatagaacagcttttggagaggcagtggagtgaaggacagcaatttttactagaacagggtactcctagtgacattttaggaatgctgaagtcattacaccaacttcaagttgaaaaccgaagattagaggaacaaattaaaaacttgactgccaaaaaggaacggcttcagttattgaatgcacagctttcagtgccttttccaacaataacagcaaatcctagtccgtctcatcaaatacacacattttcagcacagactgctcctactactgattccttgaacagcagtaagagccctcatataggaaacagctttttacctgataattctcttcctgtattaaatcaggacttaacctccagtggacaaagtaccagcagctcatcagctctttctaccccacctcctgctgggcagagtccggctcaacaaggctcaggagtgagtggagttcagcaggtcaatggcgtgacagtgggggcactagctagtggaatgcagcctgtaacttccaccattcctgccgtgtctgcagtgggtggaataattggagctttgccaggtaaccaactggcaattaatggcattgtaggagctttaaatggggttatgcagactcctgtcacaatgtcccagaaccctacccctctcacccacacaaccgtaccacctaatgcaacacatccaatgccagctacactgactaacagtgcctcaggactaggattactttctgaccagcaacgacaaatacttattcatcaacagcagtttcagcagttgttaaattctcaacagctcacaccagaacaacatcaagcctttttgtatcagttaatgcaacatcaccaccagcagcaccaccaacctgaacttcagcagctgcagatccctggaccaacacaaatacccataaacaaccttcttgcaggtacacaggcacccccacttcacacagctaccaccaacccatttctcaccatccatggagataatgcaagtcagaaagtagcaagacttagtgataaaactgggcctgtagctcaagagaaaagttagtaatgaactagtccgtaacttgaaagtatttcgatttcttggctttatatatcttgtggaaaggacgaagcctcctcatcttacggtactcc

SEQ ID NO: 2543 - DNA, 3014 bp, Homo sapiens
  source 1..3014: mol_type = genomic DNA
accgccaccatggctctttctcagggtctattgacattcagggatgtggccatagaattctctcaggaagagtggaagtgcctggaccctgctcagaggactctatacagggacgtgatgctggagaattataggaacctggtctccctggatatctcttccaaatgcatgatgaaggagttctcatcaacagcacaaggcaatacagaagtgatccacacagggacattgcaaagacatgaacgtcatcacattggagatttttgcttccaggaaatggagaaagatattcatgattttgagtttcagtggaaagaagatgaaagaaatagccatgaagcacccatgacagaaatcaaacagttgacgggtagtacaaaccgacatgatcaaaggcatgctggaaacaagcctattaaagatcagcttggatcaagctttcattcgcatctgcctgaactccacatgtttcagaccgaagggaaaattggtaatcaagttgagaagtctatcaacagtgcttcgttggtttcaacatcccaaagaatttcttgtaggcctaaaacccacatttctaagaactatgggaataatttcctgaattcttcattactcacacaaaagcaggaagtacacatgagagaaaaatctttccaatgtaatgagagtggcaaagcctttaattatagctcagtcttaaggaaacatcagataatccatttaggagcgaaacaatataaatgtgatgtgtgtggcaaggtctttaatcaaaagcgatatcttgcatgtcatcgtagatgtcacactggcaagaaaccttacaagtgtaatgattgtggcaagaccttcagtcaggagttaacccttacatgccatcatagacttcatactggagagaaacattacaagtgcagtgagtgtggcaagaccttcagtcgaaattcagcccttgtaattcataaggcaattcatactggagagaaatcttacaagtgtaatgaatgtggcaagaccttcagtcaaacgtcataccttgtgtaccatcgtagacttcatactggagagaaaccttacaaatgtgaagaatgtgacaaagctttcagtttcaaatcaaaccttgaaagacataggaaaattcatactggagagaaaccttacaagtgtaatgaatgcagcaggacctttagtcggaagtcatcccttacacgccatcgtagacttcatactggagagaaaccttataagtgtaatgattgtggcaagaccttcagtcagatgtcatcccttgtataccatcgtagacttcatactggagagaaaccttacaaatgtgaagaatgtgatgaagctttcagtttcaaatcgaaccttgaaagacataggagaattcatactggagagaaaccttacaagtgtaatgattgtggcaagaccttcagtcagacatcatcccttgtataccatcgtagacttcatactggagagaaaccttacaaatgtgaagaatgtgatgaagctttcagtttcaaatcaaaccttgaaagacataggataattcatactggagagaaactttacaagtgtaatgaatgtggcaagacctttagtcggaagtcatcccttacacgccattgtagacttcatactggagagaaaccttaccagtgtaatgagtgtggcaaagcctttcgtgggcagtcagcacttatttaccatcaagcaatccatggtatagggaaactttacaaatgtaatgattgtcaccaagtctttagtaatgctacaaccattgcaaatcattggagaatccataatgaagagagatcgtacaagtgtaatagatgtggcaaatttttcagacatcgttcataccttgcagttcattggcgaactcatagtggagagaaaccttacaaatgtgaagaatgtgatgaagctttcagtttcaaatcaaaccttcaaagacataggagaattcatactggagagaaaccttacaggtgtaatgaatgtggcaagacctttagtcggaagtcataccttacatgccatcgtagacttcatactggagagaaaccttacaagtgtaatgagtgtggcaagaccttcggtcgaaattcagcccttataattcacaaggcaattcatactggagagaaaccttacaagtgtaatgagtgtggcaaggccttcagtcagaagtcatcccttacatgccatcttagacttcatactggagagaaaccttacaaatgtgaagaatgtgacaaagttttcagtcgcaaatcaagccttgaaaaacacaggagaattcatactggagagaaaccatacaaatgtaaggtttgtgacaaagcttttgggcgtgattcacacctggcacaacatactagaattcacactggagagaaaccttacaagtgtaatgaatgtggcaagaacttccgtcacaattcagcccttgtaattcataaggcaattcatagtggagagaaaccttacaagtgtaatgagtgtggcaagaccttccgtcacaattcagcccttgaaattcataaggcaattcatactggagaaaaaccttacaagtgtagtgaatgtggcaaggtttttaatagaaaagcaaacctttcacgtcatcatagacttcatactggagagaaaccttacaagtgtaataaatgtggtaaggtttttaatcaacaagcacaccttgcatgtcatcatagaattcatactggagagaaaccttacaagtgtaatgagtgtggcaaaaccttccgtcacaattcagtccttgtaattcataagacaattcatactggagagaaaccttacaagtgtaatgaatgtggcaaggtttttaatcgaaaagcaaaacttgcacgtcatcatagaattcatactggaaagaaacattagtaatgaactagtccgtaacttgaaagtatttcgatttcttggctttatatatcttgtggaaaggacgaaagggtctctactatgctgataat

SEQ ID NO: 2544 - DNA, 947 bp, Homo sapiens
  source 1..947: mol_type = genomic DNA
accgccaccatggtgttggccccactcccagatccgggacccccaagcctggctgtagcccctgagccctgccctcagcccctgcggagccccagcttggacaatcccactcccttcccaaacctggggccctctgagaacccactgaagcggctgttggtgccgggggaagagtgggagttcgaggtgacagccttctaccggggccgccaagtcttccagcagaccatctcctgcccggagggcctgcggctggtggggtccgaagtgggagacaggacgctgcctggatggccagtcacactgccagaccctggcatgtccctgacagacaggggagtgatgagctacgtgaggcatgtgctgagctgcctgggtgggggactggctctctggcgggccgggcagtggctctgggcccagcggctggggcactgccacacatactgggcagtgagcgaggagctgctccccaacagcgggcatgggcctgatggcgaggtccccaaggacaaggaaggaggcgtgtttgacctggggcccttcattgtagatctgattaccttcacggaaggaagcggacgctcaccacgctatgccctctggttctgtgtgggggagtcatggccccaggaccagccgtggaccaagaggctcgtgatggtcaaggttgtgcccacgtgcctcagggccttggtagaaatggcccgggtagggggtgcctcctccctggagaatactgtggacctgcacatttccaacagccacccactctccctcacctccgaccagtacaaggcctacctgcaggacttggtggagggcatggatttccagggccctggggagagctagtaatgaactagtccgtaacttgaaagtatttcgatttcttggctttatatatcttgtggaaaggacgaacgttgtggcaacagcccgaaccc

SEQ ID NO: 2545 - DNA, 566 bp, Homo sapiens
  source 1..566: mol_type = genomic DNA
accgccaccatggtgttggccccactcccagatccgggacccccaagcctggctgtagcccctgagccctgccctcagcccctgcggagccccagcttggacaatcccactcccttcccaaacctggggccctctgagaacccactgaagcggctgttggtgccgggggaagatctgattaccttcacggaaggaagcggacgctcaccacgctatgccctctggttctgtgtgggggagtcatggccccaggaccagccgtggaccaagaggctcgtgatggtcaaggttgtgcccacgtgcctcagggccttggtagaaatggcccgggtagggggtgcctcctccctggagaatactgtggacctgcacatttccaacagccacccactctccctcacctccgaccagtacaaggcctacctgcaggacttggtggagggcatggatttccagggccctggggagagctagtaatgaactagtccgtaacttgaaagtatttcgatttcttggctttatatatcttgtggaaaggacgaaccggtaacactcgagggcccgta

SEQ ID NO: 2546 - DNA, 1004 bp, Homo sapiens
  source 1..1004: mol_type = genomic DNA
accgccaccatgggaaccccaaagccacggatcctgccctggctggtgtcgcagctggacctggggcaactggagggcgtggcctgggtgaacaagagccgcacgcgcttccgcatcccttggaagcacggcctacggcaggatgcacagcaggaggatttcggaatcttccaggcctgggccgaggccactggtgcatatgttcccgggagggataagccagacctgccaacctggaagaggaatttccgctctgccctcaaccgcaaagaagggttgcgtttagcagaggaccggagcaaggaccctcacgacccacataaaatctacgagtttgtgaactcaggagttggggacttttcccagccagacacctctccggacaccaatggtggaggcagtacttctgatacccaggaagacattctggatgagttactgggtaacatggtgttggccccactcccagatccgggacccccaagcctggctgtagcccctgagccctgccctcagcccctgcggagccccagcttggacaatcccactcccttcccaaacctggggccctctgagaacccactgaagcggctgttggtgccgggggaagatctgattaccttcacggaaggaagcggacgctcaccacgctatgccctctggttctgtgtgggggagtcatggccccaggaccagccgtggaccaagaggctcgtgatggtcaaggttgtgcccacgtgcctcagggccttggtagaaatggcccgggtagggggtgcctcctccctggagaatactgtggacctgcacatttccaacagccacccactctccctcacctccgaccagtacaaggcctacctgcaggacttggtggagggcatggatttccagggccctggggagagctagtaatgaactagtccgtaacttgaaagtatttcgatttcttggctttatatatcttgtggaaaggacgagacgctaccggaaaccacagacgg

SEQ ID NO: 2547 - DNA, 1385 bp, Homo sapiens
  source 1..1385: mol_type = genomic DNA
accgccaccatgggaaccccaaagccacggatcctgccctggctggtgtcgcagctggacctggggcaactggagggcgtggcctgggtgaacaagagccgcacgcgcttccgcatcccttggaagcacggcctacggcaggatgcacagcaggaggatttcggaatcttccaggcctgggccgaggccactggtgcatatgttcccgggagggataagccagacctgccaacctggaagaggaatttccgctctgccctcaaccgcaaagaagggttgcgtttagcagaggaccggagcaaggaccctcacgacccacataaaatctacgagtttgtgaactcaggagttggggacttttcccagccagacacctctccggacaccaatggtggaggcagtacttctgatacccaggaagacattctggatgagttactgggtaacatggtgttggccccactcccagatccgggacccccaagcctggctgtagcccctgagccctgccctcagcccctgcggagccccagcttggacaatcccactcccttcccaaacctggggccctctgagaacccactgaagcggctgttggtgccgggggaagagtgggagttcgaggtgacagccttctaccggggccgccaagtcttccagcagaccatctcctgcccggagggcctgcggctggtggggtccgaagtgggagacaggacgctgcctggatggccagtcacactgccagaccctggcatgtccctgacagacaggggagtgatgagctacgtgaggcatgtgctgagctgcctgggtgggggactggctctctggcgggccgggcagtggctctgggcccagcggctggggcactgccacacatactgggcagtgagcgaggagctgctccccaacagcgggcatgggcctgatggcgaggtccccaaggacaaggaaggaggcgtgtttgacctggggcccttcattgtagatctgattaccttcacggaaggaagcggacgctcaccacgctatgccctctggttctgtgtgggggagtcatggccccaggaccagccgtggaccaagaggctcgtgatggtcaaggttgtgcccacgtgcctcagggccttggtagaaatggcccgggtagggggtgcctcctccctggagaatactgtggacctgcacatttccaacagccacccactctccctcacctccgaccagtacaaggcctacctgcaggacttggtggagggcatggatttccagggccctggggagagctagtaatgaactagtccgtaacttgaaagtatttcgatttcttggctttatatatcttgtggaaaggacgaacggcgactattgaacaatttagc

SEQ ID NO: 2548 - DNA, 1460 bp, Homo sapiens
  source 1..1460: mol_type = genomic DNA
accgccaccatgggaaccccaaagccacggatcctgccctggctggtgtcgcagctggacctggggcaactggagggcgtggcctgggtgaacaagagccgcacgcgcttccgcatcccttggaagcacggcctacggcaggatgcacagcaggaggatttcggaatcttccaggcctgggccgaggccactggtgcatatgttcccgggagggataagccagacctgccaacctggaagaggaatttccgctctgccctcaaccgcaaagaagggttgcgtttagcagaggaccggagcaaggaccctcacgacccacataaaatctacgagtttgtgaactcaggagttggggacttttcccagccagacacctctccggacaccaatggtggaggcagtacttctgatacccaggaagacattctggatgagttactgggtaacatggtgttggccccactcccagatccgggacccccaagcctggctgtagcccctgagccctgccctcagcccctgcggagccccagcttggacaatcccactcccttcccaaacctggggccctctgagaacccactgaagcggctgttggtgccgggggaagagtgggagttcgaggtgacagccttctaccggggccgccaagtcttccagcagaccatctcctgcccggagggcctgcggctggtggggtccgaagtgggagacaggacgctgcctggatggccagtcacactgccagaccctggcatgtccctgacagacaggggagtgatgagctacgtgaggcatgtgctgagctgcctgggtgggggactggctctctggcgggccgggcagtggctctgggcccagcggctggggcactgccacacatactgggcagtgagcgaggagctgctccccaacagcgggcatgggcctgatggcgaggtccccaaggacaaggaaggaggcgtgtttgacctggggcccttcattgtaggctcctgggcccccagatctgattaccttcacggaaggaagcggacgctcaccacgctatgccctctggttctgtgtgggggagtcatggccccaggaccagccgtggaccaagaggctcgtgatggtcaaggttgtgcccacgtgcctcagggccttggtagaaatggcccgggtagggggtgcctcctccctggagaatactgtggacctgcacatttccaacagccacccactctccctcacctccgaccagtacaaggcctacctgcaggacttggtggagggcatggatttccagggccctggggagagctgagccctcgctcctcatggtgtgcctccaacccccctgttccccaccacctcaaccaatagtaatgaactagtccgtaacttgaaagtatttcgatttcttggctttatatatcttgtggaaaggacgatggctaattcggattagtcagccc

SEQ ID NO: 2549 - DNA, 1079 bp, Homo sapiens
  source 1..1079: mol_type = genomic DNA
accgccaccatgcccatcactcggatgcgcatgagaccctggctagagatgcagattaattccaaccaaatcccggggctcatctggattaataaagaggagatgatcttccagatcccatggaagcatgctgccaagcatggctgggacatcaacaaggatgcctgtttgttccggagctgggccattcacacaggccgatacaaagcaggggaaaaggagccagatcccaagacgtggaaggccaactttcgctgtgccatgaactccctgccagatatcgaggaggtgaaagaccagagcaggaacaagggcagctcagctgtgcgagtgtaccggatgcttccacctctcaccaagaaccagagaaaagaaagaaagtcgaagtccagccgagatgctaagagcaaggccaagaggaagtcatgtggggattccagccctgataccttctctgatggactcagcagctccactctgcctgatgaccacagcagctacacagttccaggctacatgcaggacttggaggtggagcaggccctgactccagcactgtcgccatgtgctgtcagcagcactctccccgactggcacatcccagtggaagttgtgccggacagcaccagtgatctgtacaacttccaggtgtcacccatgccctccacctctgaagctacaacagatgaggatgaggaagggaaattacctgaggacatcatgaagctcttggagcagtcggagtggcagccaacaaacgtggatgggaaggggtacctactcaatgaacctggagtccagcccacctctgtctatggagactttagctgtaaggaggagccagaaattgacagcccagggggggatattgggctgagtctacagcgtgtcttcacagatctgaagaacatggatgccacctggctggacagcctgctgaccccagtccggttgccctccatccaggccattccctgtgcaccgtagtaatgaactagtccgtaacttgaaagtatttcgatttcttggctttatatatcttgtggaaaggacgacgcaacgggtgtcagtcacaccca

SEQ ID NO: 2550 - DNA, 1526 bp, Homo sapiens
  source 1..1526: mol_type = genomic DNA
accgccaccatggccttggctcctgagagggcagccccacgcgtgctgttcggagagtggctccttggagagatcagcagcggctgctatgaggggctgcagtggctggacgaggcccgcacctgtttccgcgtgccctggaagcacttcgcgcgcaaggacctgagcgaggccgacgcgcgcatcttcaaggcctgggctgtggcccgcggcaggtggccgcctagcagcaggggaggtggcccgccccccgaggctgagactgcggagcgcgccggctggaaaaccaacttccgctgcgcactgcgcagcacgcgtcgcttcgtgatgctgcgggataactcgggggacccggccgacccgcacaaggtgtacgcgctcagccgggagctgtgctggcgagaaggcccaggcacggaccagactgaggcagaggcccccgcagctgtcccaccaccacagggtgggcccccagggccattcctggcacacacacatgctggactccaagccccaggccccctccctgccccagctggtgacaagggggacctcctgctccaggcagtgcaacagagctgcctggcagaccatctgctgacagcgtcatggggggcagatccagtcccaaccaaggctcctggagagggacaagaagggcttcccctgactggggcctgtgctggaggcgaggccgcggccccagagtccccgcaccaggcagagccgtacctgtcaccctccccaagcgcctgcaccgcggtgcaagagcccagcccaggggcgctggacgtgaccatcatgtacaagggccgcacggtgctgcagaaggtggtgggacacccgagctgcacgttcctatacggccccccagacccagctgtccgggccacagacccccagcaggtagcattccccagccctgccgagctcccggaccagaagcagctgcgctacacggaggaactgctgcggcacgtggcccctgggttgcacctggagcttcgggggccacagctgtgggcccggcgcatgggcaagtgcaaggtgtactgggaggtgggcggacccccaggctccgccagcccctccaccccagcctgcctgctgcctcggaactgtgacacccccatcttcgacttcagagtcttcttccaagagctggtggaattccgggcacggcagcgccgtggctccccacgctataccatctacctgggcttcgggcaggacctgtcagctgggaggcccaaggagaagagcctggtcctggtgaagctggaaccctggctgtgccgagtgcacctagagggcacgcagcgtgagggtgtgtcttccctggatagcagcagcctcagcctctgcctgtccagcgccaacagcctctatgacgacatcgagtgcttccttatggagctggagcagcccgcctagtaatgaactagtccgtaacttgaaagtatttcgatttcttggctttatatatcttgtggaaaggacgaacaagttgtctcggccgtagcgaa

SEQ ID NO: 2551 - DNA, 1652 bp, Homo sapiens
  source 1..1652: mol_type = genomic DNA
accgccaccatgccagtccccgagcgccctgcagccggccctgactctccgcggccgggcacccgcagggcagccccacgcgtgctgttcggagagtggctccttggagagatcagcagcggctgctatgaggggctgcagtggctggacgaggcccgcacctgtttccgcgtgccctggaagcacttcgcgcgcaaggacctgagcgaggccgacgcgcgcatcttcaaggcctgggctgtggcccgcggcaggtggccgcctagcagcaggggaggtggcccgccccccgaggctgagactgcggagcgcgccggctggaaaaccaacttccgctgcgcactgcgcagcacgcgtcgcttcgtgatgctgcgggataactcgggggacccggccgacccgcacaaggtgtacgcgctcagccgggagctgtgctggcgagaaggcccaggcacggaccagactgaggcagaggcccccgcagctgtcccaccaccacagggtgggcccccagggccattcctggcacacacacatgctggactccaagccccaggccccctccctgccccagctggtgacaagggggacctcctgctccaggcagtgcaacagagctgcctggcagaccatctgctgacagcgtcatggggggcagatccagtcccaaccaaggctcctggagagggacaagaagggcttcccctgactggggcctgtgctggaggcccagggctccctgctggggagctgtacgggtgggcagtagagacgacccccagccccgggccccagcccgcggcactaacgacaggcgaggccgcggccccagagtccccgcaccaggcagagccgtacctgtcaccctccccaagcgcctgcaccgcggtgcaagagcccagcccaggggcgctggacgtgaccatcatgtacaagggccgcacggtgctgcagaaggtggtgggacacccgagctgcacgttcctatacggccccccagacccagctgtccgggccacagacccccagcaggtagcattccccagccctgccgagctcccggaccagaagcagctgcgctacacggaggaactgctgcggcacgtggcccctgggttgcacctggagcttcgggggccacagctgtgggcccggcgcatgggcaagtgcaaggtgtactgggaggtgggcggacccccaggctccgccagcccctccaccccagcctgcctgctgcctcggaactgtgacacccccatcttcgacttcagagtcttcttccaagagctggtggaattccgggcacggcagcgccgtggctccccacgctataccatctacctgggcttcgggcaggacctgtcagctgggaggcccaaggagaagagcctggtcctggtgaagctggaaccctggctgtgccgagtgcacctagagggcacgcagcgtgagggtgtgtcttccctggatagcagcagcctcagcctctgcctgtccagcgccaacagcctctatgacgacatcgagtgcttccttatggagctggagcagcccgcctagtaatgaactagtccgtaacttgaaagtatttcgatttcttggctttatatatcttgtggaaaggacgagaaagaagggcgcgttaagcgttc

SEQ ID NO: 2552 - DNA, 1613 bp, Homo sapiens
  source 1..1613: mol_type = genomic DNA
accgccaccatggccttggctcctgagagggcagccccacgcgtgctgttcggagagtggctccttggagagatcagcagcggctgctatgaggggctgcagtggctggacgaggcccgcacctgtttccgcgtgccctggaagcacttcgcgcgcaaggacctgagcgaggccgacgcgcgcatcttcaaggcctgggctgtggcccgcggcaggtggccgcctagcagcaggggaggtggcccgccccccgaggctgagactgcggagcgcgccggctggaaaaccaacttccgctgcgcactgcgcagcacgcgtcgcttcgtgatgctgcgggataactcgggggacccggccgacccgcacaaggtgtacgcgctcagccgggagctgtgctggcgagaaggcccaggcacggaccagactgaggcagaggcccccgcagctgtcccaccaccacagggtgggcccccagggccattcctggcacacacacatgctggactccaagccccaggccccctccctgccccagctggtgacaagggggacctcctgctccaggcagtgcaacagagctgcctggcagaccatctgctgacagcgtcatggggggcagatccagtcccaaccaaggctcctggagagggacaagaagggcttcccctgactggggcctgtgctggaggcccagggctccctgctggggagctgtacgggtgggcagtagagacgacccccagccccgggccccagcccgcggcactaacgacaggcgaggccgcggccccagagtccccgcaccaggcagagccgtacctgtcaccctccccaagcgcctgcaccgcggtgcaagagcccagcccaggggcgctggacgtgaccatcatgtacaagggccgcacggtgctgcagaaggtggtgggacacccgagctgcacgttcctatacggccccccagacccagctgtccgggccacagacccccagcaggtagcattccccagccctgccgagctcccggaccagaagcagctgcgctacacggaggaactgctgcggcacgtggcccctgggttgcacctggagcttcgggggccacagctgtgggcccggcgcatgggcaagtgcaaggtgtactgggaggtgggcggacccccaggctccgccagcccctccaccccagcctgcctgctgcctcggaactgtgacacccccatcttcgacttcagagtcttcttccaagagctggtggaattccgggcacggcagcgccgtggctccccacgctataccatctacctgggcttcgggcaggacctgtcagctgggaggcccaaggagaagagcctggtcctggtgaagctggaaccctggctgtgccgagtgcacctagagggcacgcagcgtgagggtgtgtcttccctggatagcagcagcctcagcctctgcctgtccagcgccaacagcctctatgacgacatcgagtgcttccttatggagctggagcagcccgcctagtaatgaactagtccgtaacttgaaagtatttcgatttcttggctttatatatcttgtggaaaggacgatgtgccgctttacgtaatgaatag

SEQ ID NO: 2553 - DNA, 1565 bp, Homo sapiens
  source 1..1565: mol_type = genomic DNA
accgccaccatgccagtccccgagcgccctgcagccggccctgactctccgcggccgggcacccgcagggcagccccacgcgtgctgttcggagagtggctccttggagagatcagcagcggctgctatgaggggctgcagtggctggacgaggcccgcacctgtttccgcgtgccctggaagcacttcgcgcgcaaggacctgagcgaggccgacgcgcgcatcttcaaggcctgggctgtggcccgcggcaggtggccgcctagcagcaggggaggtggcccgccccccgaggctgagactgcggagcgcgccggctggaaaaccaacttccgctgcgcactgcgcagcacgcgtcgcttcgtgatgctgcgggataactcgggggacccggccgacccgcacaaggtgtacgcgctcagccgggagctgtgctggcgagaaggcccaggcacggaccagactgaggcagaggcccccgcagctgtcccaccaccacagggtgggcccccagggccattcctggcacacacacatgctggactccaagccccaggccccctccctgccccagctggtgacaagggggacctcctgctccaggcagtgcaacagagctgcctggcagaccatctgctgacagcgtcatggggggcagatccagtcccaaccaaggctcctggagagggacaagaagggcttcccctgactggggcctgtgctggaggcgaggccgcggccccagagtccccgcaccaggcagagccgtacctgtcaccctccccaagcgcctgcaccgcggtgcaagagcccagcccaggggcgctggacgtgaccatcatgtacaagggccgcacggtgctgcagaaggtggtgggacacccgagctgcacgttcctatacggccccccagacccagctgtccgggccacagacccccagcaggtagcattccccagccctgccgagctcccggaccagaagcagctgcgctacacggaggaactgctgcggcacgtggcccctgggttgcacctggagcttcgggggccacagctgtgggcccggcgcatgggcaagtgcaaggtgtactgggaggtgggcggacccccaggctccgccagcccctccaccccagcctgcctgctgcctcggaactgtgacacccccatcttcgacttcagagtcttcttccaagagctggtggaattccgggcacggcagcgccgtggctccccacgctataccatctacctgggcttcgggcaggacctgtcagctgggaggcccaaggagaagagcctggtcctggtgaagctggaaccctggctgtgccgagtgcacctagagggcacgcagcgtgagggtgtgtcttccctggatagcagcagcctcagcctctgcctgtccagcgccaacagcctctatgacgacatcgagtgcttccttatggagctggagcagcccgcctagtaatgaactagtccgtaacttgaaagtatttcgatttcttggctttatatatcttgtggaaaggacgaccactctctttctgtcccatgcca

SEQ ID NO: 2554 - DNA, 1220 bp, Homo sapiens
  source 1..1220: mol_type = genomic DNA
accgccaccatgtatgatggcaccaaggaggtgcccatgaacccagtgaagatatatcaagtgtgtgacatccctcagccccagggctcgatcattaacccaggatccacagggtctgctccctgggatgagaaggataatgatgtggatgaagaagatgaggaagatgagctggatcagtcgcagcaccatgttcccatccaggacaccttccccttcctgaacatcaatggttctcccatggcgccagccagtgtgggcaattgcagtgtgggcaactgcagcccggaggcagtgtggcccaaaactgaacccctggagatggaagtaccccaggcacctatacagcccttctatagctctccagaactgtggatcagctctctcccaatgactgacctggacatcaagtttcagtaccgtgggaaggagtacgggcagaccatgaccgtgagcaaccctcagggctgccgactcttctatggggacctgggtcccatgcctgaccaggaggagctctttggtcccgtcagcctggagcaggtcaaattcccaggtcctgagcatattaccaatgagaagcagaagctgttcactagcaagctgctggacgtcatggacagaggactgatcctggaggtcagcggtcatgccatttatgccatcaggctgtgccagtgcaaggtgtactggtctgggccatgtgccccatcacttgttgctcccaacctgattgagagacaaaagaaggtcaagctattttgtctggaaacattccttagcgatctcattgcccaccagaaaggacagatagagaagcagccaccgtttgagatctacttatgctttggggaagaatggccagatgggaaaccattggaaaggaaactcatcttggttcaggtcattccagtagtggctcggatgatctacgagatgttttctggtgatttcacacgatcctttgatagtggcagtgtccgcctgcagatctcaaccccagacatcaaggataacatcgttgctcagctgaagcagctgtaccgcatccttcaaacccaggagagctggcagcccatgcagcccacccccagcatgcaactgccccctgccctgcctccccagtagtaatgaactagtccgtaacttgaaagtatttcgatttcttggctttatatatcttgtggaaaggacgattggcaaatagtggttctagggcc

SEQ ID NO: 2555 - DNA, 1505 bp, Homo sapiens
  source 1..1505: mol_type = genomic DNA
accgccaccatggccctccacccccgcagagtccggctaaagccctggctggtggcccaggtggatagtggcctctaccctgggctcatctggctacacagggactctaaacgcttccagattccctggaaacatgccacccggcatagccctcaacaagaagaggaaaataccatttttaaggcctgggctgtagagacagggaagtaccaggaaggggtggatgaccctgacccagctaaatggaaggcccagctgcgctgtgctctcaataagagcagagaattcaacctgatgtatgatggcaccaaggaggtgcccatgaacccagtgaagatatatcaagtgtgtgacatccctcagccccagggctcgatcattaacccaggatccacagggtctgctccctgggatgagaaggataatgatgtggatgaagaagatgaggaagatgagctggatcagtcgcagcaccatgttcccatccaggacaccttccccttcctgaacatcaatggttctcccatggcgccagccagtgtgggcaattgcagtgtgggcaactgcagcccggaggcagtgtggcccaaaactgaacccctggagatggaagtaccccaggcacctatacagcccttctatagctctccagaactgtggatcagctctctcccaatgactgacctggacatcaagtttcagtaccgtgggaaggagtacgggcagaccatgaccgtgagcaaccctcagggctgccgactcttctatggggacctgggtcccatgcctgaccaggaggagctctttggtcccgtcagcctggagcaggtcaaattcccaggtcctgagcatattaccaatgagaagcagaagctgttcactagcaagctgctggacgtcatggacagaggactgatcctggaggtcagcggtcatgccatttatgccatcaggctgtgccagtgcaaggtgtactggtctgggccatgtgccccatcacttgttgctcccaacctgattgagagacaaaagaaggtcaagctattttgtctggaaacattccttagcgatctcattgcccaccagaaaggacagatagagaagcagccaccgtttgagatctacttatgctttggggaagaatggccagatgggaaaccattggaaaggaaactcatcttggttcaggtcattccagtagtggctcggatgatctacgagatgttttctggtgatttcacacgatcctttgatagtggcagtgtccgcctgcagatctcaaccccagacatcaaggataacatcgttgctcagctgaagcagctgtaccgcatccttcaaacccaggagagctggcagcccatgcagcccacccccagcatgcaactgccccctgccctgcctccccagtagtaatgaactagtccgtaacttgaaagtatttcgatttcttggctttatatatcttgtggaaaggacgacgttgtctggagatgtgtgtctga

SEQ ID NO: 2556 - DNA, 1340 bp, Homo sapiens
  source 1..1340: mol_type = genomic DNA
accgccaccatgaaccagtccatcccagtggctcccaccccaccccgccgcgtgcggctgaagccctggctggtggcccaggtgaacagctgccagtacccagggcttcaatgggtcaacggggaaaagaaattattctgcatcccctggaggcatgccacaaggcatggtcccagccaggacggagataacaccatcttcaaggcctgggccaaggagacagggaaatacaccgaaggcgtggatgaagccgatccggccaagtggaaggccaacctgcgctgtgcccttaacaagagccgggacttccgcctcatctacgacgggccccgggacatgccacctcagccctacaagatctacgaggtctgctccaatggccctgctcccacagactcccagccccctgaggattactcttttggtgcaggagaggaggaggaagaagaggaagagctgcagaggatgttgccaagcctgagcctcacagtgaccgacctggagatcaagtttcagtaccgggggcggccaccccgggccctcaccatcagcaacccccatggctgccggctcttctacagccagctggaggccacccaggagcaggtggaactcttcggccccataagcctggagcaagtgcgcttccccagccctgaggacatccccagtgacaagcagcgcttctacacgaaccagctgctggatgtcctggaccgcgggctcatcctccagctacagggccaggacctttatgccatccgcctgtgtcagtgcaaggtgttctggagcgggccttgtgcctcagcccatgactcatgccccaaccccatccagcgggaggtcaagaccaagcttttcagcctggagcattttctcaatgagctcatcctgttccaaaagggccagaccaacaccccaccacccttcgagatcttcttctgctttggggaagaatggcctgaccgcaaaccccgagagaagaagctcattactgtacaggtggtgcctgtagcagctcgactgctgctggagatgttctcaggggagctatcttggtcagctgatagtatccggctacagatctcaaacccagacctcaaagaccgcatggtggagcaattcaaggagctccatcacatctggcagtcccagcagcggttgcagcctgtggcccaggcccctcctggagcaggccttggtgttggccaggggccctggcctatgcacccagctggcatgcaatagtaatgaactagtccgtaacttgaaagtatttcgatttcttggctttatatatcttgtggaaaggacgaggattgaccaagttacttataatc

SEQ ID NO: 2557 - DNA, 1646 bp, Homo sapiens
  source 1..1646: mol_type = genomic DNA
accgccaccatgaaccagtccatcccagtggctcccaccccaccccgccgcgtgcggctgaagccctggctggtggcccaggtgaacagctgccagtacccagggcttcaatgggtcaacggggaaaagaaattattctgcatcccctggaggcatgccacaaggcatggtcccagccaggacggagataacaccatcttcaaggcctgggccaaggagacagggaaatacaccgaaggcgtggatgaagccgatccggccaagtggaaggccaacctgcgctgtgcccttaacaagagccgggacttccgcctcatctacgacgggccccgggacatgccacctcagccctacaagatctacgaggtctgctccaatggccctgctcccacagactcccagccccctgaggattactcttttggtgcaggagaggaggaggaagaagaggaagagctgcagaggatgttgccaagcctgagcctcacagatgcagtgcagtctggcccccacatgacaccctattctttactcaaagaggatgtcaagtggccgcccactctgcagccgcccactctgcggccgcctactctgcagccgcccactctgcagccgcccgtggtgctgggtccccctgctccagaccccagccccctggctcctccccctggcaaccctgctggcttcagggagcttctctctgaggtcctggagcctgggcccctgcctgccagcctgccccctgcaggcgaacagctcctgccagacctgctgatcagcccccacatgctgcctctgaccgacctggagatcaagtttcagtaccgggggcggccaccccgggccctcaccatcagcaacccccatggctgccggctcttctacagccagctggaggccacccaggagcaggtggaactcttcggccccataagcctggagcaagtgcgcttccccagccctgaggacatccccagtgacaagcagcgcttctacacgaaccagctgctggatgtcctggaccgcgggctcatcctccagctacagggccaggacctttatgccatccgcctgtgtcagtgcaaggtgttctggagcgggccttgtgcctcagcccatgactcatgccccaaccccatccagcgggaggtcaagaccaagcttttcagcctggagcattttctcaatgagctcatcctgttccaaaagggccagaccaacaccccaccacccttcgagatcttcttctgctttggggaagaatggcctgaccgcaaaccccgagagaagaagctcattactgtacaggtggtgcctgtagcagctcgactgctgctggagatgttctcaggggagctatcttggtcagctgatagtatccggctacagatctcaaacccagacctcaaagaccgcatggtggagcaattcaaggagctccatcacatctggcagtcccagcagcggttgcagcctgtggcccaggcccctcctggagcaggccttggtgttggccaggggccctggcctatgcacccagctggcatgcaatagtaatgaactagtccgtaacttgaaagtatttcgatttcttggctttatatatcttgtggaaaggacgaatttgtctggatgatggtatccca

SEQ ID NO: 2558 - DNA, 2624 bp, Homo sapiens
  source 1..2624: mol_type = genomic DNA
accgccaccatggctggaccgggcagcacgggggggcagatcggggctgcggccctggcaggcggcgcgcggtccaaggtagccccgagcgtggacttcgaccatagctgctcggacagtgtcgagtacctgacgctcaacttcgggcccttcgaaacagtgcatcgctggcggcgcctcccgccctgcgacgagttcgtgggtgcccggcgcagcaagcacacagtggtggcctataaagatgccatttatgtatttggtggagacaatgggaagaccatgctcaatgacctcctgcggttcgatgtgaaagactgctcctggtgcagggcctttaccactgggaccccaccggccccccgttaccaccactcggccgtcgtctatgggagcagcatgtttgtctttgggggttacactggggacatttattccaattctaacttgaagaataaaaacgacctctttgaatacaagtttgcaactggccagtggacggagtggaaaattgaaggacggttgccagtcgctaggtcagcccatggggccacggtgtacagtgacaagctgtggatctttgctggctatgacggcaacgccaggttgaatgacatgtggacaattggcctccaggaccgagagctcacctgctgggaggaggtggcccagagtggcgagatccccccatcttgctgcaacttccccgtggctgtgtgccgggacaagatgtttgtattctctgggcaaagcggagccaaaataaccaacaacctcttccagtttgaattcaaggacaagacgtggacacgcatcccaactgaacacctgctccggggctccccaccacccccgcagcggcgctacgggcataccatggtggcctttgaccgccacctctatgtgtttgggggtgcggccgacaacacgctgcccaacgagctgcactgctatgacgtggacttccagacctgggaggtcgtccagcccagctccgacagcgaggttggtggggctgaagtgcccgagcgagcctgtgcttccgaggaggtgcccaccctgacctatgaggagcgggttggcttcaagaagtcccgagatgtgtttggcctggactttggcaccacctcagccaagcagcccacccagcctgcctcggagctgcccagtgggaggctcttccacgcggctgctgtcatctcggacgccatgtacatcttcgggggcacggtggacaacaacatccgcagcggggagatgtacaggttccagttctcctgttaccctaaatgcacgctgcacgaggactacgggcggctgtgggagagccgccagttctgcgacgtggagttcgtgctgggtgagaaggaggagtgcgtgcagggccacgtagccattgtcacagcgcggagccgctggcttcgcaggaagatcacgcaggcgcgggagaggctggcccagaagctggagcaggaggccgccccagttcccagggaggcccccggcgtggctgctggtggggcccggccgcccctgctgcacgtggccatccgggaggccgaggcccggcccttcgaggtgctcatgcagttcctctacaccgacaagatcaaatacccacggaaaggccatgtggaggatgtgctgctcatcatggatgtgtacaaactggcactgagcttccagttgtgccgcctggagcagctgtgccgccagtacatcgaggcctccgtggacctgcagaacgtgctggttgtgtgcgagagtgccgcccggctgcagctgagccaactcaaggagcactgcctgaacttcgtggtaaaggagtcccacttcaaccaggtgatcatgatgaaggagttcgagcgcctctcctctccactgatagtggagattgtgcggcggaagcagcagccgccccctcgcactcccttggaccagccagtggacattggcacatctctgatccaggacatgaaggcatacctggagggagcgggcgcggaattctgtgacatcactctgttgcttgacgggcacccacggccagcccacaaggctatcctggccgcccgctccagctactttgaagccatgttccggtccttcatgcccgaagatgggcaggtgaacatctccatcggggagatggtgcccagcaggcaggccttcgagtccatgctgcgctacatctactacggcgaggtcaacatgccgcccgaggactcgctctacttgtttgcggccccctactactacggcttctacaacaaccggctgcaggcgtactgcaagcagaacctggagatgaacgtgacggtgcagaacgtgctgcagatcctggaggcagctgacaaaacgcaggcactggacatgaagcggcactgcctgcacatcattgtgcaccagttcaccaaggtctccaagttgcccaccctgcggtcgctgagccagcagctgctgctggacatcatagactccctggcctcccacatctcagacaagcagtgcgcagagctgggcgccgacatctagtaatgaactagtccgtaacttgaaagtatttcgatttcttggctttatatatcttgtggaaaggacgaatattggagccctagctgcctcgg

SEQ ID NO: 2559 - DNA, 770 bp, Homo sapiens
  source 1..770: mol_type = genomic DNA
accgccaccatggtgatcagcttctactatgggggcaagctggtgggccaggccaccaccacctgccccgagggctgccgcctgtccctgagccagcctgggctgcccggcaccaagctgtatgggcccgagggcctggagctggtgcgcttcccgccggccgacgccatccccagcgagcgacagaggcaggtgacgcggaagctgttcgggcacctggagcgcggggtgctgctgcacagcagccggcagggcgtgttcgtcaagcggctgtgccagggccgcgtgttctgcagcggcaacgccgtggtgtgcaaaggcaggcccaacaagctggagcgtgatgaggtggtccaggtcttcgacaccagccagttcttccgagagctgcagcagttctataacagccagggccggcttcctgacggcagggtggtgctgtgctttggggaagagtttccggatatggcccccttgcgctccaaactcattctcgtgcagattgagcagctgtatgtccggcaactggcagaagaggctgggaagagctgtggagccggctctgtgatgcaggcccccgaggagccgccgccagaccaggtcttccggatgtttccagatatttgtgcctcacaccagagatcatttttcagagaaaaccaacagatcaccgtctagtaatgaactagtccgtaacttgaaagtatttcgatttcttggctttatatatcttgtggaaaggacgaggataatcgatcgaatgacggacc

SEQ ID NO: 2560 - DNA, 953 bp, Homo sapiens
  source 1..953: mol_type = genomic DNA
accgccaccatgaacggcgaggagcagtactacgcggccacgcagctttacaaggacccatgcgcgttccagcgaggcccggcgccggagttcagcgccagcccccctgcgtgcctgtacatgggccgccagcccccgccgccgccgccgcacccgttccctggcgccctgggcgcgctggagcagggcagccccccggacatctccccgtacgaggtgccccccctcgccgacgaccccgcggtggcgcaccttcaccaccacctcccggctcagctcgcgctcccccacccgcccgccgggcccttcccggagggagccgagccgggcgtcctggaggagcccaaccgcgtccagctgcctttcccatggatgaagtctaccaaagctcacgcgtggaaaggccagtgggcaggcggcgcctacgctgcggagccggaggagaacaagcggacgcgcacggcctacacgcgcgcacagctgctagagctggagaaggagttcctattcaacaagtacatctcacggccgcgccgggtggagctggctgtcatgttgaacttgaccgagagacacatcaagatctggttccaaaaccgccgcatgaagtggaaaaaggaggaggacaagaagcgcggcggcgggacagctgtcgggggtggcggggtcgcggagcctgagcaggactgcgccgtgacctccggcgaggagcttctggcgctgccgccgccgccgccccccggaggtgctgtgccgcccgctgcccccgttgccgcccgagagggccgcctgccgcctggccttagcgcgtcgccacagccctccagcgtcgcgcctcggcggccgcaggaaccacgatagtaatgaactagtccgtaacttgaaagtatttcgatttcttggctttatatatcttgtggaaaggacgacatacataacacgtcaatatacgc

SEQ ID NO: 2561 - DNA, 3470 bp, Homo sapiens
  source 1..3470: mol_type = genomic DNA
accgccaccatgaactctcccaacgagtcggatgggatgtcaggtcgggaaccatccttggaaatcctgccgcggacttctctgcacagcatccctgtgacagtggaggtgaagccggtgctgccaagagccatgcccagttccatggggggtgggggtggaggcagccccagccctgtggagctacggggggctctggtgggctctgtggaccccacactgcgggagcagcaactgcagcaggagctcctggcgctcaagcagcagcagcagctgcagaagcagctcctgttcgctgagttccagaaacagcatgaccacctgacaaggcagcatgaggtccagctgcagaagcacctcaagcagcagcaggagatgctggcagccaagcagcagcaggagatgctggcagccaagcggcagcaggagctggagcagcagcggcagcgggagcagcagcggcaggaagagctggagaagcagcggctggagcagcagctgctcatcctgcggaacaaggagaagagcaaagagagtgccattgccagcactgaggtaaagctgaggctccaggaattcctcttgtcgaagtcaaaggagcccacaccaggcggcctcaaccattccctcccacagcaccccaaatgctggggagcccaccatgcttctttggaccagagttcccctccccagagcggcccccctgggacgcctccctcctacaaactgcctttgcctgggccctacgacagtcgagacgacttccccctccgcaaaacagcctctgaacccaacttgaaagtgcgttcaaggctaaaacagaaggtggctgagcggagaagcagtcccctcctgcgtcgcaaggatgggactgttattagcacctttaagaagagagctgttgagatcacaggtgccgggcctggggcgtcgtccgtgtgtaacagcgcacccggctccggccccagctctcccaacagctcccacagcaccatcgctgagaatggctttactggctcagtccccaacatccccactgagatgctccctcagcaccgagccctccctctggacagctcccccaaccagttcagcctctacacgtctccttctctgcccaacatctccctagggctgcaggccacggtcactgtcaccaactcacacctcactgcctccccgaagctgtcgacacagcaggaggccgagaggcaggccctccagtccctgcggcagggtggcacgctgaccggcaagttcatgagcacatcctctattcctggctgcctgctgggcgtggcactggagggcgacgggagcccccacgggcatgcctccctgctgcagcatgtgctgttgctggagcaggcccggcagcagagcaccctcattgctgtgccactccacgggcagtccccactagtgacgggtgaacgtgtggccaccagcatgcggacggtaggcaagctcccgcggcatcggcccctgagccgcactcagtcctcaccgctgccgcagagtccccaggccctgcagcagctggtcatgcaacaacagcaccagcagttcctggagaagcagaagcagcagcagctacagctgggcaagatcctcaccaagacaggggagctgcccaggcagcccaccacccaccctgaggagacagaggaggagctgacggagcagcaggaggtcttgctgggggagggagccctgaccatgccccgggagggctccacagagagtgagagcacacaggaagacctggaggaggaggacgaggaagacgatggggaggaggaggaggattgcatccaggttaaggacgaggagggcgagagtggtgctgaggaggggcccgacttggaggagcctggtgctggatacaaaaaactgttctcagatgcccagccgctgcagcctttgcaggtgtaccaggcgcccctcagcctggccactgtgccccaccaggccctgggccgtacccagtcctcccctgctgcccctgggggcatgaagagccccccagaccagcccgtcaagcacctcttcaccacaggtgtggtctacgacacgttcatgctaaagcaccagtgcatgtgcgggaacacacacgtgcaccctgagcatgctggccggatccagagcatctggtcccggctgcaggagacaggcctgcttagcaagtgcgagcggatccgaggtcgcaaagccacgctagatgagatccagacagtgcactctgaataccacaccctgctctatgggaccagtcccctcaaccggcagaagctagacagcaagaagttgctcggccccatcagccagaagatgtatgctgtgctgccttgtgggggcatcggggtggacagtgacaccgtgtggaatgagatgcactcctccagtgctgtgcgcatggcagtgggctgcctgctggagctggccttcaaggtggctgcaggagagctcaagaatggatttgccatcatccggcccccaggacaccacgccgaggaatccacagccatgggattctgcttcttcaactctgtagccatcaccgcaaaactcctacagcagaagttgaacgtgggcaaggtcctcatcgtggactgggacattcaccatggcaatggcacccagcaggcgttctacaatgacccctctgtgctctacatctctctgcatcgctatgacaacgggaacttctttccaggctctggggctcctgaagaggttggtggaggaccaggcgtggggtacaatgtgaacgtggcatggacaggaggtgtggacccccccattggagacgtggagtaccttacagccttcaggacagtggtgatgcccattgcccacgagttctcacctgatgtggtcctagtctccgccgggtttgatgctgttgaaggacatctgtctcctctgggtggctactctgtcaccgccagatgttttggccacttgaccaggcagctgatgaccctggcagggggccgggtggtgctggccctggagggaggccatgacttgaccgccatctgtgatgcctctgaggcttgtgtctcggctctgctcagtgtagagctgcagcccttggatgaggcagtcttgcagcaaaagcccaacatcaacgcagtggccacgctagagaaagtcatcgagatccagagcaaacactggagctgtgtgcagaagttcgccgctggtctgggccggtccctgcgagaggcccaagcaggtgagaccgaggaggccgagactgtgagcgccatggccttgctgtcggtgggggccgagcaggcccaggctgcggcagcccgggaacacagccccaggccggcagaggagcccatggagcaggagcctgccctgtagtaatgaactagtccgtaacttgaaagtatttcgatttcttggctttatatatcttgtggaaaggacgatttagctgataggatattgtcgaa

SEQ ID NO: 2562 - DNA, 3473 bp, Homo sapiens
  source 1..3473: mol_type = genomic DNA
accgccaccatgaactctcccaacgagtcggcagatgggatgtcaggtcgggaaccatccttggaaatcctgccgcggacttctctgcacagcatccctgtgacagtggaggtgaagccggtgctgccaagagccatgcccagttccatggggggtgggggtggaggcagccccagccctgtggagctacggggggctctggtgggctctgtggaccccacactgcgggagcagcaactgcagcaggagctcctggcgctcaagcagcagcagcagctgcagaagcagctcctgttcgctgagttccagaaacagcatgaccacctgacaaggcagcatgaggtccagctgcagaagcacctcaagcagcagcaggagatgctggcagccaagcagcagcaggagatgctggcagccaagcggcagcaggagctggagcagcagcggcagcgggagcagcagcggcaggaagagctggagaagcagcggctggagcagcagctgctcatcctgcggaacaaggagaagagcaaagagagtgccattgccagcactgaggtaaagctgaggctccaggaattcctcttgtcgaagtcaaaggagcccacaccaggcggcctcaaccattccctcccacagcaccccaaatgctggggagcccaccatgcttctttggaccagagttcccctccccagagcggcccccctgggacgcctccctcctacaaactgcctttgcctgggccctacgacagtcgagacgacttccccctccgcaaaacagcctctgaacccaacttgaaagtgcgttcaaggctaaaacagaaggtggctgagcggagaagcagtcccctcctgcgtcgcaaggatgggactgttattagcacctttaagaagagagctgttgagatcacaggtgccgggcctggggcgtcgtccgtgtgtaacagcgcacccggctccggccccagctctcccaacagctcccacagcaccatcgctgagaatggctttactggctcagtccccaacatccccactgagatgctccctcagcaccgagccctccctctggacagctcccccaaccagttcagcctctacacgtctccttctctgcccaacatctccctagggctgcaggccacggtcactgtcaccaactcacacctcactgcctccccgaagctgtcgacacagcaggaggccgagaggcaggccctccagtccctgcggcagggtggcacgctgaccggcaagttcatgagcacatcctctattcctggctgcctgctgggcgtggcactggagggcgacgggagcccccacgggcatgcctccctgctgcagcatgtgctgttgctggagcaggcccggcagcagagcaccctcattgctgtgccactccacgggcagtccccactagtgacgggtgaacgtgtggccaccagcatgcggacggtaggcaagctcccgcggcatcggcccctgagccgcactcagtcctcaccgctgccgcagagtccccaggccctgcagcagctggtcatgcaacaacagcaccagcagttcctggagaagcagaagcagcagcagctacagctgggcaagatcctcaccaagacaggggagctgcccaggcagcccaccacccaccctgaggagacagaggaggagctgacggagcagcaggaggtcttgctgggggagggagccctgaccatgccccgggagggctccacagagagtgagagcacacaggaagacctggaggaggaggacgaggaagacgatggggaggaggaggaggattgcatccaggttaaggacgaggagggcgagagtggtgctgaggaggggcccgacttggaggagcctggtgctggatacaaaaaactgttctcagatgcccagccgctgcagcctttgcaggtgtaccaggcgcccctcagcctggccactgtgccccaccaggccctgggccgtacccagtcctcccctgctgcccctgggggcatgaagagccccccagaccagcccgtcaagcacctcttcaccacaggtgtggtctacgacacgttcatgctaaagcaccagtgcatgtgcgggaacacacacgtgcaccctgagcatgctggccggatccagagcatctggtcccggctgcaggagacaggcctgcttagcaagtgcgagcggatccgaggtcgcaaagccacgctagatgagatccagacagtgcactctgaataccacaccctgctctatgggaccagtcccctcaaccggcagaagctagacagcaagaagttgctcggccccatcagccagaagatgtatgctgtgctgccttgtgggggcatcggggtggacagtgacaccgtgtggaatgagatgcactcctccagtgctgtgcgcatggcagtgggctgcctgctggagctggccttcaaggtggctgcaggagagctcaagaatggatttgccatcatccggcccccaggacaccacgccgaggaatccacagccatgggattctgcttcttcaactctgtagccatcaccgcaaaactcctacagcagaagttgaacgtgggcaaggtcctcatcgtggactgggacattcaccatggcaatggcacccagcaggcgttctacaatgacccctctgtgctctacatctctctgcatcgctatgacaacgggaacttctttccaggctctggggctcctgaagaggttggtggaggaccaggcgtggggtacaatgtgaacgtggcatggacaggaggtgtggacccccccattggagacgtggagtaccttacagccttcaggacagtggtgatgcccattgcccacgagttctcacctgatgtggtcctagtctccgccgggtttgatgctgttgaaggacatctgtctcctctgggtggctactctgtcaccgccagatgttttggccacttgaccaggcagctgatgaccctggcagggggccgggtggtgctggccctggagggaggccatgacttgaccgccatctgtgatgcctctgaggcttgtgtctcggctctgctcagtgtagagctgcagcccttggatgaggcagtcttgcagcaaaagcccaacatcaacgcagtggccacgctagagaaagtcatcgagatccagagcaaacactggagctgtgtgcagaagttcgccgctggtctgggccggtccctgcgagaggcccaagcaggtgagaccgaggaggccgagactgtgagcgccatggccttgctgtcggtgggggccgagcaggcccaggctgcggcagcccgggaacacagccccaggccggcagaggagcccatggagcaggagcctgccctgtagtaatgaactagtccgtaacttgaaagtatttcgatttcttggctttatatatcttgtggaaaggacgacgaatttcagtcgacacattcctg

SEQ ID NO: 2563 - DNA, 3356 bp, Homo sapiens
  source 1..3356: mol_type = genomic DNA
accgccaccatgagctcccaaagccatccagatggactttctggccgagaccagccagtggagctgctgaatcctgcccgcgtgaaccacatgcccagcacggtggatgtggccacggcgctgcctctgcaagtggccccctcggcagtgcccatggacctgcgcctggaccaccagttctcactgcctgtggcagagccggccctgcgggagcagcagctgcagcaggagctcctggcgctcaagcagaagcagcagatccagaggcagatcctcatcgctgagttccagaggcagcacgagcagctctcccggcagcacgaggcgcagctccacgagcacatcaagcaacaacaggagatgctggccatgaagcaccagcaggagctgctggaacaccagcggaagctggagaggcaccgccaggagcaggagctggagaagcagcaccgggagcagaagctgcagcagctcaagaacaaggagaagggcaaagagagtgccgtggccagcacagaagtgaagatgaagttacaagaatttgtcctcaataaaaagaaggcgctggcccaccggaatctgaaccactgcatttccagcgaccctcgctactggtacgggaaaacgcagcacagttcccttgaccagagttctccaccccagagcggagtgtcgacctcctataaccacccggtcctgggaatgtacgacgccaaagatgacttccctcttaggaaaacagcttctgaaccgaatctgaaattacggtccaggctaaagcagaaagtggccgaaagacggagcagccccctgttacgcaggaaagacgggccagtggtcactgctctaaaaaagcgtccgttggatgtcacagactccgcgtgcagcagcgccccaggctccggacccagctcacccaacaacagctccgggagcgtcagcgcggagaacggtatcgcgcccgccgtccccagcatcccggcggagacgagtttggcgcacagacttgtggcacgagaaggctcggccgctccacttcccctctacacatcgccatccttgcccaacatcacgctgggcctgcctgccaccggcccctctgcgggcacggcgggccagcaggacgccgagagactcacccttcccgccctccagcagaggctctcccttttccccggcacccacctcactccctacctgagcacctcgcccttggagcgggacggaggggcagcgcacagccctcttctgcagcacatggtcttactggagcagccgccggcacaagcacccctcgtcacaggcctgggagcactgcccctccacgcacagtccttggttggtgcagaccgggtgtccccctccatccacaagctgcggcagcaccgcccactggggcggacccagtcggccccgctgccccagaacgcccaggctctgcagcacctggtcatccagcagcagcatcagcagtttctggagaaacacaagcagcagttccagcagcagcaactgcagatgaacaagatcatccccaagccaagcgagccagcccggcagccggagagccacccggaggagacggaggaggagctccgtgagcaccaggctctgctggacgagccctacctggaccggctgccggggcagaaggaggcgcacgcacaggccggcgtgcaggtgaagcaggagcccattgagagcgatgaggaagaggcagagcccccacgggaggtggagccgggccagcgccagcccagtgagcaggagctgctcttcagacagcaagccctcctgctggagcagcagcggatccaccagctgaggaactaccaggcgtccatggaggccgccggcatccccgtgtccttcggcggccacaggcctctgtcccgggcgcagtcctcacccgcgtctgccaccttccccgtgtctgtgcaggagccccccaccaagccgaggttcacgacaggcctcgtgtatgacacgctgatgctgaagcaccagtgcacctgcgggagtagcagcagccaccccgagcacgccgggaggatccagagcatctggtcccgcctgcaggagacgggcctccggggcaaatgcgagtgcatccgcggacgcaaggccaccctggaggagctacagacggtgcactcggaagcccacaccctcctgtatggcacgaaccccctcaaccggcagaaactggacagtaagaaacttctaggctcgctcgcctccgtgttcgtccggctcccttgcggtggtgttggggtggacagtgacaccatatggaacgaggtgcactcggcgggggcagcccgcctggctgtgggctgcgtggtagagctggtcttcaaggtggccacaggggagctgaagaatggctttgctgtggtccgcccccctggacaccatgcggaggagagcacgcccatgggcttttgctacttcaactccgtggccgtggcagccaagcttctgcagcagaggttgagcgtgagcaagatcctcatcgtggactgggacgtgcaccatggaaacgggacccagcaggctttctacagcgaccccagcgtcctgtacatgtccctccaccgctacgacgatgggaacttcttcccaggcagcggggctcctgatgaggtgggcacagggcccggcgtgggtttcaacgtcaacatggctttcaccggcggcctggacccccccatgggagacgctgagtacttggcggccttcagaacggtggtcatgccgatcgccagcgagtttgccccggatgtggtgctggtgtcatcaggcttcgatgccgtggagggccaccccacccctcttgggggctacaacctctccgccagatgcttcgggtacctgacgaagcagctgatgggcctggctggcggccggattgtcctggccctcgagggaggccacgacctgaccgccatttgcgacgcctcggaagcatgtgtttctgccttgctgggaaacgagcttgatcctctcccagaaaaggttttacagcaaagacccaatgcaaacgctgtccgttccatggagaaagtcatggagatccacagcaagtactggcgctgcctgcagcgcacaacctccacagcggggcgttctctgatcgaggctcagacttgcgagaacgaagaagccgagacggtcaccgccatggcctcgctgtccgtgggcgtgaagcccgccgaaaagagaccagatgaggagcccatggaagaggagccgcccctgtagtaatgaactagtccgtaacttgaaagtatttcgatttcttggctttatatatcttgtggaaaggacgacatccgaggtacggttgcagccgc

SEQ ID NO: 2564 - DNA, 1586 bp, Homo sapiens
  source 1..1586: mol_type = genomic DNA
accgccaccatggagctgagcctggagagcctggggggcctgcacagcgtggcccacgcgcaggcgggcgagctgctgagcccgggccacgcgcgctcggcggcggcgcagcaccgcggcctggtggcgcccgggcgcccgggcctggtggccggcatggcgagcctgctggacggcggcggcggcggcggcggtgggggcgccgggggcgcgggcggcgcgggcagcgcgggcggcggcgcggacttccgcggggaactggcgggcccgctgcacccggcaatgggcatggcctgcgaggcgccgggcctgggcggcacctacacgacgctcacgcccctgcagcacctgccgccgctcgcggccgtggccgacaagttccaccagcacgcggcggccgcggccgtggccggggcgcacggcggccatccccacgcgcacccgcacccggcggccgcgccgcccccgccacccccgccgcagcgtctggcggccagcgtgagcggcagcttcaccctcatgcgcgacgagcgggcggcgctcgcctccgtgggccacctctacggaccctacggcaaggagctgcccgccatggggtcgccgctgtcgccgctgcccaacgcgctgccgcccgcgctgcacggcgccccgcagcccccgccgccgccaccacccccgccgctggccgcctacggcccgccaggccacctggctggggacaagctgctgccgcccgccgccttcgagccgcacgccgcgctgctgggacgcgcggaggacgcactggcccgcgggctgcccggaggcggcggcggcacaggcagcggcggagcgggcagcgggagcgccgcggggctgctggcgccgctgggcgggctggcggcggccggggcgcacgggccgcacgggggaggcggcggccccggcgggagcggcggcggccccagcgcgggcgcagcggccgaggagatcaacaccaaggaggtggcgcagcgcatcacggcggagctgaagcgctacagcatcccgcaggcaatcttcgcgcagcggatcctgtgtcgctctcagggcacgctctccgacctgctgcgcaaccccaagccgtggagcaagctcaaatccggccgcgagaccttccgcaggatgtggaagtggctgcaggagccagagttccagcgcatgtcggcgctgcgcttggcagcctgcaagcgcaaggaacaggagcagcagaaggagcgcgccctgcagcccaagaagcagcgcctggtgttcaccgacctgcagcgacgcacgctgatcgccatcttcaaggagaacaagcggccgtccaaggagatgcaggtcaccatctcgcagcagctcggcttggagctcaacaccgtcagcaacttcttcatgaacgcgcggcgccgctgcatgaaccgctgggctgaggagcccagcacggcccccgggggccccgccggcgccacggccactttctccaaggcctagtaatgaactagtccgtaacttgaaagtatttcgatttcttggctttatatatcttgtggaaaggacgactgttggacctccggtattacctt

SEQ ID NO: 2565 - DNA, 8471 bp, Homo sapiens
  source 1..8471: mol_type = genomic DNA
accgccaccatgcggctcgggggcgggcagctggtgtcagaggagctgatgaacctgggcgagagcttcatccagaccaacgacccgtcgctgaagctcttccagtgcgccgtctgcaacaagttcacgacggacaacctggacatgctgggcctgcacatgaacgtggagcgcagcctgtcggaggacgagtggaaggcggtgatgggggactcataccagtgcaagctctgccgctacaacacccagctcaaggccaacttccagctgcactgcaagacagacaagcacgtgcagaagtaccagctggtggcccacatcaaggagggcggcaaggccaacgagtggaggctcaagtgtgtggccatcggcaaccccgtgcacctcaagtgcaacgcctgtgactactacaccaacagcctggagaagctgcggctgcacacggtcaactccaggcacgaggccagcctgaagttgtacaagcacctgcagcagcatgagagtggtgtagaaggtgagagctgctactaccactgcgttctgtgcaactactccaccaaggccaagctcaacctcatccagcatgtgcgctccatgaagcaccagcgaagcgagagcctgcgaaagctgcagcggctgcagaagggccttccagaggaggacgaggacctggggcagatcttcaccatccgcaggtgcccctccacggacccagaagaagccattgaagatgttgaaggacccagtgaaacagctgctgatccagaggagcttgctaaggaccaagagggcggagcatcgtccagccaagcagagaaggagctgacagattctcctgcaacctccaaacgcatctccttcccaggtagctcagagtctcccctctcttcgaagcgaccaaaaacagctgaggagatcaaaccggagcagatgtaccagtgtccctactgcaagtacagtaatgccgatgtcaaccggctccgggtgcatgccatgacgcagcactcggtgcaacccatgcttcgctgccccctgtgccaggacatgctcaacaacaagatccacctccagctgcacctcacccacctccacagcgtggcacctgactgcgtggagaagctcattatgacggtgaccacccctgagatggtgatgccaagcagcatgttcctcccagcagctgttccagatcgagatgggaattccaatttggaagaggcaggaaagcagcctgaaacctcagaggatctgggaaagaacatcttgccatccgcaagcacagagcaaagcggagatttgaaaccatcccctgctgacccaggctctgtgagagaagactcaggcttcatctgctggaagaaggggtgcaaccaggttttcaaaacttctgctgcccttcagacgcattttaatgaagtgcatgccaagaggcctcagctgccggtgtcagatcgccatgtgtacaagtaccgctgtaatcagtgtagcctggccttcaagaccattgaaaagttgcagctccattctcagtaccatgtgatcagagctgccaccatgtgctgtctttgtcagcgcagtttccgaactttccaggctctgaagaagcaccttgagacaagccacctggagctgagtgaggctgacatccaacagctttatggtggcctgctggccaatggggacctcctggcaatgggagaccccactctggcagaggaccataccataattgttgaggaagacaaggaggaagagagtgacttggaagataaacagagcccaacgggcagtgactctgggtcagtacaagaagactcgggctcagagccaaagagagctctgcctttcagaaaaggtcccaattttactatggaaaagttcctagacccttctcgcccttacaagtgtaccgtctgcaaggaatctttcactcaaaagaatatcctgctagtacactacaattctgtctcccacctgcataagttaaagagagcccttcaagaatcagcaaccggtcagccagaacccaccagcagcccagacaacaaaccttttaagtgtaacacttgtaatgtggcctacagccagagttccactctggagatccatatgaggtctgtgttacatcaaaccaaggcccgggcagccaagctggaggctgcaagtggcagcagcaatgggactgggaacagcagcagtatttccttgagctcctccacgccaagtcctgtgagcaccagtggcagtaacacctttaccacctccaatccaagcagtgctggcattgctccaagctctaacttactaagccaagtgcccactgagagtgtagggatgccacccctggggaatcctattggtgccaacattgcttccccttcagagcccaaagaggccaatcggaagaaactggcagatatgattgcatccaggcagcagcaacaacagcagcagcaacagcaacaacaacaacaacaacaacaacaacaagcacaaacgctggcccaggcccaggctcaagttcaagctcacctgcagcaggagctgcagcaacaggctgccctgatccagtctcagctgtttaaccccaccctccttcctcacttccccatgacaactgagaccctgctgcaactacagcagcagcagcacctcctcttccctttctacatccccagtgctgagttccagcttaaccccgaggtgagcttgccagtgaccagtggggcactgacactgactgggacaggcccaggcctgctggaagatctgaaggctcaggttcaggtcccacagcagagccatcagcagatcttgccgcagcagcagcagaaccaactctctatagcccagagtcactctgccctccttcagccaagccagcaccccgaaaagaagaacaaattggtcatcaaagaaaaggaaaaagaaagccagagagagagggacagcgccgaggggggagagggcaacaccggtccgaaggaaacactgccagatgccttgaaggccaaagagaagaaagagttggcaccagggggtggttctgagccttccatgctccctccacgcattgcttcagatgccagagggaacgccaccaaggccctgctggagaactttggctttgagttggtcatccagtataatgagaacaagcagaaggtgcagaaaaagaatgggaagactgaccagggagagaacctggaaaagctcgagtgtgactcctgcggcaagttgttttccaacatcttgattttaaagagtcatcaagagcacgttcatcagaattactttcctttcaaacagctcgagaggtttgccaaacagtacagagaccactacgataaactgtacccactgaggccccagaccccagagccaccaccacctccccctccaccccctccacccccacttccggcagcgccgcctcagccggcgtccacaccagccatccccgcatcagccccacccatcacctcacctacaattgcaccggcccagccatcagtgccgctcacccagctctccatgccgatggagctgcccatcttctcgccgctgatgatgcagacgatgccgctgcagaccttgccggctcagctacccccgcagctgggacctgtggagcctctgcctgcggacctggcccaactctaccagcatcagctcaatccaaccctgctccagcagcagaacaagaggcctcgcaccaggatcacagatgatcagctccgagtcttgcggcaatattttgacattaacaactcccccagtgaagagcaaataaaagagatggcagacaagtccgggttgccccagaaagtgatcaagcactggttcaggaacactctcttcaaagagaggcagcgtaacaaggactccccttacaacttcagtaatcctcctatcaccagcctggaggagctcaagattgactcccggcccccttcgccggaacctccaaagcaggagtactggggaagcaagaggtcttcaagaacaaggtttacggactaccagctgagggtcttacaggacttcttcgatgccaatgcttacccaaaggatgatgaatttgagcaactctctaatttactgaaccttccaacccgagtgatagtggtgtggtttcagaatgcccgacagaaggccaggaagaattatgagaatcagggagagggcaaagatggagagcggcgtgagcttacaaatgatagatacattcgaacaagcaacttgaactaccagtgcaaaaaatgtagcctggtgtttcagcgcatctttgatctcatcaagcaccagaagaagctgtgttacaaggatgaggatgaggaggggcaggacgacagccaaaatgaggattccatggatgccatggaaatcctgacgcctaccagctcatcctgcagtaccccgatgccctcacaggcttacagcgccccagcaccatcagccaataatacagcttcctccgctttcttgcagcttacagcggaggctgaggaactggccaccttcaattcaaaaacagaggcaggcgatgagaaaccaaagctggcggaagctcccagtgcacagccaaaccaaacccaagaaaagcaaggacaaccaaagccagagctgcagcagcaagagcagcccgagcagaagaccaacactccccagcagaagctcccccagctggtgtccctgccttcgttgccacagcctcctccacaagcgccccctccacagtgccccttaccccagtcgagccccagtccttcccagctctcccacctgcccctcaagcccctccacacatcaactcctcaacagctcgcaaacctacctcctcagctaatcccctaccagtgtgaccagtgtaagttggcatttccgtcatttgagcactggcaggagcatcagcagctccacttcctgagcgcgcagaaccagttcatccacccccagtttttggacaggtccctggatatgcctttcatgctctttgatcccagtaacccactcctggccagccagctgctctctggggccatacctcagattccagcaagctcagccacttctccttcaactccaacctccacaatgaacactctcaagaggaagctggaggaaaaggccagtgcaagccctggcgaaaacgacagtgggacaggaggagaagagcctcagagagacaagcgtttgagaacaaccatcacaccggaacaactagaaattctctaccagaagtatctactggattccaatccgactcgaaagatgttggatcacattgcacacgaggtgggcttgaagaaacgtgtggtacaagtctggtttcagaacacccgagctcgggaaaggaaaggacagttccgggctgtaggcccagcgcaggcccacaggagatgccctttttgcagagcgctcttcaaagccaagactgctcttgaggctcatatccggtcccgtcactggcatgaagccaagagagctggctacaacctaactctgtctgcgatgctcttagactgtgatgggggactccagatgaaaggagatatttttgacggaactagcttttcccacctacccccaagcagtagtgatggtcagggtgtccccctctcacctgtgagtaaaaccatggaattgtcacccagaactcttctaagcccttcctccattaaggtggaagggattgaagactttgaaagcccctccatgtcctcagttaatctaaactttgaccaaactaagctggacaacgatgactgttcctctgtcaacacagcaatcacagataccacaactggagacgagggcaacgcagataacgacagtgcaacgggaatagcaactgaaaccaaatcctcttctgcacccaacgaagggttgaccaaagcggccatgatggcaatgtctgagtatgaagatcggttgtcatctggtctggtcagcccggccccgagcttttatagcaaggaatatgacaatgaaggtacagtggactacagtgaaacctcaagccttgcagatccctgctccccgagtcctggtgcgagtggatctgcaggcaaatctggtgacagcggagatcggcctgggcagaaacgttttcgcactcaaatgaccaatctgcagctgaaggtcctcaagtcatgctttaatgactacaggacacccactatgctagaatgtgaggtcctgggcaatgacattggactgccaaagagagtcgttcaggtctggttccagaatgcccgggcaaaagaaaagaagtccaagttaagcatggccaagcattttggtataaaccaaacgagttatgagggacccaaaacagagtgcactttgtgtggcatcaagtacagcgctcggctgtctgtacgtgaccatatcttttcccaacagcatatctccaaagttaaagacaccattggaagccagctggacaaggagaaagaatactttgacccagccaccgtacgtcagttgatggctcaacaagagttggaccggattaaaaaggccaacgaggtccttggactggcagctcagcagcaagggatgtttgacaacacccctcttcaggcccttaaccttcctacagcatatccagcgctccagggcattcctcctgtgttgctcccgggcctcaacagcccctccttgccaggctttactccatccaacacagctttaacgtctcctaagccgaacttgatgggtctgcccagcacaactgttccttcccctggcctccccacttctggattaccaaataaaccgtcctcagcgtcgctgagctccccaaccccagcacaagccacgatggcgatgggccctcagcaacccccccagcagcagcagcagcagcagcaaccacaggtgcagcagcctcccccgccgccagcagcccagccgccacccacaccacagctcccactgcaacagcagcagcaacgcaaggacaaagacagtgagaaagtaaaggagaaggaaaaggcacacaaagggaaaggggaacccctgcctgtccccaagaaggagaaaggagaggcccccacggcaactgcagccacgatctcagccccgctgcccaccatggagtatgcggtagaccctgcacagctgcaggccctgcaggccgcgttgacttcggaccccacagcattgctcacaagccagttccttccttactttgtaccaggcttttctccttattatgctccccagatccctggcgccctgcagagcgggtacctgcagcctatgtatggcatggaaggcctgttcccctacagccctgcactgtcgcaggccctgatggggctgtccccaggctccctactgcagcagtaccagcaataccagcagagtctgcaggaggcaattcagcagcagcagcagcggcaactacagcagcagcagcagcaaaaagtgcagcagcagcagcccaaagcaagccaaaccccagtcccccccggggctccttccccagacaaagaccctgccaaagaatcccccaaaccagaagaacagaaaaacaccccccgtgaggtgtcccccctcctgccgaaactccctgaagagccagaagcagaaagcaaaagtgcggactccctctacgaccccttcattgttccaaaggtgcagtacaagttggtctgccgcaagtgccaggcgggcttcagcgacgaggaggcagcgaggagccacctgaagtccctctgcttcttcggccagtctgtggtgaacctgcaagagatggtgcttcacgtccccaccggcggcggcggcggtggcagtggcggcggcggcggcggtggcggcggcggcggcggcggcggctcgtaccactgcctggcgtgcgagagcgcgctctgtggggaggaagctctgagtcaacatctcgagtcggccttgcacaaacacagaacaatcacgagagcagcaagaaacgccaaagagcaccctagtttattacctcactctgcctgcttccccgatcctagcaccgcatctacctcgcagtctgccgctcactcaaacgacagcccccctcccccgtcggccgccgccccctcctccgcttccccccacgcctccaggaagtcttggccgcaagtggtctcccgggcttcggcagcgaagcccccttcttttcctcctctctcctcatcttcaacggttacctcaagttcatgcagcacctcaggggttcagccctcgatgccaacagacgactattcggaggagtctgacacggatctcagccaaaagtccgacggaccggcgagcccggtggagggtcccaaagaccccagctgccccaaggacagtggtctgaccagtgtaggaacggacaccttcagattgtagtaatgaactagtccgtaacttgaaagtatttcgatttcttggctttatatatcttgtggaaaggacgacgagcattggactctgataatgaa

SEQ ID NO: 2566 - DNA, 7820 bp, Homo sapiens
  source 1..7820: mol_type = genomic DNA
accgccaccatggccacccttaactcagcctctaccactggtaccaccccctcccctgggcacaatgccccgtccctgccttcggacaccttctcctccagcaccccctctgatcctgtcaccaaagatccccctgctgcctcctccacctctgagaacatgaggtcctcagagccagggggacagctcctggagtcgggctgtggcctcgtcccaccaaaggagattggggagccccaggaagggcctgactgtggtcacttcccaccaaatgacccaggggtggaaaaggacaaggagcaggaggaggaagaagaagggctccctcccatggacctaagcaaccacttattcttcacagctggaggtgaggcctacctagtggccaagctgtccctgccaggtggcagtgaactcctgttaccaaagggcttcccctggggtgaggcgggcatcaaggaagagcccagtctgcccttccttgcctacccacccccctcacacctcactgcccttcacatccaacatggctttgacccaatccaaggctttagctcttctgaccaaattctgtcccatgatacctcagcaccatctccggctgcctgtgaggaaaggcatggagctttctggagctaccagctggctccaaatccacccggagatcccaaagatggccccatggggaacagcgggggcaaccacgtggcggtcttctggctctgccttctgtgccgcctgggtttcagcaagccccaggcctttatggatcacacacagtctcatggggtgaagctaacccctgcccaatatcagggcctgtcaggtagcccagctgtactccaggagggagatgaaggctgcaaggccctcataagctttctggagccaaaactccctgctcgcccctcttctgacataccccttgacaacagcagcacagtgaacatggaggcgaatgtggcccagacagaggatggcccccctgaggcagaagtccaggcccttatcctcctggatgaagaagttatggccctcagcccaccctctccacccacagccacctgggaccccagcccaacccaagccaaagaatcgccagtagcagcaggcgaggcagggccagattggttccctgaggggcaagaagaggatggagggctctgccccccactcaaccaaagctcacccacctccaaggaggggggcactctccctgccccagtgggctcccccgaagaccccagtgacccaccccagccctatcgcctagctgatgactacaccccagcccctgcagccttccagggcctcagcctgtccagccacatgtccctgctccactcacgcaactcctgcaagacactcaagtgtcccaagtgcaactggcactacaagtaccagcagaccctggatgtgcacatgcgagagaagcaccctgagagcaacagtcactgcagctactgcagtgctgggggcgcccacccccgccttgctcgtggagagagctacaactgtggctacaaaccctaccgctgtgacgtctgcaactactctacaaccaccaaaggcaacctcagcatccatatgcagtctgacaagcacctggccaacctacagggcttccaggcgggccctggtgggcagggaagtccaccagaggcatcactcccaccctccgcgggagacaaagagcctaagaccaaatcatcctggcagtgcaaggtgtgcagctacgagacaaacatctcccgtaacctgcgcatccatatgacctctgagaagcacatgcagaatgtcctaatgctgcaccaggggctgccgctgggcctgccacctggattgatggggccaggccctcctcccccaccaggggctacccccactagcccccctgaactcttccagtactttgggccccaggccctagggcagcctcagactcccttggctggcccggggctgaggccagacaagcccctggaagcccagctacttctcaatggtttccaccacgtaggagcacctgcccgcaagttccccacatccgcccctggaagcctatcccctgatgcccacctgcctccaagtcagctcctgggttcctcatctgacagcctgcccacctcaccacccccagacgacagcctgtccctgaaggtgttccgctgcctagtgtgccaggccttcagcacagacagcctggagctgctgctctaccactgcagcataggccggagcctcccggaagctgaatggaaggaggtggctggtgacacccaccgctgcaagctttgctgctatggcacccagctcaaggccaacttccaactccacctcaagactgacaaacatgctcagaagtaccagctggcagcccacctgcgggaggggggtggagccatgggcaccccttccccagcatccctgggagatggggctccttatgggtctgtctccccactacacctgcgctgcaacatctgtgactttgagtccaacagcaaggagaagatgcagctgcatgccaggggtgcagcccacgaagaaaacagccaaatctataagtttctgctggacatggagggagcggaggcaggggcagagctggggctataccactgcctgttgtgtgcgtgggagacaccctcccgcttggctgtgctgcaacacctgcgcacacctgcccaccgcgatgcccaggcccagaggcgtctgcagctgctacagaatggcccaaccactgaggaaggactcgcagctcttcagagcatcctgagcttcagccacgggcagctccggactcccgggaaggctcctgtcacccccttagctgagccacccacccctgagaaagatgcccagaacaagacagaacaattggcttcagaagagacagaaaacaagactggcccttccagagacagtgccaaccagaccacggtatactgctgtccatactgcagcttcctgagcccagagtccagccaggtgagggctcatacactctcccagcatgcagtgcagcccaagtacagatgcccactgtgccaggaacagctggtgggccggcctgccctgcacttccaccttagccaccttcacaacgtggtgcccgagtgcgttgagaagctgctgcttgtagctacaactgtagaaatgacatttacaaccaaagtgctgtctgcacccacattaagccctctggacaatggccaagaaccccccactcatgggccagagcctacaccgagcagagaccaggcagcagaaggccctaacctgaccccagaagccagtccagatcctcttcctgagcctcccctggcctcagttgaggtcccagacaaaccctcaggaagccctggccaacccccttctccagccccatctccagtccctgaacctgatgcccaagctgaagacgtagctcctccgcccaccatggctgaggaggaagaggggaccactggggagctccgctctgcagagccagctccagctgactctcgccaccctctgacctatcggaaaaccaccaactttgccctggacaagtttctcgaccctgcccggccctataagtgcactgtgtgtaaggagtccttcacccagaagaatattctgttggttcattataattctgtctcccaccttcacaagatgaagaaggctgccattgacccctctgcccctgcacggggagaggccggtgccccacccaccaccactgctgccacagacaagccctttaagtgcacagtctgcagagtctcctacaaccagagctccaccctggagatccacatgcggtcagttctgcatcagactcgctctcggggaaccaagactgattccaagattgaagggccagaacgcagccaagaagagcccaaggaaggcgagacagagggggaggtgggcactgagaagaagggccctgacaccagtggcttcatatctggattgcctttcctgtcccctcccccacctcccttggacctgcaccgattcccagcccctctcttcaccccaccagtcctgccccccttccctctggtgcccgaatcactgcttaagctccagcagcagcagctgctcctgcccttctacctccacgatctcaaggtggggcccaagctgacactagctgggcctgcacctgtgctgtccctgccagctgccacccctcctcctccaccccaacctcccaaggctgagctggctgagcgggagtgggagcggccccccatggccaaagagggtaatgaggcagggccttcctcaccccccgacccattgcccaacgaggctgcccgcactgcagccaaagcccttctagaaaactttggctttgagctggtgatccagtacaatgaagggaagcaagctgtgccccctccccctaccccacccccacctgaggccctcgggggtggggacaagctggcctgtggggcctgtgggaaactcttctccaatatgcttatcctcaagacacacgaggaacatgtccaccgccgctttctgccctttgaagccctgagccgttatgctgctcagtttcgaaagagctatgacagcctatacccgccccttgcagagcctcccaaacctcctgatgggtctctggattcacctgttccccatctgggcccacccttcctggtcccagagcctgaggcaggggggacccgtgcccctgaagagcgaagtcgagcagggggacactggcccatagaagaggaagaaagctccagagggaatcttcctcccctggtgcctgccggccgccggttctccagaaccaagttcacagagttccagacccaagccctgcagtctttctttgagactagcgcctaccccaaagacggagaggtggagcgactcgcaagtctgttgggtctggctagccgtgtggtggtggtgtggttccagaatgcccgccagaaagcacgcaaaaatgcctgtgagggtgggtccatgccaaccggaggaggcactgggggagcctccggctgcaggcgttgccacgccactttctcctgtgtttttgagttggtgcgccacctcaagaagtgctatgatgaccagacccttgaagaggaggaggaagaggcagagagaggggaagaggaggaagaggtggaagaagaagaagtagaggaggaacagggccttgaacctccagcagggcctgagggcccattaccagagcctccagatggggaggagctgagccaagcagaggcaacaaaggcaggaggcaaagagcctgaagagaaggctactccatcaccttccccagcccatacctgtgaccagtgtgccatttctttctccagccaggacctcctgaccagtcaccgccgactacatttcctgccatctctgcagcccagtgctcccccccaactcctagatctgcccttgctggtgtttggggagagaaaccccctggtggcagccacctcaccaatgccaggtccacctctcaaacggaagcatgaggacggcagcttgtctcccacaggcagtgaagcagggggaggaggggagggcgagccccccagggacaagcgcctgcgcaccaccatcttgcctgagcagctagagatcctgtaccgttggtacatgcaggattccaacccaacacgcaagatgctcgactgcatctccgaggaggtggggctcaaaaagcgagtggtacaggtctggttccagaataccagggcccgggagaggaaaggccagtttcgaagcacccctgggggggtgcctagtccagcagtgaaaccgcctgccacagccacccctgcatccttgcccaagttcaacctcttattaggcaaggtagatgatggcactgggagggaagccccaaagagggaagcacctgcttttccctaccccactgccacgcttgcttctgggccccagcctttcctaccacctgggaaagaggccaccaccccaacaccagagccacctctacctctcctacctccccctccacccagtgaggaagagggcccagaggaaccacctaaagcttctccagagagtgaggcttgcagtctctctgcaggagatctgagtgattcatctgcttccagcctagctgaaccagaatcccctggggctggagggaccagtgggggacctggaggtgggactggggttccagatggaatggggcagcggcgctacaggacccagatgagcagcctgcagctgaagatcatgaaagcctgctatgaagcttaccgcacccccaccatgcaggagtgtgaggtgctgggagaggagattgggctgcccaagagagtcatccaggtctggttccagaatgctcgtgccaaggaaaagaaggccaaactacaggggacagccgctgggagcactgggggcagcagtgagggcctcttagcagcccagcgcactgactgcccctattgtgatgtcaagtatgatttctatgtctcctgccgaggccatctcttttcccgtcagcacctggccaagctcaaggaggcggttcgagcccagctgaagagtgaaagcaagtgctacgacttggccccagcacctgaggctcccccagctctcaaggccccacctgccaccacacctgcctccatgcccctcggggctgccccaaccttgcctcgcctggcgccggtcctcttatctggcccagctctggctcagcccccgctgggcaacttagctcctttcaattcaggcccggcagcctcctcaggcctcctcggcctcgccacttcggtcctgcctaccaccacagtggtccagactgctggcccaggccgccccttacctcagagacccatgcccgaccaaaccaacacctccacagcaggcaccactgaccctgtcccaggccctcctactgagcccttgggggacaaggtctccagtgagcgaaagccagttgcaggccccaccagctcctccaatgatgccctcaagaacctcaaagcattgaagaccactgtcccagccctgttggggggccagttcctgccctttccattgccccctgctgggggaacagcaccgccagctgtctttggcccccagctacagggggcctacttccaacagctctatggcatgaagaaggggctatttcccatgaaccccatgatacctcagaccctcattgggctgctccccaatgccctcctccagccgccaccccagccccctgagcccacagccacagcacctccaaagcctcctgaactgcctgctccaggggagggggaagctggtgaggttgatgagctgctgacaggcagcactggcatctccaccgtggatgtaacccatcgctacctgtgccgccagtgcaagatggcatttgacggggaggccccggctactgcccaccagagatccttctgcttctttgggcggggctctgggggctccatgccacccccattgcgggtgcccatctgcacctaccactgcctggcatgtgaggtgctgctgagtgggcgtgaagccctagcctcccacctgcgctcctcggcccacaggcgcaaggcagccccacctcaagggggcccacccatctccatcaccaacgccgccactgctgcctcggctgctgtggcttttgccaaagaggaagcaagattacctcacacggactccaacccaaaaactacgactacctctacacttctagctttatagtaatgaactagtccgtaacttgaaagtatttcgatttcttggctttatatatcttgtggaaaggacgagggtgcctgcttccttgcaaccta

SEQ ID NO: 2567 - DNA, 1685 bp, Homo sapiens
  source 1..1685: mol_type = genomic DNA
accgccaccatgtccgaggactcgagcgccctgccctggtccatcaacagggacgattacgagctgcaggaggtgatcgggagtggagcaactgctgtagtccaagcagcttattgtgcccctaaaaaggagaaagtggcaatcaaacggataaaccttgagaaatgtcaaactagcatggatgaactcctgaaagaaattcaagccatgagtcaatgccatcatcctaatattgtatcttactacacatcttttgtggtaaaagatgagctgtggcttgtcatgaagctgctaagtggaggttctgttctggatattattaagcacattgtggcaaaaggggaacacaaaagtggagtcctagatgaatctaccattgctacgatactccgagaagtactggaagggctggaatatctgcataaaaatggacagatccacagagatgtgaaagctggaaacattcttcttggagaagatggctcagtacagattgcagactttggggttagtgcttttttagcaactggtggtgatattacccgaaataaagtgagaaagacctttgttggcaccccttgttggatggcacctgaagttatggaacaggtccgtggttatgatttcaaagctgatatttggagttttggaattacagcaattgaattggctacaggggcggctccttatcataaatatccaccaatgaaggttttaatgctgacactgcagaacgatcctccttctttggaaactggtgttcaagataaagaaatgctgaaaaaatatggaaaatcatttagaaaaatgatttcattgtgccttcaaaaagatccagaaaaaagaccaacagcagcagaactattaaggcacaaatttttccagaaagcaaagaataaagaatttcttcaagaaaaaacattgcagagagcaccaaccatttctgaaagagcaaaaaaggttcggagagtaccaggttccagtgggcgtcttcataagacagaggatggaggctgggagtggagtgatgatgaatttgatgaagaaagtgaggaagggaaagcagcaatttcacaactcaggtctccccgagtgaaagaatcaatatcaaattctgagctctttccaacaactgatcctgtgggtactttgctccaagttccagaacagatctctgctcatctacctcagccagctgggcagattgctacacagccaactcaagtctctctcccacccaccgcagagccagcaaaaacagctcaggctttgtcttcaggatcaggttcacaagaaaccaagatcccaatcagtctagtactaagattaaggaattccaaaaaagaactaaatgatattcgatttgaatttactcctgggagagatacagcagagggtgtctctcaggaactcatttctgctggcctggtcgacggaagggatttagtaatagtggcagctaatttgcagaaaattgtggaagaacctcagtcaaatcgatctgtcactttcaaactggcatctggtgtcgaaggctcagatattcctgatgatggtaaactgataggatttgcccagctcagcatcagctagtaatgaactagtccgtaacttgaaagtatttcgatttcttggctttatatatcttgtggaaaggacgaagcccacgtagtgtgcgtggccca

SEQ ID NO: 2568 - DNA, 908 bp, Homo sapiens
  source 1..908: mol_type = genomic DNA
accgccaccatggcccagcccctgtgcccgccgctctccgagtcctggatgctctctgcggcctggggcccaactcggcggccgccgccctccgacaaggactgcggccgctccctcgtctcgtccccagactcatggggcagcaccccagccgacagccccgtggcgagccccgcgcggccaggcaccctccgggacccccgcgccccctccgtaggtaggcgcggcgcgcgcagcagccgcctgggcagcgggcagaggcagagcgccagtgagcgggagaaactgcgcatgcgcacgctggcccgcgccctgcacgagctgcgccgctttctaccgccgtccgtggcgcccgcgggccagagcctgaccaagatcgagacgctgcgcctggctatccgctatatcggccacctgtcggccgtgctaggcctcagcgaggagagtctccagcgccggtgccggcagcgcggtgacgcggggtcccctcggggctgcccgctgtgccccgacgactgccccgcgcagatgcagacacggacgcaggctgaggggcaggggcaggggcgcgggctgggcctggtatccgccgtccgcgccggggcgtcctggggatccccgcctgcctgccccggagcccgagctgcacccgagccgcgcgacccgcctgcgctgttcgccgaggcggcgtgccctgaagggcaggcgatggagccaagcccaccgtccccgctccttccgggcgacgtgctggctctgttggagacctggatgcccctctcgcctctggagtggctgcctgaggagcccaagtagtaatgaactagtccgtaacttgaaagtatttcgatttcttggctttatatatcttgtggaaaggacgagaggtcccggctcaaagaaggagg

SEQ ID NO: 2569 - DNA, 1295 bp, Homo sapiens
  source 1..1295: mol_type = genomic DNA
accgccaccatggcccagtcgcctcctccgcagagcctcctcggccacgaccactggatcttcgcccagggctggggctgggccggccactgggactccacgtccccggcctcctcctccgattcgtcgggttcgtgcccctgcgacggcgcccgcggactcccgcagccacagcctccgagctgcagctcccgagccgcagaggcagccgcgacgacgcccagacgagcgcgcaccggaccagcgggcggacagcggcagagcgccagcgagcgggagaaactgcgcatgcgcacgctggcccgcgccctgcacgagttgcgccgctttctgcctccctccttggcgccggccggccagagcctgaccaagatcgagacgctgcgcctggccatccgctacatcggccacctatcggccgtgctgggtctcagcgaggagagtctgcagtgccggcgcaggcagcgcggggacgcggggtccccttggggctgcccgctgtgccccgaccgtggccccgcagaggcgcagacgcaggcggaggggcaggggcaagggcaggggcaggggcaggggcaagggcaggggcaaggacaggggcaaggacaggggcaagggcaggggcgcaggccgggcctggtctccgccgtcctcgccgaggcgtcctggggatccccgtccgcctgccccggagcccaagccgcacccgagcgcctggggaggggggtccacgacacggatccctgggcaacacccccttactgccccaagatacagtcgcccccgtattcgtcccaagggacaacctccgacgcgtctctttggacgccaccccaaggctgtccctggacgcagtcgtccccagagccccggaacccaccagtgccctggacggcggccccagcaactttggagctggccgcagtgtaccagggtctctctgtgtctccagagccctgtctgtcgctgggagctccatctctcctgccccacccatcatgccagagactgcagcctcagacccccgggaggtgctggagccacagtgcagaggtggtgcccaactcagaggaccagggaccgggcgccgccttccagctcagtgaagcaagccctccccagagctcaggcctgcggttcagtggctgccctgaactttggcaagaagatctggagggggcccgcctgggcatcttctactagtaatgaactagtccgtaacttgaaagtatttcgatttcttggctttatatatcttgtggaaaggacgatccgacagaaggccctaggcgcat

SEQ ID NO: 2570 - DNA, 425 bp, Homo sapiens
  source 1..425: mol_type = genomic DNA
accgccaccatggagctgaactccctgctgatcctgctggaggcggccgagtacctggagcgcagggatcgagaggccgagcacggctacgcctcggtgctgcccttcgacggcgacttcgccagggagaaaacaaaggcggccggcctggtgcgcaaggccccgaacaacagcggcatcctgggaggcccgggagccctggctggcctgtggggtcctgcctggacacggaaggtggcctggagctgggagcgaggtccccctgcctcgttatcctccaggcagatgctgtggcacaccctgtggtgctgggaattgtgtgcccgcgtctagtaatgaactagtccgtaacttgaaagtatttcgatttcttggctttatatatcttgtggaaaggacgacattgtgtgttgattcgaatacgt

SEQ ID NO: 2571 - DNA, 731 bp, Homo sapiens
  source 1..731: mol_type = genomic DNA
accgccaccatggagctgaactccctgctgatcctgctggaggcggccgagtacctggagcgcagggatcgagaggccgagcacggctacgcctcggtgctgcccttcgacggcgacttcgccagggagaaaacaaaggcggccggcctggtgcgcaaggccccgaacaacaggtcttcacacaacgagctagaaaagcacagacgagccaaactcaggctgtaccttgagcagctcaagcaactggtgcccctgggccccgacagcacccgccacaccacgctgagcctcctgaagcgggccaaggtgcacatcaagaaactggaggagcaggaccgccgggcactgagcatcaaggagcagctgcagcaggagcatcgtttcctgaagcggcgcctggagcagctgtcggtgcagagcgtggagcgcgtgcgcacagatagcacgggctctgctgtctccacggacgactcagagcaagaagtggacatagagggcatggagtttggccctggtgagctggacagtgttggcagcagcagtgacgcggacgaccactacagcctgcagagtggcaccggcggcgacagtggcttcgggccccactgccggcggctgggccgccccgccctctcgtagtaatgaactagtccgtaacttgaaagtatttcgatttcttggctttatatatcttgtggaaaggacgacgcacactataatcagtctgaagg

SEQ ID NO: 2572 - DNA, 683 bp, Homo sapiens
  source 1..683: mol_type = genomic DNA
accgccaccatggaacccttggccagcaacatccaggtcctgctgcaggcggccgagttcctggagcgccgtgagagagaggccgagcatggttatgcgtccctgtgcccgcatcgcagtccaggccccatccacaggaggaagaagcgacccccccaggctcctggcgcgcaggacagcgggcggtcagtgcacaatgaactggagaagcgcaggagggcccagttgaagcggtgcctggagcggctgaagcagcagatgcccctgggggccgactgtgcccggtacaccacgctgagcctgctgcgccgtgccaggatgcacatccagaagctggaggatcaggagcagcgggcccgacagctcaaggagaggctgcgcagcaagcagcagagcctgcagcggcagctggagcagctccgggggctggcaggggcggccgagcgggagcggctgcgggcggacagtctggactcctcaggcctctcctctgagcgctcagactcagaccaagtcttgcctaatgaaaacgggggaactcccaaccacagacccactggaagaggaaataatatcagttcccatcactagtaatgaactagtccgtaacttgaaagtatttcgatttcttggctttatatatcttgtggaaaggacgagtcggcccaggcggcagtccttaa

SEQ ID NO: 2573 - DNA, 1700 bp, Homo sapiens
  source 1..1700: mol_type = genomic DNA
accgccaccatggaggagctgagcagcgtgggcgagcaggtcttcgccgccgagtgcatcctgagcaagcggctccgcaagggcaagctggagtacctggtcaagtggcgcggctggtcctccaaacataacagctgggagccggaggagaacatcctggacccgaggctgctcctggccttccagaagaaggaacatgagaaggaggtgcagaaccggaagagaggcaagaggccgagaggccggccaaggaagctcactgccatgtcctcctgcagccggcgctccaagctcaaggaacccgatgctccctccaaatccaagtccagcagttcctcctcttcctccacgtcatcctcctcttcctcagatgaagaggatgacagtgacttagatgctaagaggggtccccggggccgcgagacccacccagtgccgcagaagaaggcccagatcctggtggccaaacccgagctgaaggatcccatccggaagaagcggggacgaaagcccctgcccccagagcaaaaggcaacccgaagacccgtgagcctggccaaggtgctgaagaccgcccggaaggatctgggggccccggccagcaagctgccccctccactcagcgcccccgttgcaggcctggcagctctgaaggcccacgccaaggaggcctgtggcggccccagtgccatggccaccccagagaacctggccagcctaatgaagggcatggccagtagccccggccggggtggcatcagctggcagagctccatcgtgcactacatgaaccggatgacccagagccaggcccaggctgccagcaggttggcgctgaaggcccaggccaccaacaagtgcggcctcgggctggacctgaaggtgaggacgcagaaaggggagctgggaatgagccctccaggaagcaaaatcccgaaggcccccagcggtggggctgtggagcagaaagtggggaacacagggggccccccgcacacccatggtgccagcagggtgcctgctgggtgcccaggcccccagccagcacccacccaggagctgagcctccaggtcttggacttgcagagtgtcaagaatggcatgcccggggtgggtctccttgcccgccacgccaccgccaccaagggtgtcccggccaccaacccagcccctgggaagggcactgggagtggcctcattggggccagcggggccaccatgcccaccgacacaagcaaaagtgagaagctggcttccagagcagtggcgccacccacccctgccagcaagagggactgtgtcaagggcagtgctacccccagtgggcaggagagccgcacagcccccggagaagcccgcaaggcggccacactgccagagatgagcgcaggtgaggagagtagcagctcggactccgaccccgactccgcctcgccgcccagcactggacagaacccgtcagtgtccgttcagaccagccaggactggaagcccacccgcagcctcatcgagcacgtatttgtcaccgacgtcactgccaacctcatcaccgtcacagtgaaggagtctcccaccagcgtgggcttcttcaacctgaggcattactagtaatgaactagtccgtaacttgaaagtatttcgatttcttggctttatatatcttgtggaaaggacgataacgcccgtctagcgatgccggt

SEQ ID NO: 2574 - DNA, 737 bp, Homo sapiens
  source 1..737: mol_type = genomic DNA
accgccaccatggaggagctgagcagcgtgggcgagcaggtcttcgccgccgagtgcatcctgagcaagcggctccgcaagggcaagctggagtacctggtcaagtggcgcggctggtcctccaaacataacagctgggagccggaggagaacatcctggacccgaggctgctcctggccttccagaagaaggaacatgagaaggaggtgcagaaccggaagagaggcaagaggccgagaggccggccaaggaagctcactgccatgtcctcctgcagccggcgctccaagctcaaggtgggtggctgcgctgggtatgctgaccccacctcccagcacccccttggcgtagggggcaggcagagggagggtttggggccctcaggaagggggtggcacttctgccaacagtctgtccctctactcggaaaacaggagccccctttcttcctgtctctcagcttctgctgccaggggccccagccggctgagagttcctccccgcccctcccaggggcttcctgcttcagcctgtcctgcacgcctctctgctgggtggcagggtcaaactgctgcagacaagcactcttccctcccagggggtccttgggggacggaaaggaacaggaagcatgcgtacagtagtaatgaactagtccgtaacttgaaagtatttcgatttcttggctttatatatcttgtggaaaggacgatataatatctaacggtgggtttac

SEQ ID NO: 2575 - DNA, 737 bp, Homo sapiens
  source 1..737: mol_type = genomic DNA
accgccaccatggcggcggcggttcggatgaacatccagatgctgctggaggcggccgactatctggagcggcgggagagagaagctgaacatggttatgcctccatgttaccatacaataacaaggacagagatgccttaaaacggaggaacaaatccaaaaagaataacagcagtagcagacgggctcatcttcgcttgtgcctggagaagttgaaggggctggtgccacttggacccgaatcaagtcgacacactacgttgagtttattaacaaaagccaaattgcacataaagaaacttgaagattgtgacagaaaagccgttcaccaaatcgaccagcttcagcgagagcagcgacacctgaagaggcagctggagaagctgggcattgagaggatccggatggacagcatcggctccaccgtctcctcggagcgctccgactccgacagggaagaaatcgacgttgacgtggagagcacggactatctcacaggtgatctggactggagcagcagcagtgtgagcgactctgacgagcggggcagcatgcagagcctcggcagtgatgagggctattccagcaccagcatcaagagaataaagctgcaggacagtcacaaggcgtgtcttggtctctagtaatgaactagtccgtaacttgaaagtatttcgatttcttggctttatatatcttgtggaaaggacgataatgcatcaataaggacatccca

SEQ ID NO: 2576 - DNA, 3263 bp, Homo sapiens
  source 1..3263: mol_type = genomic DNA
accgccaccatgtcaagcgaggaaagctaccgggccatcctgcgttacctgacgaacgagcgcgagccgtatgcgccgggcaccgagggcaatgtcaagcgtaaaatccgaaaagctgccgcctgctacgtggtgcgcggcgggactctgtattaccagcggcggcagcggcaccgcaagaccttcgcggagctggaggtggtgctgcagccggagcgacgccgggacctcatcgaggcggcgcacctgggtcccggcggcactcaccacacccggcatcagacctggcactacttgtccaagacgtactggtggcgaggtatattgaagcaagtcaaagattacattaaacagtgtagcaaatgccaggagaaactagatcgatcccgtccaatatcagatgtttcagaaatgttggaagaattgggactagaccttgaatctggagaagaaagtaatgaatcggaagatgacctgagcaactttacttcatctccaactacagcatccaagcctgcaaaaaagaagccagtatccaaacatgaacttgtgtttgttgacaccaaaggagtggtaaaacgttcttctccaaaacattgtcaggctgtcttaaaacagctgaacgaacagagactttccaaccagttctgtgatgttactttgttaattgaaggagaagagtacaaagctcataaatctgttttgtcagcaaatagcgagtattttcgagatctttttattgagaaaggagctgtttccagtcatgaggctgtggtggatctttctggtttttgtaaggccagcttccttcctttactggaatttgcctatacttctgtactaagttttgatttctgtagcatggctgatgtagccatcttagctcgtcatcttttcatgtcagaagtcttagagatttgtgaaagtgtacataagctaatggaagagaagcagctaacagtatataagaagggcgaagtacaaacagttgcatccacccaggacttacgagtacagaatggaggtacagcacctcctgttgctagcagtgagggaaccacaacaagtttacctactgaacttggggattgtgaaattgtactactggtaaatggagaattgccagaagctgagcagaatggagaggtaggacgacagcctgagccccaggtttcttcagaggctgaatctgccctgtcatcagtaggatgtatagctgattcccatcctgaaatggagtctgttgatttaataacaaaaaacaaccagacagaactagaaacttcaaacaacagagaaaataacacagtttctaatatacaccctaaactttcaaaagagaatgtaattagtagctcgccagaggatagtggtatgggaaatgatatatcagctgaggatatttgtgccgaagacattccaaaacataggcagaaagttgaccaacctttaaaagatcaggaaaatctagttgcatcaacagcaaagacagactttggccctgatgatgatacttatagaagcaggcttcgacaacgttctgttaatgaaggggcatatattcgactacacaagggaatggagaaaaagctgcagaaacggaaagccgttcccaagtcagcagttcaacaggtggctcagaagttagttcaaagaggaaaaaagatgaaacagccaaaaagagatgctaaagagaacacagaagaagcatctcataaatgtggggaatgtggaatggtttttcagagacgatacgcccttataatgcacaaactgaaacatgaaagagctagagattacaaatgtccattgtgtaaaaaacagtttcagtacagtgcctctttgcgagcacatcttattcgtcataccagaaaagatgcaccctcttcatcctcgtccaattccacgtctaatgaagcatcgggaacatcatctgagaagggcagaaccaagcgggaatttatatgttccatatgtggaagaacattacctaaattatattctctccgaatacatatgttaaagcacacaggtgtaaagccacatgcatgccaggtctgtggaaagacttttatctataagcatggtctaaaattacatcagagtcttcatcaatcacagaagcagttccagtgtgaactgtgtgttaagtcatttgttaccaaacggagtcttcaagaacatatgagtattcacacaggagagtccaagtacctttgctcagtttgtggaaagtcttttcataggggctctggactcagcaagcacttcaagaaacaccaaccaaagcctgaggttcgaggctatcattgtactcaatgtgaaaaaagtttctttgaagctagagatcttcgccagcacatgaacaaacatcttggtgtgaagccattccagtgccaattttgtgataagtgctatagttggaagaaagattggtattcccatgtgaagtctcattctgtcactgagccttataggtgtaatatatgtggcaaagaattttatgaaaaagctttgttcagaaggcatgtaaagaaagctacccatgggaagaaaggaagagcaaagcaaaacctggaacgggtgtgtgaaaaatgtggaagaaaattcactcagctaagagagtataggagacacatgaacaaccatgaaggagttaagccatttgagtgcttaacatgtggagtagcttgggctgatgcccgatctctaaaacgccatgtcagaacacatactggtgaacggccctatgtctgtcctgtatgtagcgaagcctacatagatgctcgaacactccgtaaacatatgactaaattccacagagactatgtgccttgcaaaattatgctggaaaaagacacccttcagtttcataaccaaggaactcaagtggcacatgctgttagcatcttaacagcaggcatgcaggaacaagaaagcagtggtcctcaagaacttgagactgtggtagtgacaggagaaactatggaagctctggaagctgttgcagctactgaagagtatccatcggtatctacactttctgaccaaagtattatgcaagtggttaattatgtattagcacaacagcaaggacagaagctatctgaagttgcagaagctattcaaactgttaaagtagaggtagcacatatttcaggaggagaatagtaatgaactagtccgtaacttgaaagtatttcgatttcttggctttatatatcttgtggaaaggacgaggactatagatcgcgataactaca

SEQ ID NO: 2577 - DNA, 1841 bp, Homo sapiens
  source 1..1841: mol_type = genomic DNA
accgccaccatgacaaggctggagcgcagctcccaccgcacagttatttgcaaagtcccaggtgaactcgtggcgagagaaggaaaatgcgcgtcccgggcgcgggagtcagaaataccatcagaggaggggtactgtgactttaatagtaggccaaatgagaactcttattgctatcaacttctgcgacaactaaatgaacagagaaagaaaggtattctttgtgatgtcagcattgtggtaagcggaaaaatcttcaaagctcataagaacatcctggttgcaggcagccgtttctttaagactttatattgcttttcaaacaaagaaagccctaaccaaaacaatactacccacttagatattgctgcagttcaaggtttttcagtcatcttggacttcttgtattctggtaacctggtgctcacaagccaaaatgccattgaagttatgaccgtggccagctatcttcaaatgagtgaagttgttcaaacttgccgaaatttcattaaagatgccttaaatataagcattaaatcagaagctccagagtctgtagttgtggactataataatagaaaaccagttaatagagatggtctgtcttcatcacgggatcaaaaaattgccagtttttgggcaacacggaatcttaccaatttggcaagtaatgtaaagattgaaaatgatggttgtaatgtcgacgagggccaaatagaaaactaccaaatgaatgacagtagttgggtccaggatggatctcctgaaatggctgaaaatgaatctgaaggtcaaacaaaagtgtttatttggaataatatgggctcccagggaattcaagagactggcaaaacaaggaggaaaaaccaaactacaaaaagatttatttataatattccacctaataatgaaacgaatttagaagattgctcagtaatgcagccacctgttgcctatccagaagaaaatacactactcatcaaggaagaaccagatttagatggtgctctactctcggggccagatggtgataggaatgtgaatgcaaatttattggctgaagctggcactagtcaagatggaggtgatgctggtacttcacatgatttcaagtatggtttgatgcctggtccttcaaatgatttcaagtatggattgataccaggtacttcaaatgatttcaagtatggattgataccaggtgcttcaaatgatttcaagtatggattattgccagaatcttggccaaaacaagaaacctgggaaaatggtgaatcatctctaatcatgaacaagttaaaatgccctcattgtagctatgtagccaaatacagacgaacactaaaaaggcacttgctcattcacacaggagtgagatcatttagctgtgatatttgtggaaaactgtttactcgaagagaacatgtaaaaagacattccctggtgcataaaaaggataaaaaatacaaatgtatggtgtgtaagaagatcttcatgttagcagccagtgttggaataagacatggatctcgacgttatggtgtttgtgtagactgtgcagataaatcacagccaggagggcaagaaggtgtagatcagggacaggatacagaattccctcgggatgaagaatacgaggagaatgaagtaggagaagctgatgaagagctagttgatgatggagaagatcagaatgatccctctcgatgggatgaatcaggagaagtttgtatgtctctagatgattagtaatgaactagtccgtaacttgaaagtatttcgatttcttggctttatatatcttgtggaaaggacgatggcgggtaaacaagctattagag

SEQ ID NO: 2578 - DNA, 2717 bp, Homo sapiens
  source 1..2717: mol_type = genomic DNA
accgccaccatgtcgttcagtgaaatgaaccgcaggacgctggcgttccgaggaggcgggttggtcaccgctagcggcggcggctccacgaacaataacgctggcggggaggcctcagcttggcctccgcagccccagccgagacagcccccgccgccagcgccgcccgcgcttcagccgcctaatgggcggggggccgacgaggaagtggaattggagggcctggagccccaagacctggaggcctccgccgggccggccgccggcgccgccgaggaagccaaggagttgctgctcccccaagacgcgggcggccccacctcgcttggcggtggcgcggggggccccctgctagcggaaaggaaccgtcggactctggccttccgaggcggcggcggcgggggtctcggcaacaatggcagtagccgcggccgccccgagacctcggtgtggcccttgaggcatttcaatgggcgagggccggcgactgtggatctggagctggacgcgctggaggggaaggagttgatgcaggacggcgcgtccctgagcgacagcaccgaggacgaggaggagggggcgagcctgggcgacggcagcggggcggaaggcggcagctgcagcagcagcaggcggtcgggcggcgatggcggggacgaagtggagggcagcggtgtgggagctggcgaaggagagactgtccagcacttcccgctcgcgcggcccaagtctctaatgcagaagctccaatgctccttccagacctcctggctcaaggactttccctggctgcgctattccaaggatactggtcttatgtcttgcggctggtgccaaaagacccctgcagatgggggaagcgtggaccttcccccagtggggcatgatgagctttcgcgagggacccgcaactacaagaaaaccctcctcctgaggcaccacgtctctaccgagcacaaactccacgaagccaacgcccaggagtcagaaataccatcagaggaggggtactgtgactttaatagtaggccaaatgagaactcttattgctatcaacttctgcgacaactaaatgaacagagaaagaaaggtattctttgtgatgtcagcattgtggtaagcggaaaaatcttcaaagctcataagaacatcctggttgcaggcagccgtttctttaagactttatattgcttttcaaacaaagaaagccctaaccaaaacaatactacccacttagatattgctgcagttcaaggtttttcagtcatcttggacttcttgtattctggtaacctggtgctcacaagccaaaatgccattgaagttatgaccgtggccagctatcttcaaatgagtgaagttgttcaaacttgccgaaatttcattaaagatgccttaaatataagcattaaatcagaagctccagagtctgtagttgtggactataataatagaaaaccagttaatagagatggtctgtcttcatcacgggatcaaaaaattgccagtttttgggcaacacggaatcttaccaatttggcaagtaatgtaaagattgaaaatgatggttgtaatgtcgacgagggccaaatagaaaactaccaaatgaatgacagtagttgggtccaggatggatctcctgaaatggctgaaaatgaatctgaaggtcaaacaaaagtgtttatttggaataatatgggctcccagggaattcaagagactggcaaaacaaggaggaaaaaccaaactacaaaaagatttatttataatattccacctaataatgaaacgaatttagaagattgctcagtaatgcagccacctgttgcctatccagaagaaaatacactactcatcaaggaagaaccagatttagatggtgctctactctcggggccagatggtgataggaatgtgaatgcaaatttattggctgaagctggcactagtcaagatggaggtgatgctggtacttcacatgatttcaagtatggtttgatgcctggtccttcaaatgatttcaagtatggattgataccaggtacttcaaatgatttcaagtatggattgataccaggtgcttcaaatgatttcaagtatggattattgccagaatcttggccaaaacaagaaacctgggaaaatggtgaatcatctctaatcatgaacaagttaaaatgccctcattgtagctatgtagccaaatacagacgaacactaaaaaggcacttgctcattcacacaggagtgagatcatttagctgtgatatttgtggaaaactgtttactcgaagagaacatgtaaaaagacattccctggtgcataaaaaggataaaaaatacaaatgtatggtgtgtaagaagatcttcatgttagcagccagtgttggaataagacatggatctcgacgttatggtgtttgtgtagactgtgcagataaatcacagccaggagggcaagaaggtgtagatcagggacaggatacagaattccctcgggatgaagaatacgaggagaatgaagtaggagaagctgatgaagagctagttgatgatggagaagatcagaatgatccctctcgatgggatgaatcaggagaagtttgtatgtctctagatgattagtaatgaactagtccgtaacttgaaagtatttcgatttcttggctttatatatcttgtggaaaggacgagaatgagtagacagtcctataaga

SEQ ID NO: 2579 - DNA, 2645 bp, Homo sapiens
  source 1..2645: mol_type = genomic DNA
accgccaccatgtcgttcagtgaaatgaaccgcaggacgctggcgttccgaggaggcgggttggtcaccgctagcggcggcggctccacgaacaataacgctggcggggaggcctcagcttggcctccgcagccccagccgagacagcccccgccgccagcgccgcccgcgcttcagccgcctaatgggcggggggccgacgaggaagtggaattggagggcctggagccccaagacctggaggcctccgccgggccggccgccggcgccgccgaggaagccaaggagttgctgctcccccaagacgcgggcggccccacctcgcttggcggtggcgcggggggccccctgctagcggaaaggaaccgtcggactctggccttccgaggcggcggcggcgggggtctcggcaacaatggcagtagccgcggccgccccgagacctcggtgtggcccttgaggcatttcaatgggcgagggccggcgactgtggatctggagctggacgcgctggaggggaaggagttgatgcaggacggcgcgtccctgagcgacagcaccgaggacgaggaggagggggcgagcctgggcgacggcagcggggcggaaggcggcagctgcagcagcagcaggcggtcgggcggcgatggcggggacgaagtggagggcagcggtgtgggagctggcgaaggagagactgtccagcacttcccgctcgcgcggcccaagtctctaatgcagaagctccaatgctccttccagacctcctggctcaaggactttccctggctgcgctattccaaggatactggtcttatgtcttgcggctggtgccaaaagacccctgcagatgggggaagcgtggaccttcccccagtggggcatgatgagctttcgcgagggacccgcaactacaagaaaaccctcctcctgaggcaccacgtctctaccgagcacaaactccacgaagccaacgcccaggagtcagaaataccatcagaggaggggtactgtgactttaatagtaggccaaatgagaactcttattgctatcaacttctgcgacaactaaatgaacagagaaagaaaggtattctttgtgatgtcagcattgtggtaagcggaaaaatcttcaaagctcataagaacatcctggttgcaggcagccgtttctttaagactttatattgcttttcaaacaaagaaagccctaaccaaaacaatactacccacttagatattgctgcagttcaaggtttttcagtcatcttggacttcttgtattctggtaacctggtgctcacaagccaaaatgccattgaagttatgaccgtggccagctatcttcaaatgagtgaagttgttcaaacttgccgaaatttcattaaagatgccttaaatataagcattaaatcagaagctccagagtctgtagttgtggactataataatagaaaaccagttaatagagatggtctgtcttcatcacgggatcaaaaaattgccagtttttgggcaacacggaatcttaccaatttggcaagtaatgtaaagattgaaaatgatggttgtaatgtcgacgagggccaaatagaaaactaccaaatgaatgacagtagttgggtccaggatggatctcctgaaatggctgaaaatgaatctgaaggtcaaacaaaagtgtttatttggaataatatgggctcccagggaattcaagagactggcaaaacaaggaggaaaaaccaaactacaaaaagatttatttataatattccacctaataatgaaacgaatttagaagattgctcagtaatgcagccacctgttgcctatccagaagaaaatacactactcatcaaggaagaaccagatttagatggtgctctactctcggggccagatggtgataggaatgtgaatgcaaatttattggctgaagctggcactagtcaagatggaggtgatgctggtacttcacatgatttcaagtatggtttgatgcctggtgcttcaaatgatttcaagtatggattattgccagaatcttggccaaaacaagaaacctgggaaaatggtgaatcatctctaatcatgaacaagttaaaatgccctcattgtagctatgtagccaaatacagacgaacactaaaaaggcacttgctcattcacacaggagtgagatcatttagctgtgatatttgtggaaaactgtttactcgaagagaacatgtaaaaagacattccctggtgcataaaaaggataaaaaatacaaatgtatggtgtgtaagaagatcttcatgttagcagccagtgttggaataagacatggatctcgacgttatggtgtttgtgtagactgtgcagataaatcacagccaggagggcaagaaggtgtagatcagggacaggatacagaattccctcgggatgaagaatacgaggagaatgaagtaggagaagctgatgaagagctagttgatgatggagaagatcagaatgatccctctcgatgggatgaatcaggagaagtttgtatgtctctagatgattagtaatgaactagtccgtaacttgaaagtatttcgatttcttggctttatatatcttgtggaaaggacgacttatatcctaggctccgaccgct

SEQ ID NO: 2580 - DNA, 2513 bp, Homo sapiens
  source 1..2513: mol_type = genomic DNA
accgccaccatggactttccccagcacagccagcatgtcttggaacagctgaaccagcagcggcagctggggcttctctgtgactgcacctttgtggtggacggtgttcactttaaggctcataaagcagtgctggcggcctgcagcgagtacttcaagatgctcttcgtggaccagaaggacgtggtgcacctggacatcagtaacgcggcaggcctggggcaggtgctggagtttatgtacacggccaagctgagcctgagccctgagaacgtggatgatgtgctggccgtggccactttcctccaaatgcaggacatcatcacggcctgccatgccctcaagtcacttgctgagccggctaccagccctgggggaaatgcggaggccttggccacagaaggaggggacaagagagccaaagaggagaaggtggccaccagcacgctgagcaggctggagcaggcaggacgcagcacacccataggccccagcagggacctcaaggaggagcgcggcggtcaggcccagagtgcggccagcggtgcagagcagacagagaaagccgatgcgccccgggagccgccgcctgtggagctcaagccagaccccacgagtggcatggctgctgcagaagctgaggccgctttgtccgagagctcggagcaagaaatggaggtggagcccgcccggaaaggggaagaggagcaaaaggagcaagaggagcaagaggaggagggcgcagggccagctgaggtcaaggaggagggttcccagctggagaacggagaggcccccgaggagaacgagaatgaggagtcagcgggcacagactcggggcaggagctcggctccgaggcccggggcctgcgctcaggcacctacggcgaccgcacggagtccaaggcctacggctccgtcatccacaagtgcgaggactgtgggaaggagttcacgcacacggggaacttcaagcggcacatccgcatccacacgggggagaagcccttctcgtgccgggagtgcagcaaggccttttccgacccggccgcgtgcaaggcccatgagaagacgcacagccctctgaagccctacggctgcgaggagtgcgggaagagctaccgcctcatcagcctgctgaacctgcacaagaagcggcactcgggcgaggcgcgctaccgctgcgaggactgcggcaagctcttcaccacctcgggcaacctcaagcgccaccagctggtgcacagcggcgagaagccctaccagtgcgactactgcggccgctccttctccgaccccacttccaagatgcgccacctggagacccacgacacggacaaggagcacaagtgcccacactgcgacaagaagttcaaccaggtagggaacctgaaggcccacctgaagatccacatcgctgacgggcccctcaagtgccgagagtgtgggaagcagttcaccacctcagggaacctgaagcggcaccttcggatccacagcggggagaagccctacgtgtgcatccactgccagcgacagtttgcagaccccggcgctctgcagcggcacgtccgcattcacacaggtgagaagccatgccagtgtgtgatgtgcggtaaggccttcacccaggccagctccctcatcgcccacgtgcgccagcacaccggggagaagccctacgtctgcgagcgctgcggcaagagattcgtccagtccagccagttggccaatcatattcgccaccacgacaacatccgcccacacaagtgcagcgtgtgcagcaaggccttcgtgaacgtgggggacctgtccaagcacatcatcattcacactggagagaagccttacctgtgtgataagtgtgggcgtggcttcaaccgggtagacaacctgcgctcccacgtgaagaccgtgcaccagggcaaggcaggcatcaagatcctggagcccgaggagggcagtgaggtcagcgtggtcactgtggatgacatggtcacgctggctaccgaggcactggcagcgacagccgtcactcagctcacagtggtgccggtgggagctgcagtgacagccgatgagacggaagtcctgaaggccgagatcagcaaagctgtgaagcaagtgcaggaagaagaccccaacactcacatcctctacgcctgtgactcctgtggggacaagtttctggatgccaacagcctggctcagcatgtgcgaatccacacagcccaggcactggtcatgttccagacagacgcggacttctatcagcagtatgggccaggtggcacgtggcctgccgggcaggtgctgcaggctggggagctggtcttccgccctcgcgacggggctgagggccagcccgcactggcagagacctcccctacagctcctgaatgtcccccgcctgccgagtagtaatgaactagtccgtaacttgaaagtatttcgatttcttggctttatatatcttgtggaaaggacgatcctatctgatccgaacgcactaa

SEQ ID NO: 2581 - DNA, 2267 bp, Homo sapiens
  source 1..2267: mol_type = genomic DNA
accgccaccatgatgtgctggccgtggccactttcctccaaatgcaggacatcatcacggcctgccatgccctcaagtcacttgctgagccggctaccagccctgggggaaatgcggaggccttggccacagaaggtctgccctgttccatctccaggaggggacaagagagccaaagaggagaaggtggccaccagcacgctgagcaggctggagcaggcaggacgcagcacacccataggccccagcagggacctcaaggaggagcgcggcggtcaggcccagagtgcggccagcggtgcagagcagacagagaaagccgatgcgccccgggagccgccgcctgtggagctcaagccagaccccacgagtggcatggctgctgcagaagctgaggccgctttgtccgagagctcggagcaagaaatggaggtggagcccgcccggaaaggggaagaggagcaaaaggagcaagaggagcaagaggaggagggcgcagggccagctgaggtcaaggaggagggttcccagctggagaacggagaggcccccgaggagaacgagaatgaggagtcagcgggcacagactcggggcaggagctcggctccgaggcccggggcctgcgctcaggcacctacggcgaccgcacggagtccaaggcctacggctccgtcatccacaagtgcgaggactgtgggaaggagttcacgcacacggggaacttcaagcggcacatccgcatccacacgggggagaagcccttctcgtgccgggagtgcagcaaggccttttccgacccggccgcgtgcaaggcccatgagaagacgcacagccctctgaagccctacggctgcgaggagtgcgggaagagctaccgcctcatcagcctgctgaacctgcacaagaagcggcactcgggcgaggcgcgctaccgctgcgaggactgcggcaagctcttcaccacctcgggcaacctcaagcgccaccagctggtgcacagcggcgagaagccctaccagtgcgactactgcggccgctccttctccgaccccacttccaagatgcgccacctggagacccacgacacggacaaggagcacaagtgcccacactgcgacaagaagttcaaccaggtagggaacctgaaggcccacctgaagatccacatcgctgacgggcccctcaagtgccgagagtgtgggaagcagttcaccacctcagggaacctgaagcggcaccttcggatccacagcggggagaagccctacgtgtgcatccactgccagcgacagtttgcagaccccggcgctctgcagcggcacgtccgcattcacacaggtgagaagccatgccagtgtgtgatgtgcggtaaggccttcacccaggccagctccctcatcgcccacgtgcgccagcacaccggggagaagccctacgtctgcgagcgctgcggcaagagattcgtccagtccagccagttggccaatcatattcgccaccacgacaacatccgcccacacaagtgcagcgtgtgcagcaaggccttcgtgaacgtgggggacctgtccaagcacatcatcattcacactggagagaagccttacctgtgtgataagtgtgggcgtggcttcaaccgggtagacaacctgcgctcccacgtgaagaccgtgcaccagggcaaggcaggcatcaagatcctggagcccgaggagggcagtgaggtcagcgtggtcactgtggatgacatggtcacgctggctaccgaggcactggcagcgacagccgtcactcagctcacagtggtgccggtgggagctgcagtgacagccgatgagacggaagtcctgaaggccgagatcagcaaagctgtgaagcaagtgcaggaagaagaccccaacactcacatcctctacgcctgtgactcctgtggggacaagtttctggatgccaacagcctggctcagcatgtgcgaatccacacagcccaggcactggtcatgttccagacagacgcggacttctatcagcagtatgggccaggtggcacgtggcctgccgggcaggtgctgcaggctggggagctggtcttccgccctcgcgacggggctgagggccagcccgcactggcagagacctcccctacagctcctgaatgtcccccgcctgccgagtagtaatgaactagtccgtaacttgaaagtatttcgatttcttggctttatatatcttgtggaaaggacgacacattatttgctactaacatgaa

SEQ ID NO: 2582 - DNA, 2534 bp, Homo sapiens
  source 1..2534: mol_type = genomic DNA
accgccaccatggactttccccagcacagccagcatgtcttggaacagctgaaccagcagcggcagctggggcttctctgtgactgcacctttgtggtggacggtgttcactttaaggctcataaagcagtgctggcggcctgcagcgagtacttcaagatgctcttcgtggaccagaaggacgtggtgcacctggacatcagtaacgcggcaggcctggggcaggtgctggagtttatgtacacggccaagctgagcctgagccctgagaacgtggatgatgtgctggccgtggccactttcctccaaatgcaggacatcatcacggcctgccatgccctcaagtcacttgctgagccggctaccagccctgggggaaatgcggaggccttggccacagaaggaggggacaagagagccaaagaggagaaggtggccaccagcacgctgagcaggctggagcaggcaggacgcagcacacccataggccccagcagggacctcaaggaggagcgcggcggtcaggcccagagtgcggccagcggtgcagagcagacagagaaagccgatgcgccccgggagccgccgcctgtggagctcaagccagaccccacgagtggcatggctgctgcagaagctgaggccgctttgtccgagagctcggagcaagaaatggaggtggagcccgcccggaaaggggaagaggagcaaaaggagcaagaggagcaagaggaggagggcgcagggccagctgaggtcaaggaggagggttcccagctggagaacggagaggcccccgaggagaacgagaatgaggagtcagcgggcacagactcggggcaggagctcggctccgaggcccggggcctgcgctcaggcacctacggcgaccgcacggagtccaaggcctacggctccgtcatccacaagtgcgaggactgtgggaaggagttcacgcacacggggaacttcaagcggcacatccgcatccacacgggggagaagcccttctcgtgccgggagtgcagcaaggccttttccgacccggccgcgtgcaaggcccatgagaagacgcacagccctctgaagccctacggctgcgaggagtgcgggaagagctaccgcctcatcagcctgctgaacctgcacaagaagcggcactcgggcgaggcgcgctaccgctgcgaggactgcggcaagctcttcaccacctcgggcaacctcaagcgccaccagctggtgcacagcggcgagaagccctaccagtgcgactactgcggccgctccttctccgaccccacttccaagatgcgccacctggagacccacgacacggacaaggagcacaagtgcccacactgcgacaagaagttcaaccaggtagggaacctgaaggcccacctgaagatccacatcgctgacgggcccctcaagtgccgagagtgtgggaagcagttcaccacctcagggaacctgaagcggcaccttcggatccacagcggggagaagccctacgtgtgcatccactgccagcgacagtttgcagaccccggcgctctgcagcggcacgtccgcattcacacaggtgagaagccatgccagtgtgtgatgtgcggtaaggccttcacccaggccagctccctcatcgcccacgtgcgccagcacaccggggagaagccctacgtctgcgagcgctgcggcaagagattcgtccagtccagccagttggccaatcatattcgccaccacgacaacatccgcccacacaagtgcagcgtgtgcagcaaggccttcgtgaacgtgggggacctgtccaagcacatcatcattcacactggagagaagccttacctgtgtgataagtgtgggcgtggcttcaaccgggtagacaacctgcgctcccacgtgaagaccgtgcaccagggcaaggcaggcatcaagatcctggagcccgaggagggcagtgaggtcagcgtggtcactgtggatgacatggtcacgctggctaccgaggcactggcagcgacagccgtcactcagctcacaggccctgcgactctgcccgcagtggtgccggtgggagctgcagtgacagccgatgagacggaagtcctgaaggccgagatcagcaaagctgtgaagcaagtgcaggaagaagaccccaacactcacatcctctacgcctgtgactcctgtggggacaagtttctggatgccaacagcctggctcagcatgtgcgaatccacacagcccaggcactggtcatgttccagacagacgcggacttctatcagcagtatgggccaggtggcacgtggcctgccgggcaggtgctgcaggctggggagctggtcttccgccctcgcgacggggctgagggccagcccgcactggcagagacctcccctacagctcctgaatgtcccccgcctgccgagtagtaatgaactagtccgtaacttgaaagtatttcgatttcttggctttatatatcttgtggaaaggacgaccttgggcggcgcacgacggtcac

SEQ ID NO: 2583 - DNA, 2123 bp, Homo sapiens
  source 1..2123: mol_type = genomic DNA
accgccaccatggatctgacaaaaatgggcatgatccagctgcagaaccctagccaccccacggggctactgtgcaaggccaaccagatgcggctggccgggactttgtgcgatgtggtcatcatggtggacagccaggagttccacgcccaccggacggtgctggcctgcaccagcaagatgtttgagatcctcttccaccgcaatagtcaacactatactttggacttcctctcgccaaagaccttccagcagattctggagtatgcatatacagccacgctgcaagccaaggcggaggacctggatgacctgctgtatgcggccgagatcctggagatcgagtacctggaggaacagtgcctgaagatgctggagaccatccaggcctcagacgacaatgacacggaggccaccatggccgatggcggggccgaggaagaagaggaccgcaaggctcggtacctcaagaacatcttcatctcgaagcattccagcgaggagagtgggtatgccagtgtggctggacagagcctccctgggcccatggtggaccagagcccttcagtctccacttcatttggtctttcagccatgagtcccaccaaggctgcagtggacagtttgatgaccataggacagtctctcctgcagggaactcttcagccacctgcagggcccgaggagccaactctggctgggggtgggcggcaccctggggtggctgaggtgaagacggagatgatgcaggtggatgaggtgcccagccaggacagccctggggcagccgagtccagcatctcaggagggatgggggacaaggttgaggaaagaggcaaagaggggcctgggaccccgactcgaagcagcgtcatcaccagtgctagggagctacactatgggcgagaggagagtgccgagcaggtgccacccccagctgaggctggccaggcccccactggccgacctgagcacccagcacccccgcctgagaagcatctgggcatctactccgtgttgcccaaccacaaggctgacgctgtattgagcatgccgtcttccgtgacctctggcctccacgtgcagcctgccctggctgtctccatggacttcagcacctatggggggctgctgccccagggcttcatccagagggagctgttcagcaagctgggggagctggctgtgggcatgaagtcagagagccggaccatcggagagcagtgcagcgtgtgtggggtcgagcttcctgataacgaggctgtggagcagcacaggaagctgcacagtgggatgaagacgtacgggtgcgagctctgcgggaagcggttcctggatagtttgcggctgagaatgcacttactggctcattcagcgggtgccaaagcctttgtctgtgatcagtgcggtgcacagttttcgaaggaggatgccctggagacacacaggcagacccatactggcactgacatggccgtcttctgtctgctgtgtgggaagcgcttccaggcgcagagcgcactgcagcagcacatggaggtccacgcgggcgtgcgcagctacatctgcagtgagtgcaaccgcaccttccccagccacacggctctcaaacgccacctgcgctcacatacaggcgaccacccctacgagtgtgagttctgtggcagctgcttccgggatgagagcacactcaagagccacaaacgcatccacacgggtgagaaaccctacgagtgcaatggctgtggcaagaagttcagcctcaagcatcagctggagacgcactatagggtgcacacaggtgagaagccctttgagtgtaagctctgccaccagcgctcccgggactactcggccatgatcaagcacctgagaacgcacaacggcgcctcgccctaccagtgcaccatctgcacagagtactgccccagcctctcctccatgcagaagcacatgaagggccacaagcccgaggagatcccgcccgactggaggatagagaagacgtacctctacctgtgctatgtgtagtaatgaactagtccgtaacttgaaagtatttcgatttcttggctttatatatcttgtggaaaggacgatgggtcgctccttaactccagatc

SEQ ID NO: 2584 - DNA, 1670 bp, Homo sapiens
  source 1..1670: mol_type = genomic DNA
accgccaccatggagtttccagaccatagtagacatttgctacagtgtctgagcgagcagagacaccagggttttctttgtgactgcactgttctggtgggagatgcccagttccgagcgcaccgagctgtactggcttcatgcagcatgtatttccacctcttttacaaggaccagctggacaaaagagacattgttcatctgaacagcgacattgttacagcccccgctttcgctctcctgcttgaattcatgtatgaagggaaactccagttcaaagacttgcccattgaagacgtgctagcagctgccagttatctccacatgtatgacattgtcaaagtctgcaaaaagaagctgaaagagaaagccaccacggaggcagacagcaccaaaaaggaagaagatgcttcaagttgttcggacaaagtcgagagtctctccgatggcagcagccacatagcaggcgatttgcccagtgatgaagatgaaggagaagatgaaaaattgaacatcctgcccagcaaaagggacttggcggccgagcctgggaacatgtggatgcgattgccctcagactcagcaggcatcccccaggctggcggagaggcagagccacacgccacagcagctggaaaaacagtagccagcccctgcagctcaacagagtctttgtcccagaggtctgtcacctccgtgagggattcggcagatgttgactgtgtgctggacctgtctgtcaagtccagcctttcaggagttgaaaatctgaacagctcttatttctcttcacaggacgtgctgagaagcaacctggtgcaggtgaaggtggagaaagaggcttcctgtgatgagagtgatgttggcactaatgactatgacatggaacatagcactgtgaaagaaagtgtgagcactaataacagggtacagtatgagccggcccatctggctcccctgagggaggactcggtcttgagggagctggaccgggaggacaaagccagtgatgatgagatgatgaccccagagagcgagcgtgtccaggtggagggaggcatggagagcagtctgctcccctacgtctccaacatcctgagccccgcgggccagatcttcatgtgccccctgtgcaacaaggtcttccccagcccccacatcctgcagatccacctgagcacgcacttccgcgagcaggacggcatccgcagcaagcccgccgccgatgtcaacgtgcccacgtgctcgctgtgtgggaagactttctcttgcatgtacaccctcaagcgccacgagaggactcactcgggggagaagccctacacatgcacccagtgcggcaagagcttccagtactcgcacaacctgagccgccatgccgtggtgcacacccgcgagaagccgcacgcctgcaagtggtgcgagcgcaggttcacgcagtccggggacctgtacagacacattcgcaagttccactgtgagttggtgaactccttgtcggtcaaaagcgaagcactgagcttgcctactgtcagagactggaccttagaagatagctctcaagaactttggaaatagtaatgaactagtccgtaacttgaaagtatttcgatttcttggctttatatatcttgtggaaaggacgaaaacgcgttgatgccaggcggaca

SEQ ID NO: 2585 - DNA, 1697 bp, Homo sapiens
  source 1..1697: mol_type = genomic DNA
accgccaccatgtgtcctaaaggttatgaagacagtatggagtttccagaccatagtagacatttgctacagtgtctgagcgagcagagacaccagggttttctttgtgactgcactgttctggtgggagatgcccagttccgagcgcaccgagctgtactggcttcatgcagcatgtatttccacctcttttacaaggaccagctggacaaaagagacattgttcatctgaacagcgacattgttacagcccccgctttcgctctcctgcttgaattcatgtatgaagggaaactccagttcaaagacttgcccattgaagacgtgctagcagctgccagttatctccacatgtatgacattgtcaaagtctgcaaaaagaagctgaaagagaaagccaccacggaggcagacagcaccaaaaaggaagaagatgcttcaagttgttcggacaaagtcgagagtctctccgatggcagcagccacatagcaggcgatttgcccagtgatgaagatgaaggagaagatgaaaaattgaacatcctgcccagcaaaagggacttggcggccgagcctgggaacatgtggatgcgattgccctcagactcagcaggcatcccccaggctggcggagaggcagagccacacgccacagcagctggaaaaacagtagccagcccctgcagctcaacagagtctttgtcccagaggtctgtcacctccgtgagggattcggcagatgttgactgtgtgctggacctgtctgtcaagtccagcctttcaggagttgaaaatctgaacagctcttatttctcttcacaggacgtgctgagaagcaacctggtgcaggtgaaggtggagaaagaggcttcctgtgatgagagtgatgttggcactaatgactatgacatggaacatagcactgtgaaagaaagtgtgagcactaataacagggtacagtatgagccggcccatctggctcccctgagggaggactcggtcttgagggagctggaccgggaggacaaagccagtgatgatgagatgatgaccccagagagcgagcgtgtccaggtggagggaggcatggagagcagtctgctcccctacgtctccaacatcctgagccccgcgggccagatcttcatgtgccccctgtgcaacaaggtcttccccagcccccacatcctgcagatccacctgagcacgcacttccgcgagcaggacggcatccgcagcaagcccgccgccgatgtcaacgtgcccacgtgctcgctgtgtgggaagactttctcttgcatgtacaccctcaagcgccacgagaggactcactcgggggagaagccctacacatgcacccagtgcggcaagagcttccagtactcgcacaacctgagccgccatgccgtggtgcacacccgcgagaagccgcacgcctgcaagtggtgcgagcgcaggttcacgcagtccggggacctgtacagacacattcgcaagttccactgtgagttggtgaactccttgtcggtcaaaagcgaagcactgagcttgcctactgtcagagactggaccttagaagatagctctcaagaactttggaaatagtaatgaactagtccgtaacttgaaagtatttcgatttcttggctttatatatcttgtggaaaggacgaaataaacatgtttaactcttcggc

SEQ ID NO: 2586 - DNA, 647 bp, Homo sapiens
  source 1..647: mol_type = genomic DNA
accgccaccatgatggacaacagaggcaactctagtctacctgacaaacttcctatcttccctgattctgcccgcttgccactgaccaggtccttctatctggagcccatggtcactttccacgtgcacccagaggccccggtgtcatccccttactctgaggagctgccacggctgccttttcccagcgactctcttatcctgggaaattacagtgaaccctgccccttctctttcccgatgccttatccaaattacagagggtgcgagtactcctacgggccagccttcacccggaaaaggaatgagcgggaaaggcagcgggtgaaatgtgtcaatgaaggctacgcccagctccgccatcatctgccagaggagtatttggagaagcgactcagcaaagtggaaaccctcagagctgcgatcaagtacattaactacctgcagtctcttctgtaccctgataaagctgagaccaagaataaccctggaaaagtttcctccatgatagcaaccaccagccaccatgctgaccctatgttcagaattgtttagtaatgaactagtccgtaacttgaaagtatttcgatttcttggctttatatatcttgtggaaaggacgatcacagaagtcacggaggtcaggt

SEQ ID NO: 2587 - DNA, 812 bp, Homo sapiens
  source 1..812: mol_type = genomic DNA
accgccaccatggaaagctctgccaagatggagagcggcggcgccggccagcagccccagccgcagccccagcagcccttcctgccgcccgcagcctgtttctttgccacggccgcagccgcggcggccgcagccgccgcagcggcagcgcagagcgcgcagcagcagcagcagcagcagcagcagcagcagcaggcgccgcagctgagaccggcggccgacggccagccctcagggggcggtcacaagtcagcgcccaagcaagtcaagcgacagcgctcgtcttcgcccgaactgatgcgctgcaaacgccggctcaacttcagcggctttggctacagcctgccgcagcagcagccggccgccgtggcgcgccgcaacgagcgcgagcgcaaccgcgtcaagttggtcaacctgggctttgccacccttcgggagcacgtccccaacggcgcggccaacaagaagatgagtaaggtggagacactgcgctcggcggtcgagtacatccgcgcgctgcagcagctgctggacgagcatgacgcggtgagcgccgccttccaggcaggcgtcctgtcgcccaccatctcccccaactactccaacgacttgaactccatggccggctcgccggtctcatcctactcgtcggacgagggctcttacgacccgctcagccccgaggagcaggagcttctcgacttcaccaactggttctagtaatgaactagtccgtaacttgaaagtatttcgatttcttggctttatatatcttgtggaaaggacgaaagtaattatccaacaatcatggt

SEQ ID NO: 2588 - DNA, 623 bp, Homo sapiens
  source 1..623: mol_type = genomic DNA
accgccaccatgatggagacgcgtaaaccggcggaacggctggccttgccatactcgctgcgcaccgcgcccctgggcgttccggggaccctgcccggactcccgcggagggaccccctcagggtcgccctgcgtctggacgccgcgtgctgggagtgggcgcgcagcggctgcgcacggggatggcagtacttgcccgtgccgctggacagcgccttcgagcccgccttcctccgcaagcgcaacgagcgcgagcggcagcgggtgcgctgcgtgaacgagggctatgcgcgcctccgagaccacctgccccgggagctggcagacaagcgcctcagcaaagtggagacgctccgcgctgccatcgactacatcaagcacctgcaggagctgctggagcgccaggcctgggggctcgagggcgcggccggcgccgtcccccagcgcagggcggaatgcaacagcgacggggagtccaaggcctcttcggcgccttcgcccagcagcgagcccgaggaggggggcagctagtaatgaactagtccgtaacttgaaagtatttcgatttcttggctttatatatcttgtggaaaggacgagttgtacaatgcgtgccgggaagg

SEQ ID NO: 2589 - DNA, 722 bp, Homo sapiens
  source 1..722: mol_type = genomic DNA
accgccaccatgaacaataacttctgccgggctctggtggaccggaggcctctggggccccccagctgcatgcagctgggcgtcatgccccctccccggcaggcgcccctgccccccgccgagcccctgggcaacgtgcccttcctgctgtacccgggcccagcagagccgccctactacgacgcctatgcgggggtgttcccctacgtgcccttccccggcgccttcggggtctacgaataccccttcgagccagccttcatccagaagcgcaacgagcgcgagaggcagcgagtcaagtgcgtcaacgagggctacgctcgcctccgcggccacctccccggcgccctggctgagaagcgactcagcaaggtggagacgctgcgcgccgccatccgctacataaagtacctgcaagagctgctgagctcggcccccgacggctcgacgccccccgcttcccgcggcctcccgggcaccgggccctgccccgcgccgcccgccaccccccgtcccgaccgccctggcgacggcgaggcccgggcgccctcctccctggtgccggagtcatccgagtcctcctgcttctccccgtcgcctttcttggagtcggaggaatcctggcattagtaatgaactagtccgtaacttgaaagtatttcgatttcttggctttatatatcttgtggaaaggacgacattagatgttgactgatccgcgc

SEQ ID NO: 2590 - DNA, 1859 bp, Homo sapiens
  source 1..1859: mol_type = genomic DNA
accgccaccatggagcctgcacccgcccgatctccgaggccccagcaggaccccgcccggccccaggagcccaccatgcctccccccgagaccccctctgaaggccgccagcccagccccagccccagccctacagagcgagcccccgcttcggaggaggagttccagtttctgcgctgccagcaatgccaggcggaagccaagtgcccgaagctgctgccttgtctgcacacgctgtgctcaggatgcctggaggcgtcgggcatgcagtgccccatctgccaggcgccctggcccctaggtgcagacacacccgccctggataacgtctttttcgagagtctgcagcggcgcctgtcggtgtaccggcagattgtggatgcgcaggctgtgtgcacccgctgcaaagagtcggccgacttctggtgctttgagtgcgagcagctcctctgcgccaagtgcttcgaggcacaccagtggttcctcaagcacgaggcccggcccctagcagagctgcgcaaccagtcggtgcgtgagttcctggacggcacccgcaagaccaacaacatcttctgctccaaccccaaccaccgcacccctacgctgaccagcatctactgccgaggatgttccaagccgctgtgctgctcgtgcgcgctccttgacagcagccacagtgagctcaagtgcgacatcagcgcagagatccagcagcgacaggaggagctggacgccatgacgcaggcgctgcaggagcaggatagtgcctttggcgcggttcacgcgcagatgcacgcggccgtcggccagctgggccgcgcgcgtgccgagaccgaggagctgatccgcgagcgcgtgcgccaggtggtagctcacgtgcgggctcaggagcgcgagctgctggaggctgtggacgcgcggtaccagcgcgactacgaggagatggccagtcggctgggccgcctggatgctgtgctgcagcgcatccgcacgggcagcgcgctggtgcagaggatgaagtgctacgcctcggaccaggaggtgctggacatgcacggtttcctgcgccaggcgctctgccgcctgcgccaggaggagccccagagcctgcaagctgccgtgcgcaccgatggcttcgacgagttcaaggtgcgcctgcaggacctcagctcttgcatcacccaggggaaagatgcagctgtatccaagaaagccagcccagaggctgccagcactcccagggaccctattgacgttgacctggatgtctccaatacaacgacagcccagaagaggaagtgcagccagacccagtgccccaggaaggtcatcaagatggagtctgaggaggggaaggaggcaaggttggctcggagctccccggagcagcccaggcccagcacctccaaggcagtctcaccaccccacctggatggaccgcctagccccaggagccccgtcataggaagtgaggtcttcctgcccaacagcaaccacgtggccagtggcgccggggaggcagaggaacgcgttgtggtgatcagcagctcggaagactcagatgccgaaaactcgtcctcccgagagctggatgacagcagcagtgagtccagtgacctccagctggaaggccccagcaccctcagggtcctggacgagaaccttgctgacccccaagcagaagacagacctctggttttctttgacctcaagattgacaatgaaagtgggttctcctggggctacccccacccctttctaatttagtaatgaactagtccgtaacttgaaagtatttcgatttcttggctttatatatcttgtggaaaggacgaggaagcattctgtaacaagtgctt

SEQ ID NO: 2591 - DNA, 2750 bp, Homo sapiens
  source 1..2750: mol_type = genomic DNA
accgccaccatggagcctgcacccgcccgatctccgaggccccagcaggaccccgcccggccccaggagcccaccatgcctccccccgagaccccctctgaaggccgccagcccagccccagccccagccctacagagcgagcccccgcttcggaggaggagttccagtttctgcgctgccagcaatgccaggcggaagccaagtgcccgaagctgctgccttgtctgcacacgctgtgctcaggatgcctggaggcgtcgggcatgcagtgccccatctgccaggcgccctggcccctaggtgcagacacacccgccctggataacgtctttttcgagagtctgcagcggcgcctgtcggtgtaccggcagattgtggatgcgcaggctgtgtgcacccgctgcaaagagtcggccgacttctggtgctttgagtgcgagcagctcctctgcgccaagtgcttcgaggcacaccagtggttcctcaagcacgaggcccggcccctagcagagctgcgcaaccagtcggtgcgtgagttcctggacggcacccgcaagaccaacaacatcttctgctccaaccccaaccaccgcacccctacgctgaccagcatctactgccgaggatgttccaagccgctgtgctgctcgtgcgcgctccttgacagcagccacagtgagctcaagtgcgacatcagcgcagagatccagcagcgacaggaggagctggacgccatgacgcaggcgctgcaggagcaggatagtgcctttggcgcggttcacgcgcagatgcacgcggccgtcggccagctgggccgcgcgcgtgccgagaccgaggagctgatccgcgagcgcgtgcgccaggtggtagctcacgtgcgggctcaggagcgcgagctgctggaggctgtggacgcgcggtaccagcgcgactacgaggagatggccagtcggctgggccgcctggatgctgtgctgcagcgcatccgcacgggcagcgcgctggtgcagaggatgaagtgctacgcctcggaccaggaggtgctggacatgcacggtttcctgcgccaggcgctctgccgcctgcgccaggaggagccccagagcctgcaagctgccgtgcgcaccgatggcttcgacgagttcaaggtgcgcctgcaggacctcagctcttgcatcacccaggggaaagatgcagctgtatccaagaaagccagcccagaggctgccagcactcccagggaccctattgacgttgacctgcccgaggaggcagagagagtgaaggcccaggttcaggccctggggctggctgaagcccagcctatggctgtggtacagtcagtgcccggggcacaccccgtgccagtgtacgccttctccatcaaaggcccttcctatggagaggatgtctccaatacaacgacagcccagaagaggaagtgcagccagacccagtgccccaggaaggtcatcaagatggagtctgaggaggggaaggaggcaaggttggctcggagctccccggagcagcccaggcccagcacctccaaggcagtctcaccaccccacctggatggaccgcctagccccaggagccccgtcataggaagtgaggtcttcctgcccaacagcaaccacgtggccagtggcgccggggaggcagaggaacgcgttgtggtgatcagcagctcggaagactcagatgccgaaaactcgtcctcccgagagctggatgacagcagcagtgagtccagtgacctccagctggaaggccccagcaccctcagggtcctggacgagaaccttgctgacccccaagcagaagacagacctctggttttctttgacctcaagattgacaatgaaacccagaagattagccagctggctgcggtgaaccgggaaagcaagttccgcgtggtcatccagcctgaagccttcttcagcatctactccaaggccgtgtccctggaggtggggctgcagcacttcctcagctttctgagctccatgcgccgccctatcttggcctgctacaagctgtgggggcctggcctcccaaacttcttccgggccctggaggacattaacaggctgtgggaattccaggaggccatctcgggcttcctggctgccctgcctctcatccgggagcgtgtgcccggggccagcagcttcaaactcaagaacctggcccagacctacctggcgagaaacatgagcgagcgcagcgccatggctgccgtgctggccatgcgtgacctgtgccgcctcctcgaggtctccccgggcccccagctggcccagcatgtctaccccttcagtagcctgcagtgctttgcctccctgcagcccctggtgcaggcagctgtgctgccccgggctgaggcccgcctcctggccctacacaacgtgagcttcatggagctgctgagtgcacaccgccgtgaccggcaggggggcctgaagaagtacagccgctatctaagcctgcagaccaccacgttgccccctgcccagcctgctttcaacctgcaggctctgggcacctactttgaaggcctgttggagggtccggcgctggcacgggcagaaggagtctccaccccacttgctggccgtggcttggcagagagggcctcccagcagagctagtaatgaactagtccgtaacttgaaagtatttcgatttcttggctttatatatcttgtggaaaggacgacctggagataggttaagcacgtta

SEQ ID NO: 2592 - DNA, 1784 bp, Homo sapiens
  source 1..1784: mol_type = genomic DNA
accgccaccatggagcctgcacccgcccgatctccgaggccccagcaggaccccgcccggccccaggagcccaccatgcctccccccgagaccccctctgaaggccgccagcccagccccagccccagccctacagagcgagcccccgcttcggaggaggagttccagtttctgcgctgccagcaatgccaggcggaagccaagtgcccgaagctgctgccttgtctgcacacgctgtgctcaggatgcctggaggcgtcgggcatgcagtgccccatctgccaggcgccctggcccctaggtgcagacacacccgccctggataacgtctttttcgagagtctgcagcggcgcctgtcggtgtaccggcagattgtggatgcgcaggctgtgtgcacccgctgcaaagagtcggccgacttctggtgctttgagtgcgagcagctcctctgcgccaagtgcttcgaggcacaccagtggttcctcaagcacgaggcccggcccctagcagagctgcgcaaccagtcggtgcgtgagttcctggacggcacccgcaagaccaacaacatcttctgctccaaccccaaccaccgcacccctacgctgaccagcatctactgccgaggatgttccaagccgctgtgctgctcgtgcgcgctccttgacagcagccacagtgagctcaagtgcgacatcagcgcagagatccagcagcgacaggaggagctggacgccatgacgcaggcgctgcaggagcaggatagtgcctttggcgcggttcacgcgcagatgcacgcggccgtcggccagctgggccgcgcgcgtgccgagaccgaggagctgatccgcgagcgcgtgcgccaggtggtagctcacgtgcgggctcaggagcgcgagctgctggaggctgtggacgcgcggtaccagcgcgactacgaggagatggccagtcggctgggccgcctggatgctgtgctgcagcgcatccgcacgggcagcgcgctggtgcagaggatgaagtgctacgcctcggaccaggaggtgctggacatgcacggtttcctgcgccaggcgctctgccgcctgcgccaggaggagccccagagcctgcaagctgccgtgcgcaccgatggcttcgacgagttcaaggtgcgcctgcaggacctcagctcttgcatcacccaggggaaagatgcagctgtatccaagaaagccagcccagaggctgccagcactcccagggaccctattgacgttgacctgcccgaggaggcagagagagtgaaggcccaggttcaggccctggggctggctgaagcccagcctatggctgtggtacagtcagtgcccggggcacaccccgtgccagtgtacgccttctccatcaaaggcccttcctatggagaggatgtctccaatacaacgacagcccagaagaggaagtgcagccagacccagtgccccaggaaggtcatcaagatggagtctgaggaggggaaggaggcaaggttggctcggagctccccggagcagcccaggcccagcacctccaaggcagtctcaccaccccacctggatggaccgcctagccccaggagccccgtcataggaagtgaggtcttcctgcccaacagcaaccacgtggccagtggcgccggggaggcaggtagggagaggaacgcgttgtggtagtaatgaactagtccgtaacttgaaagtatttcgatttcttggctttatatatcttgtggaaaggacgagccgtacagcgcagccggtccgct

SEQ ID NO: 2593 - DNA, 1937 bp, Homo sapiens
  source 1..1937: mol_type = genomic DNA
accgccaccatggagcctgcacccgcccgatctccgaggccccagcaggaccccgcccggccccaggagcccaccatgcctccccccgagaccccctctgaaggccgccagcccagccccagccccagccctacagagcgagcccccgcttcggaggaggagttccagtttctgcgctgccagcaatgccaggcggaagccaagtgcccgaagctgctgccttgtctgcacacgctgtgctcaggatgcctggaggcgtcgggcatgcagtgccccatctgccaggcgccctggcccctaggtgcagacacacccgccctggataacgtctttttcgagagtctgcagcggcgcctgtcggtgtaccggcagattgtggatgcgcaggctgtgtgcacccgctgcaaagagtcggccgacttctggtgctttgagtgcgagcagctcctctgcgccaagtgcttcgaggcacaccagtggttcctcaagcacgaggcccggcccctagcagagctgcgcaaccagtcggtgcgtgagttcctggacggcacccgcaagaccaacaacatcttctgctccaaccccaaccaccgcacccctacgctgaccagcatctactgccgaggatgttccaagccgctgtgctgctcgtgcgcgctccttgacagcagccacagtgagctcaagtgcgacatcagcgcagagatccagcagcgacaggaggagctggacgccatgacgcaggcgctgcaggagcaggatagtgcctttggcgcggttcacgcgcagatgcacgcggccgtcggccagctgggccgcgcgcgtgccgagaccgaggagctgatccgcgagcgcgtgcgccaggtggtagctcacgtgcgggctcaggagcgcgagctgctggaggctgtggacgcgcggtaccagcgcgactacgaggagatggccagtcggctgggccgcctggatgctgtgctgcagcgcatccgcacgggcagcgcgctggtgcagaggatgaagtgctacgcctcggaccaggaggtgctggacatgcacggtttcctgcgccaggcgctctgccgcctgcgccaggaggagccccagagcctgcaagctgccgtgcgcaccgatggcttcgacgagttcaaggtgcgcctgcaggacctcagctcttgcatcacccaggggaaagatgcagctgtatccaagaaagccagcccagaggctgccagcactcccagggaccctattgacgttgacctgcccgaggaggcagagagagtgaaggcccaggttcaggccctggggctggctgaagcccagcctatggctgtggtacagtcagtgcccggggcacaccccgtgccagtgtacgccttctccatcaaaggcccttcctatggagaggatgtctccaatacaacgacagcccagaagaggaagtgcagccagacccagtgccccaggaaggtcatcaagatggagtctgaggaggggaaggaggcaaggttggctcggagctccccggagcagcccaggcccagcacctccaaggcagtctcaccaccccacctggatggaccgcctagccccaggagccccgtcataggaagtgaggtcttcctgcccaacagcaaccacgtggccagtggcgccggggaggcagaggaacgcgttgtggtgatcagcagctcggaagactcagatgccgaaaactcggtgagtggcccagaagttcagcccaggactcctgcctccccccatttcaggtcccagggggcacagccacagcaggtgactctcagacttgccttgcgcctggggaattttccagtgaggcattagtaatgaactagtccgtaacttgaaagtatttcgatttcttggctttatatatcttgtggaaaggacgacactacaaacacaacgttagtagc

SEQ ID NO: 2594 - DNA, 2447 bp, Homo sapiens
  source 1..2447: mol_type = genomic DNA
accgccaccatggaaccggcgccagcgcgtagtccacgtccacagcaagatccagcccgcccgcaagaaccaacgatgccaccaccagaaaccccaagcgaaggccgccagccaagcccgagtccaagtccgacggaacgtgccccggcgagtgaagaggaattccagtttctgcgctgccagcagtgtcaagccgaagccaaatgcccgaaactgctgccatgtctgcatacgctgtgcagcggttgtctggaagccagtggtatgcagtgcccaatttgccaagccccgtggccactgggcgccgatacgccagccctcgacaacgtgtttttcgaaagtctgcagcgtcgtctgagcgtttaccgccagattgtggacgcccaagccgtttgcacccgttgcaaggaaagtgcggacttttggtgcttcgagtgcgaacagctgctgtgcgccaaatgctttgaagcgcaccagtggtttctgaaacacgaagcccgtccactggcggaactgcgcaaccagagcgttcgtgagtttctggatggcacccgcaagaccaacaatatcttttgcagtaacccgaatcaccgcacgccgacgctgaccagtatctactgccgcggctgcagcaaaccactgtgctgcagctgtgcgctgctggatagcagccacagcgaactgaagtgcgacatcagtgcggaaatccagcaacgccaagaagaactcgatgcgatgacccaagcgctgcaagaacaagatagtgcgtttggtgccgttcatgcccagatgcatgcggcggttggtcaactgggccgtgcccgcgccgaaaccgaagaactgatccgtgagcgcgtgcgccaagttgtggcccatgttcgcgcccaagaacgcgaactgctggaagcggttgatgcgcgctaccagcgtgattatgaagagatggccagccgtctgggtcgtctggatgcggtgctgcagcgcattcgcaccggtagcgcgctggtgcagcgcatgaaatgctatgcgagcgaccaagaagtgctggatatgcacggttttctgcgtcaagcgctgtgccgtctgcgccaagaggaaccacagagtctgcaagccgccgtgcgtaccgatggcttcgacgaattcaaggttcgtctgcaagatctgagcagctgcatcacccaaggcaaagatgccgcggtgagcaaaaaagcgagcccagaagccgccagtacccccagggaccctattgacgttgacctggatgtctccaatacaacgacagcccagaagaggaagtgcagccagacccagtgccccaggaaggtcatcaagatggagtctgaggaggggaaggaggcaaggttggctcggagctccccggagcagcccaggcccagcacctccaaggcagtctcaccaccccacctggatggaccgcctagccccaggagccccgtcataggaagtgaggtcttcctgcccaacagcaaccacgtggccagtggcgccggggaggcagaggaacgcgttgtggtgatcagcagctcggaagactcagatgccgaaaactcgtgcatggagcccatggagaccgccgagccacagtcctcgccagcccactcctcgccagcccactcctcgccagcccactcctcgccagtccagtctctgctgagagcacaaggagcctccagcctgccctgtggcacataccaccccccagcttggcctccccaccagcccgctgagcaggctgccacccccgatgctgagcctcacagcgagcctcctgatcaccaggagcgccctgccgtccaccgtgggatccgctacctgttgtacagagcacagagagccatccgccttcgccatgccctccgcttgcaccctcaattgcatcgggcccctattcggacttggtctccccatgtggtccaagccagcactcctgccatcacagggcccctcaaccatcctgccaatgcccaggaacatcctgcccagctgcaaaggggcatcagcccaccccaccggatacgaggggctgtgcgatcccgcagccgctccctccggggctcctcccatttatcccagtggctcaacaacttttttgccctccccttctcctccatggcttcccagcttgacatgtcttccgtggtgggggcaggggaaagcagagcccagactcttggagcaggtgttccccctggggactctgtcagaggctccatggaggcctctcaagtccaagtgcctctggaagcctctccaattacattcccaccaccctgtgccccagaaaggccccccatcagcccagtcccaggcgcccgtcaagcaggcctctagtaatgaactagtccgtaacttgaaagtatttcgatttcttggctttatatatcttgtggaaaggacgatagcattctagcaatcccttgagt

SEQ ID NO: 2595 - DNA, 1373 bp, Homo sapiens
  source 1..1373: mol_type = genomic DNA
accgccaccatggagcctgcacccgcccgatctccgaggccccagcaggaccccgcccggccccaggagcccaccatgcctccccccgagaccccctctgaaggccgccagcccagccccagccccagccctacagagcgagcccccgcttcggaggaggagttccagtttctgcgctgccagcaatgccaggcggaagccaagtgcccgaagctgctgccttgtctgcacacgctgtgctcaggatgcctggaggcgtcgggcatgcagtgccccatctgccaggcgccctggcccctaggtgcagacacacccgccctggataacgtctttttcgagagtctgcagcggcgcctgtcggtgtaccggcagattgtggatgcgcaggctgtgtgcacccgctgcaaagagtcggccgacttctggtgctttgagtgcgagcagctcctctgcgccaagtgcttcgaggcacaccagtggttcctcaagcacgaggcccggcccctagcagagctgcgcaaccagtcggtgcgtgagttcctggacggcacccgcaagaccaacaacatcttctgctccaaccccaaccaccgcacccctacgctgaccagcatctactgccgaggatgttccaagccgctgtgctgctcgtgcgcgctccttgacagcagccacagtgagctcaagtgcgacatcagcgcagagatccagcagcgacaggaggagctggacgccatgacgcaggcgctgcaggagcaggatagtgcctttggcgcggttcacgcgcagatgcacgcggccgtcggccagctgggccgcgcgcgtgccgagaccgaggagctgatccgcgagcgcgtgcgccaggtggtagctcacgtgcgggctcaggagcgcgagctgctggaggctgtggacgcgcggtaccagcgcgactacgaggagatggccagtcggctgggccgcctggatgctgtgctgcagcgcatccgcacgggcagcgcgctggtgcagaggatgaagtgctacgcctcggaccaggaggtgctggacatgcacggtttcctgcgccaggcgctctgccgcctgcgccaggaggagccccagagcctgcaagctgccgtgcgcaccgatggcttcgacgagttcaaggtgcgcctgcaggacctcagctcttgcatcacccaggggaaagatgcagctgtatccaagaaagccagcccagaggctgccagcactcccagggaccctattgacgttgacctgaggaacgcgttgtggtagtaatgaactagtccgtaacttgaaagtatttcgatttcttggctttatatatcttgtggaaaggacgagctgaaccatcagggtttaattct

SEQ ID NO: 2596 - DNA, 2003 bp, Homo sapiens
  source 1..2003: mol_type = genomic DNA
accgccaccatggagcctgcacccgcccgatctccgaggccccagcaggaccccgcccggccccaggagcccaccatgcctccccccgagaccccctctgaaggccgccagcccagccccagccccagccctacagagcgagcccccgcttcggaggaggagttccagtttctgcgctgccagcaatgccaggcggaagccaagtgcccgaagctgctgccttgtctgcacacgctgtgctcaggatgcctggaggcgtcgggcatgcagtgccccatctgccaggcgccctggcccctaggtgcagacacacccgccctggataacgtctttttcgagagtctgcagcggcgcctgtcggtgtaccggcagattgtggatgcgcaggctgtgtgcacccgctgcaaagagtcggccgacttctggtgctttgagtgcgagcagctcctctgcgccaagtgcttcgaggcacaccagtggttcctcaagcacgaggcccggcccctagcagagctgcgcaaccagtcggtgcgtgagttcctggacggcacccgcaagaccaacaacatcttctgctccaaccccaaccaccgcacccctacgctgaccagcatctactgccgaggatgttccaagccgctgtgctgctcgtgcgcgctccttgacagcagccacagtgagctcaagtgcgacatcagcgcagagatccagcagcgacaggaggagctggacgccatgacgcaggcgctgcaggagcaggatagtgcctttggcgcggttcacgcgcagatgcacgcggccgtcggccagctgggccgcgcgcgtgccgagaccgaggagctgatccgcgagcgcgtgcgccaggtggtagctcacgtgcgggctcaggagcgcgagctgctggaggctgtggacgcgcggtaccagcgcgactacgaggagatggccagtcggctgggccgcctggatgctgtgctgcagcgcatccgcacgggcagcgcgctggtgcagaggatgaagtgctacgcctcggaccaggaggtgctggacatgcacggtttcctgcgccaggcgctctgccgcctgcgccaggaggagccccagagcctgcaagctgccgtgcgcaccgatggcttcgacgagttcaaggtgcgcctgcaggacctcagctcttgcatcacccaggggaaagatgcagctgtatccaagaaagccagcccagaggctgccagcactcccagggaccctattgacgttgacctgcccgaggaggcagagagagtgaaggcccaggttcaggccctggggctggctgaagcccagcctatggctgtggtacagtcagtgcccggggcacaccccgtgccagtgtacgccttctccatcaaaggcccttcctatggagaggatgtctccaatacaacgacagcccagaagaggaagtgcagccagacccagtgccccaggaaggtcatcaagatggagtctgaggaggggaaggaggcaaggttggctcggagctccccggagcagcccaggcccagcacctccaaggcagtctcaccaccccacctggatggaccgcctagccccaggagccccgtcataggaagtgaggtcttcctgcccaacagcaaccacgtggccagtggcgccggggaggcagaggaacgcgttgtggtgatcagcagctcggaagactcagatgccgaaaactcgtcctcccgagagctggatgacagcagcagtgagtccagtgacctccagctggaaggccccagcaccctcagggtcctggacgagaaccttgctgacccccaagcagaagacagacctctggttttctttgacctcaagattgacaatgaaagtgggttctcctggggctacccccacccctttctaatttagtaatgaactagtccgtaacttgaaagtatttcgatttcttggctttatatatcttgtggaaaggacgatcacgtagcgcactatgacgaatt

SEQ ID NO: 2597 - DNA, 2591 bp, Homo sapiens
  source 1..2591: mol_type = genomic DNA
accgccaccatggagcctgcacccgcccgatctccgaggccccagcaggaccccgcccggccccaggagcccaccatgcctccccccgagaccccctctgaaggccgccagcccagccccagccccagccctacagagcgagcccccgcttcggaggaggagttccagtttctgcgctgccagcaatgccaggcggaagccaagtgcccgaagctgctgccttgtctgcacacgctgtgctcaggatgcctggaggcgtcgggcatgcagtgccccatctgccaggcgccctggcccctaggtgcagacacacccgccctggataacgtctttttcgagagtctgcagcggcgcctgtcggtgtaccggcagattgtggatgcgcaggctgtgtgcacccgctgcaaagagtcggccgacttctggtgctttgagtgcgagcagctcctctgcgccaagtgcttcgaggcacaccagtggttcctcaagcacgaggcccggcccctagcagagctgcgcaaccagtcggtgcgtgagttcctggacggcacccgcaagaccaacaacatcttctgctccaaccccaaccaccgcacccctacgctgaccagcatctactgccgaggatgttccaagccgctgtgctgctcgtgcgcgctccttgacagcagccacagtgagctcaagtgcgacatcagcgcagagatccagcagcgacaggaggagctggacgccatgacgcaggcgctgcaggagcaggatagtgcctttggcgcggttcacgcgcagatgcacgcggccgtcggccagctgggccgcgcgcgtgccgagaccgaggagctgatccgcgagcgcgtgcgccaggtggtagctcacgtgcgggctcaggagcgcgagctgctggaggctgtggacgcgcggtaccagcgcgactacgaggagatggccagtcggctgggccgcctggatgctgtgctgcagcgcatccgcacgggcagcgcgctggtgcagaggatgaagtgctacgcctcggaccaggaggtgctggacatgcacggtttcctgcgccaggcgctctgccgcctgcgccaggaggagccccagagcctgcaagctgccgtgcgcaccgatggcttcgacgagttcaaggtgcgcctgcaggacctcagctcttgcatcacccaggggaaagatgcagctgtatccaagaaagccagcccagaggctgccagcactcccagggaccctattgacgttgacctgcccgaggaggcagagagagtgaaggcccaggttcaggccctggggctggctgaagcccagcctatggctgtggtacagtcagtgcccggggcacaccccgtgccagtgtacgccttctccatcaaaggcccttcctatggagaggatgtctccaatacaacgacagcccagaagaggaagtgcagccagacccagtgccccaggaaggtcatcaagatggagtctgaggaggggaaggaggcaaggttggctcggagctccccggagcagcccaggcccagcacctccaaggcagtctcaccaccccacctggatggaccgcctagccccaggagccccgtcataggaagtgaggtcttcctgcccaacagcaaccacgtggccagtggcgccggggaggcagaggaacgcgttgtggtgatcagcagctcggaagactcagatgccgaaaactcgtgcatggagcccatggagaccgccgagccacagtcctcgccagcccactcctcgccagcccactcctcgccagcccactcctcgccagtccagtctctgctgagagcacaaggagcctccagcctgccctgtggcacataccaccccccagcttggcctccccaccagcccgctgagcaggctgccacccccgatgctgagcctcacagcgagcctcctgatcaccaggagcgccctgccgtccaccgtgggatccgctacctgttgtacagagcacagagagccatccgccttcgccatgccctccgcttgcaccctcaattgcatcgggcccctattcggacttggtctccccatgtggtccaagccagcactcctgccatcacagggcccctcaaccatcctgccaatgcccaggaacatcctgcccagctgcaaaggggcatcagcccaccccaccggatacgaggggctgtgcgatcccgcagccgctccctccggggctcctcccatttatcccagtggctcaacaacttttttgccctccccttctcctccatggcttcccagcttgacatgtcttccgtggtgggggcaggggaaagcagagcccagactcttggagcaggtgttccccctggggactctgtcagaggctccatggaggcctctcaagtccaagtgcctctggaagcctctccaattacattcccaccaccctgtgccccagaaaggccccccatcagcccagtcccaggcgcccgtcaagcaggcctctagtaatgaactagtccgtaacttgaaagtatttcgatttcttggctttatatatcttgtggaaaggacgaatacacaaccgagctctatcaaag

SEQ ID NO: 2598 - DNA, 1409 bp, Homo sapiens
  source 1..1409: mol_type = genomic DNA
accgccaccatggagcctgcacccgcccgatctccgaggccccagcaggaccccgcccggccccaggagcccaccatgcctccccccgagaccccctctgaaggccgccagcccagccccagccccagccctacagagcgagcccccgcttcggaggaggagttccagtttctgcgctgccagcaatgccaggcggaagccaagtgcccgaagctgctgccttgtctgcacacgctgtgctcaggatgcctggaggcgtcgggcatgcagtgccccatctgccaggcgccctggcccctaggtgcagacacacccgccctggataacgtctttttcgagagtctgcagcggcgcctgtcggtgtaccggcagattgtggatgcgcaggctgtgtgcacccgctgcaaagagtcggccgacttctggtgctttgagtgcgagcagctcctctgcgccaagtgcttcgaggcacaccagtggttcctcaagcacgaggcccggcccctagcagagctgcgcaaccagtcggtgcgtgagttcctggacggcacccgcaagaccaacaacatcttctgctccaaccccaaccaccgcacccctacgctgaccagcatctactgccgaggatgttccaagccgctgtgctgctcgtgcgcgctccttgacagcagccacagtgagctcaagtgcgacatcagcgcagagatccagcagcgacaggaggagctggacgccatgacgcaggcgctgcaggagcaggatagtgcctttggcgcggttcacgcgcagatgcacgcggccgtcggccagctgggccgcgcgcgtgccgagaccgaggagctgatccgcgagcgcgtgcgccaggtggtagctcacgtgcgggctcaggagcgcgagctgctggaggctgtggacgcgcggtaccagcgcgactacgaggagatggccagtcggctgggccgcctggatgctgtgctgcagcgcatccgcacgggcagcgcgctggtgcagaggatgaagtgctacgcctcggaccaggaggtgctggacatgcacggtttcctgcgccaggcgctctgccgcctgcgccaggaggagccccagagcctgcaagctgccgtgcgcaccgatggcttcgacgagttcaaggtgcgcctgcaggacctcagctcttgcatcacccaggggaaagatgcagctgtatccaagaaagccagcccagaggctgccagcactcccagggaccctattgacgttgacctgctgcctcctccagcccatgctcttacaggccctgcacagagtagcactcattagtaatgaactagtccgtaacttgaaagtatttcgatttcttggctttatatatcttgtggaaaggacgataacaacgtacgcgagccatttgc

SEQ ID NO: 2599 - DNA, 7346 bp, Homo sapiens
  source 1..7346: mol_type = genomic DNA
accgccaccatggccgagaatgtggtggaaccggggccgccttcagccaagcggcctaaactctcatctccggccctctcggcgtccgccagcgatggcacagattttggctctctatttgacttggagcacgacttaccagatgaattaatcaactctacagaattgggactaaccaatggtggtgatattaatcagcttcagacaagtcttggcatggtacaagatgcagcttctaaacataaacagctgtcagaattgctgcgatctggtagttcccctaacctcaatatgggagttggtggcccaggtcaagtcatggccagccaggcccaacagagcagtcctggattaggtttgataaatagcatggtcaaaagcccaatgacacaggcaggcttgacttctcccaacatggggatgggcactagtggaccaaatcagggtcctacgcagtcaacaggtatgatgaacagtccagtaaatcagcctgccatgggaatgaacacagggatgaatgcgggcatgaatcctggaatgttggctgcaggcaatggacaagggataatgcctaatcaagtcatgaacggttcaattggagcaggccgagggcgacagaatatgcagtacccaaacccaggcatgggaagtgctggcaacttactgactgagcctcttcagcagggctctccccagatgggaggacaaacaggattgagaggcccccagcctcttaagatgggaatgatgaacaaccccaatccttatggttcaccatatactcagaatcctggacagcagattggagccagtggccttggtctccagattcagacaaaaactgtactatcaaataacttatctccatttgctatggacaaaaaggcagttcctggtggaggaatgcccaacatgggtcaacagccagccccgcaggtccagcagccaggcctggtgactccagttgcccaagggatgggttctggagcacatacagctgatccagagaagcgcaagctcatccagcagcagcttgttctccttttgcatgctcacaagtgccagcgccgggaacaggccaatggggaagtgaggcagtgcaaccttccccactgtcgcacaatgaagaatgtcctaaaccacatgacacactgccagtcaggcaagtcttgccaagtggcacactgtgcatcttctcgacaaatcatttcacactggaagaattgtacaagacatgattgtcctgtgtgtctccccctcaaaaatgctggtgataagagaaatcaacagccaattttgactggagcacccgttggacttggaaatcctagctctctaggggtgggtcaacagtctgcccccaacctaagcactgttagtcagattgatcccagctccatagaaagagcctatgcagctcttggactaccctatcaagtaaatcagatgccgacacaaccccaggtgcaagcaaagaaccagcagaatcagcagcctgggcagtctccccaaggcatgcggcccatgagcaacatgagtgctagtcctatgggagtaaatggaggtgtaggagttcaaacgccgagtcttctttctgactcaatgttgcattcagccataaattctcaaaacccaatgatgagtgaaaatgccagtgtgccctccctgggtcctatgccaacagcagctcaaccatccactactggaattcggaaacagtggcacgaagatattactcaggatcttcgaaatcatcttgttcacaaactcgtccaagccatatttcctacgccggatcctgctgctttaaaagacagacggatggaaaacctagttgcatatgctcggaaagttgaaggggacatgtatgaatctgcaaacaatcgagcggaatactaccaccttctagctgagaaaatctataagatccagaaagaactagaagaaaaacgaaggaccagactacagaagcagaacatgctaccaaatgctgcaggcatggttccagtttccatgaatccagggcctaacatgggacagccgcaaccaggaatgacttctaatggccctctacctgacccaagtatgatccgtggcagtgtgccaaaccagatgatgcctcgaataactccacaatctggtttgaatcaatttggccagatgagcatggcccagccccctattgtaccccggcaaacccctcctcttcagcaccatggacagttggctcaacctggagctctcaacccgcctatgggctatgggcctcgtatgcaacagccttccaaccagggccagttccttcctcagactcagttcccatcacagggaatgaatgtaacaaatatccctttggctccgtccagcggtcaagctccagtgtctcaagcacaaatgtctagttcttcctgcccggtgaactctcctataatgcctccagggtctcaggggagccacattcactgtccccagcttcctcaaccagctcttcatcagaattcaccctcgcctgtacctagtcgtacccccacccctcaccatactcccccaagcataggggctcagcagccaccagcaacaacaattccagcccctgttcctacacctcctgccatgccacctgggccacagtcccaggctctacatccccctccaaggcagacacctacaccaccaacaacacaacttccccaacaagtgcagccttcacttcctgctgcaccttctgctgaccagccccagcagcagcctcgctcacagcagagcacagcagcgtctgttcctaccccaacagcaccgctgcttcctccgcagcctgcaactccactttcccagccagctgtaagcattgaaggacaggtatcaaatcctccatctactagtagcacagaagtgaattctcaggccattgctgagaagcagccttcccaggaagtgaagatggaggccaaaatggaagtggatcaaccagaaccagcagatactcagccggaggatatttcagagtctaaagtggaagactgtaaaatggaatctaccgaaacagaagagagaagcactgagttaaaaactgaaataaaagaggaggaagaccagccaagtacttcagctacccagtcatctccggctccaggacagtcaaagaaaaagattttcaaaccagaagaactacgacaggcactgatgccaactttggaggcactttaccgtcaggatccagaatcccttccctttcgtcaacctgtggaccctcagcttttaggaatccctgattactttgatattgtgaagagccccatggatctttctaccattaagaggaagttagacactggacagtatcaggagccctggcagtatgtcgatgatatttggcttatgttcaataatgcctggttatataaccggaaaacatcacgggtatacaaatactgctccaagctctctgaggtctttgaacaagaaattgacccagtgatgcaaagccttggatactgttgtggcagaaagttggagttctctccacagacactgtgttgctacggcaaacagttgtgcacaatacctcgtgatgccacttattacagttaccagaacaggtatcatttctgtgagaagtgtttcaatgagatccaaggggagagcgtttctttgggggatgacccttcccagcctcaaactacaataaataaagaacaattttccaagagaaaaaatgacacactggatcctgaactgtttgttgaatgtacagagtgcggaagaaagatgcatcagatctgtgtccttcaccatgagatcatctggcctgctggattcgtctgtgatggctgtttaaagaaaagtgcacgaactaggaaagaaaataagttttctgctaaaaggttgccatctaccagacttggcacctttctagagaatcgtgtgaatgactttctgaggcgacagaatcaccctgagtcaggagaggtcactgttagagtagttcatgcttctgacaaaaccgtggaagtaaaaccaggcatgaaagcaaggtttgtggacagtggagagatggcagaatcctttccataccgaaccaaagccctctttgcctttgaagaaattgatggtgttgacctgtgcttctttggcatgcatgttcaagagtatggctctgactgccctccacccaaccagaggagagtatacatatcttacctcgatagtgttcatttcttccgtcctaaatgcttgaggactgcagtctatcatgaaatcctaattggatatttagaatatgtcaagaaattaggttacacaacagggcatatttgggcatgtccaccaagtgagggagatgattatatcttccattgccatcctcctgaccagaagatacccaagcccaagcgactgcaggaatggtacaaaaaaatgcttgacaaggctgtatcagagcgtattgtccatgactacaaggatatttttaaacaagctactgaagatagattaacaagtgcaaaggaattgccttatttcgagggtgatttctggcccaatgttctggaagaaagcattaaggaactggaacaggaggaagaagagagaaaacgagaggaaaacaccagcaatgaaagcacagatgtgaccaagggagacagcaaaaatgctaaaaagaagaataataagaaaaccagcaaaaataagagcagcctgagtaggggcaacaagaagaaacccgggatgcccaatgtatctaacgacctctcacagaaactatatgccaccatggagaagcataaagaggtcttctttgtgatccgcctcattgctggccctgctgccaactccctgcctcccattgttgatcctgatcctctcatcccctgcgatctgatggatggtcgggatgcgtttctcacgctggcaagggacaagcacctggagttctcttcactccgaagagcccagtggtccaccatgtgcatgctggtggagctgcacacgcagagccaggaccgctttgtctacacctgcaatgaatgcaagcaccatgtggagacacgctggcactgtactgtctgtgaggattatgacttgtgtatcacctgctataacactaaaaaccatgaccacaaaatggagaaactaggccttggcttagatgatgagagcaacaaccagcaggctgcagccacccagagcccaggcgattctcgccgcctgagtatccagcgctgcatccagtctctggtccatgcttgccagtgtcggaatgccaattgctcactgccatcctgccagaagatgaagcgggttgtgcagcataccaagggttgcaaacggaaaaccaatggcgggtgccccatctgcaagcagctcattgccctctgctgctaccatgccaagcactgccaggagaacaaatgcccggtgccgttctgcctaaacatcaagcagaagctccggcagcaacagctgcagcaccgactacagcaggcccaaatgcttcgcaggaggatggccagcatgcagcggactggtgtggttgggcagcaacagggcctcccttcccccactcctgccactccaacgacaccaactggccaacagccaaccaccccgcagacgccccagcccacttctcagcctcagcctacccctcccaatagcatgccaccctacttgcccaggactcaagctgctggccctgtgtcccagggtaaggcagcaggccaggtgacccctccaacccctcctcagactgctcagccaccccttccagggcccccacctgcagcagtggaaatggcaatgcagattcagagagcagcggagacgcagcgccagatggcccacgtgcaaatttttcaaaggccaatccaacaccagatgcccccgatgactcccatggcccccatgggtatgaacccacctcccatgaccagaggtcccagtgggcatttggagccagggatgggaccgacagggatgcagcaacagccaccctggagccaaggaggattgcctcagccccagcaactacagtctgggatgccaaggccagccatgatgtcagtggcccagcatggtcaacctttgaacatggctccacaaccaggattgggccaggtaggtatcagcccactcaaaccaggcactgtgtctcaacaagccttacaaaaccttttgcggactctcaggtctcccagctctcccctgcagcagcaacaggtgcttagtatccttcacgccaacccccagctgttggctgcattcatcaagcagcgggctgccaagtatgccaactctaatccacaacccatccctgggcagcctggcatgccccaggggcagccagggctacagccacctaccatgccaggtcagcagggggtccactccaatccagccatgcagaacatgaatccaatgcaggcgggcgttcagagggctggcctgccccagcagcaaccacagcagcaactccagccacccatgggagggatgagcccccaggctcagcagatgaacatgaaccacaacaccatgccttcacaattccgagacatcttgagacgacagcaaatgatgcaacagcagcagcaacagggagcagggccaggaataggccctggaatggccaaccataaccagttccagcaaccccaaggagttggctacccaccacagcagcagcagcggatgcagcatcacatgcaacagatgcaacaaggaaatatgggacagataggccagcttccccaggccttgggagcagaggcaggtgccagtctacaggcctatcagcagcgactccttcagcaacagatggggtcccctgttcagcccaaccccatgagcccccagcagcatatgctcccaaatcaggcccagtccccacacctacaaggccagcagatccctaattctctctccaatcaagtgcgctctccccagcctgtcccttctccacggccacagtcccagcccccccactccagtccttccccaaggatgcagcctcagccttctccacaccacgtttccccacagacaagttccccacatcctggactggtagctgcccaggccaaccccatggaacaagggcattttgccagcccggaccagaattcaatgctttctcagcttgctagcaatccaggcatggcaaacctccatggtgcaagcgccacggacctgggactcagcaccgataactcagacttgaattcaaacctctcacagagtacactagacatacactagtaatgaactagtccgtaacttgaaagtatttcgatttcttggctttatatatcttgtggaaaggacgagatgtcaagatggcccgatagcgc

SEQ ID NO: 2600 - DNA, 2963 bp, Homo sapiens
  source 1..2963: mol_type = genomic DNA
accgccaccatgcgacagctgcagaagaaaataaagaatggaacactgaacataaagcaggacgacccctttgaactcttcatagcagccacaaacattcgctactgctactacaacgagacccacaagatcctgggcaataccttcggcatgtgtgtgctgcaggattttgaagccttaactccaaacttgctggccaggactgtagaaacagtggaaggtggtgggctagtggtcatcctcctacggaccatgaactcactcaagcaattgtacacagtgactatggatgtgcattccaggtacagaactgaggcccatcaggatgtggtgggaagatttaatgaaaggtttattctgtctctggcctcttgtaagaagtgtctcgtcattgatgaccagctcaacatcctgcccatctcctcccacgttgccaccatggaggccctgcctccccagactccggatgagagtcttggtccttctgatctggagctgagggagttgaaggagagcttgcaggacacccagcctgtgggtgtgttggtggactgctgtaagactctagaccaggccaaagctgtcttgaaatttatcgagggcatctctgaaaagaccctgaggagtactgttgcactcacagctgctcgaggacggggaaaatctgcagccctgggattggcgattgctggggcggtggcatttgggtactccaatatctttgttacctccccaagccctgataacctccatactctgtttgaatttgtatttaaaggatttgatgctctgcaatatcaggaacatctggattatgagattatccagtctctaaatcctgaatttaacaaagcagtgatcagagtgaatgtatttcgagaacacaggcagactattcagtatatacatcctgcagatgctgtgaagctgggccaggctgaactagttgtgattgatgaagctgccgccatccccctccccttggtgaagagcctacttggcccctaccttgttttcatggcatccaccatcaatggctatgagggcactggccggtcactgtccctcaagctaattcagcagctccgtcaacagagcgcccagagccaggtcagcaccactgctgagaataagaccacgacgacagccagattggcatcagcgcggacactgtatgaggtttccctccaggagtcaatccgatacgcccctggggatgcagtggagaagtggctgaatgacttgctgtgcctggattgcctcaacatcactcggatagtctcaggctgccccttgcctgaagcttgtgaactgtactatgttaatagagataccctcttttgctaccacaaggcctctgaagttttcctccaacggcttatggccctctacgtggcttctcactacaagaactctcccaatgatctccagatgctctccgatgcacctgctcaccatctcttctgccttctgcctcccgtgccccccacccagaatgcccttccagaagtgcttgctgttatccaggtgtgccttgaaggggagatttctcgccagtccatcttgaacagtctgtctcgaggcaagaaggcttcaggggacctgattccatggacagtgtcagaacagttccaagatccagactttggtggtctgtctggtggaagggtcgttcgcattgctgttcacccagattatcaagggatgggctatggcagccgtgctctgcagctgctgcagatgtactatgaaggcaggtttccttgtctggaggaaaaggtccttgagacaccacaggaaattcacaccgtaagcagcgaggctgtcagcttgttggaagaggtcatcactccccggaaggacctgcctcctttactcctcaaattgaatgagaggcctgccgaacgcctggattacctgggtgtttcctatggcttgacccccaggctcctcaagttctggaaacgagctggatttgttcctgtttatctgagacagaccccgaatgacctgaccggagagcactcgtgcatcatgctgaagacgctcactgatgaggatgaggctgaccagggaggctggcttgcagccttctggaaagatttccgacggcggttcctagccttgctctcctaccagttcagtaccttctctccttccctggctctgaacatcattcagaacaggaacatggggaagccagcccagcctgccctgagccgggaggagctggaagcactcttcctcccctatgacctgaagcggctggagatgtattcacggaatatggtggactatcacctcatcatggacatgatcccggccatctctcgcatctatttcctgaaccagctgggggacctggccctgtctgcggctcagtcggctcttctcttggggattggcctgcagcataagtctgtggaccagctggaaaaggagattgagctgccctcgggccagttgatgggacttttcaaccggatcatccgcaaagttgtgaagctatttaatgaagttcaggaaaaggccattgaggagcagatggtggcagcgaaggatgtggtcatggagcccacgatgaagaccctcagtgacgacctagatgaagcagcaaaggaatttcaggagaaacacaagaaggaagtagggaagctgaagagcatggacctctctgaatacataatccgtggggacgatgaagagtggaatgaagttttgaacaaagctgggccgaacgcctcgatcatcagcctgaaaagtgacaagaaaaggaagttagaggccaaacaagaacccaaacagagcaagaagttgaagaacagagagacaaagaacaaaaaagatatgaaactgaagcggaagaaatagtaatgaactagtccgtaacttgaaagtatttcgatttcttggctttatatatcttgtggaaaggacgaccctgtaatagaattgctgaaact

SEQ ID NO: 2601 - DNA, 767 bp, Homo sapiens
  source 1..767: mol_type = genomic DNA
accgccaccatggctgccgccggggccaggcctgtggagctgggcttcgccgagtcggcgccggcgtggcgactgcgcagcgagcagttccccagcaaggtgggcgggcggccggcatggctgggcgcggccgggctgccggggccccaggccctggcctgcgagctgtgcggccgcccgctctccttcctgctgcaggtgtatgcgccgctgcctggccgcccggacgccttccaccgctgcatcttcctcttctgctgccgcgagcagccgtgctgtgccggcctgcgagtttttaggaatcaactacccaggaaaaacgatttttactcatatgagccaccttctgagaatcctcccccagaaacaggagaatcagtgtgtctccagcttaagtctggtgctcatctctgcagggtttgtggctgtttaggccccaaaacgtgctccagatgccacaaagcatattactgcagcaaggagcatcagaccctagactggagattgggacataagcaggcttgtgcacaaccagatcatctggaccatataattccagaccacaacttcctttttccagaatttgaaattgtaatagaaacagaagatgagattatgcctgaggttgtggaaaaggaagattactcagagattatagggagcatggggatatagtaatgaactagtccgtaacttgaaagtatttcgatttcttggctttatatatcttgtggaaaggacgaacgcagctaacgattccaagaggg

SEQ ID NO: 2602 - DNA, 689 bp, Homo sapiens
  source 1..689: mol_type = genomic DNA
accgccaccatggctgccgccggggccaggcctgtggagctgggcttcgccgagtcggcgccggcgtggcgactgcgcagcgagcagttccccagcaaggtgtatgcgccgctgcctggccgcccggacgccttccaccgctgcatcttcctcttctgctgccgcgagcagccgtgctgtgccggcctgcgagtttttaggaatcaactacccaggaaaaacgatttttactcatatgagccaccttctgagaatcctcccccagaaacaggagaatcagtgtgtctccagcttaagtctggtgctcatctctgcagggtttgtggctgtttaggccccaaaacgtgctccagatgccacaaagcatattactgcagcaaggagcatcagaccctagactggagattgggacataagcaggcttgtgcacaaccagatcatctggaccatataattccagaccacaacttcctttttccagaatttgaaattgtaatagaaacagaagatgagattatgcctgaggttgtggaaaaggaagattactcagagattatagggagcatgggtaagcagtttcaggacttcattcattagtaatgaactagtccgtaacttgaaagtatttcgatttcttggctttatatatcttgtggaaaggacgaatcatgacaagagacagggatctt

SEQ ID NO: 2603 - DNA, 668 bp, Homo sapiens
  source 1..668: mol_type = genomic DNA
accgccaccatggctgccgccggggccaggcctgtggagctgggcttcgccgagtcggcgccggcgtggcgactgcgcagcgagcagttccccagcaaggtgtatgcgccgctgcctggccgcccggacgccttccaccgctgcatcttcctcttctgctgccgcgagcagccgtgctgtgccggcctgcgagtttttaggaatcaactacccaggaaaaacgatttttactcatatgagccaccttctgagaatcctcccccagaaacaggagaatcagtgtgtctccagcttaagtctggtgctcatctctgcagggtttgtggctgtttaggccccaaaacgtgctccagatgccacaaagcatattactgcagcaaggagcatcagaccctagactggagattgggacataagcaggcttgtgcacaaccagatcatctggaccatataattccagaccacaacttcctttttccagaatttgaaattgtaatagaaacagaagatgagattatgcctgaggttgtggaaaaggaagattactcagagattatagggagcatggggatatagtaatgaactagtccgtaacttgaaagtatttcgatttcttggctttatatatcttgtggaaaggacgattgtcggcatcactttcttagcta

SEQ ID NO: 2604 - DNA, 1136 bp, Homo sapiens
  source 1..1136: mol_type = genomic DNA
accgccaccatggctgccgccggggccaggcctgtggagctgggcttcgccgagtcggcgccggcgtggcgactgcgcagcgagcagttccccagcaaggtgggcgggcggccggcatggctgggcgcggccgggctgccggggccccaggccctggcctgcgagctgtgcggccgcccgctctccttcctgctgcaggtgtatgcgccgctgcctggccgcccggacgccttccaccgctgcatcttcctcttctgctgccgcgagcagccgtgctgtgccggcctgcgagtttttaggaatcaactacccaggaaaaacgatttttactcatatgagccaccttctgagaatcctcccccagaaacaggagaatcagtgtgtctccagcttaagtctggtgctcatctctgcagggtttgtggctgtttaggccccaaaacgtgctccagatgccacaaagcatattactgcagcaaggagcatcagaccctagactggagattgggacataagcaggcttgtgcacaaccagatcatctggaccatataattccagaccacaacttcctttttccagaatttgaaattgtaatagaaacagaagatgagattatgcctgaggttgtggaaaaggaagattactcagagattatagggagcatgggtgaagcacttgaggaagaactggattccatggcaaaacatgaatccagggaagataaaatttttcagaagtttaaaactcagatagcccttgaaccagaacagattcttagatatggcagaggtattgcccccatctggatttctggtgaaaatattcctcaagaaaaggatattccagattgcccctgtggtgccaagagaatattggaattccaggtcatgcctcagctcctaaactacctgaaggctgacagactgggcaagagcattgactggggcatcctggctgtcttcacctgtgctgagagctgcagcttgggtactggctatacagaagaatttgtgtggaagcaggatgtaacagatacaccgtagtaatgaactagtccgtaacttgaaagtatttcgatttcttggctttatatatcttgtggaaaggacgagcgtaagtagcttacgaacttcgc

SEQ ID NO: 2605 - DNA, 1037 bp, Homo sapiens
  source 1..1037: mol_type = genomic DNA
accgccaccatggctgccgccggggccaggcctgtggagctgggcttcgccgagtcggcgccggcgtggcgactgcgcagcgagcagttccccagcaaggtgtatgcgccgctgcctggccgcccggacgccttccaccgctgcatcttcctcttctgctgccgcgagcagccgtgctgtgccggcctgcgagtttttaggaatcaactacccaggaaaaacgatttttactcatatgagccaccttctgagaatcctcccccagaaacaggagaatcagtgtgtctccagcttaagtctggtgctcatctctgcagggtttgtggctgtttaggccccaaaacgtgctccagatgccacaaagcatattactgcagcaaggagcatcagaccctagactggagattgggacataagcaggcttgtgcacaaccagatcatctggaccatataattccagaccacaacttcctttttccagaatttgaaattgtaatagaaacagaagatgagattatgcctgaggttgtggaaaaggaagattactcagagattatagggagcatgggtgaagcacttgaggaagaactggattccatggcaaaacatgaatccagggaagataaaatttttcagaagtttaaaactcagatagcccttgaaccagaacagattcttagatatggcagaggtattgcccccatctggatttctggtgaaaatattcctcaagaaaaggatattccagattgcccctgtggtgccaagagaatattggaattccaggtcatgcctcagctcctaaactacctgaaggctgacagactgggcaagagcattgactggggcatcctggctgtcttcacctgtgctgagagctgcagcttgggtactggctatacagaagaatttgtgtggaagcaggatgtaacagatacaccgtagtaatgaactagtccgtaacttgaaagtatttcgatttcttggctttatatatcttgtggaaaggacgacatactatttcagggtgcgtcgtt

SEQ ID NO: 2606 - DNA, 788 bp, Homo sapiens
  source 1..788: mol_type = genomic DNA
accgccaccatggctgccgccggggccaggcctgtggagctgggcttcgccgagtcggcgccggcgtggcgactgcgcagcgagcagttccccagcaaggtgggcgggcggccggcatggctgggcgcggccgggctgccggggccccaggccctggcctgcgagctgtgcggccgcccgctctccttcctgctgcaggtgtatgcgccgctgcctggccgcccggacgccttccaccgctgcatcttcctcttctgctgccgcgagcagccgtgctgtgccggcctgcgagtttttaggaatcaactacccaggaaaaacgatttttactcatatgagccaccttctgagaatcctcccccagaaacaggagaatcagtgtgtctccagcttaagtctggtgctcatctctgcagggtttgtggctgtttaggccccaaaacgtgctccagatgccacaaagcatattactgcagcaaggagcatcagaccctagactggagattgggacataagcaggcttgtgcacaaccagatcatctggaccatataattccagaccacaacttcctttttccagaatttgaaattgtaatagaaacagaagatgagattatgcctgaggttgtggaaaaggaagattactcagagattatagggagcatgggtaagcagtttcaggacttcattcattagtaatgaactagtccgtaacttgaaagtatttcgatttcttggctttatatatcttgtggaaaggacgatcgtgcgtctctggccgtgatgtt

SEQ ID NO: 2607 - DNA, 998 bp, Homo sapiens
  source 1..998: mol_type = genomic DNA
accgccaccatggctgccgccggggccaggcctgtggagctgggcttcgccgagtcggcgccggcgtggcgactgcgcagcgagcagttccccagcaaggtgggcgggcggccggcatggctgggcgcggccgggctgccggggccccaggccctggcctgcgagctgtgcggccgcccgctctccttcctgctgcaggtgtatgcgccgctgcctggccgcccggacgccttccaccgctgcatcttcctcttctgctgccgcgagcagccgtgctgtgccggcctgcgagtttttaggaatcaactacccaggaaaaacgatttttactcatatgagccaccttctgagaatcctcccccagaaacaggagaatcagtgtgtctccagcttaagtctggtgctcatctctgcagggtttgtggctgtttaggccccaaaacgtgctccagatgccacaaagcatattactgcagcaaggagcatcagaccctagactggagattgggacataagcaggcttgtgcacaaccagatcatctggaccatataattccagaccacaacttcctttttccagaatttgaaattgtaatagaaacagaagatgagattatgcctgaggttgtggaaaaggaagattactcagagattatagggagcatgggtgaagcacttgaggaagaactggattccatggcaaaacatgaatccagggaagataaaatttttcagaagtttaaaactcagatagcccttgaaccagaacagattcttagatatggcagaggtattgcccccatctggatttctggtgaaaatattcctcaagaaaaggatattccagattgcccctgtggtgccaagagaatattggaattccagttttcagacacggtctattagtaatgaactagtccgtaacttgaaagtatttcgatttcttggctttatatatcttgtggaaaggacgatggtggctttccctacgcatcagt

SEQ ID NO: 2608 - DNA, 1994 bp, Homo sapiens
  source 1..1994: mol_type = genomic DNA
accgccaccatgtcggtctccagcggcgtccagattctgacaaagccagagaccgtggaccggaggagaagtgcggaaacgaccaaagaggccgggcgaccactggagatggctgtgtccgagcccgaggccagcgccgcggaatggaagcaactggatcctgctcagagcaacctgtataatgatgtgatgctggagaactactgcaaccaagcctcaatggggtgtcaagctcccaaaccagacatgatctccaagttggaaaaaggagaagcaccatggttggggaaggggaaaagacccagtcaaggttgtccaagtaaaatagcaagacccaagcaaaaagaaactgatggaaaagtccagaaagatgatgaccagcttgaaaatatccagaaatctcaaaacaaactcctcagggaagttgcagtcaagaagaaaactcaagctaagaagaatggcagtgactgtggttcactggggaaaaaaaataatttgcataaaaaacatgttccttcaaagaaaaggcttcttaaatttgagtcatgtggaaaaattttgaaacagaatttagatttacctgatcactcaagaaactgtgtaaaaaggaaatctgatgcagctaaagaacacaagaagtcattcaaccatagcttatctgatacaaggaaaggcaaaaagcaaactggaaagaaacatgagaaattatccagccatagctcatctgataagtgtaacaaaactggcaaaaaacatgacaaattatgctgtcatagttcatcccatattaaacaggacaaaattcaaactggagagaaacatgagaaatcacccagccttagctcatctactaagcatgaaaaacctcaagcttgtgtgaaaccctatgaatgtaatcaatgtggaaaggttctcagccataaacaaggactcattgaccatcagagagttcatactggggagaaaccatatgaatgtaatgaatgtgggatagcctttagccaaaagtcacaccttgttgtacatcagagaactcacaccggagaaaaaccatatgaatgtattcagtgtggcaaagcccatggtcataaacatgcactcactgaccatctaagaattcatactggagaaaagccctatgaatgtgctgaatgtgggaaaaccttcagacacagctcaaaccttattcaacatgtgagatctcacacaggtgagaagccatatgaatgtaaggaatgtgggaagtcttttaggtataactcatctcttaccgaacatgtgagaacacatacaggtgaaataccatatgaatgcaatgaatgtggaaaagcctttaagtatagctcatcccttactaaacacatgagaattcatacaggtgagaaaccctttgaatgtaatgaatgtgggaaagctttcagcaagaagtcacacctcattatacatcaaagaactcatactaaggagaaaccttataaatgtaatgagtgtggaaaagcctttggacatagctcatctcttacttaccatatgagaactcatacaggtgaaagtccctttgaatgtaatcaatgtgggaaaggctttaaacaaattgaaggccttactcaacatcagagagttcatactggagagaaaccgtatgagtgtaatgaatgtgggaaagcctttagccaaaagtctcacctcattgtacatcagagaactcatactggggagaaaccttatgaatgtaacgaatgtgaaaaagcctttaatgcaaaatcacagcttgttatacatcagcgatcccacactggagaaaaaccctatgaatgtaatgaatgtgggaaaactttcaaacaaaatgcatccctaaccaaacatgtgaaaactcattcagaagataaatctcatgagtagtaatgaactagtccgtaacttgaaagtatttcgatttcttggctttatatatcttgtggaaaggacgaattagattcaagcaggtagcgttg

SEQ ID NO: 2609 - DNA, 1997 bp, Homo sapiens
  source 1..1997: mol_type = genomic DNA
accgccaccatgtcggtctccagcggcgtccagattctgacaaagccagagaccgtggaccggaggagaagtgcggaaacgaccaaagaggccgggcgaccactggagatggctgtgtccgagcccgaggccagcgccgcgaaggaatggaagcaactggatcctgctcagagcaacctgtataatgatgtgatgctggagaactactgcaaccaagcctcaatggggtgtcaagctcccaaaccagacatgatctccaagttggaaaaaggagaagcaccatggttggggaaggggaaaagacccagtcaaggttgtccaagtaaaatagcaagacccaagcaaaaagaaactgatggaaaagtccagaaagatgatgaccagcttgaaaatatccagaaatctcaaaacaaactcctcagggaagttgcagtcaagaagaaaactcaagctaagaagaatggcagtgactgtggttcactggggaaaaaaaataatttgcataaaaaacatgttccttcaaagaaaaggcttcttaaatttgagtcatgtggaaaaattttgaaacagaatttagatttacctgatcactcaagaaactgtgtaaaaaggaaatctgatgcagctaaagaacacaagaagtcattcaaccatagcttatctgatacaaggaaaggcaaaaagcaaactggaaagaaacatgagaaattatccagccatagctcatctgataagtgtaacaaaactggcaaaaaacatgacaaattatgctgtcatagttcatcccatattaaacaggacaaaattcaaactggagagaaacatgagaaatcacccagccttagctcatctactaagcatgaaaaacctcaagcttgtgtgaaaccctatgaatgtaatcaatgtggaaaggttctcagccataaacaaggactcattgaccatcagagagttcatactggggagaaaccatatgaatgtaatgaatgtgggatagcctttagccaaaagtcacaccttgttgtacatcagagaactcacaccggagaaaaaccatatgaatgtattcagtgtggcaaagcccatggtcataaacatgcactcactgaccatctaagaattcatactggagaaaagccctatgaatgtgctgaatgtgggaaaaccttcagacacagctcaaaccttattcaacatgtgagatctcacacaggtgagaagccatatgaatgtaaggaatgtgggaagtcttttaggtataactcatctcttaccgaacatgtgagaacacatacaggtgaaataccatatgaatgcaatgaatgtggaaaagcctttaagtatagctcatcccttactaaacacatgagaattcatacaggtgagaaaccctttgaatgtaatgaatgtgggaaagctttcagcaagaagtcacacctcattatacatcaaagaactcatactaaggagaaaccttataaatgtaatgagtgtggaaaagcctttggacatagctcatctcttacttaccatatgagaactcatacaggtgaaagtccctttgaatgtaatcaatgtgggaaaggctttaaacaaattgaaggccttactcaacatcagagagttcatactggagagaaaccgtatgagtgtaatgaatgtgggaaagcctttagccaaaagtctcacctcattgtacatcagagaactcatactggggagaaaccttatgaatgtaacgaatgtgaaaaagcctttaatgcaaaatcacagcttgttatacatcagcgatcccacactggagaaaaaccctatgaatgtaatgaatgtgggaaaactttcaaacaaaatgcatccctaaccaaacatgtgaaaactcattcagaagataaatctcatgagtagtaatgaactagtccgtaacttgaaagtatttcgatttcttggctttatatatcttgtggaaaggacgaccaccacccggtactccaagatat

SEQ ID NO: 2610 - DNA, 2039 bp, Homo sapiens
  source 1..2039: mol_type = genomic DNA
accgccaccatgtcggtctccagcggcgtccagattctgacaaagccagagaccgtggaccggaggagaagtgcggaaacgaccaaagaggccgggcgaccactggagatggctgtgtccgagcccgaggccagcgccgcggtatcagtaacattcaaacatgtgactatggcctttacccagaaggaatggaagcaactggatcctgctcagagcaacctgtataatgatgtgatgctggagaactactgcaaccaagcctcaatggggtgtcaagctcccaaaccagacatgatctccaagttggaaaaaggagaagcaccatggttggggaaggggaaaagacccagtcaaggttgtccaagtaaaatagcaagacccaagcaaaaagaaactgatggaaaagtccagaaagatgatgaccagcttgaaaatatccagaaatctcaaaacaaactcctcagggaagttgcagtcaagaagaaaactcaagctaagaagaatggcagtgactgtggttcactggggaaaaaaaataatttgcataaaaaacatgttccttcaaagaaaaggcttcttaaatttgagtcatgtggaaaaattttgaaacagaatttagatttacctgatcactcaagaaactgtgtaaaaaggaaatctgatgcagctaaagaacacaagaagtcattcaaccatagcttatctgatacaaggaaaggcaaaaagcaaactggaaagaaacatgagaaattatccagccatagctcatctgataagtgtaacaaaactggcaaaaaacatgacaaattatgctgtcatagttcatcccatattaaacaggacaaaattcaaactggagagaaacatgagaaatcacccagccttagctcatctactaagcatgaaaaacctcaagcttgtgtgaaaccctatgaatgtaatcaatgtggaaaggttctcagccataaacaaggactcattgaccatcagagagttcatactggggagaaaccatatgaatgtaatgaatgtgggatagcctttagccaaaagtcacaccttgttgtacatcagagaactcacaccggagaaaaaccatatgaatgtattcagtgtggcaaagcccatggtcataaacatgcactcactgaccatctaagaattcatactggagaaaagccctatgaatgtgctgaatgtgggaaaaccttcagacacagctcaaaccttattcaacatgtgagatctcacacaggtgagaagccatatgaatgtaaggaatgtgggaagtcttttaggtataactcatctcttaccgaacatgtgagaacacatacaggtgaaataccatatgaatgcaatgaatgtggaaaagcctttaagtatagctcatcccttactaaacacatgagaattcatacaggtgagaaaccctttgaatgtaatgaatgtgggaaagctttcagcaagaagtcacacctcattatacatcaaagaactcatactaaggagaaaccttataaatgtaatgagtgtggaaaagcctttggacatagctcatctcttacttaccatatgagaactcatacaggtgaaagtccctttgaatgtaatcaatgtgggaaaggctttaaacaaattgaaggccttactcaacatcagagagttcatactggagagaaaccgtatgagtgtaatgaatgtgggaaagcctttagccaaaagtctcacctcattgtacatcagagaactcatactggggagaaaccttatgaatgtaacgaatgtgaaaaagcctttaatgcaaaatcacagcttgttatacatcagcgatcccacactggagaaaaaccctatgaatgtaatgaatgtgggaaaactttcaaacaaaatgcatccctaaccaaacatgtgaaaactcattcagaagataaatctcatgagtagtaatgaactagtccgtaacttgaaagtatttcgatttcttggctttatatatcttgtggaaaggacgattcgggctcaggtcctactaatac

SEQ ID NO: 2611 - DNA, 1784 bp, Homo sapiens
  source 1..1784: mol_type = genomic DNA
accgccaccatggcggggccgcagcccctggcgctgcaactggaacagttgttgaacccgcgaccaagcgaggcggaccctgaagcggaccccgaggaagccactgctgccagggtgattgacaggtttgatgaaggggaagatggggaaggtgatttcctagtagtgggtagcattagaaaactggcatcagcctccctcttggacacggacaaaaggtattgcggcaaaaccacctctagaaaagcatggaatgaagaccattgggagcagactctgccaggatcgtctgatgaggaaatatctgatgaggaagggtctggagatgaagattcagagggactgggtctggaggaatatgatgaggacgacctgggtgctgctgaggaacaggagtgtggtgatcacagggagagcaagaagagcagaagccactctgcaaaaacaccgggcttcagtgtccagagtatcagtgactttgagaaatttaccaagggaatggatgaccttgggagcagtgaggaggaggaagacgaagagagtggcatggaagaaggggatgacgcggaagactcccaaggcgagagtgaggaagacagggctggagatagaaacagtgaggatgatggtgtggtgatgaccttctctagtgtcaaagtttctgaggaagtggagaaaggaagagccgtgaagaaccagatagcactgtgggaccagctcttggaaggaaggatcaaactacaaaaagctctgttgaccaccaaccagcttcctcaaccagatgttttcccattgttcaaggacaaaggtggcccagaattttccagtgccctgaaaaatagtcacaaggcacttaaagcattgttgaggtcattggtaggtcttcaggaagagttgcttttccagtacccagacactagatatctagtagatgggacaaagcccaatgcgggaagtgaggagatttctagtgaagatgatgagctggtagaagagaagaagcagcaacgaagaagggtccctgcaaagaggaagctggagatggaggactatcccagcttcatggcaaagcgctttgccgactttacagtctacaggaaccgcacacttcagaaatggcacgataagaccaaactggcttctggaaaactggggaagggttttggtgcctttgaacgctcaatcttgactcagatcgaccatattctgatggacaaagagagattacttcgaaggacacagaccaagcgctctgtctatcgagttcttggcaaacctgagccagcagctcagcctgtcccagagagtttgccaggggaaccggagatccttcctcaagcccctgctaatgctcatctgaaggacttggatgaagaaatctttgatgatgatgacttttaccaccagctccttcgagaactcatagaacggaagaccagctccttggatcccaacgatcaggtggccatgggaaggcagtggcttgcaatccagaagttacgaagcaaaatccacaaaaaagtagataggaaagccagcaaaggcaggaaacttcggtttcatgtccttagcaagctactgagtttcatggcacctattgaccatactacaatgaatgatgatgccaggacagaactgtaccgctctctttttggccagctccaccctcccgacgaaggccacggggattagtaatgaactagtccgtaacttgaaagtatttcgatttcttggctttatatatcttgtggaaaggacgaaggagatgaatgcctcctcccgtg

SEQ ID NO: 2612 - DNA, 2081 bp, Homo sapiens
  source 1..2081: mol_type = genomic DNA
accgccaccatgctccaccagccgactcccgggaatcggggtctgaccgccaggatggaagtggggccagccaccgagaccttcgtgctggaacttcaatgtcttgaggatgggggcccagggcctgacaccctctcaggtggcagcggtgggagcgagagtcaggaggaggaagagcctcaggagaggaacagcagtccacagcggccagcagtctcggccccagtgggggccagtgaaatcgctgaggaaacccggccgggacaacgagagttgcaactgcagcagttagaacagcagcccgagccgcagcaacagccgcaacacgagcagctgcaacagccgcagccacacctagaactgcaacagcagccgcagcaagatgggcaacaacagctatctcaactacaacaggaaaaacaccaatccgtgcaccatcaggaactgaaaccagaactgcagctaatgcaccagcagcaacagttacagccacagcaagtgcaagagcaacagcggttgcagcagcagcaggagcagttacagacgcagcaagcacaagagcaacaggtattgcagcagcaggaacagctacagcagcaagtgcaagagcaacagctgttacagcaacagcaggaacagttacagcagcagcagctgctacaacagcaggaacagttacagcagcaacagtttcaacagcagcaggaacagttacagcagcagcagcagctactattgctgcagcagcagggacagttacagcagcaactgttgcagcagcagcaggcacagttacaacagcagctgctggaacagcagcaggcacagttacagcagcagctactgctgcagcagcaggaacagttacagcagcagcagcaacagcagctgttgcaacagcagcaggaacaattgcagcagcaacaactgcagcctcctcccctggagcccgaggaggaggaagaggtggagctggagctcatgccggtggacctggggtcagagcaggagctggagcagcagcggcaggagttggagcggcagcaggagctggaacggcagcaggagcagcggcagctgcagctcaaactgcaggaggagctgcagcagctggagcaacagctggagcagcagcagcagcagctggagcagcaggaggtgcagctggagctgaccccggtggagctaggcgcccagcagcaggaggtgcagctggagctgacccccgtgcagccggagctgcagctggaactggtgccagccgcagggggcggcggagcggcggtcccgggggctccggccgcggtcgtggtggctcccccgggctacgtggtggtgcaggagctcatggtgctgcccgccgtggcagcgccggccgtggtggccatcccgggcccggcaggcagcgcggcgttgacccctgcacggcagcggcggcggcggcgcgctcgggaccggccgaccatctgcggggagtgcggcaagggcttcagccgcagcacggacctggtgcgccaccaggccacgcacacgggtgagcggccacaccgctgcggcgagtgcggcaagggcttctcgcagcactcgaatctggtgacgcaccaacgcatccacacgggcgagaaaccctacgcctgctcctactgcgccaagcgcttcagcgagagctcggcgctcgtgcagcaccagcgcacgcacaccggggagcgaccctacgcctgcggggactgtggcaagcgcttcagcgtctcctccaacctgctgcgccaccggcgcacgcactcgggcgagcggccctacgtgtgcgaggactgtggcgagcgcttccgacacaaggtgcagatccgccgccacgagcgccagctgcacggcgcgggccgctccaggggcctcggcctgctgcgcgcctcgcggccggcggccctcggtggcccagcccgcgcggagcaggccgctacagccactgcgcccgcagacaaggcgctgtagtaatgaactagtccgtaacttgaaagtatttcgatttcttggctttatatatcttgtggaaaggacgatgtgagattgacttaccctgttca

SEQ ID NO: 2613 - DNA, 1613 bp, Homo sapiens
  source 1..1613: mol_type = genomic DNA
accgccaccatggaggaacacggagtgacccaaaccgaacatatggctaccatagaagcacatgcagtggcccagcaagtgcagcaggtccatgtggctacttacaccgagcatagtatgctgagtgctgatgaagactcgccttcttctcccgaggacacctcttacgatgactcagatatactcaactccacagcagctgatgaggtgacagctcatctggcagctgcaggtcctgtgggaatggccgctgctgctgctgtggcaacaggaaagaaacggaaacggcctcatgtatttgagtctaatccatctatccggaagaggcaacaaacacgtttgcttcggaaacttcgagccacgttagatgaatatactactcgtgtgggacagcaagctattgtcctctgtatctcaccctccaaacctaaccctgtctttaaagtgtttggtgcagcacctttggagaatgtggtgcgtaagtacaagagcatgatcctggaagacctggagtctgctctggcagaacacgcccctgcgccacaggaggttaactcagaactgccgcctctcaccatcgacggaattccagtctctgtggacaaaatgacccaggcccagcttcgggcatttatcccagagatgctcaagtactctacaggtcggggaaaaccaggctgggggaaagaaagctgcaagcccatctggtggcctgaagatatcccctgggcaaatgtccggagtgatgtccgcacagaagagcaaaagcagagggtttcatggacccaggcactacggaccatagttaaaaactgttataaacagcatgggcgggaagaccttttgtatgcctttgaagatcagcaaacgcaaacacaggccacagccacacatagtatagctcatcttgtaccatcacagactgtagtccagacttttagtaaccctgatggcactgtctcacttatccaggttggtacgggggcaacagtagccacattggctgatgcttcagaattgccaaccacggtcaccgttgcccaagtgaattattctgccgtggctgatggagaggtggaacaaaattgggccacgttacagggaggtgagatgaccatccagacgacgcaagcatcagaggccacccaggcggtggcatcgttggcagaggccgcagtggcagcttctcaggagatgcagcagggagctacagtcactatggcgcttaacagcgaagctgccgcccatgctgtcgccaccctggctgaggccaccttacaaggtgggggacagatcgtcttgtctggggaaaccgcagcagccgtcggagcacttactggagtccaagatgctaatggcctggtccagatccctgtgagcatgtaccagactgtggtgaccagcctcgcccagggcaacggaccagtgcaggtggccatggcccctgtgaccaccaggatatcagacagcgcagtcaccatggacggccaagctgtggaggtggtgacattggaacagtagtaatgaactagtccgtaacttgaaagtatttcgatttcttggctttatatatcttgtggaaaggacgattgcgtccggactgcagcttgacg

SEQ ID NO: 2614 - DNA, 1292 bp, Homo sapiens
  source 1..1292: mol_type = genomic DNA
accgccaccatgctggggtttttgtccgcacgccaaacgggtttggaggaccctcttcgccttcggagagcagagtcaacacggagagttttgggactggaattaaataaagacagagatgttgaaagaatccacggcggtggaattaacacccttgacattgaacctgttgaagggagatacatgttatcaggtggttcagatggtgtgattgtactttatgaccttgagaactccagcagacaatcttattacacatgtaaagcagtgtgttccattggcagagatcatcctgatgttcacagatacagtgtggagactgtacagtggtatcctcatgacactggcatgttcacatcaagctcatttgataaaactctgaaagtatgggatacaaatacattacaaactgcagatgtatttaattttgaggaaacagtttatagtcatcatatgtctccagtctccaccaagcactgtttggtagcagttggtactagaggacccaaagtacaactttgtgacttgaagtctggatcctgttctcacattctacagggtcacagacaagaaatattagcagtttcctggtctccacgttatgactatatcttggcaacagcaagtgctgacagtagagtaaaattatgggatgtgagaagagcatcaggatgtttgattactcttgatcaacataatgggaaaaagtcacaagctgttgaatcagcaaacactgctcataatgggaaagttaatggcttatgttttacaagtgatggacttcacctcctcactgttggtacagataatcgaatgaggctctggaatagttccaatggagaaaacacacttgtgaactatggaaaagtttgtaataacagtaaaaaaggattgaaattcactgtctcctgtggctgcagttcagaatttgtttttgtaccatatggtagcaccattgctgtttatacagtttactcaggagaacagataactatgcttaagggacattataaaactgttgactgctgtgtatttcagtcaaatttccaggaactttatagtggtagcagagactgcaacattctggcttgggttccatccttatatgaaccagttcctgatgatgatgagactacaacaaaatcacaattaaatccggcctttgaagatgcctggagcagcagtgatgaagaaggatagtaatgaactagtccgtaacttgaaagtatttcgatttcttggctttatatatcttgtggaaaggacgaccttggttcagcaccgggcttcta

SEQ ID NO: 2615 - DNA, 1319 bp, Homo sapiens
  source 1..1319: mol_type = genomic DNA
accgccaccatgcgggagctcaaacgcacgctggacgccaagggtcatggagtcctggagatgccctcaggcaccgggaagacagtatccctgttggccctgatcatggcataccagagagcatatccgctggaggtgaccaaactcatctactgctcaagaactgtgccagagattgagaaggtgattgaagagcttcgaaagttgctcaacttctatgagaagcaggagggcgagaagctgccgtttctgggactggctctgagctcccgcaaaaacttgtgtattcaccctgaggtgacacccctgcgctttgggaaggacgtcgatgggaaatgccacagcctcacagcctcctatgtgcgggcgcagtaccagcatgacaccagcctgccccactgccgattctatgaggaatttgatgcccatgggcgtgaggtgcccctccccgctggcatctacaacctggatgacctgaaggccctggggcggcgccagggctggtgcccatacttccttgctcgatactcaatcctgcatgccaatgtggtggtttatagctaccactacctcctggaccccaagattgcagacctggtgtccaaggaactggcccgcaaggccgtcgtggtcttcgacgaggcccacaacattgacaacgtctgcatcgactccatgagcgtcaacctcacccgccggacccttgaccggtgccagggcaacctggagaccctgcagaagacggtgctcaggatcaaagagacagacgagcagcgcctgcgggacgagtaccggcgtctggtggaggggctgcgggaggccagcgccgcccgggagacggacgcccacctggccaaccccgtgctgcccgacgaagtgctgcaggaggcagtgcctggctccatccgcacggccgagcatttcctgggcttcctgaggcggctgctggagtacgtgaagtggcggctgcgtgtgcagcatgtggtgcaggagagcccgcccgccttcctgagcggcctggcccagcgcgtgtgcatccagcgcaagcccctcagattctgtgctgaacgcctccggtccctgctgcatactctggagatcaccgaccttgctgacttctccccgctcaccctccttgctaactttgccacccttgtcagcacctacgccaaaggccaggctcagcactgtggaagcagcaggaaccaaaaaagatctcatccctagtaatgaactagtccgtaacttgaaagtatttcgatttcttggctttatatatcttgtggaaaggacgaaatcgtcaattgtaacctcgaaag

SEQ ID NO: 2616 - DNA, 2384 bp, Homo sapiens
  source 1..2384: mol_type = genomic DNA
accgccaccatgaagctcaacgtggacgggctcctggtctacttcccgtacgactacatctaccccgagcagttctcctacatgcgggagctcaaacgcacgctggacgccaagggtcatggagtcctggagatgccctcaggcaccgggaagacagtatccctgttggccctgatcatggcataccagagagcatatccgctggaggtgaccaaactcatctactgctcaagaactgtgccagagattgagaaggtgattgaagagcttcgaaagttgctcaacttctatgagaagcaggagggcgagaagctgccgtttctgggactggctctgagctcccgcaaaaacttgtgtattcaccctgaggtgacacccctgcgctttgggaaggacgtcgatgggaaatgccacagcctcacagcctcctatgtgcgggcgcagtaccagcatgacaccagcctgccccactgccgattctatgaggaatttgatgcccatgggcgtgaggtgcccctccccgctggcatctacaacctggatgacctgaaggccctggggcggcgccagggctggtgcccatacttccttgctcgatactcaatcctgcatgccaatgtggtggtttatagctaccactacctcctggaccccaagattgcagacctggtgtccaaggaactggcccgcaaggccgtcgtggtcttcgacgaggcccacaacattgacaacgtctgcatcgactccatgagcgtcaacctcacccgccggacccttgaccggtgccagggcaacctggagaccctgcagaagacggtgctcaggatcaaagagacagacgagcagcgcctgcgggacgagtaccggcgtctggtggaggggctgcgggaggccagcgccgcccgggagacggacgcccacctggccaaccccgtgctgcccgacgaagtgctgcaggaggcagtgcctggctccatccgcacggccgagcatttcctgggcttcctgaggcggctgctggagtacgtgaagtggcggctgcgtgtgcagcatgtggtgcaggagagcccgcccgccttcctgagcggcctggcccagcgcgtgtgcatccagcgcaagcccctcagattctgtgctgaacgcctccggtccctgctgcatactctggagatcaccgaccttgctgacttctccccgctcaccctccttgctaactttgccacccttgtcagcacctacgccaaaggcttcaccatcatcatcgagccctttgacgacagaaccccgaccattgccaaccccatcctgcacttcagctgcatggacgcctcgctggccatcaaacccgtatttgagcgtttccagtctgtcatcatcacatctgggacactgtccccgctggacatctaccccaagatcctggacttccaccccgtcaccatggcaaccttcaccatgacgctggcacgggtctgcctctgccctatgatcatcggccgtggcaatgaccaggtggccatcagctccaaatttgagacccgggaggatattgctgtgatccggaactatgggaacctcctgctggagatgtccgctgtggtccctgatggcatcgtggccttcttcaccagctaccagtacatggagagcaccgtggcctcctggtatgagcaggggatccttgagaacatccagaggaacaagctgctctttattgagacccaggatggtgccgaaaccagtgtcgccctggagaagtaccaggaggcctgcgagaatggccgcggggccatcctgctgtcagtggcccggggcaaagtgtccgagggaatcgactttgtgcaccactacgggcgggccgtcatcatgtttggcgtcccctacgtctacacacagagccgcattctcaaggcgcggctggaatacctgcgggaccagttccagattcgtgagaatgactttcttaccttcgatgccatgcgccacgcggcccagtgtgtgggtcgggccatcaggggcaagacggactacggcctcatggtctttgccgacaagcggtttgcccgtggggacaagcgggggaagctgccccgctggatccaggagcacctcacagatgccaacctcaacctgaccgtggacgagggtgtccaggtggccaagtacttcctgcggcagatggcacagcccttccaccgggaggatcagctgggcctgtccctgctcagcctggagcagctagaatcagaggagacgctgaagaggatagagcagattgctcagcagctctagtaatgaactagtccgtaacttgaaagtatttcgatttcttggctttatatatcttgtggaaaggacgatgtcaacaccacttgcctagccac

SEQ ID NO: 2617 - DNA, 2450 bp, Homo sapiens
  source 1..2450: mol_type = genomic DNA
accgccaccatgggcaaaagagaccgagcggaccgcgacaagaagaaatccaggaagcggcactatgaggatgaagaggatgatgaagaggacgccccggggaacgaccctcaggaagcggttccctcggcggcggggaagcaggtggatgagtcaggcaccaaagtggatgaatatggagccaaggactacaggctgcaaatgccgctgaaggacgaccacacctccaggcccctctgggtggctcccgatggccatatcttcttggaagccttctctccagtttacaaatatgcccaagacttcttggtggctattgcagagccagtgtgccgaccaacccatgtgcatgagtacaaactaactgcctactccttgtatgcagctgtcagcgttgggctgcaaaccagtgacatcaccgagtacctcaggaagctcagcaagactggagtccctgatggaattatgcagtttattaagttgtgtactgtcagctatggaaaagtcaagctggtcttgaagcacaacagatacttcgttgaaagttgccaccctgatgtaatccagcatcttctccaggaccccgtgatccgagaatgccgcttaagaaactctgaaggggaggccactgagctcatcacagagactttcacaagcaaatctgccatttctaagactgctgaaagcagtggtgggccctccacttcccgagtgacagatccacagggtaaatctgacatccccatggacctgtttgacttctatgagcaaatggacaaggatgaagaagaagaagaagagacacagacagtgtcttttgaagtcaagcaggaaatgattgaggaactccagaaacgttgcatccacctggagtaccctctgttggcagaatatgacttccggaatgattctgtcaaccctgatatcaacattgacctaaagcccacagctgtcctcagaccctatcaggagaagagcttgcgaaagatgtttggaaacgggcgtgcacgttcgggggtcattgttcttccctgcggtgctggaaagtccctggttggtgtgactgctgcatgcactgtcagaaaacgctgtctggtgctgggcaactcagctgtttctgtggagcagtggaaagcccagttcaagatgtggtccaccattgacgacagccagatctgccggttcacctccgatgccaaggacaagcccatcggctgctccgttgccattagcacctactccatgctgggccacaccaccaaaaggtcctgggaggccgagcgagtcatggagtggctcaagacccaggagtggggcctcatgatcctggatgaagtgcacaccataccagccaagatgttccgaagggtgctcaccatcgtgcaggcccactgtaagctgggtttgactgcgaccctcgtccgcgaagatgacaaaattgtggatttaaattttctgattgggcctaagctctacgaagccaactggatggagctgcagaataatggctacatcgccaaagtccagtgtgctgaggtctggtgccctatgtctcctgaattttaccgggaatatgtggcaatcaaaaccaagaaacgaatcttgctgtacaccatgaaccccaacaaatttagagcttgccagtttctgatcaagtttcatgaaaggaggaatgacaagattattgtctttgctgacaatgtgtttgccctaaaggaatatgccattcgactgaacaaaccctatatctacggacctacgtctcagggggaaaggatgcaaattctccagaatttcaagcacaaccccaaaattaacaccatcttcatatccaaggtaggtgacacttcgtttgatctgccggaagcaaatgtcctcattcagatctcatcccatggtggctccaggcgtcaggaagcccaaaggctagggcgggtgcttcgagctaaaaaagggatggttgcagaagagtacaatgcctttttctactcactggtatcccaggacacacaggaaatggcttactcaaccaagcggcagagattcttggtagatcaaggttatagcttcaaggtgatcacgaaactcgctggcatggaggaggaagacttggcgttttcgacaaaagaagagcaacagcagctcttacagaaagtcctggcagccactgacctggatgccgaggaggaggtggtggctggggaatttggctccagatccagccaggcatctcggcgctttggcaccatgagttctatgtctggggccgacgacactgtgtacatggagtaccactcatcgcggagcaaggcgcccagcaaacatgtacacccgctcttcaagcgctttaggaaatagtaatgaactagtccgtaacttgaaagtatttcgatttcttggctttatatatcttgtggaaaggacgactggctagttccatgatattacca

SEQ ID NO: 2618 - DNA, 4583 bp, Homo sapiens
  source 1..4583: mol_type = genomic DNA
accgccaccatgccaaatgagggaatcccccactcaagtcaaactcaggagcaagactgtttacagagtcaacctgtcagtaataatgaagaaatggcaatcaagcaagaaagtggtggtgatggggaggtggaggagtacctctcctttcgttctgtgggtgacgggctgtccacctctgctgtggggtgcgcatcagcagctccgaggagagggccagccctgctgcacatcgaccgacatcagatccaggcagtagagcctagcgcccaggcccttgagctgcagggtttgggtgtggacgtctatgaccaggacgtgctggaacagggagtgcttcagcaggtggacaatgccatccatgaggccagccgtgcctcccagctcgttgacgtggagaaggagtatcggtcggtcctggatgacctcacgtcatgtacgacatccctaaggcaaatcaataaaattattgaacagcttagccctcaagctgccaccagcagagacatcaacaggaaactagattctgtaaaacgacagaagtataataaggaacaacagctaaaaaagatcactgcaaaacaaaagcatctccaggccatccttggaggagcagaggtgaaaattgaactagatcacgccagtctggaggaggatgcagagccggggccatccagtcttggcagcatgctcatgcctgtccaggagactgcctgggaagagctcatccgcactggccagatgacaccttttggtacccagatccctcagaaacaggagaaaaagcccagaaaaatcatgcttaatgaagcatcaggcttcgaaaagtatttggcagatcaagcaaaactgtcttttgaaaggaagaagcaaggttgtaataaaagagcagctagaaaagctccagccccagtcacgcctccagccccagtgcaaaataaaaacaaaccaaacaagaaagccagagttctgtccaaaaaagaggagcgtttgaaaaagcacatcaagaaactccagaagagggctttgcagttccaggggaaagtgggattgccaaaggcaaggagaccttgggagtcagacatgaggccagaggcagagggagactctgagggtgaagagtctgagtatttccccacagaggaggaggaagaggaggaagatgacgaggtggagggggcagaggcggacctgtctggagatggtactgactatgagctgaagcctctgcccaagggcgggaaacggcagaagaaagtgccagtgcaggagattgatgatgactttttcccaagttctggggaagaagctgaagctgcttctgtaggagaaggaggaggaggaggtcggaaagtgggaagataccgagatgatggagatgaagattattataagcagcggttaaggagatggaataaactgagactgcaggacaaagagaaacgtctgaagctggaggacgattctgaggaaagtgatgctgaatttgacgaaggttttaaagtgccaggttttctgttcaaaaagctttttaagtaccagcagacaggtgttaggtggctgtgggaattgcactgccagcaggcaggaggaattctgggagatgaaatgggattgggcaagaccatccagataattgccttcttggcaggtctgagctacagcaagatcaggactcgtggttcaaattacaggtttgaggggttgggtccaactgtaattgtctgtccaacaacagtgatgcatcagtgggtgaaggaatttcacacgtggtggcctccgttcagagtggcaattctacatgaaaccggttcctatacccacaaaaaggagaaactaattcgagatgttgctcattgtcatggaattttgatcacatcttactcctacattcgattgatgcaggatgacattagcaggtatgactggcactatgtgatcttggacgaaggacacaaaattcgaaatccaaatgctgctgtcacccttgcttgcaaacagtttcgcacccctcatcggatcattctgtctggctcaccgatgcaaaataacctccgagagctgtggtcgctctttgacttcatcttcccgggaaagttaggcacgttgcctgtgtttatggagcagttctccgtccccatcaccatggggggatattcaaatgcttccccagtacaggtcaaaactgcttacaagtgtgcatgtgtcttacgagataccataaatccatacctactgcggagaatgaagtcagatgtcaagatgagcctttctttgccagataaaaatgaacaggtcttattttgccgtcttacagatgagcagcataaagtctaccaaaatttcgttgattccaaagaagtttacaggattctcaatggagagatgcagattttctccggacttatagccctaagaaaaatttgcaaccaccctgatctcttttctggaggtcccaagaatctcaaaggtcttcctgatgatgaactagaagaagatcagtttgggtactggaaacgttctgggaaaatgattgttgttgagtctttgttgaaaatatggcacaagcagggtcagcgagtattgctgttttctcagtcaaggcagatgctggacatacttgaagtattccttagagcccaaaagtatacctatctcaagatggatggtaccactacaatagcttcaagacagccactgattacgagatacaatgaggacacatccatatttgtgtttcttctgaccacgcgggtgggcggcttaggtgtcaacctgacgggggcaaacagagttgtcatctatgacccagactggaacccaagcacggacacgcaggcccgggagcgagcatggagaataggccagaagaagcaagtgactgtgtacaggctcctgactgcgggcaccattgaagaaaagatctaccaccgacaaatcttcaagcagtttttgacaaatagagtgctaaaagacccaaaacaaaggcggtttttcaaatccaatgatctctatgagctatttactctgactagtcctgatgcatcccagagcactgaaacaagtgcaatttttgcaggaactggatcagatgttcagacacccaaatgccatctaaaaagaaggattcaaccagcctttggagcagaccatgatgttccaaaacgcaagaagttccctgcttctaacatatctgtaaatgatgccacatcatctgaagagaaatctgaggctaaaggagctgaagtaaatgcagtaacttctaatcgaagtgatcctttgaaagatgaccctcacatgagtagtaatgtaactagcaatgataggcttggagaagagacaaatgcagtatctggaccagaagagttgtcagtgattagtggaaatggggaatgttcaaattcttcaggaacaggcaaaacttctatgccatctggtgatgaaagcattgatgaaaagttaggtctttcttacaaaagagaaagacccagccaggctcaaacagaagctttttgggagaataaacaaatggaaaataatttttataagcacaagtcaaaaacaaaacatcatagtgtggcagaagaagagaccctggagaaacatctgagaccaaagcaaaagcctaagaactctaagcattgcagagacgccaagtttgaaggaactcgaattccacacctggtgaagaaaaggcgttaccagaagcaagacagtgaaaacaagagtgaggccaaggaacagagcaatgacgattatgttttggaaaagcttttcaaaaaatcagttggcgtgcacagtgtcatgaagcacgatgccatcatggatggagccagcccagattatgtactggtggaggcagaagccaaccgagtggcccaggatgccctgaaagcactgaggctctctcgtcagcggtgtctgggagcagtgtctggtgttcccacctggactggccacagggggatttctggtgcaccagcaggaaaaaagagtagatttggtaagaaaaggaattctaacttctctgtgcagcatccttcatcaacatctccaacagagaagtgccaggatggcatcatgaaaaaggagggaaaagataatgtccctgagcattttagtggaagagcagaagatgcagactcttcatccgggcccctcgcttcctcctcactcttggctaaaatgagagctagaaaccacctgattctgccagagcgtttagaaagtgaaagcgggcacctgcaggaagcttctgccctgctgcccaccacagaacacgatgaccttctggtggagatgagaaacttcatcgctttccaggcccacactgatggccaggccagcaccagggagatactgcaggagtttgaatccaagttatctgcatcacagtcttgtgtcttccgagaactattgagaaatctgtgcactttccatagaacttctggtggtgaaggaatttggaaactcaagccagaatactgctagtaatgaactagtccgtaacttgaaagtatttcgatttcttggctttatatatcttgtggaaaggacgaacgcaatttacggcctggttgtgg

SEQ ID NO: 2619 - DNA, 3287 bp, Homo sapiens
  source 1..3287: mol_type = genomic DNA
accgccaccatgccaaatgagggaatcccccactcaagtcaaactcaggagcaagactgtttacagagtcaacctgtcagtaataatgaagaaatggcaatcaagcaagaaagtggtggtgatggggaggtggaggagtacctctcctttcgttctgtgggtgacgggctgtccacctctgctgtggggtgcgcatcagcagctccgaggagagggccagccctgctgcacatcgaccgacatcagatccaggcagtagagcctagcgcccaggcccttgagctgcagggtttgggtgtggacgtctatgaccaggacgtgctggaacagggagtgcttcagcaggtggacaatgccatccatgaggccagccgtgcctcccagctcgttgacgtggagaaggagtatcggtcggtcctggatgacctcacgtcatgtacgacatccctaaggcaaatcaataaaattattgaacagcttagccctcaagctgccaccagcagagacatcaacaggaaactagattctgtaaaacgacagaagtataataaggaacaacagctaaaaaagatcactgcaaaacaaaagcatctccaggccatccttggaggagcagaggtgaaaattgaactagatcacgccagtctggaggaggatgcagagccggggccatccagtcttggcagcatgctcatgcctgtccaggagactgcctgggaagagctcatccgcactggccagatgacaccttttggtacccagatccctcagaaacaggagaaaaagcccagaaaaatcatgcttaatgaagcatcaggcttcgaaaagtatttggcagatcaagcaaaactgtcttttgaaaggaagaagcaaggttgtaataaaagagcagctagaaaagctccagccccagtcacgcctccagccccagtgcaaaataaaaacaaaccaaacaagaaagccagagttctgtccaaaaaagaggagcgtttgaaaaagcacatcaagaaactccagaagagggctttgcagttccaggggaaagtgggattgccaaaggcaaggagaccttgggagtcagacatgaggccagaggcagagggagactctgagggtgaagagtctgagtatttccccacagaggaggaggaagaggaggaagatgacgaggtggagggggcagaggcggacctgtctggagatggtactgactatgagctgaagcctctgcccaagggcgggaaacggcagaagaaagtgccagtgcaggagattgatgatgactttttcccaagttctggggaagaagctgaagctgcttctgtaggagaaggaggaggaggaggtcggaaagtgggaagataccgagatgatggagatgaagattattataagcagcggttaagtcccaagatgcctcgaacactaagtttacatgaaataactgaccttttagagacagatgacagcatagaagcaagtgctatagtgatacaaccacctgaaaatgctacagcacctgtttctgatgaggaatcaggagatgaagaaggtggaacaataaataatctgccaggttctttgttgcacacagctgcgtatcttattcaagatggctctgatgctgagtctgactcagatgatccctcatacgcacctaaagatgactctcctgatgaagttccatctacgtttactgtgcagcaacctccaccatcaaggaggaggaaaatgacaaaaattctttgcaaatggaaaaaagccgacctaactgtacaacccgtagcaggtagagttacagcaccaccaaacgatttcttcaccgtaatgagaactcccacagaaattcttgaactttttcttgatgacgaggtcattgaactcattgtcaagtactccaacttatatgcttgcagtaaaggtgtacatcttggcttgactagctctgaattcaaatgttttctgggaattatttttctgagtggttatgtctcagttcctagaaggcgtatgttttgggaacaaagaacagatgtgcataatgtactggttagtgctgccatgagacgtgaccggtttgaaactatattttctaatttgcatgttgctgacaatgcaaatttggatccagtggacaaattttccaaattgcgacctctcataagcaaacttaatgagagatgcatgaaatttgttccaaatgaaacatatttcagctttgatgaattcatggttccttattttggtcgtcacgggtgcaaacaatttattcggggaaagcccattcggtttggctataagttttggtgtggtgccacctgtctgggctacatttgctggtttcagccgtatcagggtaaaaacccaaatactaaacatgaggaatatggtgtcggtgcgtcacttgtccttcagtttagtgaggcacttacagaggcacaccctggacaataccattttgtattcaataactttttcaccagtattgcacttcttgataagctcagttcaatgggacatcaggcaacaggtacagtgagaaaggatcacattgacagagttccactggaatcagatgtagctttaaagaaaaaagaaagaggcacatttgattatcgaattgatggcaaaggcaatattgtctgcagatggaatgataacagtgttgtcactgttgcctcatctggtgctggtatccatcccctgtgtcttgtcagtcgttactcccagaaactgaaaaagaagatacaagttcagcagccaaacatgatcaaagtgtataaccagttcatgggaggcgtagacagagctgatgaaaacattgataagtatcgggcatcaatccgtggaaagaaatggtattcaagccctcttttgttctgtttcgaactggtcttacaaaatgcttggcaattgcataaaacatatgatgagaaaccagtggattttctggagtttcgtcgacgtgtggtatgccattatctggagacccatggtcatcctccagaacctggccaaaaaggaagacctcagaagcgtaacattgactcacgttatgatggcataaatcatgtgatagtcaaacagggaaagcaaacgcgatgcgctgaatgtcataagaacacaacttttcgatgtgaaaaatgtgatgttgccttacatgtgaagtgttccgttgaatatcacactgaatagtaatgaactagtccgtaacttgaaagtatttcgatttcttggctttatatatcttgtggaaaggacgattctcgacaagagtttcgtgagga

SEQ ID NO: 2620 - DNA, 1442 bp, Homo sapiens
  source 1..1442: mol_type = genomic DNA
accgccaccatgctggacatgagcgaggcccgctcccagccgccctgcagcccgtccggcaccgccagctccatgtcgcacgtggaggactcggactcggacgcgccgccgtctcccgccggctccgagggcctgggccgcgcgggggtcgcggtggggggcgcccggggcgacccggcggaggcggcggacgagcgcttcccggcctgcatccgcgacgccgtgtcgcaggtgctcaagggctacgactggagtctggtgcccatgccggtgcgcggcggcggcggcggcgcgctcaaagccaagccgcatgtgaagcggcccatgaacgcattcatggtgtgggcgcaggcggcgcgccgcaagctggccgaccagtacccgcacctgcacaacgccgagctcagcaagacgctgggcaagctgtggcgcttgctgagcgagagcgagaagcggcccttcgtggaggaggcagagcgccttcgcgtgcagcacaagaaggaccaccccgactacaagtaccagccacggcgcaggaagagcgccaaagccggccacagcgactccgactcgggcgcggagctgggaccccaccctggcggcggtgccgtgtacaaggctgaagcagggcttggagatgggcaccaccatggcgaccacacagggcagacccacgggccgcccaccccgcccaccacccccaagacggagctgcagcaggcgggcgccaagccggagctgaagctggagggacgccggccggtggacagcgggcgccagaacatcgacttcagcaacgtggacatctcggagctcagcagcgaggtcatgggcaccatggacgccttcgacgtccacgagttcgaccagtacctgcccctgggcggccccgccccacccgagccgggccaggcctatgggggcgcctacttccacgccggggcgtcccccgtgtgggcccacaagagtgccccgtcggcctccgcgtcgcccaccgagacgggtcccccacggccgcacatcaagacggagcagccgagccccggccactacggcgaccagccccgaggctcgcccgactacggttcctgcagcggccagtccagcgccaccccggccgcccccgccggccccttcgccggctcacagggcgactatggcgacctgcaggcctccagctactatggtgcctaccctggctacgcacccggcctctaccagtacccctgcttccactcgccgcgccggccctacgcctcacccctgctcaacggcctggccctgccgcccgcccacagccccaccagtcactgggaccagccggtgtacaccaccctgaccaggccctagtaatgaactagtccgtaacttgaaagtatttcgatttcttggctttatatatcttgtggaaaggacgaaacgcggtacacgacgcaaattct

SEQ ID NO: 2621 - DNA, 1631 bp, Homo sapiens
  source 1..1631: mol_type = genomic DNA
accgccaccatgaatctcctggaccccttcatgaagatgaccgacgagcaggagaagggcctgtccggcgcccccagccccaccatgtccgaggactccgcgggctcgccctgcccgtcgggctccggctcggacaccgagaacacgcggccccaggagaacacgttccccaagggcgagcccgatctgaagaaggagagcgaggaggacaagttccccgtgtgcatccgcgaggcggtcagccaggtgctcaaaggctacgactggacgctggtgcccatgccggtgcgcgtcaacggctccagcaagaacaagccgcacgtcaagcggcccatgaacgccttcatggtgtgggcgcaggcggcgcgcaggaagctcgcggaccagtacccgcacttgcacaacgccgagctcagcaagacgctgggcaagctctggagacttctgaacgagagcgagaagcggcccttcgtggaggaggcggagcggctgcgcgtgcagcacaagaaggaccacccggattacaagtaccagccgcggcggaggaagtcggtgaagaacgggcaggcggaggcagaggaggccacggagcagacgcacatctcccccaacgccatcttcaaggcgctgcaggccgactcgccacactcctcctccggcatgagcgaggtgcactcccccggcgagcactcggggcaatcccagggcccaccgaccccacccaccacccccaaaaccgacgtgcagccgggcaaggctgacctgaagcgagaggggcgccccttgccagaggggggcagacagccccctatcgacttccgcgacgtggacatcggcgagctgagcagcgacgtcatctccaacatcgagaccttcgatgtcaacgagtttgaccagtacctgccgcccaacggccacccgggggtgccggccacgcacggccaggtcacctacacgggcagctacggcatcagcagcaccgcggccaccccggcgagcgcgggccacgtgtggatgtccaagcagcaggcgccgccgccacccccgcagcagcccccacaggccccgccggccccgcaggcgcccccgcagccgcaggcggcgcccccacagcagccggcggcacccccgcagcagccacaggcgcacacgctgaccacgctgagcagcgagccgggccagtcccagcgaacgcacatcaagacggagcagctgagccccagccactacagcgagcagcagcagcactcgccccaacagatcgcctacagccccttcaacctcccacactacagcccctcctacccgcccatcacccgctcacagtacgactacaccgaccaccagaactccagctcctactacagccacgcggcaggccagggcaccggcctctactccaccttcacctacatgaaccccgctcagcgccccatgtacacccccatcgccgacacctctggggtcccttccatcccgcagacccacagcccccagcactgggaacaacccgtctacacacagctcactcgaccttagtaatgaactagtccgtaacttgaaagtatttcgatttcttggctttatatatcttgtggaaaggacgaagttctggagtgtttcggagcctt

SEQ ID NO: 2622 - DNA, 1442 bp, Homo sapiens
  source 1..1442: mol_type = genomic DNA
accgccaccatgcgacctgttcgagagaactcatcaggtgcgagaagcccgcgggttcctgctgatttggcgcggagcattttgataagcctacccttcccgccggactcgctggcccacaggcccccaagctccgctccgacggagtcccagggccttttcaccgtggccgctccagccccgggagcgccttctcctcccgccacgctggcgcaccttcttcccgccccggcaatgtacagccttctggagactgaactcaagaaccccgtagggacacccacacaagcggcgggcaccggcggccccgcagccccgggaggcgcaggcaagagtagtgcgaacgcagccggcggcgcgaactcgggcggcggcagcagcggtggtgcgagcggaggtggcgggggtacagaccaggaccgtgtgaaacggcccatgaacgccttcatggtatggtcccgcgggcagcggcgcaaaatggccctggagaaccccaagatgcacaattctgagatcagcaagcgcttgggcgccgactggaaactgctgaccgacgccgagaagcgaccattcatcgacgaggccaagcgacttcgcgccgtgcacatgaaggagtatccggactacaagtaccgaccgcgccgcaagaccaagacgctgctcaagaaagataagtactccctgcccagcggcctcctgcctcccggtgccgcggccgccgccgccgctgccgcggccgcagccgctgccgccagcagtccggtgggcgtgggccagcgcctggacacgtacacgcacgtgaacggctgggccaacggcgcgtactcgctggtgcaggagcagctgggctacgcgcagcccccgagcatgagcagcccgccgccgccgcccgcgctgccgccgatgcaccgctacgacatggccggcctgcagtacagcccaatgatgccgcccggcgctcagagctacatgaacgtcgctgccgcggccgccgccgcctcgggctacgggggcatggcgccctcagccacagcagccgcggccgccgcctacgggcagcagcccgccaccgccgcggccgcagctgcggccgcagccgccatgagcctgggccccatgggctcggtagtgaagtctgagcccagctcgccgccgcccgccatcgcatcgcactctcagcgcgcgtgcctcggcgacctgcgcgacatgatcagcatgtacctgccacccggcggggacgcggccgacgccgcctctccgctgcccggcggtcgcctgcacggcgtgcaccagcactaccagggcgccgggactgcagtcaacggaacggtgccgctgacccacatctagtaatgaactagtccgtaacttgaaagtatttcgatttcttggctttatatatcttgtggaaaggacgacgcgactgtttattagaagcgccc

SEQ ID NO: 2623 - DNA, 1277 bp, Homo sapiens
  source 1..1277: mol_type = genomic DNA
accgccaccatgtacagcatgatgatggagaccgacctgcactcgcccggcggcgcccaggcccccacgaacctctcgggccccgccggggcgggcggcggcgggggcggaggcgggggcggcggcggcggcgggggcgccaaggccaaccaggaccgggtcaaacggcccatgaacgccttcatggtgtggtcccgcgggcagcggcgcaagatggcccaggagaaccccaagatgcacaactcggagatcagcaagcgcctgggggccgagtggaaggtcatgtccgaggccgagaagcggccgttcatcgacgaggccaagcggctgcgcgcgctgcacatgaaggagcacccggattacaagtaccggccgcgccgcaagaccaagacgctgctcaagaaggacaagtactcgctggccggcgggctcctggcggccggcgcgggtggcggcggcgcggctgtggccatgggcgtgggcgtgggcgtgggcgcggcggccgtgggccagcgcctggagagcccaggcggcgcggcgggcggcggctacgcgcacgtcaacggctgggccaacggcgcctaccccggctcggtggcggcggcggcggcggccgcggccatgatgcaggaggcgcagctggcctacgggcagcacccgggcgcgggcggcgcgcacccgcacgcgcaccccgcgcacccgcacccgcaccacccgcacgcgcacccgcacaacccgcagcccatgcaccgctacgacatgggcgcgctgcagtacagccccatctccaactcgcagggctacatgagcgcgtcgccctcgggctacggcggcctcccctacggcgccgcggccgccgccgccgccgctgcgggcggcgcgcaccagaactcggccgtggcggcggcggcggcggcggcggccgcgtcgtcgggcgccctgggcgcgctgggctctctggtgaagtcggagcccagcggcagcccgcccgccccagcgcactcgcgggcgccgtgccccggggacctgcgcgagatgatcagcatgtacttgcccgccggcgaggggggcgacccggcggcggcagcagcggccgcggcgcagagccggctgcactcgctgccgcagcactaccagggcgcgggcgcgggcgtgaacggcacggtgcccctgacgcacatctagtaatgaactagtccgtaacttgaaagtatttcgatttcttggctttatatatcttgtggaaaggacgagtcattaaaccatttacgacgtcc

SEQ ID NO: 2624 - DNA, 2507 bp, Homo sapiens
  source 1..2507: mol_type = genomic DNA
accgccaccatgtcttccaagcaagccacctctccatttgcctgtgcagctgatggagaggatgcaatgacccaggatttaacctcaagggaaaaggaagagggcagtgatcaacatgtggcctcccatctgcctctgcaccccataatgcacaacaaacctcactctgaggagctaccaacacttgtcagtaccattcaacaagatgctgactgggacagcgttctgtcatctcagcaaagaatggaatcagagaataataagttatgttccctatattccttccgaaatacctctacctcaccacataagcctgacgaagggagtcgggaccgtgagataatgaccagtgttacttttggaaccccagagcgccgcaaagggagtcttgccgatgtggtggacacactgaaacagaagaagcttgaggaaatgactcggactgaacaagaggattcctcctgcatggaaaaactactttcaaaagattggaaggaaaaaatggaaagactaaataccagtgaacttcttggagaaattaaaggtacacctgagagcctggcagaaaaagaacggcagctctccaccatgattacccagctgatcagtttacgggagcagctactggcagcgcatgatgaacagaaaaaactggcagcgtcacaaattgagaaacaacggcagcaaatggaccttgctcgccaacagcaagaacagattgcgagacaacagcagcaacttctgcaacagcagcacaaaattaatctcctgcagcaacagatccaggttcagggtcacatgcctccgctcatgatcccaatttttccacatgaccagcggactctggcagcagctgctgctgcccaacagggattcctcttcccccctggaataacatacaaaccaggtgataactaccccgtacagttcattccatcaacaatggcagctgctgctgcttctggactcagccctttacagctccagcagctctatgccgctcagctggccagcatgcaggtgtcacctggagcaaagatgccatcaactccacagccaccaaacacagcagggacggtctcacctactgggataaaaaatgaaaagagagggaccagccctgtaactcaagttaaggatgaagcagcagcacagcctctgaatctctcatcccgacccaagacagcagagcctgtaaagtccccaacgtctcccacccagaacctcttcccagccagcaaaaccagccctgtcaatctgccaaacaaaagcagcatccctagccccattggaggaagcctgggaagaggatcctctttaggtaaatggaaaagtcaacaccaggaagagacttacgaattagatatcctatctagtctcaactcccctgccctttttggggatcaggatacagtgatgaaagccattcaggaggcgcggaagatgcgagagcagatccagcgggagcaacagcagcaacagccacatggtgttgacgggaaactgtcctccataaataatatggggctgaacagctgcaggaatgaaaaggaaagaacgcgctttgagaatttggggccccagttaacgggaaagtcaaatgaagatggaaaactgggcccaggtgtcatcgaccttactcggccagaagatgcagagggaagtaaagcaatgaatggctctgcagctaaactacagcagtattattgttggccaacaggaggtgccactgtggctgaagcacgagtctacagggacgcccgcggccgtgccagcagcgagccacacattaagcgaccaatgaatgcattcatggtttgggcaaaggatgagaggagaaaaatccttcaggccttccccgacatgcataactccaacattagcaaaatcttaggatctcgctggaaatcaatgtccaaccaggagaagcaaccttattatgaagagcaggcccggctaagcaagatccacttagagaagtacccaaactataaatacaaaccccgaccgaaacgcacctgcattgttgatggcaaaaagcttcggattggggagtataagcaactgatgaggtctcggagacaggagatgaggcagttctttactgtggggcaacagcctcagattccaatcaccacaggaacaggtgttgtgtatcctggtgctatcactatggcaactaccacaccatcgcctcagatgacatctgactgctctagcacctcggccagcccggagcccagcctcccggtcatccagagcacttatggtatgaagacagatggcggaagcctagctggaaatgaaatgatcaatggagaggatgaaatggaaatgtatgatgactatgaagatgaccccaaatcagactatagcagtgaaaatgaagccccggaggctgtcagtgccaactagtaatgaactagtccgtaacttgaaagtatttcgatttcttggctttatatatcttgtggaaaggacgagcctggcggcaatgcggaaacaca

SEQ ID NO: 2625 - DNA, 2516 bp, Homo sapiens
  source 1..2516: mol_type = genomic DNA
accgccaccatgggaagaatgtcttccaagcaagccacctctccatttgcctgtgcagctgatggagaggatgcaatgacccaggatttaacctcaagggaaaaggaagagggcagtgatcaacatgtggcctcccatctgcctctgcaccccataatgcacaacaaacctcactctgaggagctaccaacacttgtcagtaccattcaacaagatgctgactgggacagcgttctgtcatctcagcaaagaatggaatcagagaataataagttatgttccctatattccttccgaaatacctctacctcaccacataagcctgacgaagggagtcgggaccgtgagataatgaccagtgttacttttggaaccccagagcgccgcaaagggagtcttgccgatgtggtggacacactgaaacagaagaagcttgaggaaatgactcggactgaacaagaggattcctcctgcatggaaaaactactttcaaaagattggaaggaaaaaatggaaagactaaataccagtgaacttcttggagaaattaaaggtacacctgagagcctggcagaaaaagaacggcagctctccaccatgattacccagctgatcagtttacgggagcagctactggcagcgcatgatgaacagaaaaaactggcagcgtcacaaattgagaaacaacggcagcaaatggaccttgctcgccaacagcaagaacagattgcgagacaacagcagcaacttctgcaacagcagcacaaaattaatctcctgcagcaacagatccaggttcagggtcacatgcctccgctcatgatcccaatttttccacatgaccagcggactctggcagcagctgctgctgcccaacagggattcctcttcccccctggaataacatacaaaccaggtgataactaccccgtacagttcattccatcaacaatggcagctgctgctgcttctggactcagccctttacagctccagcagctctatgccgctcagctggccagcatgcaggtgtcacctggagcaaagatgccatcaactccacagccaccaaacacagcagggacggtctcacctactgggataaaaaatgaaaagagagggaccagccctgtaactcaagttaaggatgaagcagcagcacagcctctgaatctctcatcccgacccaagacagcagagcctgtaaagtccccaacgtctcccacccagaacctcttcccagccagcaaaaccagccctgtcaatctgccaaacaaaagcagcatccctagccccattggaggaagcctgggaagaggatcctctttaggtaaatggaaaagtcaacaccaggaagagacttacgaattagatatcctatctagtctcaactcccctgccctttttggggatcaggatacagtgatgaaagccattcaggaggcgcggaagatgcgagagcagatccagcgggagcaacagcagcaacagccacatggtgttgacgggaaactgtcctccataaataatatggggctgaacagctgcaggaatgaaaaggaaagaacgcgctttgagaatttggggccccagttaacgggaaagtcaaatgaagatggaaaactgggcccaggtgtcatcgaccttactcggccagaagatgcagagggaagtaaagcaatgaatggctctgcagctaaactacagcagtattattgttggccaacaggaggtgccactgtggctgaagcacgagtctacagggacgcccgcggccgtgccagcagcgagccacacattaagcgaccaatgaatgcattcatggtttgggcaaaggatgagaggagaaaaatccttcaggccttccccgacatgcataactccaacattagcaaaatcttaggatctcgctggaaatcaatgtccaaccaggagaagcaaccttattatgaagagcaggcccggctaagcaagatccacttagagaagtacccaaactataaatacaaaccccgaccgaaacgcacctgcattgttgatggcaaaaagcttcggattggggagtataagcaactgatgaggtctcggagacaggagatgaggcagttctttactgtggggcaacagcctcagattccaatcaccacaggaacaggtgttgtgtatcctggtgctatcactatggcaactaccacaccatcgcctcagatgacatctgactgctctagcacctcggccagcccggagcccagcctcccggtcatccagagcacttatggtatgaagacagatggcggaagcctagctggaaatgaaatgatcaatggagaggatgaaatggaaatgtatgatgactatgaagatgaccccaaatcagactatagcagtgaaaatgaagccccggaggctgtcagtgccaactagtaatgaactagtccgtaacttgaaagtatttcgatttcttggctttatatatcttgtggaaaggacgacccagagcctctccacagatagac

SEQ ID NO: 2626 - DNA, 2528 bp, Homo sapiens
  source 1..2528: mol_type = genomic DNA
accgccaccatgtcttccaagcaagccacctctccatttgcctgtgcagctgatggagaggatgcaatgacccaggatttaacctcaagggaaaaggaagagggcagtgatcaacatgtggcctcccatctgcctctgcaccccataatgcacaacaaacctcactctgaggagctaccaacacttgtcagtaccattcaacaagatgctgactgggacagcgttctgtcatctcagcaaagaatggaatcagagaataataagttatgttccctatattccttccgaaatacctctacctcaccacataagcctgacgaagggagtcgggaccgtgagataatgaccagtgttacttttggaaccccagagcgccgcaaagggagtcttgccgatgtggtggacacactgaaacagaagaagcttgaggaaatgactcggactgaacaagaggattcctcctgcatggaaaaactactttcaaaagattggaaggaaaaaatggaaagactaaataccagtgaacttcttggagaaattaaaggtacacctgagagcctggcagaaaaagaacggcagctctccaccatgattacccagctgatcagtttacgggagcagctactggcagcgcatgatgaacagaaaaaactggcagcgtcacaaattgagaaacaacggcagcaaatggaccttgctcgccaacagcaagaacagattgcgagacaacagcagcaacttctgcaacagcagcacaaaattaatctcctgcagcaacagatccaggttcagggtcacatgcctccgctcatgatcccaatttttccacatgaccagcggactctggcagcagctgctgctgcccaacagggattcctcttcccccctggaataacatacaaaccaggtgataactaccccgtacagttcattccatcaacaatggcagctgctgctgcttctggactcagccctttacagctccagaagggtcatgtctcccacccacaaattaaccaaaggctaaagggcctaagtgaccgttttggcaggaatttggacacctttgaacatggtggtggccactcttacaaccacaaacagattgagcagctctatgccgctcagctggccagcatgcaggtgtcacctggagcaaagatgccatcaactccacagccaccaaacacagcagggacggtctcacctactgggataaaaaatgaaaagagagggaccagccctgtaactcaagttaaggatgaagcagcagcacagcctctgaatctctcatcccgacccaagacagcagagcctgtaaagtccccaacgtctcccacccagaacctcttcccagccagcaaaaccagccctgtcaatctgccaaacaaaagcagcatccctagccccattggaggaagcctgggaagaggatcctctttagatatcctatctagtctcaactcccctgccctttttggggatcaggatacagtgatgaaagccattcaggaggcgcggaagatgcgagagcagatccagcgggagcaacagcagcaacagccacatggtgttgacgggaaactgtcctccataaataatatggggctgaacagctgcaggaatgaaaaggaaagaacgcgctttgagaatttggggccccagttaacgggaaagtcaaatgaagatggaaaactgggcccaggtgtcatcgaccttactcggccagaagatgcagagggaggtgccactgtggctgaagcacgagtctacagggacgcccgcggccgtgccagcagcgagccacacattaagcgaccaatgaatgcattcatggtttgggcaaaggatgagaggagaaaaatccttcaggccttccccgacatgcataactccaacattagcaaaatcttaggatctcgctggaaatcaatgtccaaccaggagaagcaaccttattatgaagagcaggcccggctaagcaagatccacttagagaagtacccaaactataaatacaaaccccgaccgaaacgcacctgcattgttgatggcaaaaagcttcggattggggagtataagcaactgatgaggtctcggagacaggagatgaggcagttctttactgtggggcaacagcctcagattccaatcaccacaggaacaggtgttgtgtatcctggtgctatcactatggcaactaccacaccatcgcctcagatgacatctgactgctctagcacctcggccagcccggagcccagcctcccggtcatccagagcacttatggtatgaagacagatggcggaagcctagctggaaatgaaatgatcaatggagaggatgaaatggaaatgtatgatgactatgaagatgaccccaaatcagactatagcagtgaaaatgaagccccggaggctgtcagtgccaactagtaatgaactagtccgtaacttgaaagtatttcgatttcttggctttatatatcttgtggaaaggacgaacctggtgatccagtggcatagtt

SEQ ID NO: 2627 - DNA, 1268 bp, Homo sapiens
  source 1..1268: mol_type = genomic DNA
accgccaccatggcttcgctgctgggagcctacccttggcccgagggtctcgagtgcccggccctggacgccgagctgtcggatggacaatcgccgccggccgtcccccggcccccgggggacaagggctccgagagccgtatccggcggcccatgaacgccttcatggtttgggccaaggacgagaggaaacggctggcagtgcagaacccggacctgcacaacgccgagctcagcaagatgctgggaaagtcgtggaaggcgctgacgctgtcccagaagaggccgtacgtggacgaggcggagcggctgcgcctgcagcacatgcaggactaccccaactacaagtaccggccgcgcaggaagaagcaggccaagcggctgtgcaagcgcgtggacccgggcttccttctgagctccctctcccgggaccagaacgccctgccggagaagagaagcggcagccggggggcgctgggggagaaggaggacaggggtgagtactcccccggcactgccctgcccagcctccggggctgctaccacgaggggccggctggtggtggcggcggcggcaccccgagcagtgtggacacgtacccgtacgggctgcccacacctcctgaaatgtctcccctggacgtgctggagccggagcagaccttcttctcctccccctgccaggaggagcatggccatccccgccgcatcccccacctgccagggcacccgtactcaccggagtacgccccaagccctctccactgtagccaccccctgggctccctggcccttggccagtcccccggcgtctccatgatgtcccctgtacccggctgtcccccatctcctgcctattactccccggccacctaccacccactccactccaacctccaagcccacctgggccagctttccccgcctcctgagcaccctggcttcgacgccctggatcaactgagccaggtggaactcctgggggacatggatcgcaatgaattcgaccagtatttgaacactcctggccacccagactccgccacaggggccatggccctcagtgggcatgttccggtctcccaggtgacaccaacgggtcccacagagaccagcctcatctccgtcctggctgatgccacggccacgtactacaacagctacagtgtgtcatagtaatgaactagtccgtaacttgaaagtatttcgatttcttggctttatatatcttgtggaaaggacgacttagcgcgtgataccagcttgta

SEQ ID NO: 2628 - DNA, 1526 bp, Homo sapiens
  source 1..1526: mol_type = genomic DNA
accgccaccatggtgcagcaaaccaacaatgccgagaacacggaagcgctgctggccggcgagagctcggactcgggcgccggcctcgagctgggaatcgcctcctcccccacgcccggctccaccgcctccacgggcggcaaggccgacgacccgagctggtgcaagaccccgagtgggcacatcaagcgacccatgaacgccttcatggtgtggtcgcagatcgagcggcgcaagatcatggagcagtcgcccgacatgcacaacgccgagatctccaagcggctgggcaaacgctggaagctgctcaaagacagcgacaagatccctttcattcgagaggcggagcggctgcgcctcaagcacatggctgactaccccgactacaagtaccggcccaggaagaaggtgaagtccggcaacgccaactccagctcctcggccgccgcctcctccaagccgggggagaagggagacaaggtcggtggcagtggcgggggcggccatgggggcggcggcggcggcgggagcagcaacgcggggggaggaggcggcggtgcgagtggcggcggcgccaactccaaaccggcgcagaaaaagagctgcggctccaaagtggcgggcggcgcgggcggtggggttagcaaaccgcacgccaagctcatcctggcaggcggcggcggcggcgggaaagcagcggctgccgccgccgcctccttcgccgccgaacaggcgggggccgccgccctgctgcccctgggcgccgccgccgaccaccactcgctgtacaaggcgcggactcccagcgcctcggcctccgcctcctcggcagcctcggcctccgcagcgctcgcggccccgggcaagcacctggcggagaagaaggtgaagcgcgtctacctgttcggcggcctgggcacgtcgtcgtcgcccgtgggcggcgtgggcgcgggagccgaccccagcgaccccctgggcctgtacgaggaggagggcgcgggctgctcgcccgacgcgcccagcctgagcggccgcagcagcgccgcctcgtcccccgccgccggccgctcgcccgccgaccaccgcggctacgccagcctgcgcgccgcctcgcccgccccgtccagcgcgccctcgcacgcgtcctcctcggcctcgtcccactcctcctcttcctcctcctcgggctcctcgtcctccgacgacgagttcgaagacgacctgctcgacctgaaccccagctcaaactttgagagcatgtccctgggcagcttcagttcgtcgtcggcgctcgaccgggacctggattttaacttcgagcccggctccggctcgcacttcgagttcccggactactgcacgcccgaggtgagcgagatgatctcgggagactggctcgagtccagcatctccaacctggttttcacctactagtaatgaactagtccgtaacttgaaagtatttcgatttcttggctttatatatcttgtggaaaggacgacagcagtaaccaaaccgtggctaa

SEQ ID NO: 2629 - DNA, 1235 bp, Homo sapiens
  source 1..1235: mol_type = genomic DNA
accgccaccatgcatgatgaagtggcacagccactgaacctatcagctaaacccaagacctctgatggcaaatcacccacatcacccacctctccccatatgccagctctgagaataaacagtggggcaggccccctcaaagcctctgtcccagcagcgttagctagtccttcagccagagttagcacaataggttacttaaatgaccatgatgctgtcaccaaggcaatccaagaagctcggcaaatgaaggagcaactccgacgggaacaacaggtgcttgatgggaaggtggctgttgtgaatagtctgggtctcaataactgccgaacagaaaaggaaaaaacaacactggagagtctgactcagcaactggcagttaaacagaatgaagaaggaaaatttagccatgcaatgatggatttcaatctgagtggagattctgatggaagtgctggagtctcagagtcaagaatttatagggaatcccgagggcgtggtagcaatgaaccccacataaagcgtccaatgaatgccttcatggtgtgggctaaagatgaacggagaaagatccttcaagcctttcctgacatgcacaactccaacatcagcaagatattgggatctcgctggaaagctatgacaaacctagagaaacagccatattatgaggagcaagcccgtctcagcaagcagcacctggagaagtaccctgactataagtacaagcccaggccaaagcgcacctgcctggtggatggcaaaaagctgcgcattggtgaatacaaggcaatcatgcgcaacaggcggcaggaaatgcggcagtacttcaatgttgggcaacaagcacagatccccattgccactgctggtgttgtgtaccctggagccatcgccatggctgggatgccctcccctcacctgccctcggagcactcaagcgtgtctagcagcccagagcctgggatgcctgttatccagagcacttacggtgtgaaaggagaggagccacatatcaaagaagagatacaggccgaggacatcaatggagaaatttatgatgagtacgacgaggaagaggatgatccagatgtagattatgggagtgacagtgaaaaccatattgcaggacaagccaactagtaatgaactagtccgtaacttgaaagtatttcgatttcttggctttatatatcttgtggaaaggacgaggttcttacaagcaaagatgagag

SEQ ID NO: 2630 - DNA, 2363 bp, Homo sapiens
  source 1..2363: mol_type = genomic DNA
accgccaccatgtctgtgatgtcttccaagcgaccagcctctccgtatggggaagcagatggagaggtagccatggtgacaagcagacagaaagtggaagaagaggagagtgacgggctcccagcctttcaccttcccttgcatgtgagttttcccaacaagcctcactctgaggaatttcagccagtttctctgctgacgcaagagacttgtggccataggactcccacttctcagcacaatacaatggaagttgatggcaataaagttatgtcttcatttgccccacacaactcatctacctcacctcagaaggcagaagaaggtgggcgacagagtggcgagtccttgtctagtacagccctgggaactcctgaacggcgcaagggcagtttagctgatgttgttgacaccttgaagcagaggaaaatggaagagctcatcaaaaacgagccggaagaaacccccagtattgaaaaactactctcaaaggactggaaagacaagcttcttgcaatgggatcggggaactttggcgaaataaaagggactcccgagagcttagctgagaaagaaaggcaactcatgggtatgatcaaccagctgaccagcctccgagagcagctgttggctgcccacgatgagcagaagaaactagctgcctctcagattgagaaacagcgtcagcaaatggagctggccaagcagcaacaagaacaaattgcaagacagcagcagcagcttctacagcaacaacacaaaatcaatttgctccagcaacagatccaggttcaaggtcagctgccgccattaatgattcccgtattccctcctgatcaacggacactggctgcagctgcccagcaaggattcctcctccctccaggcttcagctataaggctggatgtagtgacccttaccctgttcagctgatcccaactaccatggcagctgctgccgcagcaacaccaggcttaggcccactccaactgcagcagttatatgctgcccagctagctgcaatgcaggtatctccaggagggaagctgccaggcataccccaaggcaaccttggtgctgctgtatctcctaccagcattcacacagacaagagcacaaacagcccaccacccaaaagcaaggatgaagtggcacagccactgaacctatcagctaaacccaagacctctgatggcaaatcacccacatcacccacctctccccatatgccagctctgagaataaacagtggggcaggccccctcaaagcctctgtcccagcagcgttagctagtccttcagccagagttagcacaataggttacttaaatgaccatgatgctgtcaccaaggcaatccaagaagctcggcaaatgaaggagcaactccgacgggaacaacaggtgcttgatgggaaggtggctgttgtgaatagtctgggtctcaataactgccgaacagaaaaggaaaaaacaacactggagagtctgactcagcaactggcagttaaacagaatgaagaaggaaaatttagccatgcaatgatggatttcaatctgagtggagattctgatggaagtgctggagtctcagagtcaagaatttatagggaatcccgagggcgtggtagcaatgaaccccacataaagcgtccaatgaatgccttcatggtgtgggctaaagatgaacggagaaagatccttcaagcctttcctgacatgcacaactccaacatcagcaagatattgggatctcgctggaaagctatgacaaacctagagaaacagccatattatgaggagcaagcccgtctcagcaagcagcacctggagaagtaccctgactataagtacaagcccaggccaaagcgcacctgcctggtggatggcaaaaagctgcgcattggtgaatacaaggcaatcatgcgcaacaggcggcaggaaatgcggcagtacttcaatgttgggcaacaagcacagatccccattgccactgctggtgttgtgtaccctggagccatcgccatggctgggatgccctcccctcacctgccctcggagcactcaagcgtgtctagcagcccagagcctgggatgcctgttatccagagcacttacggtgtgaaaggagaggagccacatatcaaagaagagatacaggccgaggacatcaatggagaaatttatgatgagtacgacgaggaagaggatgatccagatgtagattatgggagtgacagtgaaaaccatattgcaggacaagccaactagtaatgaactagtccgtaacttgaaagtatttcgatttcttggctttatatatcttgtggaaaggacgagctccacggacattgacagaacga

SEQ ID NO: 2631 - DNA, 2393 bp, Homo sapiens
  source 1..2393: mol_type = genomic DNA
accgccaccatgcttactgaccctgatttacctcaggagtttgaaaggatgtcttccaagcgaccagcctctccgtatggggaagcagatggagaggtagccatggtgacaagcagacagaaagtggaagaagaggagagtgacgggctcccagcctttcaccttcccttgcatgtgagttttcccaacaagcctcactctgaggaatttcagccagtttctctgctgacgcaagagacttgtggccataggactcccacttctcagcacaatacaatggaagttgatggcaataaagttatgtcttcatttgccccacacaactcatctacctcacctcagaaggcagaagaaggtgggcgacagagtggcgagtccttgtctagtacagccctgggaactcctgaacggcgcaagggcagtttagctgatgttgttgacaccttgaagcagaggaaaatggaagagctcatcaaaaacgagccggaagaaacccccagtattgaaaaactactctcaaaggactggaaagacaagcttcttgcaatgggatcggggaactttggcgaaataaaagggactcccgagagcttagctgagaaagaaaggcaactcatgggtatgatcaaccagctgaccagcctccgagagcagctgttggctgcccacgatgagcagaagaaactagctgcctctcagattgagaaacagcgtcagcaaatggagctggccaagcagcaacaagaacaaattgcaagacagcagcagcagcttctacagcaacaacacaaaatcaatttgctccagcaacagatccaggttcaaggtcagctgccgccattaatgattcccgtattccctcctgatcaacggacactggctgcagctgcccagcaaggattcctcctccctccaggcttcagctataaggctggatgtagtgacccttaccctgttcagctgatcccaactaccatggcagctgctgccgcagcaacaccaggcttaggcccactccaactgcagcagttatatgctgcccagctagctgcaatgcaggtatctccaggagggaagctgccaggcataccccaaggcaaccttggtgctgctgtatctcctaccagcattcacacagacaagagcacaaacagcccaccacccaaaagcaaggatgaagtggcacagccactgaacctatcagctaaacccaagacctctgatggcaaatcacccacatcacccacctctccccatatgccagctctgagaataaacagtggggcaggccccctcaaagcctctgtcccagcagcgttagctagtccttcagccagagttagcacaataggttacttaaatgaccatgatgctgtcaccaaggcaatccaagaagctcggcaaatgaaggagcaactccgacgggaacaacaggtgcttgatgggaaggtggctgttgtgaatagtctgggtctcaataactgccgaacagaaaaggaaaaaacaacactggagagtctgactcagcaactggcagttaaacagaatgaagaaggaaaatttagccatgcaatgatggatttcaatctgagtggagattctgatggaagtgctggagtctcagagtcaagaatttatagggaatcccgagggcgtggtagcaatgaaccccacataaagcgtccaatgaatgccttcatggtgtgggctaaagatgaacggagaaagatccttcaagcctttcctgacatgcacaactccaacatcagcaagatattgggatctcgctggaaagctatgacaaacctagagaaacagccatattatgaggagcaagcccgtctcagcaagcagcacctggagaagtaccctgactataagtacaagcccaggccaaagcgcacctgcctggtggatggcaaaaagctgcgcattggtgaatacaaggcaatcatgcgcaacaggcggcaggaaatgcggcagtacttcaatgttgggcaacaagcacagatccccattgccactgctggtgttgtgtaccctggagccatcgccatggctgggatgccctcccctcacctgccctcggagcactcaagcgtgtctagcagcccagagcctgggatgcctgttatccagagcacttacggtgtgaaaggagaggagccacatatcaaagaagagatacaggccgaggacatcaatggagaaatttatgatgagtacgacgaggaagaggatgatccagatgtagattatgggagtgacagtgaaaaccatattgcaggacaagccaactagtaatgaactagtccgtaacttgaaagtatttcgatttcttggctttatatatcttgtggaaaggacgaaggatagctgtttgttatgatgct

SEQ ID NO: 2632 - DNA, 2288 bp, Homo sapiens
  source 1..2288: mol_type = genomic DNA
accgccaccatgcttactgaccctgatttacctcaggagtttgaaaggatgtcttccaagcgaccagcctctccgtatggggaagcagatggagaggtagccatggtgacaagcagacagaaagtggaagaagaggagagtgacgggctcccagcctttcaccttcccttgcatgaagttgatggcaataaagttatgtcttcatttgccccacacaactcatctacctcacctcagaaggcagaagaaggtgggcgacagagtggcgagtccttgtctagtacagccctgggaactcctgaacggcgcaagggcagtttagctgatgttgttgacaccttgaagcagaggaaaatggaagagctcatcaaaaacgagccggaagaaacccccagtattgaaaaactactctcaaaggactggaaagacaagcttcttgcaatgggatcggggaactttggcgaaataaaagggactcccgagagcttagctgagaaagaaaggcaactcatgggtatgatcaaccagctgaccagcctccgagagcagctgttggctgcccacgatgagcagaagaaactagctgcctctcagattgagaaacagcgtcagcaaatggagctggccaagcagcaacaagaacaaattgcaagacagcagcagcagcttctacagcaacaacacaaaatcaatttgctccagcaacagatccaggttcaaggtcagctgccgccattaatgattcccgtattccctcctgatcaacggacactggctgcagctgcccagcaaggattcctcctccctccaggcttcagctataaggctggatgtagtgacccttaccctgttcagctgatcccaactaccatggcagctgctgccgcagcaacaccaggcttaggcccactccaactgcagcagttatatgctgcccagctagctgcaatgcaggtatctccaggagggaagctgccaggcataccccaaggcaaccttggtgctgctgtatctcctaccagcattcacacagacaagagcacaaacagcccaccacccaaaagcaaggatgaagtggcacagccactgaacctatcagctaaacccaagacctctgatggcaaatcacccacatcacccacctctccccatatgccagctctgagaataaacagtggggcaggccccctcaaagcctctgtcccagcagcgttagctagtccttcagccagagttagcacaataggttacttaaatgaccatgatgctgtcaccaaggcaatccaagaagctcggcaaatgaaggagcaactccgacgggaacaacaggtgcttgatgggaaggtggctgttgtgaatagtctgggtctcaataactgccgaacagaaaaggaaaaaacaacactggagagtctgactcagcaactggcagttaaacagaatgaagaaggaaaatttagccatgcaatgatggatttcaatctgagtggagattctgatggaagtgctggagtctcagagtcaagaatttatagggaatcccgagggcgtggtagcaatgaaccccacataaagcgtccaatgaatgccttcatggtgtgggctaaagatgaacggagaaagatccttcaagcctttcctgacatgcacaactccaacatcagcaagatattgggatctcgctggaaagctatgacaaacctagagaaacagccatattatgaggagcaagcccgtctcagcaagcagcacctggagaagtaccctgactataagtacaagcccaggccaaagcgcacctgcctggtggatggcaaaaagctgcgcattggtgaatacaaggcaatcatgcgcaacaggcggcaggaaatgcggcagtacttcaatgttgggcaacaagcacagatccccattgccactgctggtgttgtgtaccctggagccatcgccatggctgggatgccctcccctcacctgccctcggagcactcaagcgtgtctagcagcccagagcctgggatgcctgttatccagagcacttacggtgtgaaaggagaggagccacatatcaaagaagagatacaggccgaggacatcaatggagaaatttatgatgagtacgacgaggaagaggatgatccagatgtagattatgggagtgacagtgaaaaccatattgcaggacaagccaactagtaatgaactagtccgtaacttgaaagtatttcgatttcttggctttatatatcttgtggaaaggacgatgaccacgcgatggacgacgaaga

SEQ ID NO: 2633 - DNA, 2354 bp, Homo sapiens
  source 1..2354: mol_type = genomic DNA
accgccaccatgtcttccaagcgaccagcctctccgtatggggaagcagatggagaggtagccatggtgacaagcagacagaaagtggaagaagaggagagtgacgggctcccagcctttcaccttcccttgcatgtgagttttcccaacaagcctcactctgaggaatttcagccagtttctctgctgacgcaagagacttgtggccataggactcccacttctcagcacaatacaatggaagttgatggcaataaagttatgtcttcatttgccccacacaactcatctacctcacctcagaaggcagaagaaggtgggcgacagagtggcgagtccttgtctagtacagccctgggaactcctgaacggcgcaagggcagtttagctgatgttgttgacaccttgaagcagaggaaaatggaagagctcatcaaaaacgagccggaagaaacccccagtattgaaaaactactctcaaaggactggaaagacaagcttcttgcaatgggatcggggaactttggcgaaataaaagggactcccgagagcttagctgagaaagaaaggcaactcatgggtatgatcaaccagctgaccagcctccgagagcagctgttggctgcccacgatgagcagaagaaactagctgcctctcagattgagaaacagcgtcagcaaatggagctggccaagcagcaacaagaacaaattgcaagacagcagcagcagcttctacagcaacaacacaaaatcaatttgctccagcaacagatccaggttcaaggtcagctgccgccattaatgattcccgtattccctcctgatcaacggacactggctgcagctgcccagcaaggattcctcctccctccaggcttcagctataaggctggatgtagtgacccttaccctgttcagctgatcccaactaccatggcagctgctgccgcagcaacaccaggcttaggcccactccaactgcagcagttatatgctgcccagctagctgcaatgcaggtatctccaggagggaagctgccaggcataccccaaggcaaccttggtgctgctgtatctcctaccagcattcacacagacaagagcacaaacagcccaccacccaaaagcaaggatgaagtggcacagccactgaacctatcagctaaacccaagacctctgatggcaaatcacccacatcacccacctctccccatatgccagctctgagaataaacagtggggcaggccccctcaaagcctctgtcccagcagcgttagctagtccttcagccagagttagcacaataggttacttaaatgaccatgatgctgtcaccaaggcaatccaagaagctcggcaaatgaaggagcaactccgacgggaacaacaggtgcttgatgggaaggtggctgttgtgaatagtctgggtctcaataactgccgaacagaaaaggaaaaaacaacactggagagtctgactcagcaactggcagttaaacagaatgaagaaggaaaatttagccatgcaatgatggatttcaatctgagtggagattctgatggaagtgctggagtctcagagtcaagaatttatagggaatcccgagggcgtggtagcaatgaaccccacataaagcgtccaatgaatgccttcatggtgtgggctaaagatgaacggagaaagatccttcaagcctttcctgacatgcacaactccaacatcagcaagatattgggatctcgctggaaagctatgacaaacctagagaaacagccatattatgaggagcaagcccgtctcagcaagcagcacctggagaagtaccctgactataagtacaagcccaggccaaagcgcacctgcctggtggatggcaaaaagctgcgcattggtgaatacaaggcaatcatgcgcaacaggcggcaggaaatgcggcagtacttcaatgttgggcaacaagcacagatccccattgccactgctggtgttgtgtaccctggagccatcgccatggctgggatgccctcccctcacctgccctcggagcactcaagcgtgtctagcagcccagagcctgggatgcctgttatccagagcacttacggtgtgaaaggagaggagccacatatcaaagaagagatacaggccgaggacatcaatggagaaatttatgatgagtacgacgaggaagaggatgatccagatgtagattatgggagtgacagtgaaaaccatattgcaggacaagccaactagtaatgaactagtccgtaacttgaaagtatttcgatttcttggctttatatatcttgtggaaaggacgaatgtaggcaggccacactcttgct

SEQ ID NO: 2634 - DNA, 2873 bp, Homo sapiens
  source 1..2873: mol_type = genomic DNA
accgccaccatgttggagaactacagaaacctggtctccctagctatgtgttctcatttcacccaagactttttgccagtgcaggggatagaagattcattccacaaacttatactgagaagatatgagaaatgtgggcatgataatttacaattaaggaaaggctgtaaaagtatgaacgtgtgtaaagtgcagaagggagtttataatggaattaataaatgcttgtcaaatactcagagcaaaatatttcaatgtaatgcacgtgtcaaagtttttagtaaatttgcaaattcaaacaaagataagacaagacatactggagagaaacactttaaatgtaacgaatgtggcaagtcatttcagaagttctcagacctaactcaacataaaggaattcatgctggagagaaaccctacacttgtgaagaacgtggcaaagactttggatggtacacagacctgaatcaacacaagaaaattcatactggagagaaaccttacaaatgtgaagaatgtggcaaagcctttaataggtcaacaaaccttactgcacataagagaattcacaacagagagaaagcttacacaggtgaagatcgtgacagagcctttggatggtccacaaacctgaatgaatataagaaaattcatactggagataaaccctacaaatgtaaagaatgtgggaaagcctttatgcattcctcacacctgaataaacatgagaaaattcatactggagagaaaccctacaaatgtaaggaatgtggcaaagtcatttcctcatcctcaagctttgctaaacataagaggattcatactggcgagaaaccctttaaatgtttagaatgtggtaaagcctttaatatttccacaacccttactaaacataggagaattcatactggagagaaaccctacacatgtgaagtatgtggcaaagcctttagacagtccgcaaacctttatgtacataggagaattcatactggagagaaaccctacacatgtggagaatgtggcaaaacctttagacagtccgcaaacctttacgtacataggagaattcatactggagagaaaccttacaaatgcgaagactgtggcaaagcctttggacggtacacagccctgaatcaacacaagaaaattcatactggagagaaaccttacaaatgtgaagagtgtggcaaagcctttaatagttcaacaaaccttactgcacataagagaattcacaccagagagaaaccctacacatgtgaagatcgtggcagagcctttggattgtccacaaacctgaatgaatataagaaaattcatactggagataaaccctacaaatgtaaagaatgtgggaaagcctttatacattccttgcacctgaataaacatgagaaaattcatactggaaagaaaccctacaaatgtaagcaatgtggcaaagtcattacctcatcctcaagctttgctaaacataagaggattcatactggcgagaaaccctttgaatgtttagaatgtggtaaagcgtttactagttccacaacccttactaaacataggagaattcatactggagagaaaccctacacatgtgaagtatgtggcaaagcctttagacagtccgcaatcctttatgtacataggagaattcatactggagagaaaccctacacatgtgaagaatgtggcaaaacctttagacagtccgcaaacctttatgtacataggagaattcatactggagagaaaccttacaaatgtgaagagtgtggcaaagcctttggacggtacacagacctgaatcaacacaagaaaattcatactggagagaaactttacaaatgtgaagagtgtggcaaagactttgtatggtacacggacctgaatcaacagaagaaaatttacactggggagaaaccttacaaatgtgaagagtgtggcaaagcctttgccccatcaacagacctgaatcaacacacgaaaattcttactggagagcaaagttacaaatgtgaagagtgtggcaaagcctttggatggtccatagccctgaatcaacacaagaaaattcatactggagaaaaaccttacaaatgtgaagagtgtggcaaagcctttagtaggtcaagaaaccttactacacataggagagttcacactagggagaaaccctacaaatgtgaagatcgtggcagatcctttggatggtccacaaacctgaacgaatataagaaaattcatactggagataaactctacaaatgtaaagaatgtgggaaagtgtttaaacagtcctcacacctgaatagacatgagaaaattcatactggaaagaaaccctacaaatgtaaggaatgtggcaaagtcattacgtcatcctcaagctttgctaaacataagaggattcatacaggtgagaaaccctttaaatgtttagaatgtggtaaagcgtttactagttccacaacccttactaaacataggagaattcatactggagagaaaccctacacatgtgaagaatgtggcaaagcctttagacagtcagcaatcctttatgtacataggagaattcatactggagagaaaccctacacatgtggagaatgtggcaaaacctttagacagtctgcaaatctttatgcgcataagaaaattcatactggagagaaaccctacacgtgtggagactgtggcaaaacctttagacagtctgcaaatctttatgcacataagaaaattcatactggagataaaaccatacaagtgtagtaatgaactagtccgtaacttgaaagtatttcgatttcttggctttatatatcttgtggaaaggacgaatgtaaattcaaacttattggtta

SEQ ID NO: 2635 - DNA, 1139 bp, Homo sapiens
  source 1..1139: mol_type = genomic DNA
accgccaccatgcaacgcctggtggcctgggacccagcatgtctccccctgccgccgccgccgcctgcctttaaatccatggaagtggccaacttctactacgaggcggactgcttggctgctgcgtacggcggcaaggcggcccccgcggcgccccccgcggccagacccgggccgcgcccccccgccggcgagctgggcagcatcggcgaccacgagcgcgccatcgacttcagcccgtacctggagccgctgggcgcgccgcaggccccggcgcccgccacggccacggacaccttcgaggcggctccgcccgcgcccgcccccgcgcccgcctcctccgggcagcaccacgacttcctctccgacctcttctccgacgactacgggggcaagaactgcaagaagccggccgagtacggctacgtgagcctggggcgcctgggggccgccaagggcgcgctgcaccccggctgcttcgcgcccctgcacccaccgcccccgccgccgccgccgcccgccgagctcaaggcggagccgggcttcgagcccgcggactgcaagcggaaggaggaggccggggcgccgggcggcggcgcaggcatggcggcgggcttcccgtacgcgctgcgcgcttacctcggctaccaggcggtgccgagcggcagcagcgggagcctctccacgtcctcctcgtccagcccgcccggcacgccgagccccgctgacgccaaggcgcccccgaccgcctgctacgcgggggccgcgccggcgccctcgcaggtcaagagcaaggccaagaagaccgtggacaagcacagcgacgagtacaagatccggcgcgagcgcaacaacatcgccgtgcgcaagagccgcgacaaggccaagatgcgcaacctggagacgcagcacaaggtcctggagctcacggccgagaacgagcggctgcagaagaaggtggagcagctgtcgcgcgagctcagcaccctgcggaacttgttcaagcagctgcccgagcccctgctcgcctcctccggccactgctagtaatgaactagtccgtaacttgaaagtatttcgatttcttggctttatatatcttgtggaaaggacgagggttaaggtaatatcgtcttggc

SEQ ID NO: 2636 - DNA, 1178 bp, Homo sapiens
  source 1..1178: mol_type = genomic DNA
accgccaccatggagtcggccgacttctacgaggcggagccgcggcccccgatgagcagccacctgcagagccccccgcacgcgcccagcagcgccgccttcggctttccccggggcgcgggccccgcgcagcctcccgccccacctgccgccccggagccgctgggcggcatctgcgagcacgagacgtccatcgacatcagcgcctacatcgacccggccgccttcaacgacgagttcctggccgacctgttccagcacagccggcagcaggagaaggccaaggcggccgtgggccccacgggcggcggcggcggcggcgactttgactacccgggcgcgcccgcgggccccggcggcgccgtcatgcccgggggagcgcacgggcccccgcccggctacggctgcgcggccgccggctacctggacggcaggctggagcccctgtacgagcgcgtcggggcgccggcgctgcggccgctggtgatcaagcaggagccccgcgaggaggatgaagccaagcagctggcgctggccggcctcttcccttaccagccgccgccgccgccgccgccctcgcacccgcacccgcacccgccgcccgcgcacctggccgccccgcacctgcagttccagatcgcgcactgcggccagaccaccatgcacctgcagcccggtcaccccacgccgccgcccacgcccgtgcccagcccgcaccccgcgcccgcgctcggtgccgccggcctgccgggccctggcagcgcgctcaaggggctgggcgccgcgcaccccgacctccgcgcgagtggcggcagcggcgcgggcaaggccaagaagtcggtggacaagaacagcaacgagtaccgggtgcggcgcgagcgcaacaacatcgcggtgcgcaagagccgcgacaaggccaagcagcgcaacgtggagacgcagcagaaggtgctggagctgaccagtgacaatgaccgcctgcgcaagcgggtggaacagctgagccgcgaactggacacgctgcggggcatcttccgccagctgccagagagctccttggtcaaggccatgggcaactgcgcgtagtaatgaactagtccgtaacttgaaagtatttcgatttcttggctttatatatcttgtggaaaggacgatcgaatttagggctctgtccttcc

SEQ ID NO: 2637 - DNA, 911 bp, Homo sapiens
  source 1..911: mol_type = genomic DNA
accgccaccatgagcgccgcgctcttcagcctggacggcccggcgcgcggcgcgccctggcctgcggagcctgcgcccttctacgaaccgggccgggcgggcaagccgggccgcggggccgagccaggggccctaggcgagccaggcgccgccgcccccgccatgtacgacgacgagagcgccatcgacttcagcgcctacatcgactccatggccgccgtgcccaccctggagctgtgccacgacgagctcttcgccgacctcttcaacagcaatcacaaggcgggcggcgcggggcccctggagcttcttcccggcggccccgcgcgccccttgggcccgggccctgccgctccccgcctgctcaagcgcgagcccgactggggcgacggcgacgcgcccggctcgctgttgcccgcgcaggtggccgcgtgcgcacagaccgtggtgagcttggcggccgcagggcagcccaccccgcccacgtcgccggagccgccgcgcagcagccccaggcagacccccgcgcccggccccgcccgggagaagagcgccggcaagaggggcccggaccgcggcagccccgagtaccggcagcggcgcgagcgcaacaacatcgccgtgcgcaagagccgcgacaaggccaagcggcgcaaccaggagatgcagcagaagttggtggagctgtcggctgagaacgagaagctgcaccagcgcgtggagcagctcacgcgggacctggccggcctccggcagttcttcaagcagctgcccagcccgcccttcctgccggccgccgggacagcagactgccggtagtaatgaactagtccgtaacttgaaagtatttcgatttcttggctttatatatcttgtggaaaggacgacatgtcatgtcctttaggtggacc

SEQ ID NO: 2638 - DNA, 3860 bp, Homo sapiens
  source 1..3860: mol_type = genomic DNA
accgccaccatgccaggtgcccctggcagcctagaaatgggaccattgacatttagagatgtgaccatagaattctctctggaggagtggcaatgcctggacacggttcagcagaatttatatagggatgtgatgttagagaactacagaaacctggtcttcctgggtatggctgtctttaagccagacttgataacttgtctgaagcaagggaaagagccttggaatatgaagagacatgagatggtaactaaacccccagttatgcgttctcattttacacaagacctttggccagatcagagcacaaaagattctttccaagaagtaatactgagaacatatgcaagatgtggacataagaatttacgattaagaaaagattgtaaaagtgccaatgagggtaagatgcacaaagaaggttataataaacttaaccaatgcaggacagctacccagagaaaaatatttcagtgtaacaaacatatgaaagtctttcataaatattcaaatagaaataaggttagacacactaaaaagaaaactttcaaatgtataaaatgtagcaaatcatttttcatgctttcatgcttaattcgacataagagaattcatattagacagaatatctacaaatgtgaagaacgtggcaaagcctttaaatcgttctcaacccttactaaacataagataattcatactgaagacaaaccttacaaatataagaaatgtggcaatgcctttaaattttcttcaacgttcactaaacataagagaattcatactggagagacacctttcagatgtgaagaatgtggcaaagcttttaaccagtcctcaaatcttactgaccataagagaattcatactggagagaaaacctacaaatgtgaagaatgtggcaaagcttttaaggggtcctcaaattttaatgcacataaggtaattcatactgcagagaaaccctacaaatgtgaagattgtggcaaaacttttaaccatttctcagcccttagaaaacataagataattcatactggaaagaaaccctacaagcgtgaagaatgtggcaaagcttttagccagtcctcaacccttagaaaacatgagataattcatactggagagaaaccctacaaatgtgaagaatgtggtaaagcttttaagtggtcttcaaaacttactgtacataaggtagttcatactggagagaaaccctacaaatgtgaagaatgtggcaaagcttttagccagttctcaacccttaaaaaacataagataattcatactggaaagaaaccctacaaatgtgaagaatgtggcaaagcttttaacagttcctcaacccttatgaaacataagataattcatactggggagaaaccatacaaatgtgaagaatgtggcaaagcttttaggcaatcctcacaccttactagacataaagcaattcatactggagagaaaccctacaaatgtgaagaatgtggcaaagcttttaaccatttctcagaccttagaagacataagataattcatactggaaagaaaccctacaaatgtgaagaatgtgggaaagcttttagccagtcctcaacccttagaaaccatcagataattcatactggagagaaaccctacaaatgtgaagaatgtggtaaagcttttaagtggtcatcaaaacttactgtacataaggtaattcatactggagagaaaccctgcaaatgtgaagaatgtggcaaagcttttaagcatttctcagccctcagaaaacataaggtaattcatactagggagaaattgtacaaatgtgaagaatgtggcaaagcttttaacaattcctcaatccttgctaaacataagataattcatactgggaagaaaccgtacaaatgtgaagaatgtggcaaagcttttaggcaatcctcacaccttactagacataaagcaattcatactggagagaaaccttacaaatgtgaagaatgtggcaaagcttttagccatttctcagcccttagaagacataagataattcatactggaaagaaaccgtacaaatgtgaagaatgtggcaaagcttttagccatttctcagcccttagaagacataagataattcatactggagagaaaccctacaaatgtgaagaatgtggtaaagcttttaagtggtcatcaaaacttactgtacataaggtaattcatactgcagagaaaccctgcaaatgtgaagaatgtggcaaatcttttaagcatttctcagcccttagaaaacataaggtaattcatactagggagaaattgtacaaatgtgaagaatgtgtcaaagcttttaacagtttctcagcccttatgaaacataaggtaattcatactggagagaaaccctacaagtgtgaagaatgtggtaaagcttttaagtggtcctcaaagcttactgtacataaggtaattcatactggagagaaaccctgcaaatgtgaagaatgtggcaaagcttttaagcatttctcagcccttagaaaacataaggtaattcatactggaaagaaaccctacaaatgtgaagaatgtggcaaagcttttagccaatcctcatcccttagaaaacatgagataattcatagtggagagaaaccatacaaatgtgaagaatgtggtaaagcttttaagtggttgtcaaaacttactgtacataaggtaattcatactgcagagaaaccctgtaaatgtgaagaatgtggcaaagcttttaagcatttctcagcccttagaaaacataagataattcatactggaaagaaaccctacaaatgtgaagaatgtggcaaagcttttaatgattcctcaacccttatgaagcataagataattcatactgggaagaaaccatacaaatgtgcagaatgtggcaaagcttttaagcaatcctcacatcttactagacataaagcaattcatactggggagaaaccctacaaatgcgaagaatgtggcaaagattttaacaattcctcaacccttaagaaacataagctaattcatactagggagaaattgtacaaatgtgaagaatgtgtcaaagcttttaacaatttctcagcccttatgaaacataagataattcatactggggagaaaccctacaaatgtgaagaatgtggtaaagcttttaagtggtcctcaaaacttactgaacataaggtaattcatactggagagaaaccctgcaaatgtgaagaatgtgacaaagcttttaagcatttctcagcccttagaaaacataaggtaattcatactggaaagaaaccctaccaatgtgacgaatgtggcaaagcttttaacaattcctcaacccttacgaaacataagataattcatactggggagaaaccctacaaatgtgaagaatgtggcaaagcctttagtcagtcctcaatccttactaaacataagataattcattctgtagagaaaccctacaaatgtgaagaatgtggcaaagcctttaaccagtcctcacaccttactagacacaaaacaattcatactggagagaaaccctacaaatgtgaagaatgtggcaaagcttttattcagtgctcataccttattagacataaaacaattcataccagagagaaacctacaaatgtgaagaaagtaccaaagcttttaagcaatcctcacaccttactagacaaaacaattcatactggagagaaaccctacaaatgtgaagaatgtgccaaagctttttagtaatgaactagtccgtaacttgaaagtatttcgatttcttggctttatatatcttgtggaaaggacgaattgtttcaaaggttctcgaaatg

SEQ ID NO: 2639 - DNA, 2288 bp, Homo sapiens
  source 1..2288: mol_type = genomic DNA
accgccaccatggaggcggcggcaggcggccgcggctgtttccagccgcacccggggctgcagaagacgctggagcagttccacctgagctccatgagctcgctgggcggcccggccgctttctcggcgcgctgggcgcaggaggcctacaagaaggagagcgccaaggaggcgggcgcggccgcggtgccggcgccggtgcccgcagccaccgagccgccgcccgtgctgcacctgcccgccatccagccgccgccgcccgtgctgcccgggcccttcttcatgccgtccgaccgctccaccgagcgctgcgagaccgtactggaaggcgagaccatctcgtgcttcgtggtgggaggcgagaagcgcctgtgtctgccgcagattctcaactcggtgctgcgcgacttctcgctgcagcagatcaacgcggtgtgcgacgagctccacatctactgctcgcgctgcacggccgaccagctggagatcctcaaagtcatgggcatcctgcccttctcggcgccctcgtgcgggctcatcaccaagacggacgccgagcgcctgtgcaacgcgctgctctacggcggcgcctacccgccgccctgcaagaaggagctggccgccagcctggcgctgggcctggagctcagcgagcgcagcgtccgcgtgtaccacgagtgcttcggcaagtgtaaggggctgctggtgcccgagctctacagcagcccgagcgccgcctgcatccagtgcctggactgccgcctcatgtacccgccgcacaagttcgtggtgcactcgcacaaggccctggagaaccggacctgccactggggcttcgactcggccaactggcgggcctacatcctgctgagccaggattacacgggcaaggaggagcaggcgcgcctcggccgctgcctggacgacgtgaaggagaaattcgactatggcaacaagtacaagcggcgggtgccccgggtctcctctgagcctccggcctccataagacccaaaacagatgacacctcttcccagtcccccgcgccttccgaaaaggacaagccgtccagctggctgcggaccttggccggctcttccaataagagcctgggctgtgttcaccctcgccagcgcctctctgctttccgaccctggtcccccgcagtgtcagcgagtgagaaagagctctccccacacctcccggccctcatccgagacagcttctactcctacaagagctttgagacagccgtggcgcccaacgtggccctcgcaccgccggcccagcagaaggttgtgagcagccctccgtgtgccgccgccgtctcccgggcccccgagcctctcgccacttgcacccagcctcggaagcggaagctgactgtggacaccccaggagccccagagacgctggcgcccgtggctgccccagaggaggacaaggactcggaggcggaggtggaagttgaaagcagggaggaattcacctcctccttgtcctcgctctcttccccgtcctttacctcatccagctccgccaaggacctgggctccccgggtgcgcgtgccctgccctcggccgtccctgatgctgcggcccctgccgacgcccccagtgggctggaggcggagctggagcacctgcggcaggcactggagggcggcctggacaccaaggaagccaaagagaagttcctgcatgaggtggtcaagatgcgcgtgaagcaggaggagaagctcagcgcagccctgcaggccaagcgcagcctccaccaggagctggagttcctacgcgtggccaagaaggagaagctgcgggaggccacggaggccaagcgtaacctgcggaaggagatcgagcgtctccgcgccgagaacgagaagaagatgaaagaggccaacgagtcacggctgcgcctgaagcgggagctggagcaggcgcggcaggcccgggtgtgcgacaagggctgcgaggcgggccgcctgcgcgccaagtactcggcccagatcgaagacctgcaggtgaagctgcagcacgcggaggcggaccgggagcagctgcgggccgacctgctgcgggagcgcgaggcccgggagcacctggagaaggtggtgaaggagctgcaggaacagctgtggccgcgggcccgccccgaggctgcgggcagcgagggcgctgcggagctggagccgtagtaatgaactagtccgtaacttgaaagtatttcgatttcttggctttatatatcttgtggaaaggacgacacctatacccacgggttacaatc

SEQ ID NO: 2640 - DNA, 827 bp, Homo sapiens
  source 1..827: mol_type = genomic DNA
accgccaccatgtgcagcggtgctggggtcatgatggctcggtgggcagcgaggggccgggccggctggaggagcacagtgcggattctgtcgccactgggacactgtgaaccaggagtgagtcggagctgccgcgctgcccaggccatggactgtgaggtcaacaacggttccagcctcagggatgagtgcatcacaaacctactggtgtttggcttcctccaaagctgttctgacaacagcttccgcagagagctggacgcactgggccacgagctgccagtgctggctccccagtgggagggctacgatgagctgcagactgatggcaaccgcagcagccactcccgcttgggaagaatagaggcagattctgaaagtcaagaagacatcatccggaatattgccaggcacctcgcccaggtcggggacagcatggaccgtagcatccctccgggcctggtgaacggcctggccctgcagctcaggaacaccagccggtcggaggaggaccggaacagggacctggccactgccctggagcagctgctgcaggcctaccctagagacatggagaaggagaagaccatgctggtgctggccctgctgctggccaagaaggtggccagtcacacgccgtccttgctccgtgatgtctttcacacaacagtgaattttattaaccagaacctacgcacctacgtgaggagcttagccagaaatgggatggactagtaatgaactagtccgtaacttgaaagtatttcgatttcttggctttatatatcttgtggaaaggacgaaacgtcggtgcatcgcatgtgcgc

SEQ ID NO: 2641 - DNA, 401 bp, Homo sapiens
  source 1..401: mol_type = genomic DNA
accgccaccatggaccgtagcatccctccgggcctggtgaacggcctggccctgcagctcaggaacaccagccggtcggaggaggaccggaacagggacctggccactgccctggagcagctgctgcaggcctaccctagagacatggagaaggagaagaccatgctggtgctggccctgctgctggccaagaaggtggccagtcacacgccgtccttgctccgtgatgtctttcacacaacagtgaattttattaaccagaacctacgcacctacgtgaggagcttagccagaaatgggatggactagtaatgaactagtccgtaacttgaaagtatttcgatttcttggctttatatatcttgtggaaaggacgatggatggccaattaatcagcgctt

SEQ ID NO: 2642 - DNA, 689 bp, Homo sapiens
  source 1..689: mol_type = genomic DNA
accgccaccatggactgtgaggtcaacaacggttccagcctcagggatgagtgcatcacaaacctactggtgtttggcttcctccaaagctgttctgacaacagcttccgcagagagctggacgcactgggccacgagctgccagtgctggctccccagtgggagggctacgatgagctgcagactgatggcaaccgcagcagccactcccgcttgggaagaatagaggcagattctgaaagtcaagaagacatcatccggaatattgccaggcacctcgcccaggtcggggacagcatggaccgtagcatccctccgggcctggtgaacggcctggccctgcagctcaggaacaccagccggtcggaggaggaccggaacagggacctggccactgccctggagcagctgctgcaggcctaccctagagacatggagaaggagaagaccatgctggtgctggccctgctgctggccaagaaggtggccagtcacacgccgtccttgctccgtgatgtctttcacacaacagtgaattttattaaccagaacctacgcacctacgtgaggagcttagccagaaatgggatggactagtaatgaactagtccgtaacttgaaagtatttcgatttcttggctttatatatcttgtggaaaggacgatggccaaaggttaacagggcggcc

SEQ ID NO: 2643 - DNA, 1268 bp, Homo sapiens
  source 1..1268: mol_type = genomic DNA
accgccaccatgatactctggcttcacagtttggagactgccagggaccatgttttgcccattgactattactttccaccccagaagacctgcctgatctgtggagatgaagcttctgggtgtcactatggagctctcacatgtggaagctgcaaggtcttcttcaaaagagccgctgaagggaaacagaagtacctgtgcgccagcagaaatgattgcactattgataaattccgaaggaaaaattgtccatcttgtcgtcttcggaaatgttatgaagcagggatgactctgggagcccggaagctgaagaaacttggtaatctgaaactacaggaggaaggagaggcttccagcaccaccagccccactgaggagacaacccagaagctgacagtgtcacacattgaaggctatgaatgtcagcccatctttctgaatgtcctggaagccattgagccaggtgtagtgtgtgctggacacgacaacaaccagcccgactcctttgcagccttgctctctagcctcaatgaactgggagagagacagcttgtacacgtggtcaagtgggccaaggccttgcctggcttccgcaacttacacgtggacgaccagatggctgtcattcagtactcctggatggggctcatggtgtttgccatgggctggcgatccttcaccaatgtcaactccaggatgctctacttcgcccctgatctggttttcaatgagtaccgcatgcacaagtcccggatgtacagccagtgtgtccgaatgaggcacctctctcaagagtttggatggctccaaatcaccccccaggaattcctgtgcatgaaagcactgctactcttcagcattattccagtggatgggctgaaaaatcaaaaattctttgatgaacttcgaatgaactacatcaaggaactcgatcgtatcattgcatgcaaaagaaaaaatcccacatcctgctcaagacgcttctaccagctcaccaagctcctggactccgtgcagcctattgcgagagagctgcatcagttcacttttgacctgctaatcaagtcacacatggtgagcgtggactttccggaaatgatggcagagatcatctctgtgcaagtgcccaagatcctttctgggaaagtcaagcccatctatttccacacccagtagtaatgaactagtccgtaacttgaaagtatttcgatttcttggctttatatatcttgtggaaaggacgaactgacgtaggtcgcgctcatcgg

SEQ ID NO: 2644 - DNA, 2864 bp, Homo sapiens
  source 1..2864: mol_type = genomic DNA
accgccaccatggaagtgcagttagggctgggaagggtctaccctcggccgccgtccaagacctaccgaggagctttccagaatctgttccagagcgtgcgcgaagtgatccagaacccgggccccaggcacccagaggccgcgagcgcagcacctcccggcgccagtttgctgctgctgcagcagcagcagcagcagcagcagcagcagcagcagcagcagcagcagcagcagcagcagcagcagcaagagactagccccaggcagcagcagcagcagcagggtgaggatggttctccccaagcccatcgtagaggccccacaggctacctggtcctggatgaggaacagcaaccttcacagccgcagtcggccctggagtgccaccccgagagaggttgcgtcccagagcctggagccgccgtggccgccagcaaggggctgccgcagcagctgccagcacctccggacgaggatgactcagctgccccatccacgttgtccctgctgggccccactttccccggcttaagcagctgctccgctgaccttaaagacatcctgagcgaggccagcaccatgcaactccttcagcaacagcagcaggaagcagtatccgaaggcagcagcagcgggagagcgagggaggcctcgggggctcccacttcctccaaggacaattacttagggggcacttcgaccatttctgacaacgccaaggagttgtgtaaggcagtgtcggtgtccatgggcctgggtgtggaggcgttggagcatctgagtccaggggaacagcttcggggggattgcatgtacgccccacttttgggagttccacccgctgtgcgtcccactccttgtgccccattggccgaatgcaaaggttctctgctagacgacagcgcaggcaagagcactgaagatactgctgagtattcccctttcaagggaggttacaccaaagggctagaaggcgagagcctaggctgctctggcagcgctgcagcagggagctccgggacacttgaactgccgtctaccctgtctctctacaagtccggagcactggacgaggcagctgcgtaccagagtcgcgactactacaactttccactggctctggccggaccgccgccccctccgccgcctccccatccccacgctcgcatcaagctggagaacccgctggactacggcagcgcctgggcggctgcggcggcgcagtgccgctatggggacctggcgagcctgcatggcgcgggtgcagcgggacccggttctgggtcaccctcagccgccgcttcctcatcctggcacactctcttcacagccgaagaaggccagttgtatggaccgtgtggtggtggtgggggtggtggcggcggcggcggcggcggcggcggcggcggcggcggcggcggcggcggcgaggcgggagctgtagccccctacggctacactcggccccctcaggggctggcgggccaggaaagcgacttcaccgcacctgatgtgtggtaccctggcggcatggtgagcagagtgccctatcccagtcccacttgtgtcaaaagcgaaatgggcccctggatggatagctactccggaccttacggggacatgcgtttggagactgccagggaccatgttttgcccattgactattactttccaccccagaagacctgcctgatctgtggagatgaagcttctgggtgtcactatggagctctcacatgtggaagctgcaaggtcttcttcaaaagagccgctgaagggaaacagaagtacctgtgcgccagcagaaatgattgcactattgataaattccgaaggaaaaattgtccatcttgtcgtcttcggaaatgttatgaagcagggatgactctgggagcccggaagctgaagaaacttggtaatctgaaactacaggaggaaggagaggcttccagcaccaccagccccactgaggagacaacccagaagctgacagtgtcacacattgaaggctatgaatgtcagcccatctttctgaatgtcctggaagccattgagccaggtgtagtgtgtgctggacacgacaacaaccagcccgactcctttgcagccttgctctctagcctcaatgaactgggagagagacagcttgtacacgtggtcaagtgggccaaggccttgcctggcttccgcaacttacacgtggacgaccagatggctgtcattcagtactcctggatggggctcatggtgtttgccatgggctggcgatccttcaccaatgtcaactccaggatgctctacttcgcccctgatctggttttcaatgagtaccgcatgcacaagtcccggatgtacagccagtgtgtccgaatgaggcacctctctcaagagtttggatggctccaaatcaccccccaggaattcctgtgcatgaaagcactgctactcttcagcattattccagtggatgggctgaaaaatcaaaaattctttgatgaacttcgaatgaactacatcaaggaactcgatcgtatcattgcatgcaaaagaaaaaatcccacatcctgctcaagacgcttctaccagctcaccaagctcctggactccgtgcagcctattgcgagagagctgcatcagttcacttttgacctgctaatcaagtcacacatggtgagcgtggactttccggaaatgatggcagagatcatctctgtgcaagtgcccaagatcctttctgggaaagtcaagcccatctatttccacacccagtagtaatgaactagtccgtaacttgaaagtatttcgatttcttggctttatatatcttgtggaaaggacgaccgcaggtacgagcgcggtcaacc

SEQ ID NO: 2645 - DNA, 2252 bp, Homo sapiens
  source 1..2252: mol_type = genomic DNA
accgccaccatggcgcctcagaagcacggcggtgggggagggggcggctcggggcccagcgcggggtccgggggaggcggcttcgggggttcggcggcggtggcggcggcgacggcttcgggcggcaaatccggcggcgggagctgtggagggggtggcagttactcggcctcctcctcctcctccgcggcggcagcggcgggggctgcggtgttaccggtgaagaagccgaaaatggagcacgtccaggctgaccacgagcttttcctccaggcctttgagaagccaacacagatctatagatttcttcgaactcggaatctcatagcaccaatatttttgcacagaactcttacttacatgtctcatcgaaactccagaacaaacatcaaaagcttgtcagctcatttgcagcttacgtttactggtttcttccacaaaaatgataagccatcaccaaactcagaaaatgaacaaaattctgttaccctggaagtcctgcttgtgaaagtttgccacaaaaaaagaaaggatgtaagttgtccaataaggcaagttcccacaggtaaaaagcaggtgcctttgaatcctgacctcaatcaaacaaaacccggaaatttcccgtcccttgcagtttccagtaatgaatttgaacctagtaacagccatatggtgaagtcttactcgttgctatttagagtgactcgtccaggaagaagagagtttaatggaatgattaatggagaaaccaatgaaaatattgatgtcaatgaagagcttccagccagaagaaaacgaaatcgtgaggatggggaaaagacatttgttgcacaaatgacagtatttgataaaaacaggcgcttacagcttttagatggggaatatgaagtagccatgcaggaaatggaagaatgtccaataagcaagaaaagagcaacatgggagactattcttgatgggaagaggctgcctccattcgaaacattttctcagggacctacgttgcagttcactcttcgttggacaggagagaccaatgataaatctacggctcctattgccaaacctcttgccactagaaattcagagagtctccatcaggaaaacaagcctggttcagttaaacctactcaaactattgctgttaaagaatcattgactacagatctacaaacaagaaaagaaaaggatactccaaatgaaaaccgacaaaaattaagaatattttatcagtttctctataacaacaatacaaggcaacaaactgaagcaagagatgacctgcattgcccttggtgtactctgaactgccgcaaactttatagtttactcaagcatcttaaactctgccatagcagatttatcttcaactatgtttatcatccaaaaggtgctaggatagatgtttctatcaatgagtgttatgatggctcctatgcaggaaatcctcaggatattcatcgccaacctggatttgcttttagtcgcaacggaccagttaagagaacacctatcacacatattcttgtgtgcaggccaaaacgaacaaaagcaagcatgtctgaatttcttgaatctgaagatggggaagtagaacagcaaagaacatatagtagtggccacaatcgtctgtatttccatagtgatacctgcttacctctccgtccacaagaaatggaagtagatagtgaagatgaaaaggatcctgaatggctaagagaaaaaaccattacacaaattgaagagttttctgatgttaatgaaggagagaaagaagtgatgaaactctggaatctccatgtcatgaagcatgggtttattgctgacaatcaaatgaatcatgcctgtatgctgtttgtagaaaattatggacagaaaataattaagaagaatttatgtcgaaacttcatgcttcatctagtcagcatgcatgactttaatcttattagcataatgtcaatagataaagctgttaccaagctccgtgaaatgcagcaaaaattagaaaagggggaatctgcttcccctgcaaacgaagaaataactgaagaacaaaatgggacagcaaatggatttagtgaaattaactcaaaagagaaagctttggaaacagatagtgtctcaggggtttcaaaacagagcaaaaaacaaaaactctagtaatgaactagtccgtaacttgaaagtatttcgatttcttggctttatatatcttgtggaaaggacgaggagcttaacttatggattgcgaa

SEQ ID NO: 2646 - DNA, 3497 bp, Homo sapiens
  source 1..3497: mol_type = genomic DNA
accgccaccatgtttcaaattcctgtggaaaatcttgacaacatcagaaaggtgcgaaaaaaggtgaaaggtattcttgtggatattgggcttgacagctgcaaggagttactgaaggaccttaaaggctttgatccaggagagaaatactttcataacacatcatggggtgatgtttctctctgggaaccttctggaaagaaagtgagatatcgaacaaagccatactgttgtggcctctgtaaatactctacaaaggtgcttacttcattcaagaatcatttacatcgttaccatgaagatgaaattgaccaagagctggtgatcccttgcccaaactgtgtatttgcatctcagcccaaagttgtgggaaggcacttcagaatgttccatgcacctgtccggaaagtccagaactacacagtgaatattttaggtgaaactaaatcatctaggagcgatgtgataagtttcacatgtctaaaatgtaacttttcaaacactttgtactacagcatgaagaagcatgtgctggtagcccattttcactacttaattaactcctactttggcctaagaactgaggaaatgggtgagcaaccgaaaactaacgatactgtttctatagagaagatcccaccacctgacaaatattactgtaaaaagtgcaacgccaatgccagcagccaggatgcgttaatgtatcacattttgacatcagacatacacagagatttggagaataagcttagatctgtgatttcagaacatattaagaggactggactcttgaagcaaacgcacattgctccaaaaccagcagcacatttggctgcaccagcaaatggcagtgctccaagcgctccagcgcagcctccttgcttccatcttgctttgccacagaacagtccaagcccagccgcaggacagccagtgactgtggcccagggtgcccctggaagcctcactcattccccccctgctgctggccaatcccacatgactctggtctccagccctctgcctgtgggccagaacagcctcaccctgcagcccccagcacctcagcccgtctttctttctcacggggttccacttcatcagtctgtgaatcctcctgtgttgcccttgagtcagccagtcggacctgtcaataagtctgttggaactagtgtcctccccataaatcagactgttcgccctggggttttacccctcacccagcctgtgggacccataaacagacctgttgggcctggtgttcttcctgtgagcccctctgtcacccctggggtcctgcaggctgtctcgccaggggtgctttctgtgagtcgggcggtcccgtctggagtccttcctgcaggccagatgactcctgcaggccagatgactcctgcaggggttatccctgggcaaacagcaacttctggggttcttcctactggccagatggtccagtcaggagttctccctgtgggccagacagctccgtcacgggttcttcccccaggccagacagccccattgagggttatctctgcaggccaggtggtcccgtctgggcttctttctcccaaccagacagtctcctcctcagctgttgtgcctgtaaaccagggtgtgaattctggtgttctgcagcttagtcagcctgttgtgtcgggagttcttcctgtgggccagccagtgaggcctggggtcttgcaactcaaccagactgtgggcaccaacattctgcctgtgaatcagccagtgagacctggtgcttcgcagaacaccaccttcctgacatcaggctctattctcagacagctcatccctacagggaaacaagtgaatgggattccaacctacacgctggcccccgtgtctgtcactctgccggttccccctggaggccttgcgactgtcgctccgccccagatgcccatccagctcctgccgtcaggtgcagctgcaccaatggccggttccatgcccggcatgccctctcctccagtgctggtgaatgctgctcagagcgtgtttgttcaggcctcctcctctgcagcagacacaaaccaggtgctcaaacaggccaagcagtggaagacctgccctgtctgcaacgagctctttccgtccaacgtctaccaggtccacatggaggtagcgcataagcacagcgagtccaagtctggtgagaaacttgagcctgaaaaactggcagcgtgtgcaccatttctaaagtggatgagagagaaaacggtgcgatgtctgtcttgtaagtgcttggtctctgaggaagagcttatacaccacttgctgatgcatggcttggggtgcttgttctgtccatgcaccttccatgatatcaaaggtctttcagagcacagcaggaataggcacctggggaagaagaagttgcctatggattatagcaacagaggttttcaattagatgtcgatgccaatggcaacctgctctttccccaccttgatttcatcaccatattgccaaaggagaagcttggggagcgggaagtctacttggcaatcctggctgggatacactccaagtcactggtgcctgtgtatgtgaaggtgaggcctcaggctgagggcacccccgggagcaccggcaagcgagtgtccacctgccccttttgctttggcccctttgtgacaactgaggcctatgagctgcatttgaaggagaggcaccacatcatgcccacagtccacacggtcctgaagtctcccgccttcaagtgcatccactgctgtggggtctacacgggaaatatgaccctggctgccatcgccgtccatttggtgcgctgcagaagtgctcccaaggacagcagctcagacctgcaggcccagccgggttttattcacaacagtgaactgcttttagtcagtggtgaagtgatgcatgattccagtttttctgttaagagaaagctgcctgacggccacttaggggccgaagaccagcggcatggggaggagcagcctcccatcctaaatgccgatgcagccccgggtccagaaaaggtgacgagtgttgtgccttttaaaagacaaaggaatgaaagcagaacagagggacctattgtcaaggacgaggctcttcagattttagcattagatcctaaaaaatatgaaggccgttcttatgaagaaaagaagcaatttcttaaagattatttccataagaaaccatatcctagtaaaaaggaaatagaactgttgtcctcactcttttgggtgtggaaaattgatgtggcttcattttttggaaaaagaaggtatatttgcatgaaagcaataaaaaatcacaagccttctgtacttttaggctttgatatgtctgaacttaaaaatgtgaaacatagattgaactttgaatatgaaccatagtaatgaactagtccgtaacttgaaagtatttcgatttcttggctttatatatcttgtggaaaggacgaatggccacttcgtctagtgtacgt

SEQ ID NO: 2647 - DNA, 551 bp, Homo sapiens
  source 1..551: mol_type = genomic DNA
accgccaccatgccctgctgtagtcacaggaggtgtagagaggaccccgggacatctgaaagccaggaaatggaggagtgggctttgctggatatttcccagaggaaactctacaaggaagtgatgctggaaactttcaggaacctgacctctgtaggaaaaagttggaaagaccagaacattgaatatgagtaccaaaaccccaggagaaacttcaggagtctcatagaaaagaaagtcaatgaaattaaagatgacagtcattgtggagaaacttttacccaggttccagatgacaggctgaacttccaggagaagaaagcttctcctgaaataaaatcatgtgacagctttgtgtgtggagaagttggcctaggtaactcatcttttaatatgaacatcagaggtgacattggacacaaggcctatgagtatcaggaatatggaccgaagccatagtaatgaactagtccgtaacttgaaagtatttcgatttcttggctttatatatcttgtggaaaggacgatagttccgtacctcatagaagcgg

SEQ ID NO: 2648 - DNA, 1094 bp, Homo sapiens
  source 1..1094: mol_type = genomic DNA
accgccaccatggagcacctgggtccgcaccacctccacccgggtcacgcagagcccattagcttcggcatcgaccagatcctcaacagcccggaccagggtggctgcatgggacccgcctcgcgcctccaggacggagaatacggccttggctgcttggtcggaggcgcctacacttacggcggcgggggctccgcggccgcgacgggggctggaggagcgggggcctatggtactggaggtcccggcggccccggaggcccggcaggcggcggcggcgcctgcagcatgggtcctctgaccggctcctacaacgtgaacatggccttggcaggcggccccggtcctggcggcggcggcggcagcagcggcggtgccggggcactcagcgctgcgggggtaatccgggtgccggcacacaggccgctcgccggagccgtggcccacccccagcccctggccaccggcttgcccaccgtgccctctgtgcctgccatgccgggcgtcaacaacctcactggcctcaccttcccctggatggagagtaaccgcagatacacaaaggacaggttcacaggtcacccctatcagaaccggacgccccccaagaagaagaagccgcgcacgtccttcacacgcctgcagatctgcgagctggagaagcgcttccaccgccagaagtacctggcctcggccgagcgcgccgccctggccaaggcgctcaaaatgaccgatgcgcaggtcaaaacctggttccagaaccggcggacaaagtggagacggcagactgcggaggaacgggaggccgagaggcagcaagcgaaccgcatcctcctgcagttgcagcaggaggccttccagaagagcctggcacagccgctgcccgctgaccctctgtgcgtgcacaactcgtcgctcttcgccctgcagaatctgcagccgtggtctgacgactcgaccaaaatcactagcgtcacgtcggtggcgtcggcctgcgagtagtaatgaactagtccgtaacttgaaagtatttcgatttcttggctttatatatcttgtggaaaggacgatgacccaccggatctgccgcacgc

SEQ ID NO: 2649 - DNA, 875 bp, Homo sapiens
  source 1..875: mol_type = genomic DNA
accgccaccatggaacatctgggcccgcatcatctgcatccgggtcacgccgaaccgatcagcttcggtatcgatcagattctgaacagcccagatcaaggcggctgcatgggtccagcgagccgtctccaagatggcgaatacggtctgggttgtctggtgggtggcgcgtacacgtatggtggtggtggtagcgccgcggccaccggcgcgggcggcgcgggcgcctacggtacgggtggtccgggcggcccgggcggtccggcgggcggtggcggtgcgtgcagtatgggtccgctgaccggcagctacaatgtgaatatggcgctggccggcggcccgggcccgggcggcggtggtggtagtagcggtggtgccggtgcgctgagcgccgcgggtgttattcgcgttccagcccatcgtccactggcgggtgcggttgcccatccacaaccactggcgacgggtctgccgaccgttccgagtgttccggccatgccgggcgttaacaatctgaccggtctgacctttccgtggatggaaagcaaccgccgctacaccaaggatcgcttcaccggccatccgtatcagaatcgcaccccgccgaagaagaaaaaaccgcgcaccagcttcacccgtctgcagatctgcgaactggaaaaacgcttccaccgccagaaatatctggccagcgcggaacgcgcggcgctggcgaaagcgctgaaaatgacggatgcccaagttaaaacgtggttccagaaccgccgcaccaaatggcgctagtaatgaactagtccgtaacttgaaagtatttcgatttcttggctttatatatcttgtggaaaggacgagcccggcctttgagtccctccggg

SEQ ID NO: 2650 - DNA, 3281 bp, Homo sapiens
  source 1..3281: mol_type = genomic DNA
accgccaccatgaacatgtctcaggcatcagtgtcattccaggacgtgactgtggaattcacccgggaggagtggcagcacctgggccctgtcgagaggacgctgtacagagatgtgatgctggagaactacagccacctcatctcagtgggatattgcattactaaacctaaggtgatctccaagttggagaaaggagaagagccatggtctttagaagatgaattcctgaaccagaggtacccagggtattttaaagttgatcacatcaaagggatccgggaaaaacaagaaaaacctctgtggcaagaaatattcatcagtgatgctgacaaaacattgagtaaagaaggacagaaagttttagaaaaaccatttaatctggaaatagctccagagctttcagaaaaaatatcctgtaaatgtgactcacacagaatgaatttgccagttgcttctcaattaattataagtgaaagaaaatattcaagaaagaagactgaatacatgaatgtgtgtgagaaactgcagcttgatattaagcatgagaaagctcatgctgaagagaaatcttatgaacatggtgaaaatgctaaagctttcagttataagaaagatcagcattggaaatttcaaactttggaggaatcttttgaatgtgatggatctggacaaggtttatatgataagacaatttgtattacacctcagagttttctaacaggagaaaagtcctgtaaggatgatgaatttagaaaaaactttgataaaatcactttatttaaccacatgagaactgacacaagggggaaatgctctgatcttaatgaatatgggacatcctgtgacaaaaccaccgctgttgaatacaataaagttcacatggctatgacacactatgagtgtaatgaaagggggattaatttcagtaggaagtcacccctcactcaatctcagagaactattacaggatggagtgcttttgaaagcaataaatgtgaagaaaattttagccagagctcagcccatatagtacatcagaaaacacaagctggagataaatttggtgaacataatgaatgtacagatgccctctaccagaaattagactttacagcacatcagagaattcacacagaagataaattctacctttctgatgaacatgggaaatgcagaaaatccttttaccggaaagcacacctcattcagcatcagaggccccactcaggagagaaaacttaccaatatgaggaatgtgcaaaatccttttgttcaagttcacatcctattcagcatcctggaacttatgtgggattcaaactttatgaatgtaatgaatgtgggaaagctttctgtcagaattcaaacctcagtaaacatctgagaattcacacaaaagagaaaccttgtgataacaatggctgtgggagatcttacaagtcacccctcataggacaccagaaaacagatgcagagatggaactctgtggtggcagtgaatatgggaagacatcacatctcaaaggacatcagagaattctcatgggggagaaaccctatgaatgtattgaatgtgggaaaactttctccaagacatcacatctcagagcacatcagagaattcacacaggtgaaaaaccctatgaatgtgttgaatgtgagaaaactttctctcacaagacacacctcagtgtacatcagagagttcacacaggggagaaaccctatgaatgtaatgactgtgggaaatcttttacctataactcagccctgagagcacatcaaagaattcacacaggtgagaagccctatgaatgcagtgactgtgagaaaacttttgcccataattcagccctcagagcacatcatagaattcacacgggggagaaaccttatgaatgtaatgaatgtggaaggtcttttgcccatatttctgttctcaaggcacatcaaagaattcacacaggggagaaaccctatgaatgtaatgaatgtgggagatctttcacctacaattcagccctgagagcacatcagagaattcacacaggtagaaaaccctatgaatgtagtgactgtgagaaaacttttgcccataattcagccctcaaaatacatcagagaattcacacgggggagaaaccctatgaatgtaatgaatgtgagaaaacatttgcccataattcagcccttagagcacatcagaatatccacacaggggagaaactctatgaatgtagtgaatgtggaaaaacttttttccagaagacacgcctcagtacacatcggagaattcacacaggggagaaaccctatgaatgtagcaagtgtgggaaaactttctcccagaaatcatacctcagtggacatgagagaattcacacaggggaaaaaccgtatgaatgtaacgtatgtgggaaaacttttgtctataaggcagccctcatagtgcatcaaagaattcacacaggggagaaaccctatgaatgtaaccaatgtgggaaaactttctcccaaagaacacacctctgtgcacatcagagaattcatactggggaaaaaccctatgagtgtaatgaatgtgggaaaacgtttgctgataattcagccctcagggcacatcacagaattcacacaggggagaaaccctatgaatgtaatgactgtgggaagactttctccaagacatcacatctcagagcacatcttagaactcgctcaggggagaaaccctatgaatgcagtgaatgtgggaaaaccttctctgagaagtcatatgttagtgcacatcagagagttcatacgggggagaaaccctacgaatgtaatgtatgtgggaagccatttgcccataattcaaccctcagagtacatcaaagaattcacacaggggagaaatcctatgaatgtaatgattgtgggaaaacgttctcccagaaatcacaccttagtgcacaccagagaattcacacaggggagaaaccctatgagtgtaatgaatgcggaaaagcttttgcccaaaattcaactctcagagtacaccagagaattcacacaggggagaaaccctatgaatgtgatgaatgtgggaaaacttttgtccgtaaggcagctcttagggtacatcacaccagaatgcataccagagagaaaaccctagcatgtaatggatttgggaagtcctagtaatgaactagtccgtaacttgaaagtatttcgatttcttggctttatatatcttgtggaaaggacgaaaacaccgctccgtgggcagaaga

SEQ ID NO: 2651 - DNA, 434 bp, Homo sapiens
  source 1..434: mol_type = genomic DNA
accgccaccatggaggaaataccagcccaggaagcagcagggtcaccaagggtccagtttcagtctttggagacccagtctgagtgtctgtccccagagcctcagtttgtgcaggacaccgacatggaacagggactcactgggggcatacttctccgccttcccaccacccggattcatagtgtgaattcctgcccggccctgagtcatacccaggcaagtgctttctctggagaaacacttgccgtccttacagcaggaatctccaagagatggcccaagtatcggcttcccatcgatattgctcgtccctgctcggaaactccttttccacgattgtagtaatgaactagtccgtaacttgaaagtatttcgatttcttggctttatatatcttgtggaaaggacgagcacgagacaaacccttctaccta

SEQ ID NO: 2652 - DNA, 1577 bp, Homo sapiens
  source 1..1577: mol_type = genomic DNA
accgccaccatggaggaaataccagcccaggaagcagcagggtcaccaagggtccagtttcagtctttggagacccagtctgagtgtctgtccccagagcctcagtttgtgcaggacaccgacatggaacagggactcactggggatggagagaccagagaagagaacaagctgttgattcctaagcagaaaatttcggaagaagtgcattcatacaaagtgagagtaggaagactcaaacacgatattacccaagttcctgagactagagaagtgtataagtctgaggacagattagaaagacttcaggaaattctaaggaaatttctgtacctggagagagagtttaggcaaataacaatcagcaaggaaaccttcaccagtgagaagaacaatgaatgtcatgaacccgaaaaaagcttcagtctggactctactattgatgcagatcagagagttcttagaatacagaataccgatgacaatgataagtatgacatgagcttcaaccagaattcagcctctggtaaacatgaacacttaaatctaacagaggattttcagagtagtgaatgtaaggaaagcttaatggatctctcccaccttaataaatgggagagcatccctaacactgagaaatcctataaatgtgatgtatgtgggaaaattttccatcagagctcagcccttactagacatcagagaatccatactagagagaagccctacaaatgtaaagaatgtgaaaagtctttcagtcagagctcaagtcttagtcgacataaaagaatacacactagagaaaaaccttacaaatgtgaagcatctgataaatcctgtgaagcgtctgataaatcctgtagtccaagctcaggcataattcagcataagaaaattcacaccagagccaaatcttacaaatgtagcagttgtgaaagagtcttcagtcgtagtgtccaccttactcaacatcagaaaattcacaaagagatgccctgtaagtgtactgtatgtggcagtgacttctgccatacttcatacctacttgaacatcagagggtccatcatgaagagaaagcctatgagtatgatgaatatgggttggcctatattaaacaacaaggaattcatttcagagaaaagccctatacgtgtagtgaatgtggaaaagacttcagattgaattcacatcttattcagcatcaaagaattcacacaggagagaaagcacatgaatgtaatgaatgtggaaaagctttcagtcaaacctcatgccttattcagcatcacaaaatgcataggaaagagaaatcgtatgaatgtaatgagtatgagggcagtttcagtcatagctcagatcttatcctgcaacaagaagtcctcaccagacagaaagcctttgattgtgatgtatgggaaaagaactccagtcagagagcacatctagttcaacatcagagcattcataccaaagagaactcatagtaatgaactagtccgtaacttgaaagtatttcgatttcttggctttatatatcttgtggaaaggacgagatgggagttgctcgaaacagatt

SEQ ID NO: 2653 - DNA, 413 bp, Homo sapiens
  source 1..413: mol_type = genomic DNA
accgccaccatggaggaaataccagcccaggaagcagcagggtcaccaagggtccagtttcagtctttggagacccagtctgagtgtctgtccccagagcctcagtttgtgcaggacaccgacatggaacagggactcactggggctccacctgttcctcaggtgcctgctcttccccgtgagggaagcccaggagaccaggcagctgcgctcttgacagccaggtaccaggatttccaatttccaagcctgatgggatctcccagctggaacaggatctacaggtctttgatctggaaactaagactagagaagtcttagtaatgaactagtccgtaacttgaaagtatttcgatttcttggctttatatatcttgtggaaaggacgaaactcatgtccgcagctagtctgg

SEQ ID NO: 2654 - DNA, 647 bp, Homo sapiens
  source 1..647: mol_type = genomic DNA
accgccaccatggaggaaataccagcccaggaagcagcagggtcaccaagggtccagtttcagtctttggagacccagtctgagtgtctgtccccagagcctcagtttgtgcaggacaccgacatggaacagggactcactggggctccacctgttcctcaggtgcctgctcttccccgtgagggaagcccaggagaccaggcagctgcgctcttgacagccaggtaccaggagtttgtgacattcgaggatgtggctgtgcaccttactcgagaggaatggggatacctggaccctgttcagagggacctctacagagaagtgatgttagagaattatgggaacgtggtctcactgggcatacttctccgccttcccaccacccggattcatagtgtgaattcctgcccggccctgagtcatacccaggcaagtgctttctctggagaaacacttgccgtccttacagcaggaatctccaagagatggcccaagtatcggcttcccatcgatattgctcgtccctgctcggaaactccttttccacgattgtagtaatgaactagtccgtaacttgaaagtatttcgatttcttggctttatatatcttgtggaaaggacgatgtacccaggcacttatacccttc

SEQ ID NO: 2655 - DNA, 1682 bp, Homo sapiens
  source 1..1682: mol_type = genomic DNA
accgccaccatggaggaaataccagcccaggaagcagcagggtcaccaagggtccagtttcagtctttggagacccagtctgagtgtctgtccccagagcctcagtttgtgcaggacaccgacatggaacagggactcactgggggatttccaatttccaagcctgatgggatctcccagctggaacaggatctacaggtctttgatctggaaactaagactagagaagtcttaagagatgactgctcagatggagagaccagagaagagaacaagctgttgattcctaagcagaaaatttcggaagaagtgcattcatacaaagtgagagtaggaagactcaaacacgatattacccaagttcctgagactagagaagtgtataagtctgaggacagattagaaagacttcaggaaattctaaggaaatttctgtacctggagagagagtttaggcaaataacaatcagcaaggaaaccttcaccagtgagaagaacaatgaatgtcatgaacccgaaaaaagcttcagtctggactctactattgatgcagatcagagagttcttagaatacagaataccgatgacaatgataagtatgacatgagcttcaaccagaattcagcctctggtaaacatgaacacttaaatctaacagaggattttcagagtagtgaatgtaaggaaagcttaatggatctctcccaccttaataaatgggagagcatccctaacactgagaaatcctataaatgtgatgtatgtgggaaaattttccatcagagctcagcccttactagacatcagagaatccatactagagagaagccctacaaatgtaaagaatgtgaaaagtctttcagtcagagctcaagtcttagtcgacataaaagaatacacactagagaaaaaccttacaaatgtgaagcatctgataaatcctgtgaagcgtctgataaatcctgtagtccaagctcaggcataattcagcataagaaaattcacaccagagccaaatcttacaaatgtagcagttgtgaaagagtcttcagtcgtagtgtccaccttactcaacatcagaaaattcacaaagagatgccctgtaagtgtactgtatgtggcagtgacttctgccatacttcatacctacttgaacatcagagggtccatcatgaagagaaagcctatgagtatgatgaatatgggttggcctatattaaacaacaaggaattcatttcagagaaaagccctatacgtgtagtgaatgtggaaaagacttcagattgaattcacatcttattcagcatcaaagaattcacacaggagagaaagcacatgaatgtaatgaatgtggaaaagctttcagtcaaacctcatgccttattcagcatcacaaaatgcataggaaagagaaatcgtatgaatgtaatgagtatgagggcagtttcagtcatagctcagatcttatcctgcaacaagaagtcctcaccagacagaaagcctttgattgtgatgtatgggaaaagaactccagtcagagagcacatctagttcaacatcagagcattcataccaaagagaactcatagtaatgaactagtccgtaacttgaaagtatttcgatttcttggctttatatatcttgtggaaaggacgacctgttccacgtgtcacggctaaa

SEQ ID NO: 2656 - DNA, 3488 bp, Homo sapiens
  source 1..3488: mol_type = genomic DNA
accgccaccatggcggaggaagagagcgaccaagaggccgaacgcctcggagaagagcttgtggccattgtggagtccccgctgggccctgtggggcttagagctgcgggcgacggcagaggcggcgctggcagcggcaactgcggcggcggcgtcggaatcagcagtcgggattactgccgacgcttctgtcaggtggttgaagattatgctggaagatggcaggtccctttgccacagcttcaggttcttcagactgccctttgttgttttacaacagccagtgcatcattcccagatgaatgtgagcatgtacaatatgttttgagtagccttgctgtgagtttctttgagttgctgctgttctttggaagagatgagttttatgaagagcccttaaaggatattcttggatcattccaggaatgccagaatcacctccgcagatatggaaatgtgaatctggaactggtgactcgaatcattagagatggtggcccatgggaagatccagtgttgcaagctgtccttaaagctcagccagcatctcaggagatagtgaacaaatatttaagttctgaaaatccactgttctttgaactacgtgccagatacctaattgcttgtgaacgcatacccgaagcaatggctcttattaaatcttgtataaatcacccagaaatcagtaaagacttatacttccatcaagcactcttcacatgtctgtttatgtcacctgtagaagatcagctattccgggagcatttattgaaaactgattgtaagagtggaattgatatcatctgtaatgctgaaaaagaaggcaaaactatgttagccttgcaactctgtgaatcctttcttattccacagctccagaatggggatatgtactgtatctgggagttgattttcatatggagtaaactacagcttaaatctaatccttcaaaacaagtttttgtagatcaatgctaccagcttttaagaacagcaactaatgtgagagtcatatttcctttcatgaaaatcatcaaagatgaggttgaagaagaaggcttgcaaatttgtgttgaaatatgtggttgtgctctacaactcgaccttcatgatgatcccaaaactaaatgtctaatttataaaacaattgcacattttttgccaaatgatttggagatcctcaggatttgtgcactctcaatattttttctggagcgctccttagaagcgtatcgtactgttgaagagctttacaaacgtccagatgaagaatataatgaaggcacaagtagtgttcaaaatcgtgttcgttttgaattgcttccaattttgaaaaagggattgttttttgaccctgaattttggaacttcgtaatgattaagaaaaactgtgtagcattattgagtgataaatcagcagttagatttctaaatgaaagcacactggaaaataatgcaggtaatctaaaaaggacggaggaacagcaaggtttggatgaagggtttgactctcttacagatcagagcactggagagactgatcctgatgatgtatctggagtgcagcctaaaggtcatattaatacgaagaaaaatcttacagctctcagtacttccaaagtagatcacaatgtcccaaggcatcgttgtatgttatgtaacaaggaatttttaggtggtcacattgtaaggcatgcccaggctcatcagaaaaaaggcagttttgcatgtgtaatatgtggtaggaaatttagaaacagaggacttatgcagaagcatttgaagaatcatgttaagaagatacagaggcagcaaattgctgcagctcaacaggatgatcaggaagtcactgctttggaagaaataaattgttctagttcttccatttcatttgaaaatgggaattctgatagtaaggatttggaagtggagacacttactgcttctagtgaaggaaacaaagaagtcatccctgagcatgtggctgaattcattgaaattcccataagtgtaccagaagatgttattgaaaatgttattgaaaatggcagtcctaataattctttaaataatgttttcaagcctttaactgaatgtggggatgattatgaggaggaagaggatgaagaaggtgattatgaagaagatgattatgacctgaatcaagaaacttcagtaattcataaaatcaatggaactgtgtgccatccaaaagacatatatgccacagatcaagaaggaaactttaagtgtcctgctcttggttgtgtccggatatttaaaagaattgggtttctaaataaacatgcaatgaccgtacatccaaccgatttaaatgtgcgacaaacagtaatgaagtggagcaaaggaaaatgcaaattttgtcaaaggcaatttgaagattctcaacattttatagaccaccttaatagacatagctatccaaatgtgtatttttgtttgcattttaattgcaacgagtcgtttaagctgccgttccagcttgcccagcacacaaaaagtcacaggatatttcaggctcagtgtagttttccagaatgccatgagctttttgaagatcttcctctgctgtatgaacatgaagctcaacactatttaagtaaaacaccagagtcatctgcacaaccaagtgaaacaattctttgggatgttcagacagactcaaatcctaatcaggaaaaagactcatctagtaatgagaaacaaactattagtctgccagtttctactagcaaatcaaggaaagagtctacagaaccaaagacatgtatagaaagtatggaaaagaaaacagacagtttagttcagaatggaaacgaacgttctgatgacactgtttcaaatataagcttgatagaccaaaagatgcctgacatagagccaaattctgaaaataattgtagtagtagtgatatagtcaatggacacagtgaaatagagcaaacacctttagtttcatcagatcctgctttgaaaattgatacaaacagaatcaggacagaaaatggttccattttgcccagtgttgtaccacaagaacacaacaccttgccagtatctcaggcaccttccaaaccaaatctgacaagtgaacatacttcatatggcttaattttaacaaaaccatacgtcagaccattgcctcccagttaccttgatgaacggtatcttagtatgccaaaacgcagaaaatttctgactgatagagtagatgcctgttctgatcaagataacgtgtataaaaaatcagtgaaaagattaagatgtggcaaatgcctgaccacctactgtaatgcagaagcacttgaggctcatcttgcacaaaagaaatgtcagacactctttggatttgattcagatgatgaaagtgcctagtaatgaactagtccgtaacttgaaagtatttcgatttcttggctttatatatcttgtggaaaggacgaggaaacatgccggtttagaacgct

SEQ ID NO: 2657 - DNA, 1847 bp, Homo sapiens
  source 1..1847: mol_type = genomic DNA
accgccaccatgttatgtaacaaggaatttttaggtggtcacattgtaaggcatgcccaggctcatcagaaaaaaggcagttttgcatgtgtaatatgtggtaggaaatttagaaacagaggacttatgcagaagcatttgaagaatcatgttaagaagatacagaggcagcaaattgctgcagctcaacaggatgatcaggaagtcactgctttggaagaaataaattgttctagttcttccatttcatttgaaaatgggaattctgatagtaaggatttggaagtggagacacttactgcttctagtgaaggaaacaaagaagtcatccctgagcatgtggctgaattcattgaaattcccataagtgtaccagaagatgttattgaaaatgttattgaaaatggcagtcctaataattctttaaataatgttttcaagcctttaactgaatgtggggatgattatgaggaggaagaggatgaagaaggtgattatgaagaagatgattatgacctgaatcaagaaacttcagtaattcataaaatcaatggaactgtgtgccatccaaaagacatatatgccacagatcaagaaggaaactttaagtgtcctgctcttggttgtgtccggatatttaaaagaattgggtttctaaataaacatgcaatgaccgtacatccaaccgatttaaatgtgcgacaaacagtaatgaagtggagcaaaggaaaatgcaaattttgtcaaaggcaatttgaagattctcaacattttatagaccaccttaatagacatagctatccaaatgtgtatttttgtttgcattttaattgcaacgagtcgtttaagctgccgttccagcttgcccagcacacaaaaagtcacaggatatttcaggctcagtgtagttttccagaatgccatgagctttttgaagatcttcctctgctgtatgaacatgaagctcaacactatttaagtaaaacaccagagtcatctgcacaaccaagtgaaacaattctttgggatgttcagacagactcaaatcctaatcaggaaaaagactcatctagtaatgagaaacaaactattagtctgccagtttctactagcaaatcaaggaaagagtctacagaaccaaagacatgtatagaaagtatggaaaagaaaacagacagtttagttcagaatggaaacgaacgttctgatgacactgtttcaaatataagcttgatagaccaaaagatgcctgacatagagccaaattctgaaaataattgtagtagtagtgatatagtcaatggacacagtgaaatagagcaaacacctttagtttcatcagatcctgctttgaaaattgatacaaacagaatcaggacagaaaatggttccattttgcccagtgttgtaccacaagaacacaacaccttgccagtatctcaggcaccttccaaaccaaatctgacaagtgaacatacttcatatggcttaattttaacaaaaccatacgtcagaccattgcctcccagttaccttgatgaacggtatcttagtatgccaaaacgcagaaaatttctgactgatagagtagatgcctgttctgatcaagataacgtgtataaaaaatcagtgaaaagattaagatgtggcaaatgcctgaccacctactgtaatgcagaagcacttgaggctcatcttgcacaaaagaaatgtcagacactctttggatttgattcagatgatgaaagtgcctagtaatgaactagtccgtaacttgaaagtatttcgatttcttggctttatatatcttgtggaaaggacgagcaactcttcaaggccacccaggt

SEQ ID NO: 2658 - DNA, 1307 bp, Homo sapiens
  source 1..1307: mol_type = genomic DNA
accgccaccatggttctagcgcagagccgggtgtctgccggggtgggctccccgcattgttcgggctccggcgggggcggctctgattcctttccatggcccgcctcccaccccgggaatccccagtgctccttttccacggcttttctggcgtccccccgactctcccgcggcactttggcctaccttcccccagcgccgtggtcctccctggcgaccccctctgcgctcctggggtcctcctgcgccccccctcctccaccggcgcgctgcccacagccgcgtgccctctccccggagctggggaccaaggctgggccccgccggccgcatcggtgggaacttccgcggtccccatcccagggcgcacagggtccagctcctcggcgccgactcctggaaacaatgaaaggtattgttgcagcatctggcagtgagactgaggatgaggacagcatggacattcccttggacctttcttcatccgctggctcaggcaagagaaggagaaggggcaacctacccaaggagtctgtgcagattcttcgggattggctgtatgagcaccgttacaatgcctatccttcagagcaagaaaaagcgttgctgtcccagcaaacacacctgtctacgctacaggtctgtaactggttcatcaacgcccgccgcaggctcctccctgacatgctgagaaaggatggcaaagatccaaatcagttcacaatttcccgccgtggggccaagatttctgaaacgagctctgtggagtccgtgatgggcatcaaaaacttcatgccagctctagaggagaccccatttcattcctgtacagctgggccaaacccaaccctagggaggccactgtctcctaagccgtcatccccgggatcagttttggctcgtccatcagtgatctgccataccactgtgactgcattgaaagatgtccctttctctctctgccagtcggtcggtgtgggacaaaacacagatatacagcagatagcggccaaaaacttcacagacacctctctcatgtacccagaggacacttgtaaatctggaccaagtacgaatacacagagtggtcttttcaacactcctccccctactccaccggacctcaaccaggacttcagtggatttcagcttctagtggatgttgcactcaaacgggctgcagagatggagcttcaggcaaaacttacagcttagtaatgaactagtccgtaacttgaaagtatttcgatttcttggctttatatatcttgtggaaaggacgacgtaccaatctgcacttcggtggc

SEQ ID NO: 2659 - DNA, 860 bp, Homo sapiens
  source 1..860: mol_type = genomic DNA
accgccaccatggacattcccttggacctttcttcatccgctggctcaggcaagagaaggagaaggggcaacctacccaaggagtctgtgcagattcttcgggattggctgtatgagcaccgttacaatgcctatccttcagagcaagaaaaagcgttgctgtcccagcaaacacacctgtctacgctacaggtctgtaactggttcatcaacgcccgccgcaggctcctccctgacatgctgagaaaggatggcaaagatccaaatcagttcacaatttcccgccgtggggccaagatttctgaaacgagctctgtggagtccgtgatgggcatcaaaaacttcatgccagctctagaggagaccccatttcattcctgtacagctgggccaaacccaaccctagggaggccactgtctcctaagccgtcatccccgggatcagttttggctcgtccatcagtgatctgccataccactgtgactgcattgaaagatgtccctttctctctctgccagtcggtcggtgtgggacaaaacacagatatacagcagatagcggccaaaaacttcacagacacctctctcatgtacccagaggacacttgtaaatctggaccaagtacgaatacacagagtggtcttttcaacactcctccccctactccaccggacctcaaccaggacttcagtggatttcagcttctagtggatgttgcactcaaacgggctgcagagatggagcttcaggcaaaacttacagcttagtaatgaactagtccgtaacttgaaagtatttcgatttcttggctttatatatcttgtggaaaggacgatcccgagtcatccggcgcagttgt

SEQ ID NO: 2660 - DNA, 962 bp, Homo sapiens
  source 1..962: mol_type = genomic DNA
accgccaccatgacttgctcgggcaaaagttgtgcattggcccgatcaagcctgacttctagccaaggtattgttgcagcatctggcagtgagactgaggatgaggacagcatggacattcccttggacctttcttcatccgctggctcaggcaagagaaggagaaggggcaacctacccaaggagtctgtgcagattcttcgggattggctgtatgagcaccgttacaatgcctatccttcagagcaagaaaaagcgttgctgtcccagcaaacacacctgtctacgctacaggtctgtaactggttcatcaacgcccgccgcaggctcctccctgacatgctgagaaaggatggcaaagatccaaatcagttcacaatttcccgccgtggggccaagatttctgaaacgagctctgtggagtccgtgatgggcatcaaaaacttcatgccagctctagaggagaccccatttcattcctgtacagctgggccaaacccaaccctagggaggccactgtctcctaagccgtcatccccgggatcagttttggctcgtccatcagtgatctgccataccactgtgactgcattgaaagatgtccctttctctctctgccagtcggtcggtgtgggacaaaacacagatatacagcagatagcggccaaaaacttcacagacacctctctcatgtacccagaggacacttgtaaatctggaccaagtacgaatacacagagtggtcttttcaacactcctccccctactccaccggacctcaaccaggacttcagtggatttcagcttctagtggatgttgcactcaaacgggctgcagagatggagcttcaggcaaaacttacagcttagtaatgaactagtccgtaacttgaaagtatttcgatttcttggctttatatatcttgtggaaaggacgacgacacttgatactacgagttcta

SEQ ID NO: 2661 - DNA, 1922 bp, Homo sapiens
  source 1..1922: mol_type = genomic DNA
accgccaccatgagccacacagccagttcttgtcaggagctggttgaaaactgtgctgtgcatgtagcaggaatggcacaagaagatagccgtcgtggtcaagtgccatcttccttttatcatggtgccaaccaagaacttgacctgtccaccaaagtgtacaaaagggaatcaggaagtccttattctgtgttagtggacaccaagatgagcaaaccgcatctccatgaaacagaagaacagccatatttcagggagacaagagcagtgtctgacgtgcatgctgttaaggaagaccgggagaattctgatgacacagaggaggaagaggaagaagtctcttacaaaagggagcagatcatagtggaggtaaaccttaataatcaaacattaaatgtatctaaaggggaaaagggtgtctcttctcagtccaaagagactcctgttcttaagacaagcagtgaggaggaagaggaagagagtgaggaagaggccacagatgacagcaatgactatggagagaatgaaaagcagaagaaaaaggagaagatagtagagaaagtcagcgttacacaaaggagaaccaggagagctgcctctgttgccgcagctaccacttcccctactcccagaactacaagaggtcgtaggaagagtgtagagccacctaagcgtaagaagcgggccacaaaggagcccaaagcaccagtccagaaagctaagtgtgaagagaaagagactctgacctgtgagaagtgccccagggtatttaacactcgctggtacctggagaagcacatgaacgttactcataggcgcatgcagatttgtgataaatgtggcaagaagtttgtcctggaaagtgagctgtcccttcaccagcaaacagactgtgaaaaaaacattcagtgtgtttcctgtaacaaatcgttcaagaaactctggtcccttcatgaacatatcaagatcgtccatggatatgcagaaaagaaattttcctgtgaaatttgtgagaagaaattctataccatggctcatgtgcggaaacacatggttgcacacacaaaagacatgccatttacatgcgaaacctgtggaaaatcattcaaacgcagtatgtcactcaaggtgcactccttgcagcattctggagagaagccctttagatgcgagaactgtgacgaaaggtttcagtacaagtaccagctacgctcccacatgagcattcatattgggcacaaacagttcatgtgccagtggtgtggcaaggatttcaacatgaagcagtacttcgacgaacacatgaaaacacacactggagagaaaccctttatctgtgaaatctgtggcaaaagcttcaccagccgccccaacatgaagagacaccgcagaactcacacaggcgagaagccctatccatgtgatgtgtgtggccagcggttccgcttctcgaacatgcttaaggcccacaaggagaagtgctttcgggtgaccagccccgtgaatgtgccacctgctgtccagatcccacttacaacttccccagccaccccagttccttctgtggtgaacacagccacaaccccaacccctccaatcaatatgaatcctgtaagcactcttccccctcggcccatcccccaccccttctcacacctgcacatccacccacaccctcaccacccacaccaccttcccatccctccagtccctcacctcccgccacctccagctctctttaagagtgagcctttaaatcatagaggccagagtgaggacaactttctgcggcacctggcagagaagaacagttcagcacagcatcattagtaatgaactagtccgtaacttgaaagtatttcgatttcttggctttatatatcttgtggaaaggacgacgcatactggcgattagtacgtgt

SEQ ID NO: 2662 - DNA, 1382 bp, Homo sapiens
  source 1..1382: mol_type = genomic DNA
accgccaccatgagccacacagccagttcttgtcaggagctggttgaaaactgtgctgtgcatgtagcaggaatggcacaagaagatagccgtcgtggtcaagtgccatcttccttttatcatggtgccaaccaagaacttgacctgtccaccaaagtgtacaaaagggaatcaggaagtccttattctgtgttagtggacaccaagatgagcaaaccgcatctccatgaaacagaagaacagccatatttcagggagacaagagcagtgtctgacgtgcatgctgttaaggaagaccgggagaattctgatgacacagaggaggaagaggaagaagtctcttacaaaagggagcagatcatagtggagtgtgtttcctgtaacaaatcgttcaagaaactctggtcccttcatgaacatatcaagatcgtccatggatatgcagaaaagaaattttcctgtgaaatttgtgagaagaaattctataccatggctcatgtgcggaaacacatggttgcacacacaaaagacatgccatttacatgcgaaacctgtggaaaatcattcaaacgcagtatgtcactcaaggtgcactccttgcagcattctggagagaagccctttagatgcgagaactgtgacgaaaggtttcagtacaagtaccagctacgctcccacatgagcattcatattgggcacaaacagttcatgtgccagtggtgtggcaaggatttcaacatgaagcagtacttcgacgaacacatgaaaacacacactggagagaaaccctttatctgtgaaatctgtggcaaaagcttcaccagccgccccaacatgaagagacaccgcagaactcacacaggcgagaagccctatccatgtgatgtgtgtggccagcggttccgcttctcgaacatgcttaaggcccacaaggagaagtgctttcgggtgaccagccccgtgaatgtgccacctgctgtccagatcccacttacaacttccccagccaccccagttccttctgtggtgaacacagccacaaccccaacccctccaatcaatatgaatcctgtaagcactcttccccctcggcccatcccccaccccttctcacacctgcacatccacccacaccctcaccacccacaccaccttcccatccctccagtccctcacctcccgccacctccagctctctttaagagtgagcctttaaatcatagaggccagagtgaggacaactttctgcggcacctggcagagaagaacagttcagcacagcatcattagtaatgaactagtccgtaacttgaaagtatttcgatttcttggctttatatatcttgtggaaaggacgaagcagtaggtatttctcatgcctg

SEQ ID NO: 2663 - DNA, 1712 bp, Homo sapiens
  source 1..1712: mol_type = genomic DNA
accgccaccatgaagcagagttcgaacgtgccggctttcctcagcaagctgtggacgcttgtggaggaaacccacactaacgagttcatcacctggagccagaatggccaaagttttctggtcttggatgagcaacgatttgcaaaagaaattcttcccaaatatttcaagcacaataatatggcaagctttgtgaggcaactgaatatgtatggtttccgtaaagtagtacatatcgactctggaattgtaaagcaagaaagagatggtcctgtagaatttcagcatccttacttcaaacaaggacaggatgacttgttggagaacattaaaaggaaggtttcatcttcaaaaccagaagaaaataaaattcgtcaggaagatttaacaaaaattataagtagtgctcagaaggttcagataaaacaggaaactattgagtccaggctttctgaattaaaaagtgagaatgagtccctttggaaggaggtgtcagaattacgagcaaagcatgcacaacagcaacaagttattcgaaagattgtccagtttattgttacattggttcaaaataaccaacttgtgagtttaaaacgtaaaaggcctctacttctaaacactaatggagcccaaaagaagaacctgtttcagcacatagtcaaagaaccaactgataatcatcatcataaagttccacacagtaggactgaaggtttaaagccaagggagaggatttcagatgacatcattatttatgatgttactgatgataatgcagatgaagaaaatatcccagttattccagaaactaatgaggatgttatatctgatccctccaactgtagccagtaccctgatattgtcatcgttgaagatgacaatgaagatgagtatgcacctgtcattcagagtggagagcagaatgaaccagccagagaatccctaagttcaggcagtgatggcagcagccctctcatgtctagtgctgtccagctaaatggctcatccagtctgacctcagaagatccagtgaccatgatggattccattttgaatgataacatcaatcttttgggaaaggttgagctgttggattatcttgacagtattgactgcagtttagaggacttccaggccatgctatcaggaagacaatttagcatagacccagatctcctggttgatcttttcactagttctgtgcagatgaatcccacagattacatcaataatacaaaatctgagaataaaggattagaaactaccaagaacaatgtagttcagccagtttcggaagagggaagaaaatctaaatccaaaccagataagcagcttatccagtataccgcctttccacttcttgcattcctcgatgggaaccctgcttcttctgttgaacaggcgagtacaacagcatcatcagaagttttgtcctctgtagataaacccatagaagttgatgagcttctggatagcagcctagacccagaaccaacccaaagtaagcttgttcgcctggagccattgactgaagctgaagctagtgaagctacactgttttatttatgtgaacttgctcctgcacctctggatagtgatatgccacttttagatagctagtaatgaactagtccgtaacttgaaagtatttcgatttcttggctttatatatcttgtggaaaggacgaggtctttagtcactcaacctacgg

SEQ ID NO: 2664 - DNA, 1658 bp, Homo sapiens
  source 1..1658: mol_type = genomic DNA
accgccaccatgaagcagagttcgaacgtgccggctttcctcagcaagctgtggacgcttgtggaggaaacccacactaacgagttcatcacctggagccagaatggccaaagttttctggtcttggatgagcaacgatttgcaaaagaaattcttcccaaatatttcaagcacaataatatggcaagctttgtgaggcaactgaatatgtatggtttccgtaaagtagtacatatcgactctggaattgtaaagcaagaaagagatggtcctgtagaatttcagcatccttacttcaaacaaggacaggatgacttgttggagaacattaaaaggaaggtttcatcttcaaaaccagaagaaaataaaattcgtcaggaagatttaacaaaaattataagtagtgctcagaaggttcagataaaacaggaaactattgagtccaggctttctgaattaaaaagtgagaatgagtccctttggaaggaggtgtcagaattacgagcaaagcatgcacaacagcaacaagttattcgaaagattgtccagtttattgttacattggttcaaaataaccaacttgtgagtttaaaacgtaaaaggcctctacttctaaacactaatggagcccaaaagaagaacctgtttcagcacatagtcaaagaaccaactgataatcatcatcataaagttccacacagtaggactgaaggtttaaagccaagggagaggatttcagatgacatcattatttatgatgttactgatgataatgcagatgaagaaaatatcccagttattccagaaactaatgaggatgttatatctgatccctccaactgtagccagtaccctgatattgtcatcgttgaagatgacaatgaagatgagtatgcacctgtcattcagagtggagagcagaatgaaccagccagagaatccctaagttcaggcagtgatggcagcagccctctcatgtctagtgctgtccagctaaatggctcatccagtctgacctcagaagatccagtgaccatgatggattccattttgaatgataacatcaatcttttgggaaaggttgagctgttggattatcttgacagtattgactgcagtttagaggacttccaggccatgctatcaggaagacaatttagcatagacccagatctcctggttgattctgagaataaaggattagaaactaccaagaacaatgtagttcagccagtttcggaagagggaagaaaatctaaatccaaaccagataagcagcttatccagtataccgcctttccacttcttgcattcctcgatgggaaccctgcttcttctgttgaacaggcgagtacaacagcatcatcagaagttttgtcctctgtagataaacccatagaagttgatgagcttctggatagcagcctagacccagaaccaacccaaagtaagcttgttcgcctggagccattgactgaagctgaagctagtgaagctacactgttttatttatgtgaacttgctcctgcacctctggatagtgatatgccacttttagatagctagtaatgaactagtccgtaacttgaaagtatttcgatttcttggctttatatatcttgtggaaaggacgacgatccatcctccggtcgtgggaa

SEQ ID NO: 2665 - DNA, 1892 bp, Homo sapiens
  source 1..1892: mol_type = genomic DNA
accgccaccatggaggcgctgctctccacccccatcaaccccaacaacttccccgccaagctgtggcgcctggtgaacagcccgcgctaccgctccatccgctgggacggccgcggcgaggggctgcttatcgatcagccgctcttcgaggccgagctgctcagcccgcccgggccggggggcggtggcgggactgcgggggccggggccgagcccgagctcttcaaaaccaccagcttcaccagcttcatccgccagctcaacctctacggcttccgcaaggtggtgctgggcgggccggggggcggcaaaccggcaggcaatgggccgctccatcacttccacaacccgcacttccgccgcgaccagccacagctgctcgtgcacctcaagcgcctcaccagcgccaacaaggccaagctggcggccggcctggaggtgccctgccgcccgcccaaccgcttccagcggctgctcatcacctcggcctccgccgccaccgcgccactgcagcaccagcagccgccgccgcccgcggggccccggcccgagccgcacggaccagtggctgtaggacaatttcaccggtcatttcgtcgagatagtttgtctccttactcctgtgtatcaactccatcccacgaccacagtacttaccctctgaaaggtttagatcggaccccagttcctcatagaatatggcagaactcccttggaatgcatcctggacaagtggagacatctcccacattttcagataaaggggttccgtttcctgtactccagaggtttccaactgaggttacctatacactgcagcccagcaccacatctgtacatgttcaacaaggtcctcaaacaatggtcagctcctcccaaaaatacagtaactacacaccctcagcacagtactcgcaagcctactatccaacagctgtgctacagtgctgttctcctacccacatggatgctctaagtagttgtgtcactcccactgcctcttcctatgcacactgcaactacttccagaatccttcaatgcagtcctcctatccagttgaatttttgccttccaattggccctgcagtactactgatgaaaatacaaagacagaagtaaacctagaggctgtctttcagatagttgatgagttgcattcctcccctaaattggagatggtaaaggtggagcctgttgagaatcagtgcccaacatctccgtcttacagaggccaacacattttagctaattctaacaacagcaatccatgttctgcaagtcaggctagccagctggagccacttactcctgtaggctcagatattatgtcttttgtggttggaacagaacaagcagttgcctgctctctaccacagtcacctgagtacatctataccatccacacagctcagcctgttgaaaatagcacaatacaggaatctgcagccatccagcaagctcatgtcaaactgaaggagcacctaaatcataatccatctccatcttcagtagtatttgtgcaggaagggccaccattcagcacacaccaggtggatgccaacataaaatgccagaccagttcacgtgagaatatcttgccgtcagaacagatgggattcctcatttcagaaatggggcctgctagcaagcctagtgaagacacaggtttagccactccagccagatacagagagcacagaagcaactcacaacaaggaaagtcccctgatcttcatctgctggtggacgtggcctgcaagcaggagcgctttccaaaggaggaagaattaaaagagtagtaatgaactagtccgtaacttgaaagtatttcgatttcttggctttatatatcttgtggaaaggacgagggcgtaacatggttagacataac

SEQ ID NO: 2666 - DNA, 1580 bp, Homo sapiens
  source 1..1580: mol_type = genomic DNA
accgccaccatgcaggaagcgccagctgcgctgcccacggagccaggccccagccccgtgcctgccttcctcggcaagctatgggcgctggtgggggacccaggcacagaccacctgatccgctggagcccgagcgggaccagtttcctcgtaagcgaccagagccgtttcgccaaggaagtgctgccccagtatttcaagcatagcaacatggcgagcttcgtgcgccaactcaacatgtacggttttcggaaggtggtgagcatcgagcagggcggcctgcttaggccggagcgcgaccacgtcgagttccagcacccgagcttcgtgcgcggccgcgagcagctactggagcgcgtgcggcgcaaggtgcccgcgctgcgcggcgacgacggccgctggcgcccggaggacctgggtcgactactgggcgaggtgcaggctttgcggggagtgcaggagagcaccgaggcgcggctgcgggagctcaggcagcagaacgagatcttgtggcgggaggtggtgacacttcggcagagccacggtcagcagcaccgggtcattggcaagctgatccagtgtctctttgggccacttcaggcggggccgagcaatgcaggaggcaagagaaagctgtccctgatgctggatgaggggagctcatgcccaacacctgccaagttcaacacctgccctctacctggtgcccttctgcaggacccctacttcatccagtcgcctctcccagagacaaatttgggccttagccctcacagggccaggggccccatcatctctgacatcccagaagactctccatcccctgaggggaccaggctttctccctccagtgatggcaggagggagaagggcctggcactgctcaaagaagagccggccagtccagggggggatggcgaggccgggctggccctggccccaaacgagtgtgacttctgcgtgacagcccccccgccactgcctgtggctgtggtgcaggccatcctggaagggaaagggagcttcagccccgaggggcccaggaatgcccaacagcctgaaccaggggatcccagggagatacctgacagggggcctctgggcctggaaagcggggacaggagcccagagagtctgctgcctccgatgctgcttcagccccctcaagaaagtgtggaacctgcagggcctctagatgtgctgggccccagtctccaagggcgagaatggaccctgatggacttggacatggagctgtccttgatgcagcccttggttccagagcggggtgagcctgagctggcggtcaaggggttaaattctccaagcccagggaaggaccccacgctcggggccccactcctgctggatgtccaggcggccttgggaggcccagccctgggcctgcctggggctttaaccatttatagcactcctgagagccggactgcctcctacttgggcccggaagccagtccctccccctagtaatgaactagtccgtaacttgaaagtatttcgatttcttggctttatatatcttgtggaaaggacgattgggtattagaacgagcttagtt

SEQ ID NO: 2667 - DNA, 1490 bp, Homo sapiens
  source 1..1490: mol_type = genomic DNA
accgccaccatgcaggaagcgccagctgcgctgcccacggagccaggccccagccccgtgcctgccttcctcggcaagctatgggcgctggtgggggacccaggcacagaccacctgatccgctggagcccgagcgggaccagtttcctcgtaagcgaccagagccgtttcgccaaggaagtgctgccccagtatttcaagcatagcaacatggcgagcttcgtgcgccaactcaacatgtacggttttcggaaggtggtgagcatcgagcagggcggcctgcttaggccggagcgcgaccacgtcgagttccagcacccgagcttcgtgcgcggccgcgagcagctactggagcgcgtgcggcgcaaggtgcccgcgctgcgcggcgacgacggccgctggcgcccggaggacctgggtcgactactgggcgaggtgcaggctttgcggggagtgcaggagagcaccgaggcgcggctgcgggagctcaggcagcagaacgagatcttgtggcgggaggtggtgacacttcggcagagccacggtcagcagcaccgggtcattggcaagctgatccagtgtctctttgggccacttcaggcggggccgagcaatgcaggaggcaagagaaagctgtccctgatgctggatgaggggagctcatgcccaacacctgccaagttcaacacctgccctctacctggtgcccttctgcaggacccctacttcatccagtcgccttctacttacagcctctcccagagacaaatttgggccttagccctcacagggccaggggccccatcatctctgacatcccagaagactctccatcccctgaggggaccaggctttctccctccagtgatggcaggagcccccccgccactgcctgtggctgtggtgcaggccatcctggaagggaaagggagcttcagccccgaggggcccaggaatgcccaacagcctgaaccaggggatcccagggagatacctgacagggggcctctgggcctggaaagcggggacaggagcccagagagtctgctgcctccgatgctgcttcagccccctcaagaaagtgtggaacctgcagggcctctagatgtgctgggccccagtctccaagggcgagaatggaccctgatggacttggacatggagctgtccttgatgcagcccttggttccagagcggggtgagcctgagctggcggtcaaggggttaaattctccaagcccagggaaggaccccacgctcggggccccactcctgctggatgtccaggcggccttgggaggcccagccctgggcctgcctggggctttaaccatttatagcactcctgagagccggactgcctcctacttgggcccggaagccagtccctccccctagtaatgaactagtccgtaacttgaaagtatttcgatttcttggctttatatatcttgtggaaaggacgacaatttactacgttcactatatct

SEQ ID NO: 2668 - DNA, 1367 bp, Homo sapiens
  source 1..1367: mol_type = genomic DNA
accgccaccatggcccggaggtatgatgagctgccgcactacccaggcatcgtggatggccccgcagccctggctagcttcccagagacagtgcccgcagtaccagggccctatggcccgcaccggcctccccagcccctgcccccaggcttggacagcgacggcctgaagagggagaaggatgagatctatggacacccgctcttccccctcttggccctggtctttgagaaatgtgaactggctacatgctctccccgtgacggggccggagctgggctggggacaccccctggaggtgacgtctgctcctctgattccttcaacgaggacatcgctgcctttgccaagcaggttcgctctgagaggcccctcttctcctccaacccagaactggacaatctgatgatccaggccatccaggtgctgcggttccacctgctggagctggagaaggtccacgacctgtgcgacaacttctgtcaccgctacatcacctgcctcaagggaaagatgcccatcgacctggtcatcgaggatcgggacggcggctgcagggaggacttcgaggactacccagcctcctgccccagcctcccagaccagaataatatgtggattcgagaccatgaggatagtgggtctgtacatttggggaccccaggtccatccagtgggggcctggcctcccagagtggggacaactccagtgaccaaggagacgggctggacaccagcgtggcctctcccagttctggtggagaagatgaggacttggaccaggagcgacggcgaaacaagaagagggggatcttccccaaggtggccaccaacatcatgcgagcctggttgttccagcacctctcgagacgctcagaagcgccggttctcccagacgtctgcctgggcctgggctccccatcccccggaccccggtgggccagaccttggggttcagactgcggccggccaggcaggcagagtgactcttgctggtggctgcagcacccgtacccctcggaggagcagaagaaacagctggcgcaggacacggggctcaccatcctgcaagtcaacaactggttcattaacgcccggagacgcatcgtgcaacctatgatcgatcaatccaaccgcacagggcagggtgcagccttcagcccagagggccagcccatcgggggctataccgagacgcagccacacgtggccgtccggcctccgggatcagtggggatgagtttgaacttggaaggagaatggcattatctatagtaatgaactagtccgtaacttgaaagtatttcgatttcttggctttatatatcttgtggaaaggacgaagatggtcccaagtttaatttccg

SEQ ID NO: 2669 - DNA, 1493 bp, Homo sapiens
  source 1..1493: mol_type = genomic DNA
accgccaccatgtgtactttgtgtacaacaatgcgcggttcctacaggaggtgtccatggatctccctctctgtctgtctctctctctgtctctgtcactgtcttctcacgccactttctccatctcttttccctcccagccagaccctgccgtctctccctctgggtcctcctgcccacatgtcaggaatctctgcctggacggggtcctcactccccaccgaggcagctccaggggacctggagggcttcaagcttgggggctcagacacctggggaccacagtatgatgagctgccgcactacccaggcatcgtggatggccccgcagccctggctagcttcccagagacagtgcccgcagtaccagggccctatggcccgcaccggcctccccagcccctgcccccaggcttggacagcgacggcctgaagagggagaaggatgagatctatggacacccgctcttccccctcttggccctggtctttgagaaatgtgaactggctacatgctctccccgtgacggggccggagctgggctggggacaccccctggaggtgacgtctgctcctctgattccttcaacgaggacatcgctgcctttgccaagcaggttcgctctgagaggcccctcttctcctccaacccagaactggacaatctgatgatccaggccatccaggtgctgcggttccacctgctggagctggagaaggtccacgacctgtgcgacaacttctgtcaccgctacatcacctgcctcaagggaaagatgcccatcgacctggtcatcgaggatcgggacggcggctgcagggaggacttcgaggactacccagcctcctgccccagcctcccagaccagaataatatgtggattcgagaccatgaggatagtgggtctgtacatttggggaccccaggtccatccagtgggggcctggcctcccagagtggggacaactccagtgaccaaggagacgggctggacaccagcgtggcctctcccagttctggtggagaagatgaggacttggaccaggagcgacggcgaaacaagaagagggggatcttccccaaggtggccaccaacatcatgcgagcctggttgttccagcacctctcgcacccgtacccctcggaggagcagaagaaacagctggcgcaggacacggggctcaccatcctgcaagtcaacaactggttcattaacgcccggagacgcatcgtgcaacctatgatcgatcaatccaaccgcacagggcagggtgcagccttcagcccagagggccagcccatcgggggctataccgagacgcagccacacgtggccgtccggcctccgggatcagtggggatgagtttgaacttggaaggagaatggcattatctatagtaatgaactagtccgtaacttgaaagtatttcgatttcttggctttatatatcttgtggaaaggacgaggttctcgtctctttatagtaaac

SEQ ID NO: 2670 - DNA, 1178 bp, Homo sapiens
  source 1..1178: mol_type = genomic DNA
accgccaccatggcccggaggtatgatgagctgccgcactacccaggcatcgtggatggccccgcagccctggctagcttcccagagacagtgcccgcagtaccagggccctatggcccgcaccggcctccccagcccctgcccccaggcttggacagcgacggcctgaagagggagaaggatgagatctatggacacccgctcttccccctcttggccctggtctttgagaaatgtgaactggctacatgctctccccgtgacggggccggagctgggctggggacaccccctggaggtgacgtctgctcctctgattccttcaacgaggacatcgctgcctttgccaagcaggttcgctctgagaggcccctcttctcctccaacccagaactggacaatctgatgatccaggccatccaggtgctgcggttccacctgctggagctggagaagggaaagatgcccatcgacctggtcatcgaggatcgggacggcggctgcagggaggacttcgaggactacccagcctcctgccccagcctcccagaccagaataatatgtggattcgagaccatgaggatagtgggtctgtacatttggggaccccaggtccatccagtgggggcctggcctcccagagtggggacaactccagtgaccaaggagacgggctggacaccagcgtggcctctcccagttctggtggagaagatgaggacttggaccaggagcgacggcgaaacaagaagagggggatcttccccaaggtggccaccaacatcatgcgagcctggttgttccagcacctctcgcacccgtacccctcggaggagcagaagaaacagctggcgcaggacacggggctcaccatcctgcaagtcaacaactggttcattaacgcccggagacgcatcgtgcaacctatgatcgatcaatccaaccgcacagggcagggtgcagccttcagcccagagggccagcccatcgggggctataccgagacgcagccacacgtggccgtccggcctccgggatcagtggggatgagtttgaacttggaaggagaatggcattatctatagtaatgaactagtccgtaacttgaaagtatttcgatttcttggctttatatatcttgtggaaaggacgaaatcgtcgaggttctcctcaaagg

SEQ ID NO: 2671 - DNA, 1229 bp, Homo sapiens
  source 1..1229: mol_type = genomic DNA
accgccaccatggcccggaggtatgatgagctgccgcactacccaggcatcgtggatggccccgcagccctggctagcttcccagagacagtgcccgcagtaccagggccctatggcccgcaccggcctccccagcccctgcccccaggcttggacagcgacggcctgaagagggagaaggatgagatctatggacacccgctcttccccctcttggccctggtctttgagaaatgtgaactggctacatgctctccccgtgacggggccggagctgggctggggacaccccctggaggtgacgtctgctcctctgattccttcaacgaggacatcgctgcctttgccaagcaggttcgctctgagaggcccctcttctcctccaacccagaactggacaatctgatgatccaggccatccaggtgctgcggttccacctgctggagctggagaaggtccacgacctgtgcgacaacttctgtcaccgctacatcacctgcctcaagggaaagatgcccatcgacctggtcatcgaggatcgggacggcggctgcagggaggacttcgaggactacccagcctcctgccccagcctcccagaccagaataatatgtggattcgagaccatgaggatagtgggtctgtacatttggggaccccaggtccatccagtgggggcctggcctcccagagtggggacaactccagtgaccaaggagacgggctggacaccagcgtggcctctcccagttctggtggagaagatgaggacttggaccaggagcgacggcgaaacaagaagagggggatcttccccaaggtggccaccaacatcatgcgagcctggttgttccagcacctctcgcacccgtacccctcggaggagcagaagaaacagctggcgcaggacacggggctcaccatcctgcaagtcaacaactggttcattaacgcccggagacgcatcgtgcaacctatgatcgatcaatccaaccgcacagggcagggtgcagccttcagcccagagggccagcccatcgggggctataccgagacgcagccacacgtggccgtccggcctccgggatcagtggggatgagtttgaacttggaaggagaatggcattatctatagtaatgaactagtccgtaacttgaaagtatttcgatttcttggctttatatatcttgtggaaaggacgacacgccttcaatacgggcgcgcat

SEQ ID NO: 2672 - DNA, 1946 bp, Homo sapiens
  source 1..1946: mol_type = genomic DNA
accgccaccatgacgaccctggactccaacaacaacacaggtggcgtcatcacctacattggctccagtggctcctccccaagccgcaccagccctgaatccctctatagtgacaactccaatggcagcttccagtccctgacccaaggctgtcccacctacttcccaccatcccccactggctccctcacccaagacccggctcgctcctttgggagcattccacccagcctgagtgatgacggctccccttcttcctcatcttcctcgtcgtcatcctcctcctccttctataatgggagcccccctgggagtctacaagtggccatggaggacagcagccgagtgtcccccagcaagagcaccagcaacatcaccaagctgaatggcatggtgttactgtgtaaagtgtgtggggacgttgcctcgggcttccactacggtgtgcacgcctgcgagggctgcaagggctttttccgtcggagcatccagcagaacatccagtacaaaaggtgtctgaagaatgagaattgctccatcgtccgcatcaatcgcaaccgctgccagcaatgtcgcttcaagaagtgtctctctgtgggcatgtctcgagacgctgtgcgttttgggcgcatccccaaacgagagaagcagcggatgcttgctgagatgcagagtgccatgaacctggccaacaaccagttgagcagccagtgcccgctggagacttcacccacccagcaccccaccccaggccccatgggcccctcgccaccccctgctccggtcccctcacccctggtgggcttctcccagtttccacaacagctgacgcctcccagatccccaagccctgagcccacagtggaggatgtgatatcccaggtggcccgggcccatcgagagatcttcacctacgcccatgacaagctgggcagctcacctggcaacttcaatgccaaccatgcatcaggtagccctccagccaccaccccacatcgctgggaaaatcagggctgcccacctgcccccaatgacaacaacaccttggctgcccagcgtcataacgaggccctaaatggtctgcgccaggctccctcctcctaccctcccacctggcctcctggccctgcacaccacagctgccaccagtccaacagcaacgggcaccgtctatgccccacccacgtgtatgcagccccagaaggcaaggcacctgccaacagtccccggcagggcaactcaaagaatgttctgctggcatgtcctatgaacatgtacccgcatggacgcagtgggcgaacggtgcaggagatctgggaggatttctccatgagcttcacgcccgctgtgcgggaggtggtagagtttgccaaacacatcccgggcttccgtgacctttctcagcatgaccaagtcaccctgcttaaggctggcacctttgaggtgctgatggtgcgctttgcttcgttgttcaacgtgaaggaccagacagtgatgttcctaagccgcaccacctacagcctgcaggagcttggtgccatgggcatgggagacctgctcagtgccatgttcgacttcagcgagaagctcaactccctggcgcttaccgaggaggagctgggcctcttcaccgcggtggtgcttgtctctgcagaccgctcgggcatggagaattccgcttcggtggagcagctccaggagacgctgctgcgggctcttcgggctctggtgctgaagaaccggcccttggagacttcccgcttcaccaagctgctgctcaagctgccggacctgcggaccctgaacaacatgcattccgagaagctgctgtccttccgggtggacgcccagtagtaatgaactagtccgtaacttgaaagtatttcgatttcttggctttatatatcttgtggaaaggacgacaataaccgtccacactgtctccc

SEQ ID NO: 2673 - DNA, 824 bp, Homo sapiens
  source 1..824: mol_type = genomic DNA
accgccaccatggctaccgctgaatctcgcgctctgcaattcgctgaaggtgctgctttcccggcttatcgtgctccgcatgctggtggtgctctgctcccaccgccatctccggctgctgctctcctgccggctccaccggctggtccgggtccggctactttcgctggttttctgggtcgtgatccgggtccagctccaccaccgccggcttctctcggttctccggctccgccgaagggtgctgctgctccatctgcttctcaacgtcgtaaacgtacctccttttctgctgagcaactccaactcctcgaactggtttttcgtcgtactcgttatccggatattcatctgcgtgaacgtctcgctgctctgactctcctgccggaatctcgtattcaactgctgttctccccgctgtttcaagtttggtttcaaaatcgtcgcgctaaatcccgtcgccaatctggtaagtcttttcagccgctggcacgtccagaaatcattctgaatcattgcgcaccgggtaccgagaccaagtgcctcaaaccgcaactcccgctggaagttgacgttaattgtctcccggagccgaatggtgtaggtggtggtatttccgattcctcttctcagggccaaaacttcgagacttgctctccgctgtccgaggatatcggctctaaactcgattcttgggaagagcatattttctccgctttcggcaatttctagtaatgaactagtccgtaacttgaaagtatttcgatttcttggctttatatatcttgtggaaaggacgaattaccgcaggtcatggaggcacg

SEQ ID NO: 2674 - DNA, 800 bp, Homo sapiens
  source 1..800: mol_type = genomic DNA
accgccaccatggctaccgctgaatctcgcgctctgcaattcgctgaaggtgctgctttcccggcttatcgtgctccgcatgctggtggtgctctgctcccaccgccatctccggctgctgctctcctgccggctccaccggctggtccgggtccggctactttcgctggttttctgggtcgtgatccgggtccagctccaccaccgccggcttctctcggttctccggctccgccgaagggtgctgctgctccatctgcttctcaacgtcgtaaacgtacctccttttctgctgagcaactccaactcctcgaactggtttttcgtcgtactcgttatccggatattcatctgcgtgaacgtctcgctgctctgactctcctgccggaatctcgtattcaagtttggtttcaaaatcgtcgcgctaaatcccgtcgccaatctggtaagtcttttcagccgctggcacgtccagaaatcattctgaatcattgcgcaccgggtaccgagaccaagtgcctcaaaccgcaactcccgctggaagttgacgttaattgtctcccggagccgaatggtgtaggtggtggtatttccgattcctcttctcagggccaaaacttcgagacttgctctccgctgtccgaggatatcggctctaaactcgattcttgggaagagcatattttctccgctttcggcaatttctagtaatgaactagtccgtaacttgaaagtatttcgatttcttggctttatatatcttgtggaaaggacgagcaacacggttcaacacttaaagt

SEQ ID NO: 2675 - DNA, 1256 bp, Homo sapiens
  source 1..1256: mol_type = genomic DNA
accgccaccatggcagggatcttagcctggttctggaacgagaggttttggctcccgcacaatgtcacctgggcggacctgaagaacacggaggaggccaccttcccgcaggctgaggacctctatctcgcttttcccctggccttctgtatcttcatggtgcggctcatcttcgagagatttgtagccaaaccgtgcgccatagccctcaacattcaggccaatggaccacaaattgctccgcccaatgccattctggaaaaggtcttcactgcaattacaaagcatcctgatgaaaagagattggaaggcctctccaagcaactggactgggatgttcgaagcattcagcgctggtttcgacaaagacgcaatcaggagaagccaagcacgctgacgaggttctgtgagagcatgtggagattttcattttacctttatgtatttacctacggagtcagattcctgaaaaagaccccctggttgtggaatacgaggcattgctggtacaactacccctatcagccactcacaactgaccttcactactattacatcctggagctgtcgttttattggtctttgatgttttctcagttcactgatatcaaaagaaaggactttggcattatgttcctgcaccaccttgtatctattttcttgattaccttttcatatgtcaacaatatggcccgagtaggaacgctggtcctttgtcttcatgattcagctgatgctcttctggaggctgccaaaatggcaaattatgccaagtttcagaaaatgtgtgatctcctgtttgttatgtttgccgtggtttttatcaccacacgactgggtatatttcctctctgggtgttaaataccacattatttgaaagctgggagatcgttggaccttacccttcctggtgggtttttaacctactgctattgctagtacaagggttgaactgcttctggtcttacttgattgtgaaaatagcttgcaaagctgtttcaagaggcaaggtgtccaaggatgatcgaagtgatattgagtctagctcagatgaggaggactcagaacctccgggaaagaatccccacactgcgacaaccaccaatgggaccagtggtaccaacgggtatctcctgactggctcctgctccatggatgattagtaatgaactagtccgtaacttgaaagtatttcgatttcttggctttatatatcttgtggaaaggacgacggagtctcaggaggccttaggtt

SEQ ID NO: 2676 - DNA, 1286 bp, Homo sapiens
  source 1..1286: mol_type = genomic DNA
accgccaccatgctgtccagtttcaacgagtggttttggcaggacaggttctggttaccacccaatgtcacgtggacagagctagaagaccgggatggccgtgtctacccccacccccaggacttgttggcagccctgcccctggcgctggtcctcctggccatgcgccttgcctttgagagattcattggcctgcccctgagccggtggctgggtgtgagggatcagaccaggaggcaagtgaagcccaacgccacgctggagaaacacttcctcacggaagggcacaggcccaaggagccccagctgtctctcctggccgcccagtgtggcctcacgctgcagcagacccagcgatggttccggagacgccggaaccaggatcgaccccagctgaccaagaagttctgtgaggccagctggaggtttctcttctacctgtcctccttcgtgggcggcctctcggtcctgtaccacgagtcatggctgtgggcaccagtaatgtgctgggacaggtacccaaaccagactctgaagccatccctgtactggtggtacctcttggagctgggtttctacctctcactgctaatcaggctgccctttgatgtcaagcgcaaggatttcaaggagcaggtgatacaccacttcgtggcggtcatcctgatgaccttctcctacagtgccaacctgctgcgcattggctctctggtgctgctgttacacgattcctctgactacctgctggaggcctgtaagatggtcaactacatgcagtatcagcaagtgtgcgacgctctcttcctcatcttctcctttgtcttcttctacacccgactggtcctctttcccacccagatcctctacaccacatactacgagtccatcagcaacaggggccccttcttcggctactacttcttcaacgggcttctgatgttgctgcagctgctgcacgtgttctggtcttgcctcattctgcgcatgctctatagcttcatgaagaagggccagatggagaaggacattcgtagtgatgtagaagaatcagactccagtgaggaggcggcggcggcccaggaacctctgcagctaaagaacggggcagctggagggcccaggccagcccccactgatggccctcggagccgggtggccgggcgtctgaccaacaggcacacaacagccacatagtaatgaactagtccgtaacttgaaagtatttcgatttcttggctttatatatcttgtggaaaggacgaggtcgcgaccattgtaagcccttc

SEQ ID NO: 2677 - DNA, 1280 bp, Homo sapiens
  source 1..1280: mol_type = genomic DNA
accgccaccatggcgacagcagcgcagggacccctaagcttgctgtggggctggctgtggagcgagcgcttctggctacccgagaacgtgagctgggctgatctggaggggccggccgacggctacggttacccccgcggccggcacatcctctcggtgttcccgctggcggcgggcatcttcttcgtgaggctgctcttcgagcgatttattgccaaaccctgtgcactctgtattggcatcgaggacagtggtccttatcaggcccaacccaatgccatccttgaaaaggtgttcatatctattaccaagtatcctgataagaaaaggctggagggcctgtcaaagcagctggattggaatgtccgaaaaatccaatgctggtttcgccatcggaggaatcaggacaagcccccaacgcttactaaattctgtgaaagcatgtggagattcacattttatttatgtatattctgctatggaattagatttctctggtcgtcaccttggttctgggacatccgacagtgctggcataactatccatttcagcctctttcaagtgggctttatcactattatatcatggaattggccttctattggtcccttatgttttctcagtttacagacattaaaagaaaggacttcctgatcatgtttgtgcatcacttggtcaccattgggcttatctccttctcctacatcaacaatatggttcgagtgggaactctgatcatgtgtctacatgatgtctcagacttcttgctggaggcagccaaactggccaattatgccaagtatcagcggctctgtgacaccctttttgtgatcttcagtgctgtttttatggttacacgactaggaatctatccattctggattctgaacacgaccctctttgagagttgggagataatcgggccttatgcttcatggtggctcctcaatggcctgctgctgaccctacagcttctgcatgtcatctggtcctacctaattgcacggattgctttgaaagccttgatcaggggaaaggtatcgaaggatgatcgcagtgatgtggagagcagctcagaggaagaagatgtgaccacctgcacaaaaagtccctgtgacagtagctccagcaatggtgccaatcgggtgaatggtcacatgggaggcagctactgggctgaagagtagtaatgaactagtccgtaacttgaaagtatttcgatttcttggctttatatatcttgtggaaaggacgatcattcgcattacggccaaccggt

SEQ ID NO: 2678 - DNA, 1106 bp, Homo sapiens
  source 1..1106: mol_type = genomic DNA
accgccaccatgatgaaaccaagacccaagagatttattgccaaaccctgtgcactctgtattggcatcgaggacagtggtccttatcaggcccaacccaatgccatccttgaaaaggtgttcatatctattaccaagtatcctgataagaaaaggctggagggcctgtcaaagcagctggattggaatgtccgaaaaatccaatgctggtttcgccatcggaggaatcaggacaagcccccaacgcttactaaattctgtgaaagcatgtggagattcacattttatttatgtatattctgctatggaattagatttctctggtcgtcaccttggttctgggacatccgacagtgctggcataactatccatttcagcctctttcaagtgggctttatcactattatatcatggaattggccttctattggtcccttatgttttctcagtttacagacattaaaagaaaggacttcctgatcatgtttgtgcatcacttggtcaccattgggcttatctccttctcctacatcaacaatatggttcgagtgggaactctgatcatgtgtctacatgatgtctcagacttcttgctggaggcagccaaactggccaattatgccaagtatcagcggctctgtgacaccctttttgtgatcttcagtgctgtttttatggttacacgactaggaatctatccattctggattctgaacacgaccctctttgagagttgggagataatcgggccttatgcttcatggtggctcctcaatggcctgctgctgaccctacagcttctgcatgtcatctggtcctacctaattgcacggattgctttgaaagccttgatcaggggaaaggtatcgaaggatgatcgcagtgatgtggagagcagctcagaggaagaagatgtgaccacctgcacaaaaagtccctgtgacagtagctccagcaatggtgccaatcgggtgaatggtcacatgggaggcagctactgggctgaagagtagtaatgaactagtccgtaacttgaaagtatttcgatttcttggctttatatatcttgtggaaaggacgaagaagagcatttgactgagctcaa

SEQ ID NO: 2679 - DNA, 1919 bp, Homo sapiens
  source 1..1919: mol_type = genomic DNA
accgccaccatggctgctgggcagcgggaagcgaggccccaggtgtcactgacgtttgaggatgtggctgtgctgtttacccgagatgagtggagaaagctggccccttctcagagaaacttgtaccgggatgtgatgctggagaactataggaacctggtctcactggggctcccatttaccaaaccaaaagtgatctccctgttgcagcaaggagaagatccctgggaggtggagaaagacggttctggcgtctcctctctaggatcgaagagcagtcataaaaccacaaagtcaacgcaaacacaagactcttcatttcagggactgatactgaaaagatccaacaggaatgtaccttgggatttgaaattagaaaagccttacatatatgaaggcagattagagaaaaagcaggataaaaagggaagttttcagatagtttcagccacccacaaaaaaatccccactatagaaagaagccataaaaatactgaattgagccaaaacttcagcccaaagtcagtgcttattaggcaacagatacttcccagagaaaaaacaccaccaaaatgtgaaatacaaggaaacagcctcaaacagaattcacaattacttaatcaaccaaaaattacagcagataaacgctataaatgtagtctgtgtgaaaaaaccttcattaacacttcatcccttcgtaaacatgagaaaaaccatagtggagagaaactatttaagtgtaaagaatgttcaaaagcctttagccaaagttcagctcttattcaacatcaaataacgcatactggagagaaaccctacatatgtaaagaatgtgggaaagcctttactctcagtacatccctttataaacatctaagaacccatactgtggagaaatcctacagatgtaaagaatgtggtaaatccttcagccgaaggtcaggcctttttatacatcaaaaaattcatgctgaagaaaacccttgtaagtataatccgggtaggaaggcatctagttgcagcacatccctttctggatgtcaaagaattcattctagaaagaagtcctacttatgtaatgaatgtggcaacacctttaagtctagctcatcccttcgttatcatcagagaattcacactggagagaagccttttaaatgtagtgaatgtgggagagccttcagccagagtgcctctcttattcaacatgaaagaattcacaccggagaaaagccctatagatgcaatgaatgtgggaaaggctttacttctatttcacgacttaatagacaccgaatcattcatactggagagaagttttataattgtaatgaatgtggtaaagccttaagctcccactcaacacttattattcacgagcgaattcatactggagaaaaaccatgtaaatgtaaagtatgtggaaaagccttcagacagagttcagctctcattcaacatcagagaatgcatactggagaaagaccctataaatgtaacgagtgtgggaaaacattcaggtgtaactcatcacttagtaatcaccagagaattcatactggagagaaaccatatcgatgtgaggaatgtgggatatcttttggccaaagttcagctcttattcagcatcgaaggattcatacaggagaaaaaccctttaaatgtaatacatgtggaaaaacttttagacaaagctcatcacgtattgcacatcagagaattcatactggagagaaaccctatgaatgtaatacatgtgggaaacttttcaaccataggtcatcccttactaatcattataaaattcatatcgaagaggacccctagtaatgaactagtccgtaacttgaaagtatttcgatttcttggctttatatatcttgtggaaaggacgaggcatccaatgacatatacagatt

SEQ ID NO: 2680 - DNA, 1253 bp, Homo sapiens
  source 1..1253: mol_type = genomic DNA
accgccaccatgttttggacgtttaaagaatggttctggttggaaagattctggcttcctccaacaataaagtggtcagatcttgaggatcacgatggactcgtctttgtaaaaccttctcatttatacgtgacaattccatatgcttttctcttgctgattatcagacgtgtatttgaaaaatttgttgcttcacctctagcaaaatcatttggcattaaagagacagttcgaaaggttacaccaaatactgtcttagagaattttttcaaacattccacaaggcaaccattgcaaactgatatttatggactggcaaagaagtgtaacttgacggagcgccaggtggaaagatggtttaggagtcggcggaatcaagagaggccttccaggctgaagaaattccaggaagcttgctggagatttgcattttacttaatgatcactgttgctggaattgcgtttctttatgataaaccttggctatatgacttatgggaggtttggaatggctatcccaaacagccactgctgccatcccagtactggtactacattttagaaatgagtttttattggtctctgttatttagacttggctttgatgtcaagagaaaggattttctagctcatatcatccaccacctggctgctattagtctgatgagcttctcttggtgtgctaattatattcgcagtgggaccctcgtgatgattgtacacgatgtggctgacatttggctggagtctgctaagatgttttcttatgctggatggacgcagacctgtaacaccctgtttttcatcttctccaccatatttttcatcagccgcctcattgtttttcctttctggattttatattgcacgctgatcttgcctatgtatcacctcgagcctttcttttcatacatcttcctcaacctacagctcatgatcttgcaggtccttcacctttactggggttattacatcttgaagatgctcaacagatgtatattcatgaagagcatccaggatgtgaggagtgatgacgaggattatgaagaggaagaggaagaggaagaagaagaggctaccaaaggcaaagagatggattgtttaaagaacggcctcagggctgagaggcacctcattcccaatggccagcatggccattagtaatgaactagtccgtaacttgaaagtatttcgatttcttggctttatatatcttgtggaaaggacgacggcatgttcactcctgactatag

SEQ ID NO: 2681 - DNA, 1766 bp, Homo sapiens
  source 1..1766: mol_type = genomic DNA
accgccaccatggctgtggatctgctgtctgctcaggagcctgtgacattcagggatgtggccgtgttcttcagccaggacgagtggttgcacctggactctgcccagagggccttgtaccgggaggtgatgctggagaactacagcagcctggtctcactggggattccattttcaatgccaaagttgattcatcagttgcagcaaggagaagatccctgcatggtggaaagagaagtcccttcagatacccgtctaggtttcaagacttggcttgaaacagaagcattgcctcatagacaggacatttttatagaagaaacatctcagggaatggtaaagaaagaatccattaaggatggtcactgggacattaactttgaagaagctgtggaatttgagagcgagatagaagaagagcaagagaagaaacctcttagacaaatgatagattcgcatgagaaaaccatcagtgaagatggaaaccatacaagtcttgaattggggaaaagcttatttacaaatacagctcttgtcacacaacagagtgttcctatagaaaggatacccaatatgtattatacatttgggaaagattttaaacagaattttgatctcatgaaatgcttccagatttacccaggaggaaaacctcacatctgtaatgaatgtgggaagagcttcaagcagaatctgcatcttattgaacatcagagaattcatacaggtgagaaaccctacaaatgtaatgagtgtgaaaaaaccttcagccacagatcatcccttctttctcatcagagaattcatactggagagaaaccttacaagtgtaatgaatgtgagaaggcatttagcaacagttcaacccttatcaaacatctgagagtgcatactggagagaaaccgtatcgatgtagggaatgtggtaaagcctttagccagtgttcaaccctcactgtacatcagagaattcatactggagagaaactctataaatgcggcgaatgtgagaaggccttcaactgtagagcaaaacttcacaggcatcaaagaatccatacaggtgagaaaccctataaatgtagtgagtgtgggaagggatacagccagtttacatctctagctgaacatcagaggtttcatactggagaacaactgtatacatgcttggaatgtgggagaaccttcacacgtattgtaacccttatcgaacatcagcgaattcacactggacaaaaaccttatcagtgcaacgaatgtgagaaagccttcaaccagtattcatcctttaatgaacatcggaaaattcatactggggaaaaactttatacatgtgaggaatgtgggaaagcctttggttgcaaatctaacctttataggcatcagagaattcatactggagagaaaccgtatcagtgtaatcagtgtggaaaggccttcagccagtattcatttttaaccgaacatgagaggatccacactggagagaaactgtataaatgtatggaatgtgggaaagcctacagttacagatcaaacctttgtagacacaaaaaagttcacacgaaagagaaactctataagtggaaggaatatgggaaacctttcatctgcagctcctcacttacccagtatcagagattttttaaaggagataaagcctatgaggtttagtaatgaactagtccgtaacttgaaagtatttcgatttcttggctttatatatcttgtggaaaggacgagtgacagaaaccgaatgcgctttg

SEQ ID NO: 2682 - DNA, 1940 bp, Homo sapiens
  source 1..1940: mol_type = genomic DNA
accgccaccatggctgctgggcagcgggaagcgaggccccaggtgtcactgacattcgaggacgtggctgtgctctttacctgggatgagtggagaaagctggctccttctcagagaaacttgtaccgggatgtgatgctggagaactataggaacctggtctcactgggactctcatttaccaaaccaaaagtcatctccctgttgcagcaaggagaagatccctgggaggtggagaaagacagttctggtgtctcctctctaggatgtaagagcacacctaaaatgacaaagtcaactcaaactcaggattcatttcaggagcagataaggaaaagattgaaaagggatgaaccctggaacttcatatcagaaagatcctgcatatatgaagagaaattaaagaaacagcaggacaaaaatgaaaatttacaaataatttcagttgcccatacaaaaatccttactgtagatagaagccataaaaatgttgaatttggccaaaacttctacctgaaatcagtcttcattaagcaacagagatttgctaaagaaaaaactccatcaaaatgtgaaatacaaagaaatagtttcaagcagaattcaaatttacttaaccaatcaaaaatcaaaacagcagagaaacgctataaatgcagtacatgtgaaaaagccttcattcacaattcatcccttcgtaaacatcagaaaaaccacactggagaaaaattatttaaatgtaaagaatgtttaaaagctttcagccaaagttctgctcttattcaacatcaaagaactcatacaggagagaaaccctatatatgtaaagaatgtgggaaagccttcagccatagtgcatccctttgtaagcatttaaggacccatactgtggagaaatgctatagatgtaaagaatgtggtaaatccttcagtcgaaggtctgggctttttatacatcaaaaaatccatgctcaagaaaatccccataaatacaatccaggcaggaaggcatccagttacagcacttccctttctggaagtcagaaaattcatctcagaaagaagtcctacttatgtaatgaatgtggcaacacctttaagtctagctcatcccttcgttatcatcagagaattcacactggagagaagccttttaaatgtagtgaatgtgggagagccttcagccagagtgcctctcttattcaacatgaaagaattcacaccggagaaaagccctatagatgcaatgaatgtgggaaaggctttacttctatttcacgacttaatagacaccgaataattcatactggagagaaattgtataattgtaatgaatgtggtaaagccttaagctcccactcaacacttattattcatgagcgaattcatactggagaaaaaccatgtaaatgtaaagtatgtggaaaagccttcagacagagttccgctctcattcaacatcagagaatgcatactggagaaagaccctataagtgtaacgaatgtgacaaaacattcaggtgtaactcatcgcttagtaatcaccagagaattcatactggagagaaaccatatcgatgtttagaatgtgggatgtcttttggccaaagtgcagctcttatacaacatcagaggattcatacaggagaaaaaccctttaaatgtaatacatgtggaaaaacttttagacaaagctcatcacttattgcacatcaaagaattcatactggagagaaaccctatgaatgtaatgcatgtgggaaactctttagccagaggtcatcccttactaatcattataaaattcacattgaagaggactccttaaaagccgatttgcatgtgtagtaatgaactagtccgtaacttgaaagtatttcgatttcttggctttatatatcttgtggaaaggacgaatgtctgcgaagtactccctattt

SEQ ID NO: 2683 - DNA, 1340 bp, Homo sapiens
  source 1..1340: mol_type = genomic DNA
accgccaccatggagcggatccccagcgcgcaaccaccccccgcctgcctgcccaaagcaccgggactggagcacggagacctaccagggatgtaccctgcccacatgtaccaagtgtacaagtcaagacggggaataaagcggagcgaggacagcaaggagacctacaaattgccgcaccggctcatcgagaaaaagagacgtgaccggattaacgagtgcatcgcccagctgaaggatctcctacccgaacatctcaaacttacaactttgggtcacttggaaaaagcagtggttcttgaacttaccttgaagcatgtgaaagcactaacaaacctaattgatcagcagcagcagaaaatcattgccctgcagagtggtttacaagctggtgagctgtcagggagaaatgtcgaaacaggtcaagagatgttctgctcaggtttccagacatgtgcccgggaggtgcttcagtatctggccaagcacgagaacactcgggacctgaagtcttcgcagcttgtcacccacctccaccgggtggtctcggagctgctgcagggtggtacctccaggaagccatcagacccagctcccaaagtgatggacttcaaggaaaaacccagctctccggccaaaggttcggaaggtcctgggaaaaactgcgtgccagtcatccagcggactttcgctcactcgagtggggagcagagcggcagcgacacggacacagacagtggctatggaggagaatcggagaagggcgacttgcgcagtgagcagccgtgcttcaaaagtgaccacggacgcaggttcacgatgggagaaaggatcggcgcaattaagcaagagtccgaagaaccccccacaaaaaagaaccggatgcagctttcggatgatgaaggccatttcactagcagtgacctgatcagctccccgttcctgggcccacacccacaccagcctcctttctgcctgcccttctacctgatcccaccttcagcgactgcctacctgcccatgctggagaagtgctggtatcccacctcagtgccagtgctatacccaggcctcaacgcctctgccgcagccctctctagcttcatgaacccagacaagatctcggctcccttgctcatgccccagagactcccttctcccttgccagctcatccgtccgtcgactcttctgtcttgctccaagctctgaagccaatcccccctttaaacttagaaaccaaagactagtaatgaactagtccgtaacttgaaagtatttcgatttcttggctttatatatcttgtggaaaggacgacagtaatcctacgtaatgtgggcc

SEQ ID NO: 2684 - DNA, 1550 bp, Homo sapiens
  source 1..1550: mol_type = genomic DNA
accgccaccatggacgaaggaattcctcatttgcaagagagacagttactggaacatagagattttataggactggactattcctctttgtatatgtgtaaacccaaaaggagcatgaaacgagacgacaccaaggatacctacaaattaccgcacagattaatagaaaagaaaagaagagaccgaattaatgaatgcattgctcagctgaaagatttactgcctgaacatctgaaattgacaactctgggacatctggagaaagctgtagtcttggaattaactttgaaacacttaaaagctttaaccgccttaaccgagcaacagcatcagaagataattgctttacagaatggggagcgatctctgaaatcgcccattcagtccgacttggatgcgttccactcgggatttcaaacatgcgccaaagaagtcttgcaatacctctcccggtttgagagctggacacccagggagccgcggtgtgtccagctgatcaaccacttgcacgccgtggccacccagttcttgcccaccccgcagctgttgactcaacaggtccctctgagcaaaggcaccggcgctccctcggccgccgggtccgcggccgccccctgcctggagcgcgcggggcagaagctggagcccctcgcctactgcgtgcccgtcatccagcggactcagcccagcgccgagctcgccgccgagaacgacacggacaccgacagcggctacggcggcgaagccgaggcccggccggaccgcgagaaaggcaaaggcgcgggggcgagccgcgtcaccatcaagcaggagcctcccggggaggactcgccggcgcccaagaggatgaagctggattcccgcggcggcggcagcggcggcggcccggggggcggcgcggcggcggcggcagccgcgcttctggggcccgaccctgccgccgcggccgcgctgctgagacccgacgccgccctgctcagctcgctggtggcgttcggcggaggcggaggcgcgcccttcccgcagcccgcggccgccgcggcccccttctgcctgcccttctgcttcctctcgccttctgcagctgccgcctacgtgcagcccttcctggacaagagcggcctggagaagtatctgtacccggcggcggctgccgccccgttcccgctgctataccccggcatccccgccccggcggcagccgcggcagccgccgccgccgctgccgccgccgccgccgcgttcccctgcctgtcctcggtgttgtcgccccctcccgagaaggcgggcgccgccgccgcgaccctcctgccgcacgaggtggcgccccttggggcgccgcacccccagcacccgcacggccgcacccacctgcccttcgccgggccccgcgagccggggaacccggagagctctgctcaggaagatccctcgcagccaggaaaggaagctccctagtaatgaactagtccgtaacttgaaagtatttcgatttcttggctttatatatcttgtggaaaggacgatacagcccagccaattcagtggga

SEQ ID NO: 2685 - DNA, 1595 bp, Homo sapiens
  source 1..1595: mol_type = genomic DNA
accgccaccatgagaacacaaattgaagtgatcccttgcaaaatctgtggggacaagtcgtctgggatccactacggggttatcacctgtgaggggtgcaagggcttcttccgccggagccagcgctgtaacgcggcctactcctgcacccgtcagcagaactgccccatcgaccgcaccagccgaaaccgatgccagcactgccgcctgcagaaatgcctggcgctgggcatgtcccgagatgctgtcaagttcggccgcatgtccaagaagcagagggacagcctgcatgcagaagtgcagaaacagctgcagcagcggcaacagcagcaacaggaaccagtggtcaagacccctccagcaggggcccaaggagcagataccctcacctacaccttggggctcccagacgggcagctgcccctgggctcctcgcctgacctgcctgaggcttctgcctgtccccctggcctcctgaaagcctcaggctctgggccctcatattccaacaacttggccaaggcagggctcaatggggcctcatgccaccttgaatacagccctgagcggggcaaggctgagggcagagagagcttctatagcacaggcagccagctgacccctgaccgatgtggacttcgttttgaggaacacaggcatcctgggcttggggaactgggacagggcccagacagctacggcagccccagtttccgcagcacaccggaggcaccctatgcctccctgacagagatagagcacctggtgcagagcgtctgcaagtcctacagggagacatgccagctgcggctggaggacctgctgcggcagcgctccaacatcttctcccgggaggaagtgactggctaccagaggaagtccatgtgggagatgtgggaacggtgtgcccaccacctcaccgaggccattcagtacgtggtggagttcgccaagaggctctcaggctttatggagctctgccagaatgaccagattgtgcttctcaaagcaggagcaatggaagtggtgctggttaggatgtgccgggcctacaatgctgacaaccgcacggtcttttttgaaggcaaatacggtggcatggagctgttccgagccttgggctgcagcgagctcatcagctccatctttgacttctcccactccctaagtgccttgcacttttccgaggatgagattgccctctacacagcccttgttctcatcaatgcccatcggccagggctccaagagaaaaggaaagtagaacagctgcagtacaatctggagctggcctttcatcatcatctctgcaagactcatcgccaaagcatcctggcaaagctgccacccaaggggaagcttcggagcctgtgtagccagcatgtggaaaggctgcagatcttccagcacctccaccccatcgtggtccaagccgctttccctccactctacaaggagctcttcagcactgaaaccgagtcacctgtggggctgtccaagtagtaatgaactagtccgtaacttgaaagtatttcgatttcttggctttatatatcttgtggaaaggacgacggacttacatgccgctactgact

SEQ ID NO: 2686 - DNA, 1481 bp, Homo sapiens
  source 1..1481: mol_type = genomic DNA
accgccaccatgcgagcacaaattgaagtgataccatgcaaaatttgtggcgataagtcctctgggatccactacggagtcatcacatgtgaaggctgcaagggattctttaggaggagccagcagaacaatgcttcttattcctgcccaaggcagagaaactgtttaattgacagaacgaacagaaaccgttgccaacactgccgactgcagaagtgtcttgccctaggaatgtcaagagatgctgtgaagtttgggaggatgtccaagaagcaaagggacagcctgtatgctgaggtgcagaagcaccagcagcggctgcaggaacagcggcagcagcagagtggggaggcagaagcccttgccagggtgtacagcagcagcattagcaacggcctgagcaacctgaacaacgagaccagcggcacttatgccaacgggcacgtcattgacctgcccaagtctgagggttattacaacgtcgattccggtcagccgtcccctgatcagtcaggacttgacatgactggaatcaaacagataaagcaagaacctatctatgacctcacatccgtacccaacttgtttacctatagctctttcaacaatgggcagttagcaccagggataaccatgactgaaatcgaccgaattgcacagaacatcattaagtcccatttggagacatgtcaatacaccatggaagagctgcaccagctggcgtggcagacccacacctatgaagaaattaaagcatatcaaagcaagtccagggaagcactgtggcaacaatgtgccatccagatcactcacgccatccaatacgtggtggagtttgcaaagcggataacaggcttcatggagctctgtcaaaatgatcaaattctacttctgaagtcaggttgcttggaagtggttttagtgagaatgtgccgtgccttcaacccattaaacaacactgttctgtttgaaggaaaatatggaggaatgcaaatgttcaaagccttaggttctgatgacctagtgaatgaagcatttgactttgcaaagaatttgtgttccttgcagctgaccgaggaggagatcgctttgttctcatctgctgttctgatatctccagaccgagcctggcttatagaaccaaggaaagtccagaagcttcaggaaaaaatttattttgcacttcaacatgtgattcagaagaatcacctggatgatgagaccttggcaaagttaatagccaagataccaaccatcacggcagtttgcaacttgcacggggagaagctgcaggtatttaagcaatctcatccagagatagtgaatacactgtttcctccgttatacaaggagctctttaatcctgactgtgccaccggctgcaaatagtaatgaactagtccgtaacttgaaagtatttcgatttcttggctttatatatcttgtggaaaggacgagttaagtcgtagaggttaagacat

SEQ ID NO: 2687 - DNA, 1772 bp, Homo sapiens
  source 1..1772: mol_type = genomic DNA
accgccaccatgaatgagggggccccaggagacagtgacttagagactgaggcaagagtgccgtggtcaatcatgggtcattgtcttcgaactggacaggccagaatgtctgccacacccacacctgcaggtgaaggagccagaagggatgaactttttgggattctccaaatactccatcagtgtatcctgtcttcaggtgatgcttttgttcttactggcgtctgttgttcctggaggcagaatggcaagccaccatattcacaaaaggaagataaggaagtacaaactggatacatgaatgctcaaattgaaattattccatgcaagatctgtggagacaaatcatcaggaatccattatggtgtcattacatgtgaaggctgcaagggctttttcaggagaagtcagcaaagcaatgccacctactcctgtcctcgtcagaagaactgtttgattgatcgaaccagtagaaaccgctgccaacactgtcgattacagaaatgccttgccgtagggatgtctcgagatgctgtaaaatttggccgaatgtcaaaaaagcagagagacagcttgtatgcagaagtacagaaacaccggatgcagcagcagcagcgcgaccaccagcagcagcctggagaggctgagccgctgacgcccacctacaacatctcggccaacgggctgacggaacttcacgacgacctcagtaactacattgacgggcacacccctgaggggagtaaggcagactccgccgtcagcagcttctacctggacatacagccttccccagaccagtcaggtcttgatatcaatggaatcaaaccagaaccaatatgtgactacacaccagcatcaggcttctttccctactgttcgttcaccaacggcgagacttccccaactgtgtccatggcagaattagaacaccttgcacagaatatatctaaatcgcatctggaaacctgccaatacttgagagaagagctccagcagataacgtggcagacctttttacaggaagaaattgagaactatcaaaacaagcagcgggaggtgatgtggcaattgtgtgccatcaaaattacagaagctatacagtatgtggtggagtttgccaaacgcattgatggatttatggaactgtgtcaaaatgatcaaattgtgcttctaaaagcaggttctctagaggtggtgtttatcagaatgtgccgtgcctttgactctcagaacaacaccgtgtactttgatgggaagtatgccagccccgacgtcttcaaatccttaggttgtgaagactttattagctttgtgtttgaatttggaaagagtttatgttctatgcacctgactgaagatgaaattgcattattttctgcatttgtactgatgtcagcagatcgctcatggctgcaagaaaaggtaaaaattgaaaaactgcaacagaaaattcagctagctcttcaacacgtcctacagaagaatcaccgagaagatggaatactaacaaagttaatatgcaaggtgtctaccttaagagccttatgtggacgacatacagaaaagctaatggcatttaaagcaatatacccagacattgtgcgacttcattttcctccattatacaaggagttgttcacttcagaatttgagccagcaatgcaaattgatgggtagtaatgaactagtccgtaacttgaaagtatttcgatttcttggctttatatatcttgtggaaaggacgatatggtgaagattcatgctagggt

SEQ ID NO: 2688 - DNA, 1508 bp, Homo sapiens
  source 1..1508: mol_type = genomic DNA
accgccaccatgatgtattttgtgatcgcagcgatgaaagctcaaattgaaattattccatgcaagatctgtggagacaaatcatcaggaatccattatggtgtcattacatgtgaaggctgcaagggctttttcaggagaagtcagcaaagcaatgccacctactcctgtcctcgtcagaagaactgtttgattgatcgaaccagtagaaaccgctgccaacactgtcgattacagaaatgccttgccgtagggatgtctcgagatgctgtaaaatttggccgaatgtcaaaaaagcagagagacagcttgtatgcagaagtacagaaacaccggatgcagcagcagcagcgcgaccaccagcagcagcctggagaggctgagccgctgacgcccacctacaacatctcggccaacgggctgacggaacttcacgacgacctcagtaactacattgacgggcacacccctgaggggagtaaggcagactccgccgtcagcagcttctacctggacatacagccttccccagaccagtcaggtcttgatatcaatggaatcaaaccagaaccaatatgtgactacacaccagcatcaggcttctttccctactgttcgttcaccaacggcgagacttccccaactgtgtccatggcagaattagaacaccttgcacagaatatatctaaatcgcatctggaaacctgccaatacttgagagaagagctccagcagataacgtggcagacctttttacaggaagaaattgagaactatcaaaacaagcagcgggaggtgatgtggcaattgtgtgccatcaaaattacagaagctatacagtatgtggtggagtttgccaaacgcattgatggatttatggaactgtgtcaaaatgatcaaattgtgcttctaaaagcaggttctctagaggtggtgtttatcagaatgtgccgtgcctttgactctcagaacaacaccgtgtactttgatgggaagtatgccagccccgacgtcttcaaatccttaggttgtgaagactttattagctttgtgtttgaatttggaaagagtttatgttctatgcacctgactgaagatgaaattgcattattttctgcatttgtactgatgtcagcagatcgctcatggctgcaagaaaaggtaaaaattgaaaaactgcaacagaaaattcagctagctcttcaacacgtcctacagaagaatcaccgagaagatggaatactaacaaagttaatatgcaaggtgtctaccttaagagccttatgtggacgacatacagaaaagctaatggcatttaaagcaatatacccagacattgtgcgacttcattttcctccattatacaaggagttgttcacttcagaatttgagccagcaatgcaaattgatgggtagtaatgaactagtccgtaacttgaaagtatttcgatttcttggctttatatatcttgtggaaaggacgagacataagtaggtactcaatactt

SEQ ID NO: 2689 - DNA, 1748 bp, Homo sapiens
  source 1..1748: mol_type = genomic DNA
accgccaccatgaatgagggggccccaggagacagtgacttagagactgaggcaagagtgccgtggtcaatcatgggtcattgtcttcgaactggacaggccagaatgtctgccacacccacacctgcaggtgaaggagccagaagctcttcaacctgtagctccctgagcaggctgttctggtctcaacttgagcacataaactgggatggagccacagccaagaactttattaatttaagggagttcttctcttttctgctccctgcattgagaaaagctcaaattgaaattattccatgcaagatctgtggagacaaatcatcaggaatccattatggtgtcattacatgtgaaggctgcaagggctttttcaggagaagtcagcaaagcaatgccacctactcctgtcctcgtcagaagaactgtttgattgatcgaaccagtagaaaccgctgccaacactgtcgattacagaaatgccttgccgtagggatgtctcgagatgctgtaaaatttggccgaatgtcaaaaaagcagagagacagcttgtatgcagaagtacagaaacaccggatgcagcagcagcagcgcgaccaccagcagcagcctggagaggctgagccgctgacgcccacctacaacatctcggccaacgggctgacggaacttcacgacgacctcagtaactacattgacgggcacacccctgaggggagtaaggcagactccgccgtcagcagcttctacctggacatacagccttccccagaccagtcaggtcttgatatcaatggaatcaaaccagaaccaatatgtgactacacaccagcatcaggcttctttccctactgttcgttcaccaacggcgagacttccccaactgtgtccatggcagaattagaacaccttgcacagaatatatctaaatcgcatctggaaacctgccaatacttgagagaagagctccagcagataacgtggcagacctttttacaggaagaaattgagaactatcaaaacaagcagcgggaggtgatgtggcaattgtgtgccatcaaaattacagaagctatacagtatgtggtggagtttgccaaacgcattgatggatttatggaactgtgtcaaaatgatcaaattgtgcttctaaaagcaggttctctagaggtggtgtttatcagaatgtgccgtgcctttgactctcagaacaacaccgtgtactttgatgggaagtatgccagccccgacgtcttcaaatccttaggttgtgaagactttattagctttgtgtttgaatttggaaagagtttatgttctatgcacctgactgaagatgaaattgcattattttctgcatttgtactgatgtcagcagatcgctcatggctgcaagaaaaggtaaaaattgaaaaactgcaacagaaaattcagctagctcttcaacacgtcctacagaagaatcaccgagaagatggaatactaacaaagttaatatgcaaggtgtctaccttaagagccttatgtggacgacatacagaaaagctaatggcatttaaagcaatatacccagacattgtgcgacttcattttcctccattatacaaggagttgttcacttcagaatttgagccagcaatgcaaattgatgggtagtaatgaactagtccgtaacttgaaagtatttcgatttcttggctttatatatcttgtggaaaggacgagatacatattagtaagtccgtgcc

SEQ ID NO: 2690 - DNA, 2069 bp, Homo sapiens
  source 1..2069: mol_type = genomic DNA
accgccaccatgagtgctcttcttcaggatccaatgatagctggacaagtcagtaagcccttgctgtcagtgcggagtgaaatgaatgcggagttgagaggtgaggacaaggctgctacttcagacagcgagctgaatgagcccctgcttgcgcctgtggaatcaaatgacagcgaggacactcccagcaagctcttcggggctagaggaaacccagcattatcagacccaggcactcctgaccaacaccaggccagtcagacccaccccccatttccagttgggccacagccacttctgacggcacagcagttagcttctgctgtggccggcgtgatgccgggaggccccccagccctcaaccagccaatcctcattcccttcaacatggcgggacagctaggaggccagcaaggactggttctcacactgccaacagcgaatctcaccaacatccaagggctggtggcagcagctgcagccggaggcattatgactctgccactgcaaaatctacaagctacctcatccctgaactcccagctccagcagctccagctccagctccagcagcagcagcagcagcagcagcagcagcctcccccgtcaaccaaccagcacccgcaaccagccccacaggcgccctcgcagtcccagcagcagccgctgcagcccaccccaccccagcagccaccacccgcctctcagcagccgccagctcctacatctcagctgcaacaggcgcctcagccccagcagcaccaaccccactcccactcccagaaccagaaccaaccatctccaacccagcagagctccagccccccgcagaaacctagtcagtctccaggacatggcctgccttcaccgctcacgccacccaatcctctacagctggttaataatccactagcaagtcaggctgcagcggctgcagcagccatgagctccatagcaagctcacaggcctttggcaatgccctctccagtcttcagggggtcacaggtcaactagttactaatgcacaaggacagattatcgggaccattccactgatgcctaatccagggccatcgagccaagcagcaagcggcactcagggcttgcaagtgcagccaatcaccccccagctcctcacaaacgcccagggccagatcatcgccacagtcattgggaaccagatcctgcccgtgatcaacacccagggcatcacgctgtcacccatcaagcccggccagcagctccaccaaccctcccagacgtcagtgggtcaagcagcctcccaaggcaaccttctgcacctggctcacagccaagcatccatgtctcaaagtcccgtccggcaggcttcctcttcttcctcctcatcctcctcttcttcagctttgagcgtgggccagttagtcagcaatcctcaaacggcagcgggtgaggtggatggggttaatctggaggagatccgagaatttgccaaagcttttaaaatccggcgcctgtcccttggcctgacccagactcaggtgggacaggctctcagtgctacagagggccccgcgtacagccagtcggccatctgcaggtttgaaaagctggacatcacccctaaaagtgcccagaagatcaagccggtgcttgagcggtggatggctgaggctgaggcccgccatcgagcaggtatgcagaacctgaccgagtttatcgggagtgaaccatccaaaaagcgcaagcggcgcacctccttcacaccccaggcccttgagatcctcaatgcccactttgagaagaacacacacccttctgggcaggaaatgaccgaaattgctgagaagctgaactatgaccgagaagtagttagagtttggttctgcaataagaggcaagccctgaagaacacaattaaacgcttaaaacagcacgagccggccacggcagtccctttggagcccttaacagactctctggaagaaaactcctagtaatgaactagtccgtaacttgaaagtatttcgatttcttggctttatatatcttgtggaaaggacgacatagtatgattcgcgcgccgtgt

SEQ ID NO: 2691 - DNA, 2177 bp, Homo sapiens
  source 1..2177: mol_type = genomic DNA
accgccaccatgagtgctcttcttcaggatccaatgatagctggacaagtcagtaagcccttgctgtcagtgcggagtgaaatgaatgcggagttgagaggtgaggacaaggctgctacttcagacagcgagctgaatgagcccctgcttgcgcctgtggaatcaaatgacagcgaggacactcccagcaagctcttcggggctagaggaaacccagcattatcagacccaggcactcctgaccaacaccaggccagtcagacccaccccccatttccagttgggccacagccacttctgacggcacagcagttagcttctgctgtggccggcgtgatgccgggaggccccccagccctcaaccagccaatcctcattcccttcaacatggcgggacagctaggaggccagcaaggactggttctcacactgccaacagcgaatctcaccaacatccaagggctggtggcagcagctgcagccggaggcattatgactctgccactgcaaaatctacaagctacctcatccctgaactcccagctccagcagctccagctccagctccagcagcagcagcagcagcagcagcagcagcctcccccgtcaaccaaccagcacccgcaaccagccccacaggcgccctcgcagtcccagcagcagccgctgcagcccaccccaccccagcagccaccacccgcctctcagcagccgccagctcctacatctcagctgcaacaggcgcctcagccccagcagcaccaaccccactcccactcccagaaccagaaccaaccatctccaacccagcagagctccagccccccgcagaaacctagtcagtctccaggacatggcctgccttcaccgctcacgccacccaatcctctacagctggttaataatccactagcaagtcaggctgcagcggctgcagcagccatgagctccatagcaagctcacaggcctttggcaatgccctctccagtcttcagggggtcacaggtcaactagttactaatgcacaaggacagattatcgggaccattccactgatgcctaatccagggccatcgagccaagcagcaagcggcactcagggcttgcaagtgcagccaatcaccccccagctcctcacaaacgcccagggccagatcatcgccacagtcattgggaaccagatcctgcccgtgatcaacacccagggcatcacgctgtcacccatcaagcccggccagcagctccaccaaccctcccagacgtcagtgggtcaagcagcctcccaaggcaaccttctgcacctggctcacagccaagcatccatgtctcaaagtcccgtccggcaggcttcctcttcttcctcctcatcctcctcttcttcagctttgagcgtgggccagttagtcagcaatcctcaaacggcagcgggtgaggtggatggggttaatctggaggagatccgagaatttgccaaagcttttaaaatccggcgcctgtcccttggcctgacccagactcaggtgggacaggctctcagtgctacagagggccccgcgtacagccagtcggccatctgcagacacaccatcctgagaagccactttttcctaccacaggaagcccaagagaacactatagctagcagtctgacagccaaactgaaccctggccttttgtatcctgccaggtttgaaaagctggacatcacccctaaaagtgcccagaagatcaagccggtgcttgagcggtggatggctgaggctgaggcccgccatcgagcaggtatgcagaacctgaccgagtttatcgggagtgaaccatccaaaaagcgcaagcggcgcacctccttcacaccccaggcccttgagatcctcaatgcccactttgagaagaacacacacccttctgggcaggaaatgaccgaaattgctgagaagctgaactatgaccgagaagtagttagagtttggttctgcaataagaggcaagccctgaagaacacaattaaacgcttaaaacagcacgagccggccacggcagtccctttggagcccttaacagactctctggaagaaaactcctagtaatgaactagtccgtaacttgaaagtatttcgatttcttggctttatatatcttgtggaaaggacgatgtctttcccggtaagactttgtc

SEQ ID NO: 2692 - DNA, 1937 bp, Homo sapiens
  source 1..1937: mol_type = genomic DNA
accgccaccatggatcctggagccgggtcagagacatctctgactgtcaatgagcaggtcatcgtgatgtcaggtcatgagaccatccgagtgctggaagtcggagtggatgcccaactccctgctgaggaagagagcaaaggactggagggtgtggccgccgagggctcccagagcggagaccctgctgaagccagtcaagctgctggtgaagctgggccagacaacctgggctcctctgcagaggcaactgtgaagtcacccccggggatccctccgagccctgccactgccattgccaccttcagccaagccccaagccagcctcaggcatcgcagaccctgacgccactggctgtacaagctgccccccaggtcttgactcaggaaaacttagccacagttctgacaggagttatggttccagcaggggcagttactcaacctcttcttatccccatcagtattgcaggtcaagtggctggtcagcaggggctggccgtgtggacaattcctacagcaactgtggctgccctcccaggactgaccgctgcttctcctacggggggagtgttcaagccacctttagccggtctccaagcagctgctgtgctgaacaccgctcttccggcaccggtacaagctgccgcaccagtacaggcctcctcgacggcccaaccccggccaccagcccagccccagacgctgttccagacccagccgctgctgcagaccacacctgccatcctcccgcagcccactgctgccaccgctgctgcccctacccccaagccagtggacacccccccacagatcaccgtccagcctgcaggcttcgcatttagcccaggaatcatcagtgctgcttccctcgggggacagacccagatcctggggtccctcactacagctccagtcattaccagcgccattcccagcatgccagggatcagcagtcagatcctcaccaatgctcagggacaggttattggaacccttccatgggtagtgaactcagctagtgtggcggccccagcaccagcccaaagcctgcaggtccaggccgtgaccccccagctgttgttgaacgcccagggccaggtgattgcgaccctggctagcagccccctgcctccacctgtggctgtccggaagccaagcacacctgagtcccctgctaagagtgaggtgcagcccatccagcccacaccaaccgtgccccagcctgctgtggtcattgccagcccagctccagccgccaagccatctgcctctgctcctatcccaattacctgctcagagacccccaccgtcagccagttggtgtccaagccacatactccaagtctggatgaggatgggatcaacttagaagagatccgggagtttgccaagaactttaagatccggcggctctcgctgggccttacacagacccaggtgggtcaggctctgactgcaacggaaggtccagcctacagccagtcagccatctgccggttcgagaagctagacatcacacccaagagtgcccagaagctaaagccggtgctggaaaagtggctaaacgaagctgaactgcggaaccaggaaggccagcagaacctgatggagtttgtgggaggcgagccctccaagaaacgcaaacgccgcacctccttcaccccccaggccatagaggctctcaatgcctattttgagaagaacccactgcccacaggccaggagatcactgaaattgctaaggagctcaactacgaccgtgaggtagtgcgggtctggttctgcaatcggcgccagacgctcaagaacaccagcaagctgaacgtctttcagatcccttagtaatgaactagtccgtaacttgaaagtatttcgatttcttggctttatatatcttgtggaaaggacgactgcctcaactggtgcttagcgca

SEQ ID NO: 2693 - DNA, 1982 bp, Homo sapiens
  source 1..1982: mol_type = genomic DNA
accgccaccatgaatgttgaagtagtaaaagtcatgccccaggacttagtgacattcaaggatgtggcaatagatttttcccaggaagaatggcaatggatgaaccctgctcagaagcgtttatacaggagtatgatgttggagaactatcagagcctggtatcacttggtctttgcatttctaagccatatgtgatctccttattggagcaagggagagagccttgggagatgacgagtgagatgacaagaagcccattctcagattgggaatctatatatgtgacacaggaattacctctgaagcagttcatgtatgatgatgcatgcatggagggaattactagctatggacttgagtgttccacttttgaagaaaattggaaatgggaagacctttttgagaagcagatgggaagtcatgagatgtttagcaagaaagaaataatcactcataaagaaaccatcactaaggaaacagaattcaaatatactaaatttgggaaatgtatccatctggaaaacatagaagagagtatttataatcacacatcagataaaaaaagcttctccaaaaattctatggtaataaaacacaagaaagtctatgtaggaaagaagctttttaaatgtaatgaatgtgacaaaaccttcacccatagctcatcccttactgttcattttagaattcatactggtgaaaaaccatatgcatgtgaggaatgtggaaaagccttcaagcaaaggcaacaccttgctcaacatcacagaacacatactggagagaaactctttgaatgtaaagaatgtaggaaagccttcaaacaaagtgaacaccttattcagcatcaaagaattcatactggagaaaaaccatataaatgtaaggaatgcagaaaagccttcagacagcctgcacaccttgctcagcatcagagaattcatactggagagaaaccctatgaatgtaaagaatgtggcaaagccttcagtgatggctcgtcttttgctcgacatcagagatgtcacactggcaaaagaccctatgaatgtattgagtgtgggaaggcttttaggtataacacatcttttattcgtcactggaggagttatcatactggagagaagccttttaattgcattgattgtgggaaagccttcagtgttcacataggacttattctgcataggagaattcatacaggagagaaaccttacaaatgtggtgtgtgtggaaaaaccttcagctcgggttcatcccgtactgtacatcagagaattcatacaggagagaaaccttatgaatgtgatatatgtgggaaagattttagccatcatgcatcactcactcagcatcaaagagtacattctggagagaaaccgtatgaatgcaaggaatgtgggaaagcctttaggcagaatgtacaccttgttagtcatttgagaattcatactggtgaaaaaccctatgaatgtaaagaatgtggaaaagcttttagaatcagttcacagctggctactcatcagagaattcatactggagagaagccttatgaatgtattgaatgtggaaatgctttcaaacagagatcacaccttgcccaacatcagaaaactcatacaggagagaaaccttatgagtgtaatgaatgcgggaaagccttcagccaaacttccaatcttactcaacatcaaagaattcatactggagagaaaccctataaatgtactgaatgtggaaaggcttttagtgatagctcatcctgtgctcagcatcaaagactccacactggccaaaggccctatcagtgttttgaatgtgggaaggcgttcagaagaaagttatccttaatttgtcatcaaagaagtcatactggagaagaaccttagtaatgaactagtccgtaacttgaaagtatttcgatttcttggctttatatatcttgtggaaaggacgaacctccttcccgtgtcacctaccg

SEQ ID NO: 2694 - DNA, 2255 bp, Homo sapiens
  source 1..2255: mol_type = genomic DNA
accgccaccatgaagagccaggaagaggtagaggtggcaggaattaaactttgtaaagccatgtccctgggttcagtgactttcacagatgtggccatagacttttcccaagatgaatgggagtggctgaatcttgctcagagaagtttgtacaagaaggtgatgttagaaaactacaggaacctagtttcagtgggtctttgcatttctaaaccagatgtgatctccttactggagcaagagaaagacccttgggtgataaaaggagggatgaacagaggcctgtgcccagacttggagtgtgtgtgggtgaccaaatcattatctttaaaccaggatatttatgaagaaaaattacccccggcaatcataatggaaagacttaaaagctatgaccttgaatgttcaacattagggaaaaactggaaatgtgaagacttgtttgagagggagcttgtaaaccagaagacacattttaggcaagagaccatcactcatatagatactcttattgaaaaaagagatcactctaacaaatctgggacagtttttcatctgaatacattatcttatataaaacagatttttcccatggaagagagaatatttaattttcatacagataagaaaagcttaaaaacacattcagttgtgaaaaaacacaagcaagaccgtggagaaaagaaacttttaaaatgtaatgactgtgagaaaatattcagcaaaatctcaacccttactcttcaccaaagaattcatacaggagagaaaccctatgaatgtattgaatgtggaaaggcctttagccagagtgcccaccttgctcaacatcagagaatacacacaggagaaaaaccttttgaatgtactgaatgtgggaaagccttcagccagaatgctcatcttgttcaacaccagagagttcatactggagagaaaccttatcagtgtaagcagtgtaataaagcattcagccagcttgcacaccttgctcaacatcagagggtccacactggagagaaaccctatgaatgtattgaatgtgggaaggcttttagtgattgctcatccctagctcatcatcgaaggattcacactgggaaaagaccttatgaatgtattgactgtgggaaagctttcaggcagaatgcttctcttatacgtcatcggcgatattatcatactggagagaaaccctttgactgtattgattgtgggaaggctttcactgatcacataggacttattcagcataagagaactcatactggagagagaccttacaaatgtaatgtgtgtgggaaggcttttagccatggctcatctctgacagtacatcagagaattcatacaggagagaaaccttatgaatgcaatatctgtgagaaagccttcagccatcgtgggtctcttactcttcatcagagagttcatactggagagaaaccctatgaatgtaaagaatgtgggaaagctttccggcagagcacgcatctggctcatcatcagagaattcatactggagagaaaccttatgaatgtaaggaatgcagcaaaaccttcagccagaatgcacacctcgcgcaacatcagaaaatacacactggggagaaaccttatgaatgtaaggaatgtggtaaggccttcagtcagattgcacaccttgttcagcaccagagagttcatactggtgagaagccttacgaatgtattgaatgtgggaaggcctttagtgatggctcatatcttgttcaacatcagagactccacagtggcaaaagaccgtatgaatgtcttgaatgtgggaaggcattcaggcagagggcatccttgatttgtcatcagagatgtcatactggtgagaaaccttatgaatgtaatgtttgtgggaaagcctttagccatcgtaaatcccttactctgcatcagagaattcatacaggagagaaaccttatgagtgtaaggaatgtagcaaagccttcagccaggttgcccatcttactctacataagagaattcatactggagaaaggccctatgagtgtaaagaatgtggaaaagccttcaggcagagtgtacatcttgctcatcatcagcgaattcataccggagagtcatcagttattctctcctctgccctcccataccaccaagtcctatagtaatgaactagtccgtaacttgaaagtatttcgatttcttggctttatatatcttgtggaaaggacgaccacgacatcttggcactcgtcgg

SEQ ID NO: 2695 - DNA, 3557 bp, Homo sapiens
  source 1..3557: mol_type = genomic DNA
accgccaccatggaggtggtggacgagacggaggcgctgcagcgcttcttcgaaggccacgacatcaacggtgccctggagccctccaacatagacaccagcatcctggaggagtacatcagcaaggaggatgcctccgacctctgcttccctgacatctctgctccagccagctcggcctcctactcccacgggcagcctgcgatgcctggctccagcggggtccaccacctgagcccccctgggggtggaccctccccggggcgccatggtcccctcccacccccgggctacggcaccccgctgaactgcaacaacaacaacggcatgggcgctgcccccaagcccttcccggggggcaccgggccccccatcaaggctgagcccaaggctccctatgccccaggcacactgccggactctcccccagactcgggctccgaggcctactccccccagcaggtgaatgagccccacctcctgcgcacgataacccctgagacactgtgccacgtgggagtgccctcccgcctggagcatccgcccccacctccagcccacttgccaggccccccgccacccccaccacccccacctcactaccctgtcctgcagcgggatctgtacatgaaggccgagcccccgatcccccactacgctgccatggggcaggggctggtgcccactgatcttcaccacacccagcagtcccagatgctgcaccagctcctgcagcagcacggagctgagctccctacacacccctccaagaagaggaagcactctgaatccccccccagcaccctcaatgcccagatgctgaatggaatgatcaaacaggagcctgggaccgtgacagccctgcctctgcaccccactcgagccccatcgccaccctggcctccccagggtccgctctccccgggccctggttccttgcctctcagcattgcccgtgtccagacaccgccttggcacccgccaggtgccccctccccaggcctcctgcaggacagtgacagcctcagtggctcctacctggaccccaactaccagtccatcaagtggcagcctcatcagcagaacaagtgggcgaccctgtacgatgctaactacaaggagctgcccatgctcacctaccgcgtggatgcggacaagggcttcaacttttcggtgggcgacgacgcctttgtgtgccagaagaagaaccacttccaggtgacagtgtacatcggcatgctgggcgagcccaagtacgtcaagacgcccgagggcctcaagcccctcgactgcttctatctgaagctgcacggagtgaagctggaggccctgaaccagtccattaacatcgagcagtcccagtcagaccggagcaagcggcccttcaacccggtcacggtcaatctgccccctgagcaggtcacgaaggtgactgtggggcggctgcacttcagcgagaccaccgctaacaacatgcgtaagaagggcaagcccaacccggaccagaggtacttcatgctggtggtggccctccaggctcatgcacagaaccagaactacacgctggccgcccagatctcagagcgcatcattgtgcgggcctccaacccaggccagttcgagagcgacagcgatgtgttgtggcagcgggcacaggtgcccgacaccgtcttccaccacggccgcgtgggcatcaacacagaccggccggatgaggcgctggttgtgcacgggaatgtcaaggtcatgggctcgcttatgcacccctccgacctgcgcgccaaggaacacgtgcaggaggtggacaccaccgagcaattgaagaggatctcgcgcatgcggctggtgcactacagatacaagcccgagttcgccgccagcgcgggcatcgaggccaccgcgccagagacaggtgtcatcgctcaggaggtgaaggagatcttgcctgaggctgtgaaagacaccggagacatggtctttgccaatgggaaaaccatagagaacttcctggtggtgaacaaggagcgcatcttcatggagaacgtaggggccgtgaaggagctgtgcaagctgacagacaacctggagacgcgcattgatgagctggagcgctggagccacaagctggccaagctgcggcggctcgacagcctcaagtccaccggcagctcgggcgccttcagccatgcagggagccagttcagtcgggcgggcagcgtcccccacaagaagaggccccccaaggtggccagcaagtcatcgtccgtggttccggaccaggcctgcatcagccagcgcttcctgcagggaaccatcattgccctggtggtggtcatggccttcagcgtggtgtccatgtccacactgtacgtgctgagcctgcgcacagaggaggacctggtagacactgatggctcttttgccgtgtccacttcctgtctcctggccctgctccggccccagccccctggggggagtgaggccttgtgcccatggtccagccagagctttgggaccacgcagctccgacagtcccccttgaccacggggctaccaggcatacagccctctttgctgctggtgaccaccagcctcaccagctcggccccaggttctgctgtccgcaccttggacatgtgttccagccacccctgccctgtcatctgctgttcctcacccactaccaaccctaccactggtcctagtcttggccccagctttaaccctggccatgttctcagcccaagtcccagccccagcaccaaccgctcaggccccagccagatggcccttctgccagtcaccaacatcagagccaagtcctggggtctttcagtcaatggcattggccactccaagcatcacaagagtctggagcctctggccagccctgcagtccccttccctggggggcagggcaaagccaagaacagtcccagccttggtttccatggccgggcccgccgaggggccctccagtccagcgtgggccctgctgagcccacctgggcccagggccagtcagcctctctccttgcagagccagtgccctccctgacctccatccaggtgctggagaattcgatgtccatcacctcccagtactgtgctccaggggatgcctgcaggcctgggaacttcacctaccacatccctgtcagtagtggcaccccactgcacctcagcctgactctgcagatgaactcctcctcccccgtgtctgtggtgctgtgcagcctgaggtcaaaggaggaaccatgtgaggaggggagccttccacagagtctccacacccaccaggacacccagggcacctctcaccggtggccaataaccatcctgtccttccgtgaattcacctaccacttccgggtggcactgctgggtcaggccaactgcagttcagaggctctcgcccagccagccacagactaccacttccacttctaccgcctgtgtgactagtaatgaactagtccgtaacttgaaagtatttcgatttcttggctttatatatcttgtggaaaggacgattgaggcttccacacaggtagatt

SEQ ID NO: 2696 - DNA, 3437 bp, Homo sapiens
  source 1..3437: mol_type = genomic DNA
accgccaccatgcactggcttccagcaggccacgacatcaacggtgccctggagccctccaacatagacaccagcatcctggaggagtacatcagcaaggaggatgcctccgacctctgcttccctgacatctctgctccagccagctcggcctcctactcccacgggcagcctgcgatgcctggctccagcggggtccaccacctgagcccccctgggggtggaccctccccggggcgccatggtcccctcccacccccgggctacggcaccccgctgaactgcaacaacaacaacggcatgggcgctgcccccaagcccttcccggggggcaccgggccccccatcaaggctgagcccaaggctccctatgccccaggcacactgccggactctcccccagactcgggctccgaggcctactccccccagcaggtgaatgagccccacctcctgcgcacgataacccctgagacactgtgccacgtgggagtgccctcccgcctggagcatccgcccccacctccagcccacttgccaggccccccgccacccccaccacccccacctcactaccctgtcctgcagcgggatctgtacatgaaggccgagcccccgatcccccactacgctgccatggggcaggggctggtgcccactgatcttcaccacacccagcagtcccagatgctgcaccagctcctgcagcagcacggagctgagctccctacacacccctccaagaagaggaagcactctgaatccccccccagcaccctcaatgcccagatgctgaatggaatgatcaaacaggagcctgggaccgtgacagccctgcctctgcaccccactcgagccccatcgccaccctggcctccccagggtccgctctccccgggccctggttccttgcctctcagcattgcccgtgtccagacaccgccttggcacccgccaggtgccccctccccaggcctcctgcaggacagtgacagcctcagtggctcctacctggaccccaactaccagtccatcaagtggcagcctcatcagcagaacaagtgggcgaccctgtacgatgctaactacaaggagctgcccatgctcacctaccgcgtggatgcggacaagggcttcaacttttcggtgggcgacgacgcctttgtgtgccagaagaagaaccacttccaggtgacagtgtacatcggcatgctgggcgagcccaagtacgtcaagacgcccgagggcctcaagcccctcgactgcttctatctgaagctgcacggagtgaagctggaggccctgaaccagtccattaacatcgagcagtcccagtcagaccggagcaagcggcccttcaacccggtcacggtcaatctgccccctgagcaggtcacgaaggtgactgtggggcggctgcacttcagcgagaccaccgctaacaacatgcgtaagaagggcaagcccaacccggaccagaggtacttcatgctggtggtggccctccaggctcatgcacagaaccagaactacacgctggccgcccagatctcagagcgcatcattgtgcgggcctccaacccaggccagttcgagagcgacagcgatgtgttgtggcagcgggcacaggtgcccgacaccgtcttccaccacggccgcgtgggcatcaacacagaccggccggatgaggcgctggttgtgcacgggaatgtcaaggtcatgggctcgcttatgcacccctccgacctgcgcgccaaggaacacgtgcaggaggtggacaccaccgagcaattgaagaggatctcgcgcatgcggctggtgcactacagatacaagcccgagttcgccgccagcgcgggcatcgaggccaccgcgccagagacaggtgtcatcgctcaggaggtgaaggagatcttgcctgaggctgtgaaagacaccggagacatggtctttgccaatgggaaaaccatagagaacttcctggtggtgaacaaggagcgcatcttcatggagaacgtaggggccgtgaaggagctgtgcaagctgacagacaacctggagacgcgcattgatgagctggagcgctggagccacaagctggccaagctgcggcggctcgacagcctcaagtccaccggcagctcgggcgccttcagccatgcagggagccagttcagtcgggcgggcagcgtcccccacaagaagaggccccccaaggtggccagcaagtcatcgtccgtggttccggaccaggcctgcatcagccagcgcttcctgcagggaaccatcattgccctggtggtggtcatggccttcagcgtggtgtccatgtccacactgtacgtgctgagcctgcgcacagaggaggacctggtagacactgatggcaggtccagccagagctttgggaccacgcagctccgacagtcccccttgaccacggggctaccaggcatacagccctctttgctgctggtgaccaccagcctcaccagctcggccccaggttctgctgtccgcaccttggacatgtgttccagccacccctgccctgtcatctgctgttcctcacccactaccaaccctaccactggtcctagtcttggccccagctttaaccctggccatgttctcagcccaagtcccagccccagcaccaaccgctcaggccccagccagatggcccttctgccagtcaccaacatcagagccaagtcctggggtctttcagtcaatggcattggccactccaagcatcacaagagtctggagcctctggccagccctgcagtccccttccctggggggcagggcaaagccaagaacagtcccagccttggtttccatggccgggcccgccgaggggccctccagtccagcgtgggccctgctgagcccacctgggcccagggccagtcagagccagtgccctccctgacctccatccaggtgctggagaattcgatgtccatcacctcccagtactgtgctccaggggatgcctgcaggcctgggaacttcacctaccacatccctgtcagtagtggcaccccactgcacctcagcctgactctgcagatgaactcctcctcccccgtgtctgtggtgctgtgcagcctgaggtcaaaggaggaaccatgtgaggaggggagccttccacagagtctccacacccaccaggacacccagggcacctctcaccggtggccaataaccatcctgtccttccgtgaattcacctaccacttccgggtggcactgctgggtcaggccaactgcagttcagaggctctcgcccagccagccacagactaccacttccacttctaccgcctgtgtgactagtaatgaactagtccgtaacttgaaagtatttcgatttcttggctttatatatcttgtggaaaggacgatacaggacccgaccctacccacgg

SEQ ID NO: 2697 - DNA, 2120 bp, Homo sapiens
  source 1..2120: mol_type = genomic DNA
accgccaccatgactgcaaccacagaagtagcagatgatgaggttactgaggggactgtgacacagatacagattttgcagaatgagcaactagatgaaatatctcccttgggtaacgaggaagtttcagcagttagccaagcatggtttacaactaaagaagataaggattctctgactaataaaggacataaatggaagcaggggatgtggtccaaggaagaaattgatattttgatgaacaatattgaacgctatcttaaggcacgcggaataaaagatgctacagaaatcatctttgagatgtcaaaagacgaaagaaaagatttctacaggactatagcatggggtctgaaccggcctttgtttgcagtttatagaagagtgcttcgcatgtatgatgacagaaaccatgtgggaaaatatacacctgaagaaattgagaagctcaaggagctccggataaagcatggcaatgactgggcaacaataggggcggcgctaggaagaagtgcatcttctgtcaaagatcggtgccgactgatgaaggatacttgcaacacagggaagtggacagaagaagaagaaaagagacttgcagaagtggttcatgagttgacaagcactgagccaggtgacatagtcacacagggtgtgtcttgggcagctgtggctgaacgagtcggtacccgctcagaaaagcaatgtcgttctaaatggctcaactacctgaattggaaacagagtgggggtactgaatggaccaaggaagatgaaatcaatctcatcctcaggatagcagaacttgatgtagctgatgaaaatgacattaactgggatctgttagctgagggatggagtagtgtccgttcaccacaatggctacgaagtaaatggtggaccatcaaaaggcaaattgcaaaccataaggatgtttcgttccctgtcttaataaaaggtcttaaacagttacatgagaaccaaaaaaacaacccaacgcttttggagaataaatcaggatctggagttccaaacagtaataccaattccagtgtgcagcatgttcagataagagttgcccgcttggaagataatacagccatctcttctagccccatggcagcattgcagattccagtccagatcacccatgtttcttcagcagactctcctgctaccgttgactcagaaacaataacactaaacagtggaacactacagacatttgagattcttccctctttccatctacagcccactggcactccaggcacctacctacttcaaacaagctcaagccaaggccttcccctaactctgactgctagtcccacagtaaccctgacagctgctgctcctgcttctcctgaacagattattgttcatgctttatccccagaacatttgttgaacacaagtgataatgttacagtgcagtgtcacacaccaagagtcatcattcagactgttgccacagaggacatcacttcttccatatcccaagcagaactgacagtcgatagtgatattcagtcatctgattttcctgagcctccagacgccctagaagcagacactttcccagatgaaattcatcaccctaagatgactgtggagccatcatttaatgatgctcatgtatccaaattcagtgaccaaaatagcacagaactgatgaatagtgttatggtcagaacagaagaagaaatctctgacaccgaccttaaacaagaggaatcaccctctgatttagccagtgcttatgttactgagggtttagagtctcccactatagaagaacaagttgatcaaacaattgatgatgaaacaatacttatcgttccttcaccacatggctttatccaggcatctgatgttatagatactgaatctgtcttgcctttgacaacactaacagatcccatactccaacatcatcaggaagaatcaaatatcattggatcatccttgggcagtcctgtttcagaagattcaaaggatgtcgaagatttggtaaactgtcattagtaatgaactagtccgtaacttgaaagtatttcgatttcttggctttatatatcttgtggaaaggacgaacacctgtgttgttgttctgactc

SEQ ID NO: 2698 - DNA, 2384 bp, Homo sapiens
  source 1..2384: mol_type = genomic DNA
accgccaccatgagcacagtggaagaggattctgacacagtaacagtagaaactgtgaactctgtgactttgactcaggacacagaagggaatctcattcttcactgccctcagaatgaagcggatgaaatagactcagaagatagtattgaacctccacataaaaggctttgtttgtcctctgaggatgatcagagtattgatgattctactccttgcatatcagttgttgcacttccactttcagaaaatgatcagagctttgaagtgaccatgactgcaaccacagaagtagcagatgatgaggttactgaggggactgtgacacagatacagattttgcagaatgagcaactagatgaaatatctcccttgggtaacgaggaagtttcagcagttagccaagcatggtttacaactaaagaagataaggattctctgactaataaaggacataaatggaagcaggggatgtggtccaaggaagaaattgatattttgatgaacaatattgaacgctatcttaaggcacgcggaataaaagatgctacagaaatcatctttgagatgtcaaaagacgaaagaaaagatttctacaggactatagcatggggtctgaaccggcctttgtttgcagtttatagaagagtgcttcgcatgtatgatgacagaaaccatgtgggaaaatatacacctgaagaaattgagaagctcaaggagctccggataaagcatggcaatgactgggcaacaataggggcggcgctaggaagaagtgcatcttctgtcaaagatcggtgccgactgatgaaggatacttgcaacacagggaagtggacagaagaagaagaaaagagacttgcagaagtggttcatgagttgacaagcactgagccaggtgacatagtcacacagggtgtgtcttgggcagctgtggctgaacgagtcggtacccgctcagaaaagcaatgtcgttctaaatggctcaactacctgaattggaaacagagtgggggtactgaatggaccaaggaagatgaaatcaatctcatcctcaggatagcagaacttgatgtagctgatgaaaatgacattaactgggatctgttagctgagggatggagtagtgtccgttcaccacaatggctacgaagtaaatggtggaccatcaaaaggcaaattgcaaaccataaggatgtttcgttccctgtcttaataaaaggtcttaaacagttacatgagaaccaaaaaaacaacccaacgcttttggagaataaatcaggatctggagttccaaacagtaataccaattccagtgtgcagcatgttcagataagagttgcccgcttggaagataatacagccatctcttctagccccatggcagcattgcagattccagtccagatcacccatgtttcttcagcagactctcctgctaccgttgactcagaaacaataacactaaacagtggaacactacagacatttgagattcttccctctttccatctacagcccactggcactccaggcacctacctacttcaaacaagctcaagccaaggccttcccctaactctgactgctagtcccacagtaaccctgacagctgctgctcctgcttctcctgaacagattattgttcatgctttatccccagaacatttgttgaacacaagtgataatgttacagtgcagtgtcacacaccaagagtcatcattcagactgttgccacagaggacatcacttcttccatatcccaagcagaactgacagtcgatagtgatattcagtcatctgattttcctgagcctccagacgccctagaagcagacactttcccagatgaaattcatcaccctaagatgactgtggagccatcatttaatgatgctcatgtatccaaattcagtgaccaaaatagcacagaactgatgaatagtgttatggtcagaacagaagaagaaatctctgacaccgaccttaaacaagaggaatcaccctctgatttagccagtgcttatgttactgagggtttagagtctcccactatagaagaacaagttgatcaaacaattgatgatgaaacaatacttatcgttccttcaccacatggctttatccaggcatctgatgttatagatactgaatctgtcttgcctttgacaacactaacagatcccatactccaacatcatcaggaagaatcaaatatcattggatcatccttgggcagtcctgtttcagaagattcaaaggatgtcgaagatttggtaaactgtcattagtaatgaactagtccgtaacttgaaagtatttcgatttcttggctttatatatcttgtggaaaggacgattctattagtgtagtaacggtatt

SEQ ID NO: 2699 - DNA, 1475 bp, Homo sapiens
  source 1..1475: mol_type = genomic DNA
accgccaccatgctgggagcggtgaagatggaagggcacgagccgtccgactggagcagctactatgcagagcccgagggctactcctccgtgagcaacatgaacgccggcctggggatgaacggcatgaacacgtacatgagcatgtcggcggccgccatgggcagcggctcgggcaacatgagcgcgggctccatgaacatgtcgtcgtacgtgggcgctggcatgagcccgtccctggcggggatgtcccccggcgcgggcgccatggcgggcatgggcggctcggccggggcggccggcgtggcgggcatggggccgcacttgagtcccagcctgagcccgctcggggggcaggcggccggggccatgggcggcctggccccctacgccaacatgaactccatgagccccatgtacgggcaggcgggcctgagccgcgcccgcgaccccaagacctacaggcgcagctacacgcacgcaaagccgccctactcgtacatctcgctcatcaccatggccatccagcagagccccaacaagatgctgacgctgagcgagatctaccagtggatcatggacctcttccccttctaccggcagaaccagcagcgctggcagaactccatccgccactcgctctccttcaacgactgtttcctgaaggtgccccgctcgcccgacaagcccggcaagggctccttctggaccctgcaccctgactcgggcaacatgttcgagaacggctgctacctgcgccgccagaagcgcttcaagtgcgagaagcagctggcgctgaaggaggccgcaggcgccgccggcagcggcaagaaggcggccgccggagcccaggcctcacaggctcaactcggggaggccgccgggccggcctccgagactccggcgggcaccgagtcgcctcactcgagcgcctccccgtgccaggagcacaagcgagggggcctgggagagctgaaggggacgccggctgcggcgctgagccccccagagccggcgccctctcccgggcagcagcagcaggccgcggcccacctgctgggcccgccccaccacccgggcctgccgcctgaggcccacctgaagccggaacaccactacgccttcaaccacccgttctccatcaacaacctcatgtcctcggagcagcagcaccaccacagccaccaccaccaccaaccccacaaaatggacctcaaggcctacgaacaggtgatgcactaccccggctacggttcccccatgcctggcagcttggccatgggcccggtcacgaacaaaacgggcctggacgcctcgcccctggccgcagatacctcctactaccagggggtgtactcccggcccattatgaactcctcttagtaatgaactagtccgtaacttgaaagtatttcgatttcttggctttatatatcttgtggaaaggacgacagtgttgtccggtggcttctgtt

SEQ ID NO: 2700 - DNA, 1493 bp, Homo sapiens
  source 1..1493: mol_type = genomic DNA
accgccaccatgcactcggcttccagtatgctgggagcggtgaagatggaagggcacgagccgtccgactggagcagctactatgcagagcccgagggctactcctccgtgagcaacatgaacgccggcctggggatgaacggcatgaacacgtacatgagcatgtcggcggccgccatgggcagcggctcgggcaacatgagcgcgggctccatgaacatgtcgtcgtacgtgggcgctggcatgagcccgtccctggcggggatgtcccccggcgcgggcgccatggcgggcatgggcggctcggccggggcggccggcgtggcgggcatggggccgcacttgagtcccagcctgagcccgctcggggggcaggcggccggggccatgggcggcctggccccctacgccaacatgaactccatgagccccatgtacgggcaggcgggcctgagccgcgcccgcgaccccaagacctacaggcgcagctacacgcacgcaaagccgccctactcgtacatctcgctcatcaccatggccatccagcagagccccaacaagatgctgacgctgagcgagatctaccagtggatcatggacctcttccccttctaccggcagaaccagcagcgctggcagaactccatccgccactcgctctccttcaacgactgtttcctgaaggtgccccgctcgcccgacaagcccggcaagggctccttctggaccctgcaccctgactcgggcaacatgttcgagaacggctgctacctgcgccgccagaagcgcttcaagtgcgagaagcagctggcgctgaaggaggccgcaggcgccgccggcagcggcaagaaggcggccgccggagcccaggcctcacaggctcaactcggggaggccgccgggccggcctccgagactccggcgggcaccgagtcgcctcactcgagcgcctccccgtgccaggagcacaagcgagggggcctgggagagctgaaggggacgccggctgcggcgctgagccccccagagccggcgccctctcccgggcagcagcagcaggccgcggcccacctgctgggcccgccccaccacccgggcctgccgcctgaggcccacctgaagccggaacaccactacgccttcaaccacccgttctccatcaacaacctcatgtcctcggagcagcagcaccaccacagccaccaccaccaccaaccccacaaaatggacctcaaggcctacgaacaggtgatgcactaccccggctacggttcccccatgcctggcagcttggccatgggcccggtcacgaacaaaacgggcctggacgcctcgcccctggccgcagatacctcctactaccagggggtgtactcccggcccattatgaactcctcttagtaatgaactagtccgtaacttgaaagtatttcgatttcttggctttatatatcttgtggaaaggacgaatccgacctcggaggtaacgtgtt

SEQ ID NO: 2701 - DNA, 1454 bp, Homo sapiens
  source 1..1454: mol_type = genomic DNA
accgccaccatggctgcttccaagacccagggggctgtcgcccgaatgcaggaagaccgtgatgggagctgcagcacagtcgggggtgtaggttatggggacagtaaggattgtatcctggagccgctttccctgccagaaagtccaggtggcaccaccactttagaaggttctccatctgtgccttgtattttctgtgaagaacattttcctgtggctgaacaagacaaacttctgaagcacatgattattgagcataagattgtcatagctgatgtcaagttggttgctgatttccaaaggtacattttatattggaggaaaaggttcactgaacagcccatcacagatttttgtagtgtaataagaattaattccactgctccatttgaagaacaagagaattattttttgttatgtgacgttttaccagaagatagaattcttagagaagagcttcagaaacagagactgagagaaattctggaacaacagcagcaagaacgaaatgataccaattttcatggcgtttgtatgttttgcaatgaagaattccttggaaacagatctgttattttgaaccacatggccagagaacatgctttcaacattggattgccagacaacattgtaaactgcaatgaatttttgtgtacattacagaaaaagcttgacaatttgcagtgcttgtactgtgagaagaccttcagggacaaaaatacacttaaagatcacatgaggaaaaaacagcatcgtaagattaatcctaagaacagagaatatgacagattttatgtcatcaattatttggaacttggaaaatcgtgggaagaagttcagttggaagatgatcgggagttgctggaccatcaggaagatgactggtctgattgggaagaacaccctgcctctgcagtctgcttattttgtgaaaagcaagcagaaacaattgagaagttgtatgtccacatggaggatgcacacgaatttgatcttctcaaaataaagtcagaacttggattaaatttctatcagcaagtgaaactggtcaattttattcggaggcaagttcaccaatgcagatgttatggctgccatgtgaagttcaaatccaaagcagacttaagaactcacatggaagaaactaaacacacttcgctgctccccgatagaaagacgtgggatcaactggagtattattttccaacctatgaaaatgacactctcctgtgtacactatctgacagtgaaagtgacctgacagctcaggaacaaaatgaaaatgttcccatcatcagtgaagatacatctaaactgtatgctttgaaacaaagcagtattttgaaccagttgctactatagtaatgaactagtccgtaacttgaaagtatttcgatttcttggctttatatatcttgtggaaaggacgacaaagatcttgcgaggagtacaat

SEQ ID NO: 2702 - DNA, 1946 bp, Homo sapiens
  source 1..1946: mol_type = genomic DNA
accgccaccatgaagcgggaccggctgggccgcttcctgtctcctgggtcgtcccgacagtgcggggcctcggacggcggcggcggcgtcagccggactcggggccgcccttcccttagcggtgggccgagggtggacggggcgacggcgcggcgcgcctggggcccggtggggtcctgcggggacgcgggcgaggacggcgcggacgaggcaggagcaggccgggctctcgccatgggtcactgtcgcctctgccacgggaagttttcctcgagaagcctgcgcagcatctccgagagggcgcctggagcgagcatggagaggccatccgcagaggagcgcgtgctcgtacgggacttccagcgcctgcttggtgtggctgtccgccaggaccccaccttgtctccgtttgtctgcaagagctgccacgcccagttctaccagtgccacagccttctcaagtccttcctgcagagggtcaacgcctccccggctggtcgccggaagccttgtgcaaaggtcggtgcccagcccccaacaggggcagaggagggagcgtgtctggtggatctgatcacatccagcccccagtgcctgcacggcttggtggggtgggtgcatggacatgcggccagctgcggggccctgccccaccttcagaggacactgtcctccgagtactgcggcgtcatccaggtcgtgtggggctgcgaccagggccacgactacaccatggataccagctccagctgcaaggccttcttgctggacagtgcgctggcagtcaagtggccatgggacaaagagacggcgccacggctgccccagcaccgagggtggaaccctggggatgcccctcagacctcccagggtagagggacagggaccccagttggggctgagaccaagaccctgcccagcacggatgtggcccagcctccttcggacagcgacgcggtggggcccaggtcgggcttcccacctcagccaagcctgcccctttgcagggccccagggcagttgggtgagaagcagcttccatcttcaacctcggatgatcgggtaaaagacgagttcagtgacctttctgagggagacgtcttgagtgaagatgaaaatgacaagaagcaaaatgcccagtcttcggacgagtcctttgagccttacccagaaaggaaagtctctggtaagaagagtgaaagcaaagaagccaagaagtctgaagaaccaagaattcggaagaagccgggacccaagcccggatggaagaagaagcttcgttgtgagagggaggagcttcccaccatctacaagtgtccttaccagggctgcacggccgtgtaccgaggcgctgacggcatgaagaagcacatcaaggagcaccacgaggaggtccgggagcggccctgcccccaccctggctgcaacaaggttttcatgatcgaccgctacctgcagcgccacgtgaagctcatccacacagaggtgcggaactatatctgtgacgaatgtggacaaaccttcaagcagcggaagcaccttctcgtccaccaaatgcgacattcgggagccaagcctttgcagtgtgaggtctgtgggttccagtgcaggcagcgggcatccctcaagtaccacatgaccaaacacaaggctgagactgagctggactttgcctgtgaccagtgtggccggcggtttgagaaggcccacaacctcaatgtacacatgtccatggtgcacccgctgacacagacccaggacaaggccctgcccctggaggcggaaccaccacctgggccaccgagcccctctgtgaccacagagggccaggcggtgaagcccgaacccacctagtaatgaactagtccgtaacttgaaagtatttcgatttcttggctttatatatcttgtggaaaggacgatgctcgcgataaagaggcgatgtt

SEQ ID NO: 2703 - DNA, 1721 bp, Homo sapiens
  source 1..1721: mol_type = genomic DNA
accgccaccatgggtcactgtcgcctctgccacgggaagttttcctcgagaagcctgcgcagcatctccgagagggcgcctggagcgagcatggagaggccatccgcagaggagcgcgtgctcgtacgggacttccagcgcctgcttggtgtggctgtccgccaggaccccaccttgtctccgtttgtctgcaagagctgccacgcccagttctaccagtgccacagccttctcaagtccttcctgcagagggtcaacgcctccccggctggtcgccggaagccttgtgcaaaggtcggtgcccagcccccaacaggggcagaggagggagcgtgtctggtggatctgatcacatccagcccccagtgcctgcacggcttggtggggtgggtgcatggacatgcggccagctgcggggccctgccccaccttcagaggacactgtcctccgagtactgcggcgtcatccaggtcgtgtggggctgcgaccagggccacgactacaccatggataccagctccagctgcaaggccttcttgctggacagtgcgctggcagtcaagtggccatgggacaaagagacggcgccacggctgccccagcaccgagggtggaaccctggggatgcccctcagacctcccagggtagagggacagggaccccagttggggctgagaccaagaccctgcccagcacggatgtggcccagcctccttcggacagcgacgcggtggggcccaggtcgggcttcccacctcagccaagcctgcccctttgcagggccccagggcagttgggtgagaagcagcttccatcttcaacctcggatgatcgggtaaaagacgagttcagtgacctttctgagggagacgtcttgagtgaagatgaaaatgacaagaagcaaaatgcccagtcttcggacgagtcctttgagccttacccagaaaggaaagtctctggtaagaagagtgaaagcaaagaagccaagaagtctgaagaaccaagaattcggaagaagccgggacccaagcccggatggaagaagaagcttcgttgtgagagggaggagcttcccaccatctacaagtgtccttaccagggctgcacggccgtgtaccgaggcgctgacggcatgaagaagcacatcaaggagcaccacgaggaggtccgggagcggccctgcccccaccctggctgcaacaaggttttcatgatcgaccgctacctgcagcgccacgtgaagctcatccacacagaggtgcggaactatatctgtgacgaatgtggacaaaccttcaagcagcggaagcaccttctcgtccaccaaatgcgacattcgggagccaagcctttgcagtgtgaggtctgtgggttccagtgcaggcagcgggcatccctcaagtaccacatgaccaaacacaaggctgagactgagctggactttgcctgtgaccagtgtggccggcggtttgagaaggcccacaacctcaatgtacacatgtccatggtgcacccgctgacacagacccaggacaaggccctgcccctggaggcggaaccaccacctgggccaccgagcccctctgtgaccacagagggccaggcggtgaagcccgaacccacctagtaatgaactagtccgtaacttgaaagtatttcgatttcttggctttatatatcttgtggaaaggacgagggagctctcgaatggatctcccg

SEQ ID NO: 2704 - DNA, 1091 bp, Homo sapiens
  source 1..1091: mol_type = genomic DNA
accgccaccatgatgagtcatccgtgtgtgtctcttttgggcgttcctgttttaaatcctgccttggtccctcacctggcacaaggacaagtgctactggtgtcagacccatcgcccaacactgatcctgctaagtactctgaaagcacctccgcgacccgacaccagatgaagggggaagatgcccagccacaggagatggcgtccacaagcttcccaagggccagtggtcccagtcctgaattcagacagcacggggactctgacgggaagagagggagcccacagaatctgcccatagaacatcattttgcttgtaaagagtgtggggacacctttcggcttaaagtcctgcttgtccagcaccagagagtccacagtgaggagaagggctgggaatgtggcgactgcgggaaggtctttaggggggtggcggagtttaatgagcacaggaaaagccacgtagctgcggagccccagcccggccccagtagggccctggagaatgccgcggagaagagggagcagatggagagggaggcaaagcccttcgagtgcgaggagtgcggaaaacggtttaagaagaatgcaggcctgagtcagcatctgagggtccacagcagagagaagccctttgattgcgaggaatgcgggcggtcgttcaaagtcaacacccacctcttccgacatcagaaacttcacacttcggaaaagcctttcgcctgcaaggcgtgcagcagggatttcctggatcgccaggagcttctcaagcaccagcgcatgcacactggccacctgcccttcgactgcgacgactgcggcaagtccttccgaggggtcaacgggctggccgagcaccagcgcatccacagtggggccaagccatacgggtgtccccactgcggcaagctcttccgaaggagctcggagctcaccaagcaccggcggatccacacgggcgagaagccctacgcctgcggccttccgtgggccctctagtaatgaactagtccgtaacttgaaagtatttcgatttcttggctttatatatcttgtggaaaggacgaagaacggatcagccacggatctac

SEQ ID NO: 2705 - DNA, 2063 bp, Homo sapiens
  source 1..2063: mol_type = genomic DNA
accgccaccatggcctccaggcttccgacggcctggtcctgtgaaccagtgacctttgaagatgtaacactgggttttaccccggaagagtggggactgctggacctcaaacagaagtccctgtacagggaagtgatgctggagaactacaggaacctggtctcagtggaacatcagctttccaaaccagatgtggtatctcagttagaggaggcagaagatttctggccagtggagagaggaattcctcaagacaccattccagagtatcctgagctccagctggaccctaaattggatcctcttcctgctgagagtcccctaatgaacattgaggttgttgaggtcctcacactgaaccaggaggtggctggtccccggaatgcccagatccaggccctatatgctgaagatggaagcctgagtgcagatgcccccagtgagcaggtccaacagcagggcaagcatccaggtgaccctgaggccgcgcgccagaggttccggcagttccgttataaggacatgacaggtccccgggaggccctggaccagctccgagagctgtgtcaccagtggctacagcctaaggcacgctccaaggagcagatcctggagctgctggtgctggagcagttcctaggtgcactgcctgtgaagctccggacatgggtggaatcgcagcacccagagaactgccaagaggtggtggccctggtagagggtgtgacctggatgtctgaggaggaagtacttcctgcaggacaacctgccgagggcaccacctgctgcctcgaggtcactgcccagcaggaggagaagcaggaggatgcagccatctgcccagtgacagtgctccctgaggagccagtgaccttccaggatgtggctgtggacttcagccgggaggagtgggggctgctgggcccgacacagaggaccgagtaccgcgatgtgatgctggagacctttgggcacctggtctctgtggggtgggagactacactggaaaataaagagttagctccaaattctgacattcctgaggaagaaccagcccccagcctgaaagtacaagaatcctcaagggattgtgccttgtcctctacattagaagataccttgcagggtggggtccaggaagtccaagacacagtgttgaagcagatggagtctgctcaggaaaaagaccttcctcagaagaagcactttgacaaccgtgagtcccaggcaaacagtggtgctcttgacacaaaccaagtttcgctccagaaaattgacaaccctgagtcccaggcaaacagtggcgctcttgacacaaaccaagttttgctccacaaaattcctcctagaaaacgattgcgcaaacgtgactcacaagttaaaagtatgaaacataattcacgtgtaaaaattcatcagaagagctgtgaaaggcaaaaggccaaggaaggcaatggttgtaggaaaaccttcagtcggagtactaaacagattacgtttataagaattcacaaggggagccaagtttgccgatgcagtgaatgtggtaaaatattccggaacccaagatacttttctgtgcataagaaaatccataccggagagaggccctatgtgtgtcaagactgtgggaaaggatttgttcagagctcttccctcacacagcatcagagagttcattctggagagagaccatttgaatgtcaggagtgtgggaggaccttcaatgatcgctcagccatctcccagcacctgaggactcacactggcgctaagccctacaagtgtcaggactgtggaaaagccttccgccagagctcccacctcatcagacatcagaggactcacaccggggagcgcccatatgcatgcaacaaatgtggaaaggccttcacccagagctcacaccttattgggcaccagagaacccacaataggacaaagcgaaagaagaaacagcctacctcatagtaatgaactagtccgtaacttgaaagtatttcgatttcttggctttatatatcttgtggaaaggacgaatgttctatccacctcgtagctac

SEQ ID NO: 2706 - DNA, 1748 bp, Homo sapiens
  source 1..1748: mol_type = genomic DNA
accgccaccatgaacattgaggttgttgaggtcctcacactgaaccaggaggtggctggtccccggaatgcccagatccaggccctatatgctgaagatggaagcctgagtgcagatgcccccagtgagcaggtccaacagcagggcaagcatccaggtgaccctgaggccgcgcgccagaggttccggcagttccgttataaggacatgacaggtccccgggaggccctggaccagctccgagagctgtgtcaccagtggctacagcctaaggcacgctccaaggagcagatcctggagctgctggtgctggagcagttcctaggtgcactgcctgtgaagctccggacatgggtggaatcgcagcacccagagaactgccaagaggtggtggccctggtagagggtgtgacctggatgtctgaggaggaagtacttcctgcaggacaacctgccgagggcaccacctgctgcctcgaggtcactgcccagcaggaggagaagcaggaggatgcagccatctgcccagtgacagtgctccctgaggagccagtgaccttccaggatgtggctgtggacttcagccgggaggagtgggggctgctgggcccgacacagaggaccgagtaccgcgatgtgatgctggagacctttgggcacctggtctctgtggggtgggagactacactggaaaataaagagttagctccaaattctgacattcctgaggaagaaccagcccccagcctgaaagtacaagaatcctcaagggattgtgccttgtcctctacattagaagataccttgcagggtggggtccaggaagtccaagacacagtgttgaagcagatggagtctgctcaggaaaaagaccttcctcagaagaagcactttgacaaccgtgagtcccaggcaaacagtggtgctcttgacacaaaccaagtttcgctccagaaaattgacaaccctgagtcccaggcaaacagtggcgctcttgacacaaaccaagttttgctccacaaaattcctcctagaaaacgattgcgcaaacgtgactcacaagttaaaagtatgaaacataattcacgtgtaaaaattcatcagaagagctgtgaaaggcaaaaggccaaggaaggcaatggttgtaggaaaaccttcagtcggagtactaaacagattacgtttataagaattcacaaggggagccaagtttgccgatgcagtgaatgtggtaaaatattccggaacccaagatacttttctgtgcataagaaaatccataccggagagaggccctatgtgtgtcaagactgtgggaaaggatttgttcagagctcttccctcacacagcatcagagagttcattctggagagagaccatttgaatgtcaggagtgtgggaggaccttcaatgatcgctcagccatctcccagcacctgaggactcacactggcgctaagccctacaagtgtcaggactgtggaaaagccttccgccagagctcccacctcatcagacatcagaggactcacaccggggagcgcccatatgcatgcaacaaatgtggaaaggccttcacccagagctcacaccttattgggcaccagagaacccacaataggacaaagcgaaagaagaaacagcctacctcatagtaatgaactagtccgtaacttgaaagtatttcgatttcttggctttatatatcttgtggaaaggacgaggtggtaaatcactctcagcctgg

SEQ ID NO: 2707 - DNA, 1937 bp, Homo sapiens
  source 1..1937: mol_type = genomic DNA
accgccaccatgctggagaactacaggaacctggtctcagtggaacatcagctttccaaaccagatgtggtatctcagttagaggaggcagaagatttctggccagtggagagaggaattcctcaagacaccattccagagtatcctgagctccagctggaccctaaattggatcctcttcctgctgagagtcccctaatgaacattgaggttgttgaggtcctcacactgaaccaggaggtggctggtccccggaatgcccagatccaggccctatatgctgaagatggaagcctgagtgcagatgcccccagtgagcaggtccaacagcagggcaagcatccaggtgaccctgaggccgcgcgccagaggttccggcagttccgttataaggacatgacaggtccccgggaggccctggaccagctccgagagctgtgtcaccagtggctacagcctaaggcacgctccaaggagcagatcctggagctgctggtgctggagcagttcctaggtgcactgcctgtgaagctccggacatgggtggaatcgcagcacccagagaactgccaagaggtggtggccctggtagagggtgtgacctggatgtctgaggaggaagtacttcctgcaggacaacctgccgagggcaccacctgctgcctcgaggtcactgcccagcaggaggagaagcaggaggatgcagccatctgcccagtgacagtgctccctgaggagccagtgaccttccaggatgtggctgtggacttcagccgggaggagtgggggctgctgggcccgacacagaggaccgagtaccgcgatgtgatgctggagacctttgggcacctggtctctgtggggtgggagactacactggaaaataaagagttagctccaaattctgacattcctgaggaagaaccagcccccagcctgaaagtacaagaatcctcaagggattgtgccttgtcctctacattagaagataccttgcagggtggggtccaggaagtccaagacacagtgttgaagcagatggagtctgctcaggaaaaagaccttcctcagaagaagcactttgacaaccgtgagtcccaggcaaacagtggtgctcttgacacaaaccaagtttcgctccagaaaattgacaaccctgagtcccaggcaaacagtggcgctcttgacacaaaccaagttttgctccacaaaattcctcctagaaaacgattgcgcaaacgtgactcacaagttaaaagtatgaaacataattcacgtgtaaaaattcatcagaagagctgtgaaaggcaaaaggccaaggaaggcaatggttgtaggaaaaccttcagtcggagtactaaacagattacgtttataagaattcacaaggggagccaagtttgccgatgcagtgaatgtggtaaaatattccggaacccaagatacttttctgtgcataagaaaatccataccggagagaggccctatgtgtgtcaagactgtgggaaaggatttgttcagagctcttccctcacacagcatcagagagttcattctggagagagaccatttgaatgtcaggagtgtgggaggaccttcaatgatcgctcagccatctcccagcacctgaggactcacactggcgctaagccctacaagtgtcaggactgtggaaaagccttccgccagagctcccacctcatcagacatcagaggactcacaccggggagcgcccatatgcatgcaacaaatgtggaaaggccttcacccagagctcacaccttattgggcaccagagaacccacaataggacaaagcgaaagaagaaacagcctacctcatagtaatgaactagtccgtaacttgaaagtatttcgatttcttggctttatatatcttgtggaaaggacgatgccctggtattcccacggtcata

SEQ ID NO: 2708 - DNA, 1967 bp, Homo sapiens
  source 1..1967: mol_type = genomic DNA
accgccaccatggcctccaggcttccgacggcctggtcctgtgaaccagtgacctttgaagatgtaacactgggttttaccccggaagagtggggactgctggacctcaaacagaagtccctgtacagggaagtgatgctggagaactacaggaacctggtctcagtggagtatcctgagctccagctggaccctaaattggatcctcttcctgctgagagtcccctaatgaacattgaggttgttgaggtcctcacactgaaccaggaggtggctggtccccggaatgcccagatccaggccctatatgctgaagatggaagcctgagtgcagatgcccccagtgagcaggtccaacagcagggcaagcatccaggtgaccctgaggccgcgcgccagaggttccggcagttccgttataaggacatgacaggtccccgggaggccctggaccagctccgagagctgtgtcaccagtggctacagcctaaggcacgctccaaggagcagatcctggagctgctggtgctggagcagttcctaggtgcactgcctgtgaagctccggacatgggtggaatcgcagcacccagagaactgccaagaggtggtggccctggtagagggtgtgacctggatgtctgaggaggaagtacttcctgcaggacaacctgccgagggcaccacctgctgcctcgaggtcactgcccagcaggaggagaagcaggaggatgcagccatctgcccagtgacagtgctccctgaggagccagtgaccttccaggatgtggctgtggacttcagccgggaggagtgggggctgctgggcccgacacagaggaccgagtaccgcgatgtgatgctggagacctttgggcacctggtctctgtggggtgggagactacactggaaaataaagagttagctccaaattctgacattcctgaggaagaaccagcccccagcctgaaagtacaagaatcctcaagggattgtgccttgtcctctacattagaagataccttgcagggtggggtccaggaagtccaagacacagtgttgaagcagatggagtctgctcaggaaaaagaccttcctcagaagaagcactttgacaaccgtgagtcccaggcaaacagtggtgctcttgacacaaaccaagtttcgctccagaaaattgacaaccctgagtcccaggcaaacagtggcgctcttgacacaaaccaagttttgctccacaaaattcctcctagaaaacgattgcgcaaacgtgactcacaagttaaaagtatgaaacataattcacgtgtaaaaattcatcagaagagctgtgaaaggcaaaaggccaaggaaggcaatggttgtaggaaaaccttcagtcggagtactaaacagattacgtttataagaattcacaaggggagccaagtttgccgatgcagtgaatgtggtaaaatattccggaacccaagatacttttctgtgcataagaaaatccataccggagagaggccctatgtgtgtcaagactgtgggaaaggatttgttcagagctcttccctcacacagcatcagagagttcattctggagagagaccatttgaatgtcaggagtgtgggaggaccttcaatgatcgctcagccatctcccagcacctgaggactcacactggcgctaagccctacaagtgtcaggactgtggaaaagccttccgccagagctcccacctcatcagacatcagaggactcacaccggggagcgcccatatgcatgcaacaaatgtggaaaggccttcacccagagctcacaccttattgggcaccagagaacccacaataggacaaagcgaaagaagaaacagcctacctcatagtaatgaactagtccgtaacttgaaagtatttcgatttcttggctttatatatcttgtggaaaggacgaaatcatcagtcgcgacaaagattc

SEQ ID NO: 2709 - DNA, 2513 bp, Homo sapiens
  source 1..2513: mol_type = genomic DNA
accgccaccatggaaattccgaaactgctgccagcccgtggtacgctgcaaggcggcggtggtggcggtatcccagccggtggtggtcgtgttcatcgcggtccggatagcccagccggtcaagttccgacccgtcgtctgctgctgctgcgtggtccacaagatggcggtccgggccgtcgccgcgaagaagccagcaccgccagtcgtggtccgggtccaagtctgctggccccacgcaccgatcagccaagtggcggcggcggtggtggtggcgatgatttttttctcgttctcctggatccagttggcggtgatgttgaaactgctggttctggccaagctgctggtccggttctgcgtgaagaagctgaagaaggtccaggtctgcaaggtggtgaatctggtgctaacccggctggtccgaccgctctgggtccgcgttgtctctccgcggttcccactccggccccgatctccgcccccggccccgccgcggccttcgcgggcacagtcactatccacaaccaggacctgctgttgcgctttgagaacggcgtcctcaccctggccacgcccccaccacacgcctgggagccaggggccgctcctgcccagcagcccgggtgtctgatcgccccgcaagctgggttcccgcatgccgcgcacccgggtgactgcccagagctgccgccagacctcctgctagctgagccggccgaacccgcgccagctccggcgcctgaggaggaggcggagggcccggccgccgccctgggcccccgcggaccgctgggctccggcccaggcgtggtgctgtacttgtgccccgaggcgcagtgcgggcaaaccttcgccaagaagcaccagctgaaggtgcacctgctgacgcacagcagcagccagggccagaggcccttcaaatgccccctgggtggctgcggctggaccttcaccacctcttacaagctcaagaggcacctgcagtcgcacgacaaactgcggccctttggctgcccggcagagggctgtggcaagagcttcaccacagtgtacaacctcaaggcgcacatgaagggccatgagcaggagaactcattcaaatgcgaggtgtgcgaggagagcttccccacgcaggccaaactcagcgcccaccagcgcagccacttcgaaccggagaggccttaccagtgcgcgttttctggctgcaagaagacatttatcacagtgagtgctctgttttcccataaccgcgcccatttcagggaacaggaactgttttcctgctcttttcctggctgcagcaaacaatatgacaaggcttgtaggctgaaaattcacctgcggagtcacaccggcgagagacctttcctttgtgactttgatggctgtggctggaacttcactagcatgtccaaactcttaaggcacaaaagaaagcacgacgatgaccggaggttcatgtgccctgtggaaggctgtgggaaatctttcacgagggcggaacatctgaaaggccacagcataacccacctgggcacaaagcctttcgtgtgtcctgtggcaggctgctgtgccaggttctctgctcgcagtagcctctacattcactccaagaaacacctgcaggatgtggacacttggaaaagccgttgcccgatctcctcttgtaataaactcttcacatccaagcacagcatgaagacgcacatggttaaaaggcataaggtgggccaggatctcttagctcagctagaagcagcaaattctctcacacccagcagtgaacttaccagccagagacagaatgatctcagtgatgcagagatagtgtctctcttctctgatgtacctgacagtacttctgctgcattgctggacacagcattggtgaactctggaatcttgactattgatgtggcttctgtgagctcgactctggcagggcacctccctgctaataataataattccgtagggcaggctgtggaccctccgtccttgatggccaccagcgaccctcctcaaagtctggatacctctctcttttttggaacggcggccactggttttcagcagagctccttaaatatggatgaggtctcaagtgtaagtgtggggccattgggatctctggactctttggccatgaaaaactccagtccagagcctcaggctttgacacccagcagtaagctaacagtggacacagatgctctgactccttcgagcaccctttgtgaaaacagtgtctcagaactactgacaccaaccaaagcggagtggaacgtacatcctgactctgacttctttggacaggagggagaaacccagtttggattccccaatgcagcaggaaaccatggttctcagaaagaaacagatcttatcactgtgactggcagctcatttttggtatagtaatgaactagtccgtaacttgaaagtatttcgatttcttggctttatatatcttgtggaaaggacgaaagatatgcgtcatacgtcggctg

SEQ ID NO: 2710 - DNA, 1001 bp, Homo sapiens
  source 1..1001: mol_type = genomic DNA
accgccaccatgatggcgtatatgaacccggggccccactattctgtcaacgccttggccctaagtggccccagtgtggatctgatgcaccaggctgtgccctacccaagcgcccccaggaagcagcggcgggagcgcaccaccttcacccggagccaactggaggagctggaggcactgtttgccaagacccagtacccagacgtctatgcccgtgaggaggtggctctgaagatcaatctgcctgagtccagggttcaggtttggttcaagaaccggagggctaaatgcaggcagcagcgacagcagcagaaacagcagcagcagcccccagggggccaggccaaggcccggcctgccaagaggaaggcgggcacgtccccaagaccctccacagatgtgtgtccagaccctctgggcatctcagattcctacagtccccctctgcccggcccctcaggctccccaaccacggcagtggccactgtgtccatctggagcccagcctcagagtcccctttgcctgaggcgcagcgggctgggctggtggcctcagggccgtctctgacctccgccccctatgccatgacctacgccccggcctccgctttctgctcttccccctccgcctatgggtctccgagctcctatttcagcggcctagacccctacctttctcccatggtgccccagctagggggcccggctcttagccccctctctggcccctccgtgggaccttccctggcccagtcccccacctccctatcaggccagagctatggcgcctacagccccgtggatagcttggaattcaaggaccccacgggcacctggaaattcacctacaatcccatggaccctctggactacaaggatcagagtgcctggaagtttcagatcttgtagtaatgaactagtccgtaacttgaaagtatttcgatttcttggctttatatatcttgtggaaaggacgacgtgttagaaattgagccgagtct

SEQ ID NO: 2711 - DNA, 2501 bp, Homo sapiens
  source 1..2501: mol_type = genomic DNA
accgccaccatggaaatcccgaagctgctcccggctcgcgggacactacagggcggcggcggcggcggtatccccgcgggtggcggccgagtccaccgaggccctgactcgccggctggccaggtccccacgcgccgcctcctgctgccccggggcccccaagatggcgggcccgggcggcggcgcgaggaggccagcacggcatcacggggccctggcccaagcctgttcgcgccgaggccccatcaacctagcggcggcggcgacgacttcttcctggtgctgcttgacccggtgggtggcgacgtggagaccgcgggctccggtcaggccgcagggcctgtgttgagggaggaggccaaggcgggcccggggctccagggggacgagagcggcgcgaaccccgcgggctgctctgcgcagggcccccactgcctgtccgcggttcccactccggccccgatctccgcccccggccccgccgcggccttcgcgggcacagtcactatccacaaccaggacctgctgttgcgctttgagaacggcgtcctcaccctggccacgcccccaccacacgcctgggagccaggggccgctcctgcccagcagcccaggtgtctgatcgccccccaagctgggttcccgcaagccgcgcacccgggtgactgcccagagctgcggtccgacctcctgctagccgagcccgcagaacccgcgcctgctccggcgccccaggaggaggcggagggcctggccgccgccctgggcccccgcggactgctgggctctggtccaggcgtggtgctgtacctgtgccccgaggcgctgtgcgggcaaaccttcgccaagaagcaccagctgaagatgcacctgctgacgcacagcagcagccagggccagaggcccttcaaatgccccctgggtggctgcggctggaccttcaccacctcttacaagctcaagaggcacctgcagtcgcacgataaactgcggcccttcggctgccctgcggagggctgtggcaagagcttcaccaccgtgtacaacctcaaggcgcacatgaagggccatgagcaggagaactcgttcaaatgtgaggtgtgcgaggagagcttccccacgcaggccaaactcggcgcccaccagcgcagccacttcgaacccgagaggccttaccagtgcgcgttttctggctgcaagaagacatttatcacagtgagtgctctgttttcccataaccgcgcccatttcagggaacaggaactgttttcctgctctttccctggctgcagcaagcaatatgacaaggcttgtaggctgaaaattcacctgcggagtcacaccggcgagagacctttcctttgtgactttgatggctgtggctggaacttcaccagcatgtccaaactcttaaggcacaaaaggaagcacgacgatgaccggaggttcatgtgccctgtggaaggctgtgggaaatctttcacgagggccgaacatctgaaaggccacagcattacccacctgggcacaaagcctttcgtgtgtcctgtggcaggctgctgtgccaggttctctgctcgcagtagcctctacattcactccaagaaacacctgcaggatgtggacacttggaaaagccgttgcccgatctcctcttgtaataaactcttcacatccaagcacagcatgaagacgcacatggttaaaaggcataaggtgggccaggatctcttagctcagctagaagcagcaaattctcttacacccagcagtgaacttaccagccagagacagaatgatctcagtgatgcagagatagtgtctctcttctctgatgtacctgacagtacttctgctgcattgctggacacagcattggtgaactctggaatcttgactattgatgtggcttctgtgagctcgactctggcagggcacctccctgctaataataataattccgtagggcaggctgtggaccctccgtccttgatggccaccagcgaccctcctcaaagtctggatacctctctcttttttggaacggcggccactggttttcagcagagctccttaaatatggatgaggtctcaagtgtaagtgtggggccattgggatctctggactctttggccatgaaaaactccagtccagagcctcaggctttgacacccagcagtaagctaacagtggacacagatactctgactccttcgagcaccctttgtgaaaacagtgtctcagaactactgacaccagccaaagcggagtggagcgtacatcctaactctgacttctttggacaggagggagaaacccagtttggattccccaatgcagcaggaaaccatggttctcagaaagaaagaaatcttatcactgtgactggcagctcatttttggtatagtaatgaactagtccgtaacttgaaagtatttcgatttcttggctttatatatcttgtggaaaggacgacgcgcagttcggtaacgtacagca

SEQ ID NO: 2712 - DNA, 2006 bp, Homo sapiens
  source 1..2006: mol_type = genomic DNA
accgccaccatggcgacttcgaacaatccgcggaaattcagcgagaagatcgcgctgcacaatcagaagcaggcggaggagacggcggccttcgaggaggtcatgaaggacctgagcctgacgcgggccgcgcggctccagctccagaaatcccagtacctgcaactgggccccagccgaggccagtactatggcgggtccctgcccaacgtgaaccagatcgggagtggcaccatggacctgcccttccagacccccttccaatcctcgggcctggacaccagccggaccacccggcaccatgggctggtggacagggtgtaccgggagcgtggccggctcggctccccacaccgccggcccctgtcagtggacaaacacggacggcaggccgacagctgcccctatggcaccatgtacctctcaccacccgcggacaccagctggagaaggaccaattctgactccgccctgcaccagagcacaatgacgcccacgcagccagaatcctttagcagtgggtcccaggacgtgcaccagaaaagagtcttactgttaacagtcccaggaatggaagagaccacatcagaggcagacaaaaacctttccaagcaagcatgggacaccaagaagacggggtccaggcccaagtcctgtgaggtccccggaatcaacatcttcccgtctgccgaccaggaaaacactacagccctgatccccgccacccacaacacaggggggtccctgcccgacctgaccaacatccacttcccctccccgctcccgaccccgctggaccccgaggagcccaccttccctgcactgagcagctccagcagcaccggcaacctcgcggccaacctgacgcacctgggcatcggtggcgccggccagggaatgagcacacctggctcctctccacagcaccgcccagctggcgtcagccccctgtccctgagcacagaggcaaggcgtcagcaggcatcgcccaccctgtccccgctgtcacccatcactcaggctgtagccatggacgccctgtctctggagcagcagctgccctacgccttcttcacccaggcgggctcccagcagccaccgccgcagccccagcccccgccgcctcctccacccgcgtcccagcagccaccacccccgccacccccacaggcgcccgtccgcctgccccctggtggccccctgttgcccagcgccagcctgactcgtgggccacagccgcccccgcttgcagtcacggtaccgtcctctctcccccagtcccccccagagaaccctggccagccatcgatggggatcgacatcgcctcggcgccggctctgcagcagtaccgcactagcgccggctccccggccaaccagtctcccacctcgccagtctccaatcaaggcttctccccagggagctccccgcaacacacttccaccctgggcagcgtgtttggggacgcgtactatgagcagcagatggcggccaggcaggccaatgctctgtcccaccagctggagcagttcaacatgatggagaacgccatcagctccagcagcctgtacagcccgggctccacactcaactactcgcaggcggccatgatgggcctcacgggcagccacgggagcctgccggactcgcagcaactgggatacgccagccacagtggcatccccaacatcatcctcacagtgacaggagagtccccccccagcctctctaaagaactgaccagctctctggccggggtcggcgacgtcagcttcgactccgacagccagtttcccctggacgaactcaagatcgaccccctgaccctcgacggactgcacatgctcaacgaccccgacatggttctggccgacccagccaccgaggacaccttccggatggaccgcctgtagtaatgaactagtccgtaacttgaaagtatttcgatttcttggctttatatatcttgtggaaaggacgataagcgaaagtgtgtcttaatgca

SEQ ID NO: 2713 - DNA, 2054 bp, Homo sapiens
  source 1..2054: mol_type = genomic DNA
accgccaccatggcgacttcgaacaatccgcggaaattcagcgagaagatcgcgctgcacaatcagaagcaggcggaggagacggcggccttcgaggaggtcatgaaggacctgagcctgacgcgggccgcgcggctccagctccagaaatcccagtacctgcaactgggccccagccgaggccagtactatggcgggtccctgcccaacgtgaaccagatcgggagtggcaccatggacctgcccttccagcccagcggatttctgggggaggccctggcagcggctcctgtctctctgacccccttccaatcctcgggcctggacaccagccggaccacccggcaccatgggctggtggacagggtgtaccgggagcgtggccggctcggctccccacaccgccggcccctgtcagtggacaaacacggacggcaggccgacagctgcccctatggcaccatgtacctctcaccacccgcggacaccagctggagaaggaccaattctgactccgccctgcaccagagcacaatgacgcccacgcagccagaatcctttagcagtgggtcccaggacgtgcaccagaaaagagtcttactgttaacagtcccaggaatggaagagaccacatcagaggcagacaaaaacctttccaagcaagcatgggacaccaagaagacggggtccaggcccaagtcctgtgaggtccccggaatcaacatcttcccgtctgccgaccaggaaaacactacagccctgatccccgccacccacaacacaggggggtccctgcccgacctgaccaacatccacttcccctccccgctcccgaccccgctggaccccgaggagcccaccttccctgcactgagcagctccagcagcaccggcaacctcgcggccaacctgacgcacctgggcatcggtggcgccggccagggaatgagcacacctggctcctctccacagcaccgcccagctggcgtcagccccctgtccctgagcacagaggcaaggcgtcagcaggcatcgcccaccctgtccccgctgtcacccatcactcaggctgtagccatggacgccctgtctctggagcagcagctgccctacgccttcttcacccaggcgggctcccagcagccaccgccgcagccccagcccccgccgcctcctccacccgcgtcccagcagccaccacccccgccacccccacaggcgcccgtccgcctgccccctggtggccccctgttgcccagcgccagcctgactcgtgggccacagccgcccccgcttgcagtcacggtaccgtcctctctcccccagtcccccccagagaaccctggccagccatcgatggggatcgacatcgcctcggcgccggctctgcagcagtaccgcactagcgccggctccccggccaaccagtctcccacctcgccagtctccaatcaaggcttctccccagggagctccccgcaacacacttccaccctgggcagcgtgtttggggacgcgtactatgagcagcagatggcggccaggcaggccaatgctctgtcccaccagctggagcagttcaacatgatggagaacgccatcagctccagcagcctgtacagcccgggctccacactcaactactcgcaggcggccatgatgggcctcacgggcagccacgggagcctgccggactcgcagcaactgggatacgccagccacagtggcatccccaacatcatcctcacagtgacaggagagtccccccccagcctctctaaagaactgaccagctctctggccggggtcggcgacgtcagcttcgactccgacagccagtttcccctggacgaactcaagatcgaccccctgaccctcgacggactgcacatgctcaacgaccccgacatggttctggccgacccagccaccgaggacaccttccggatggaccgcctgtagtaatgaactagtccgtaacttgaaagtatttcgatttcttggctttatatatcttgtggaaaggacgatactttaccgtaacgtgcaccaac

SEQ ID NO: 2714 - DNA, 1958 bp, Homo sapiens
  source 1..1958: mol_type = genomic DNA
accgccaccatggccgcctcgccgggctcgggcagcgccaacccgcggaagttcagtgagaagatcgcgctgcacacgcagagacaggccgaggagacgcgggccttcgagcagctcatgaccgacctcaccctgtcgcgggttcaatttcagaagcttcagcaactgcgccttacacagtaccatggaggatccttaccaaatgtgagccagctgcggagcagtgcgtcagagtttcagccgtcatttcaccaagctgataatgttcggggaacccgccatcacgggctggtggagaggccatccaggaaccgcttccaccccctccaccgaaggtctggggacaagccagggcgacaatttgatggtagtgcttttggagccaattattcctcacagcctctggatgagagttggccaaggcagcagcctccttggaaagacgaaaagcatcctgggttcaggctgacatctgcacttaacaggaccaattctgattctgctcttcacacgagtgctctgagtaccaagccccaggacccctatggaggagggggccagtcggcctggcctgccccatacatgggtttctgtgatggtgagaataatggacatggggaagtagcatctttccctggcccattgaaagaagagaatctgttaaatgttccgaagccactgccaaaacaactgtgggagaccaaggagattcagtccctgtcaggacgccctcgatcctgtgatgttggaggtggcaatgcttttccacataatggtcaaaacctaggcctctcacccttcttggggaccttgaacactggagggtcattgccagatctaaccaacctccactactcgacacccctgccagcctccctggacaccaccgaccaccactttggcagtatgagtgtggggaatagtgtgaacaacatcccagctgctatgacccacctgggtataagaagctcctctggtctccagagttctcggagtaacccctccatccaagccacgctcaataagactgtgctttcctcttccttaaataaccacccacagacatctgttcccaacgcatctgctcttcacccttcgctccgtctgttttcccttagcaacccatctctttccaccacaaacctgagcggcccgtctcggcgtcggcagcctcccgtcagccctctcacgctttctcctggccctgaagcacatcaaggtttcagcagacagctgtcttcaaccagcccactggccccatatcctacctcccagatggtgtcctcagaccgaagccaactttcctttctgcccacagaagctcaagcccaggtgtcgccgccacccccttaccctgcaccccaggagctcacccagcccctcctgcagcagccccgcgcccctgaggcccctgcccagcagccccaggcagcctcctcactgccacagtcagactttcagcttctcccggcccagggctcatctttgaccaacttcttcccagatgtgggttttgaccagcagtccatgaggccaggccctgcctttcctcaacaggtgcctctggtgcaacaaggttcccgagaactgcaggactcttttcatttgagaccaagcccgtattccaactgcgggagtctcccgaacaccatcctgccagactccagcaccagcctgttcaaagacctcaacagtgcgctggcaggcctgcctgaggtcagcctgaacgtggacactccatttccactggaagaggagctgcagattgaacccctgagcctggacggactcaacatgttaagtgactccagcatgggcctgctggacccctctgttgaagagacgtttcgagctgacagactgtagtaatgaactagtccgtaacttgaaagtatttcgatttcttggctttatatatcttgtggaaaggacgatagatggctatcgattataatcaa

SEQ ID NO: 2715 - DNA, 1961 bp, Homo sapiens
  source 1..1961: mol_type = genomic DNA
accgccaccatggccgcctcgccgggctcgggcagcgccaacccgcggaagttcagtgagaagatcgcgctgcacacgcagagacaggccgaggagacgcgggccttcgagcagctcatgaccgacctcaccctgtcgcgggttcaatttcagaagcttcagcaactgcgccttacacagtaccatggaggatccttaccaaatgtgagccagctgcggagcagtgcgtcagagtttcagccgtcatttcaccaagctgataatgttcggggaacccgccatcacgggctggtggagaggccatccaggaaccgcttccaccccctccaccgaaggtctggggacaagccagggcgacaatttgatggtagtgcttttggagccaattattcctcacagcctctggatgagagttggccaaggcagcagcctccttggaaagacgaaaagcatcctgggttcaggctgacatctgcacttaacaggaccaattctgattctgctcttcacacgagtgctctgagtaccaagccccaggacccctatggaggagggggccagtcggcctggcctgccccatacatgggtttctgtgatggtgagaataatggacatggggaagtagcatctttccctggcccattgaaagaagagaatctgttaaatgttccgaagccactgccaaaacaactgtgggagaccaaggagattcagtccctgtcaggacgccctcgatcctgtgatgttggaggtggcaatgcttttccacataatggtcaaaacctaggcctctcacccttcttggggaccttgaacactggagggtcattgccagatctaaccaacctccactactcgacacccctgccagcctccctggacaccaccgaccaccactttggcagtatgagtgtggggaatagtgtgaacaacatcccagctgctatgacccacctgggtataagaagctcctctggtctccagagttctcggagtaacccctccatccaagccacgctcaataagactgtgctttcctcttccttaaataaccacccacagacatctgttcccaacgcatctgctcttcacccttcgctccgtctgttttcccttagcaacccatctctttccaccacaaacctgagcggcccgtctcggcgtcggcagcctcccgtcagccctctcacgctttctcctggccctgaagcacatcaaggtttcagcagacagctgtcttcaaccagcccactggccccatatcctacctcccagatggtgtcctcagaccgaagccaactttcctttctgcccacagaagctcaagcccaggtgtcgccgccacccccttaccctgcaccccaggagctcacccagcccctcctgcagcagccccgcgcccctgaggcccctgcccagcagccccaggcagcctcctcactgccacagtcagactttcagcttctcccggcccagggctcatctttgaccaacttcttcccagatgtgggttttgaccagcagtccatgaggccaggccctgcctttcctcaacaggtgcctctggtgcaacaaggttcccgagaactgcaggactcttttcatttgagaccaagcccgtattccaactgcgggagtctcccgaacaccatcctgccagaagactccagcaccagcctgttcaaagacctcaacagtgcgctggcaggcctgcctgaggtcagcctgaacgtggacactccatttccactggaagaggagctgcagattgaacccctgagcctggacggactcaacatgttaagtgactccagcatgggcctgctggacccctctgttgaagagacgtttcgagctgacagactgtagtaatgaactagtccgtaacttgaaagtatttcgatttcttggctttatatatcttgtggaaaggacgaaagtttgttcaggcatattcggcg

SEQ ID NO: 2716 - DNA, 3152 bp, Homo sapiens
  source 1..3152: mol_type = genomic DNA
accgccaccatggtgctgcccacctgccccatggcggagttcgcgctgccgcggcacagcgcggtcatggagcgccttcgccggcgcatcgagctgtgccggcgccaccacagcacctgcgaggcccgctacgaggccgtgtcgcccgagcgcctggagctggagcgccaacacaccttcgccctgcaccagcgctgcatccaggccaaggccaagcgcgccgggaagcacaggcagccgcccgccgccacggccccggcgcccgccgccccggccccgcgcctggacgccgctgacggccccgagcacggccgcccggccacgcatcttcatgatacagttaagaggaatcttgacagcgccacttcccctcagaatggcgatcaacagaatggctacggggacctctttcctgggcataagaagactcgccgggaggcccctctgggagttgccatctcttccaatggactgcctccagcctcccccctcggtcagtctgacaagccttctggagccgacgccctgcagtccagtgggaagcactctctggggctagactctctcaacaaaaagcgtctggctgactccagccttcacttgaatggaggcagtaaccccagtgagtcatttcctctgagcctgaataaagaactgaagcaggagcctgtcgaagacctgccttgcatgatcactgggactgtcggctccatatcgcaaagcaacctcatgccagacctcaaccttaacgagcaggagtggaaggagctcatcgaggagctgaacaggtcggtgcccgatgaagacatgaaggacctgtttaatgaggacttcgaggagaagaaggacccagagtcttctggctctgccacacaaacccccttggcacaggacattaatattaagacggaattctctccagcagcctttgagcaagaacagttaggctctccacaagtgagggccgggtctgcagggcagacctttctggggccttcctctgcccctgtgagtacagattcccccagcctagggggctcccaaaccttattccacacctctggtcagccccgggcggacaatcccagtccaaacctgatgccggcatcagcccaggcccagaacgcacaaagagcccttgcaggtgtggtattgcccagtcagggcccaggaggggcctcagagctgtcctctgcccaccagctccagcagatcgctgccaagcagaagcgcgagcagatgctccagaacccacagcaggccaccccggcaccagccccgggccagatgtccacatggcagcagacggggccctcccacagttccttagatgtcccttaccccatggagaagcctgccagcccttccagctacaagcaagacttcactaactccaaactgctcatgatgcctagtgtgaataagagttcccctcggcccggaggcccctacctccagcccagccatgtgaacctgctgagtcaccagccaccgagtaacttgaatcagaactccgcgaataaccaggggtctgtgctggactacggcaatacaaaacccctttctcattacaaagcggactgtgggcaaggcagcccggggtctggccagagcaagccagccctgatggcttatcttccccagcagctgtcccatataagtcacgagcagaactccctgtttctgatgaagccaaagccaggaaatatgcctttccgatcactggttccacctggccaggagcagaacccttccagtgtccctgtgcaagcccaggctaccagtgttgggacccagccgcctgccgtgtccgtggccagctcccacaacagctccccctatctcagcagccagcaacaggccgctgtaatgaagcagcatcagttgcttttggaccaacagaaacaaagggagcagcagcaaaagcatttacagcaacagcagttccttcagaggcaacagcaccttctcgcggaacaggagaagcaacagtttcagcgccatctgacccgcccaccaccccagtaccaagacccgacacaaggcagcttcccacagcaggttggacagttcacagggtcctctgctgccgtgcccggcatgaacaccttgggtccatccaactccagctgtcctcgagtgttccctcaggctgggaatctgatgccaatgggccctggacatgcttcagtttcctctctccccacaaactcaggccaacaggaccggggtgtggctcagttccctggctcccaaaacatgcctcagagcagcctctatggcatggcttctggcataacccagatagttgcccagcccccgccacaggccaccaatggacatgcccacattccacggcagaccaacgtgggccagaacacctccgtctcagctgcctatgggcagaactctctgggaagctctggcctctcccagcagcacaataaggggaccctgaaccctggtttaacaaagccaccggtcccaagggtgtcaccagccatgggaggccagaattcctcctggcagcatcagggaatgccgaacctcagtggccagaccccagggaacagcaacgtgagtcccttcactgcagcctccagtttccacatgcagcagcaggcccacctgaaaatgtctagcccgcaattctcccaggcagtgcccaacaggcccatggctcccatgagctcagcagctgccgtggggtccttgctacccccagtgagtgcacagcagaggaccagcgcccctgccccagcaccacccccaacagcccctcagcagggcttgcctggcctgagcccagcagggcctgagctgggggccttcagccagagccctgcctcacagatgggcggtcgggcggggctgcactgcacccaggcctaccctgtgcggaccgcgggccaggagctgccttttgcctatagcgggcagccaggtggcagtgggctctctagtgtggctggacacaccgatctgatcgactccctgctgaagaacaggacttcagaggagtggatgagtgatttggacgacctgttagggtctcagtagtaatgaactagtccgtaacttgaaagtatttcgatttcttggctttatatatcttgtggaaaggacgaggacgacatcttacttaatctgtg

SEQ ID NO: 2717 - DNA, 1250 bp, Homo sapiens
  source 1..1250: mol_type = genomic DNA
accgccaccatgaggaaactatttgagaaatatggaaaggcaggcgaagtcttcattcataaggataaaggatttggctttatccgcttggaaacccgaaccctagcggagattgccaaagtggagctggacaatatgccactccgtggaaagcagctgcgtgtgcgctttgcctgccatagtgcatcccttacagttcgaaaccttcctcagtatgtgtccaacgaactgctggaagaagccttttctgtgtttggccaggtagagagggctgtagtcattgtggatgatcgaggaaggccctcaggaaaaggcattgttgagttctcagggaagccagctgctcggaaagctctggacagatgcagtgaaggctccttcctgctaaccacatttcctcgtcctgtgactgtggagcccatggaccagttagatgatgaagagggacttccagagaagctggttataaaaaaccagcaatttcacaaggaacgagagcagccacccagatttgcacagcctggctcctttgagtatgaatatgccatgcgctggaaggcactcattgagatggagaagcagcagcaggaccaagtggaccgcaacatcaaggaggctcgtgagaagctggagatggagatggaagctgcacgccatgagcaccaggtcatgctaatgagacaggatttgatgaggcgccaagaagaacttcggaggatggaagagctgcacaaccaagaggtgcaaaaacgaaagcaactggagctcaggcaggaggaagagcgcaggcgccgtgaagaagagatgcggcggcagcaagaagaaatgatgcggcgacagcaggaaggattcaagggaaccttccctgatgcgagagagcaggagattcggatgggtcagatggctatgggaggtgctatgggcataaacaacagaggtgccatgccccctgctcctgtgccagctggtaccccagctcctccaggacctgccactatgatgccggatggaactttgggattgaccccaccaacaactgaacgctttggtcaggctgctacaatggaaggaattggggcaattggtggaactcctcctgcattcaaccgtgcagctcctggagctgaatttgccccaaacaaacgtcgccgatactagtaatgaactagtccgtaacttgaaagtatttcgatttcttggctttatatatcttgtggaaaggacgaacgcgaagaattgggcgtccagac

SEQ ID NO: 2718 - DNA, 1517 bp, Homo sapiens
  source 1..1517: mol_type = genomic DNA
accgccaccatgcagagtaataaaacttttaacttggagaagcaaaaccatactccaagaaagcatcatcaacatcaccaccagcagcagcaccaccagcagcaacagcagcagccgccaccaccgccaatacctgcaaatgggcaacaggccagcagccaaaatgaaggcttgactattgacctgaagaattttagaaaaccaggagagaagaccttcacccaacgaagccgtctttttgtgggaaatcttcctcccgacatcactgaggaagaaatgaggaaactatttgagaaatatggaaaggcaggcgaagtcttcattcataaggataaaggatttggctttatccgcttggaaacccgaaccctagcggagattgccaaagtggagctggacaatatgccactccgtggaaagcagctgcgtgtgcgctttgcctgccatagtgcatcccttacagttcgaaaccttcctcagtatgtgtccaacgaactgctggaagaagccttttctgtgtttggccaggtagagagggctgtagtcattgtggatgatcgaggaaggccctcaggaaaaggcattgttgagttctcagggaagccagctgctcggaaagctctggacagatgcagtgaaggctccttcctgctaaccacatttcctcgtcctgtgactgtggagcccatggaccagttagatgatgaagagggacttccagagaagctggttataaaaaaccagcaatttcacaaggaacgagagcagccacccagatttgcacagcctggctcctttgagtatgaatatgccatgcgctggaaggcactcattgagatggagaagcagcagcaggaccaagtggaccgcaacatcaaggaggctcgtgagaagctggagatggagatggaagctgcacgccatgagcaccaggtcatgctaatgagacaggatttgatgaggcgccaagaagaacttcggaggatggaagagctgcacaaccaagaggtgcaaaaacgaaagcaactggagctcaggcaggaggaagagcgcaggcgccgtgaagaagagatgcggcggcagcaagaagaaatgatgcggcgacagcaggaaggattcaagggaaccttccctgatgcgagagagcaggagattcggatgggtcagatggctatgggaggtgctatgggcataaacaacagaggtgccatgccccctgctcctgtgccagctggtaccccagctcctccaggacctgccactatgatgccggatggaactttgggattgaccccaccaacaactgaacgctttggtcaggctgctacaatggaaggaattggggcaattggtggaactcctcctgcattcaaccgtgcagctcctggagctgaatttgccccaaacaaacgtcgccgatactagtaatgaactagtccgtaacttgaaagtatttcgatttcttggctttatatatcttgtggaaaggacgaatgattacgtatctgactaaatag

SEQ ID NO: 2719 - DNA, 1802 bp, Homo sapiens
  source 1..1802: mol_type = genomic DNA
accgccaccatgccaaggggattcctggtgaagcgaactaaacggacaggcggcttgtaccgagttcgccttgcggagcgtgtcttccctctgctggggccccagggggcgccgcccttcttggaggaggctcccagcgcctccttgcccggcgcggagcgggcgacaccccccacccgagaggaaccaggaaaggggttgacggcggaggcggcccgggaacagtcggggtcgccatgtcgggcggctggggtgagcccggggacgggcgggcgggaaggcgcggagtggcgggcgggtggcagggaaggtcccgggcccagccccagccccagccccagtccagcgaagccggcaggcgcagagctgcgtcgggcgttcctggagcgctgcctcagctcgcccgtctccgccgagtctttccccgggggcgccgccgccgtggccgctttctcctgctccgtggcgccagcagccgcaccgaccccgggggagcagtttctgctgccgcttcgggcgccgttcccagagcccgcgcttcagccggaccctgcgcccctctcggccgcccttcagagtctgaagcgggcggccggcggcgagcgccgcggcaaggcacccacggactgcgcgtctggacccgcggccgcgggaatcaagaagccaaaggccatgaggaagttgagctttgccgatgaggtgaccacatcccctgtcctgggcctgaagatcaaggaggaggagcccggagcgccgtcccggggcttggggggcagccgcacgccactgggggagttcatctgccagctgtgcaaggagcagtacgcagaccccttcgcgctggcccagcaccgctgctcccgcatcgtgcgcgtagagtaccgctgccctgagtgcgacaaggtgttcagctgtcctgcgaacctggcctcccatcgccgctggcataagccgcgtcctgcggctgcaaacgccgccacagtctcctccgccgacgggaagccgccttcttcgtcgtcttcgtcctcccgggactccggggccattgcatcttttctggcggagggaaaggagaacagccgaatagagcggactgcggatcagcacccgcaggccagggacagctccggggcggatcagcacccggacagcgccccgaggcagggcctccaggtgctgacgcatccagagccaccgctgcctcagggcccctacacggagggggtgttggggcgccgggtacctgtgccgggcagtaccagtggtggcaggggatccgagattttcgtgtgcccatattgccacaaaaagtttcgtcgccaagcctatctgcgcaagcacctgagcactcacgaggcgggctcggcccgtgcgctagcgccgggctttggctccgaacgcggtgccccacttgccttcgcttgcccattgtgcggagcgcacttccctacagcagatatcagggagaagcaccggctgtggcatgctgtccgcgaggagctgctcctgcccgctctggcgggggctcctcccgaaacgtcgggccctagcgggccatctgacgggagtgcccagcaaattttctcgtgcaagcactgcccgtccactttttttagctctccagggctgacccggcacatcaataagtgccacccctcagaaagccggcaagtgctgctgctgcagatgccactgcggcctggctgctagtaatgaactagtccgtaacttgaaagtatttcgatttcttggctttatatatcttgtggaaaggacgacgcggaagactctagttcgtgtct

SEQ ID NO: 2720 - DNA, 1811 bp, Homo sapiens
  source 1..1811: mol_type = genomic DNA
accgccaccatgtccaaggatttggtgacatttggggatgtggctgtaaatttctctcaagaggaatgggaatggctgaaccctgctcagaggaatttgtacaggaaagtgatgttggagaactacaggagcttggtatcattgggagtttctgtttctaagccagatgtgatctcattattggagcaaggaaaagagccctggatggtgaagaaggagggaacaagaggcccatgccctgattgggagtatgtatttaaaaacagtgaattttcatcaaagcaagagacatatgaagaatcatccaaagttgtgacagtgggagcaagacatcttagttatagccttgactatcccagtttgagagaagactgtcaaagtgaggactggtataagaaccagctgggaagtcaagaggtacatcttagtcaattaatcatcactcataaagaaatccttccagaagttcaaaataaagaatataacaaatcttggcaaacattccaccaggatacaatctttgatatacaacagagttttcccaccaaagaaaaagcacataagcatgaaccacaaaagaaaagttaccgaaaaaaatctgttgaaatgaaacataggaaagtctatgtagaaaagaaacttttgaaatgtaatgattgtgagaaagtcttcaaccagagctcatcccttactcttcatcagagaattcatactggagagaaaccctatgcatgtgttgaatgtgggaaaacgttcagccagagtgcaaacttggcgcaacataagagaatacatactggagagaaaccctatgaatgtaaagaatgtaggaaagccttcagccagaatgcacacctggcccaacatcagagagttcatactggagagaaaccttatcagtgtaaagaatgtaaaaaagccttcagccagattgcacacctgactcagcatcagagagttcatactggagagagacctttcgaatgtattgaatgtggaaaggcctttagtaatggttcatttcttgctcagcatcagagaattcatacaggagagaaaccttatgtgtgtaatgtgtgtgggaaagcctttagccatcgtggatacctaattgtacatcagagaattcatactggagagagaccctacgaatgtaaggaatgtaggaaagccttcagccagtatgcacaccttgctcaacatcagagagttcatactggagaaaaaccttatgaatgtaaagtatgtaggaaagccttcagccaaattgcataccttgatcaacatcagagggttcatactggagagaaaccctatgaatgtattgaatgtgggaaggcctttagcaatagttcatcacttgcacaacatcagagaagtcatactggagaaaaaccctatatgtgtaaggaatgtaggaaaacatttagccagaatgcaggccttgctcaacatcagagaattcatactggagagaaaccttatgaatgtaatgtttgtgggaaagcatttagctatagtggatctcttactctacatcagagaattcatactggagaaagaccctatgaatgtaaagattgcaggaaatctttcaggcagcgtgcacatcttgctcatcatgagagaattcatactatggagtcattcttgactctttcctctccctcaccctccacatcaaatcagttgccaagacctgtaggtttcatctcctagtaatgaactagtccgtaacttgaaagtatttcgatttcttggctttatatatcttgtggaaaggacgacaatgtgagtggttctcttacaag

SEQ ID NO: 2721 - DNA, 1634 bp, Homo sapiens
  source 1..1634: mol_type = genomic DNA
accgccaccatgccccgcggcttcctggtgaagcgcagcaagaagtccacgcccgtttcctaccgggtccgcggcggcgaggacggcgaccgcgcactgctgctctcgcccagctgcgggggcgcccgcgccgagcccccggcgccgagcccggtccccgggccgctgccgccgccgccgcccgcggagcgcgcccatgcagcgctcgccgccgcgcttgcctgcgcgcctgggccgcagccacccccgcagggcccgcgggccgcgcacttcggcaaccccgaggctgcgcaccccgcgccgctctacagtcccacgcggcccgtgagccgcgagcacgagaagcacaagtacttcgaacgcagcttcaacctgggctcgccggtctcggccgagtccttccccacgcccgccgcgctgctcggagggggcggcggcggcggcgcgagcggagctggcggaggcggcacctgcggcggcgacccgctgctcttcgcgcccgccgagctcaagatgggcacggcgttctcggctggcgccgaggcggcccgcggcccgggccccggccccccactgccccctgccgccgccctgcggcccccgggaaagcggcccccgccccctaccgccgcggagccgcccgccaaggcagtcaaggccccgggcgccaagaagcccaaggccatccgcaagctgcacttcgaggacgaggtgaccacgtcgcccgtgctggggctcaagatcaaggagggcccggtggaggcgccgcggggccgcgcggggggcgcggcgcggccgctgggcgagttcatctgccagctgtgcaaggaggagtacgccgacccgttcgcgctggcgcagcacaaatgctcgcgcatcgtgcgtgtggagtaccgctgtcccgagtgcgccaaggtcttcagctgcccggccaacctggcctcgcaccgccgctggcacaaaccgcggcccgcgcccgccgccgcccgcgcgccggagccagaagcagcagccagggctgaggcgcgggaggcacccggcggcggcagcgaccgggacacgccgagccccggcggcgtgtccgagtcgggctccgaggacgggctctacgagtgccatcactgcgccaagaagttccgccgccaggcctacctacgcaagcacctgctggcgcaccaccaggcgctgcaggccaagggcgcgccgctagcgcccccggccgaggacctactggccttgtaccccgggcccgacgagaaggcgccccaggaggcggccggcgacggcgagggggccggcgtgctgggcctgagtgcgtccgccgagtgccacctgtgcccagtgtgcggagagtcgttcgccagcaagggcgctcaggagcgccacctgcgcctgctgcacgccgcccaggtgttcccctgcaagtactgcccggccaccttctacagctcgcccggccttacgcggcacatcaacaagtgccacccatccgaaaacagacaggtgatcctcctgcaggtgcccgtgcgcccggcctgctagtaatgaactagtccgtaacttgaaagtatttcgatttcttggctttatatatcttgtggaaaggacgaaccagtagtctgatagaaggatgt

SEQ ID NO: 2722 - DNA, 1319 bp, Homo sapiens
  source 1..1319: mol_type = genomic DNA
accgccaccatggcaaaatatgtcagtctcactgaagctaacgaagaactcaaggtcttaatggacgagaaccagaccagccgccccgtggccgttcacacctccaccgtgaacccgctcgggaagcagctcttgccgaaaacctttggacagtccagtgtcaacattgaccagcaagtggtaattggtatgcctcagagaccagcagcatcaaacatccctgtggtaggaagcccaaacccacccagcactcactttgcctctcagaaccagcattcctactcctcacctccttgggccgggcagcacaacaggaaaggagagaagaatggcatgggcctgtgccgtctttccatgaaggtctgggagacggtgcagaggaaagggaccacttcctgccaggaagtggtgggcgagctggtcgccaagttcagagctgccagcaaccacgcctcaccaaacgagtcagcttatgacgtgaaaaacataaaacggcgcacctacgatgccttaaacgtgctgatggccatgaatatcatctccagggagaaaaagaagatcaagtggattggtctgaccaccaactcggctcagaactgtcagaacttacgggtggaaagacagaagagacttgaaagaataaagcagaaacagtctgaacttcaacaacttattctacagcaaattgctttcaagaacctggtgctgagaaaccagtatgtggaggagcaggtcagccagcggccgctgcccaactcagtcatccacgtgcccttcatcatcatcagcagtagcaagaagaccgtcatcaactgcagcatctccgacgacaaatcagaatatctgtttaagtttaacagctcctttgaaatccacgatgacacagaagtgctgatgtggatgggcatgacttttgggctagagtccgggagctgctctgccgaagaccttaaaatggccagaaatttggtcccaaaggctctggagccgtacgtgacagaaatggctcagggaacttttggaggtgtgttcacgacggcaggttccaggtctaatggcacgtggctttctgccagtgacctgaccaacattgcgattgggatgctggccacaagctccggtggatctcagtacagtggctccagggtggagaccccagcagtcgaggaggaagaggaggaggacaacaacgatgacgacctcagtgagaatgacgaggatgactagtaatgaactagtccgtaacttgaaagtatttcgatttcttggctttatatatcttgtggaaaggacgaacgcatagcaccgtggaccgtgaa

SEQ ID NO: 2723 - DNA, 1151 bp, Homo sapiens
  source 1..1151: mol_type = genomic DNA
accgccaccatgttggaccccaaatgtgatagaaaacgggctagaaaatttatagactctgatttttcagaaagtaaacgaagcaaaaaaggagataaaaatgggaaaggcttgagacacttttcaatgaaagtgtgtgagaaagttcaacgaaaaggtacaacatcgtacaatgaagtcgctgatgagctggtgtcagagttcaccaattcaaataaccatttggctgctgattcggcttatgatcagaagaacattaggcgaagagtttatgatgctttaaatgtgctaatggcaatgaacataatttcaaaggaaaaaaaagaaatcaagtggattggcctgcctaccaattctgctcaggaatgtcagaatctggagatagagaagcagaggcggatagaacggataaagcagaagcgggcccagctgcaagaacttctcctacagcaaatcgctttcaaaaacctggtacagagaaatcgacaaaatgagcagcaaaaccagggcccgccggctctgaactctaccattcagctgccattcataatcatcaatacaagcagaaaaacagtcatagattgcagcatctccagtgacaagtttgagtatcttttcaattttgacaacacctttgagatccatgatgacatagaagtactaaagcggatgggaatgtcgtttggcctggagtcaggcaaatgctctctggaggatctgaaacttgcgaaatccctggtgccaaaggctttagaaggttatatcacagatatctccacaggaccttcttggttaaatcagggactacttctgaactctacccaatcagtttcaaatttagacctgaccactggtgccaccttaccccagtcaagtgtaaaccaagggttatgcttggatgcagaagtggccttagcaactgggcagttcctggccccaaacagtcaccagtccagcagtgcggcctctcactgctccgagtcccgaggcgagaccccctgttcgttcaatgatgaagatgaggaagatgatgaggaggattcctcctccccagaatagtaatgaactagtccgtaacttgaaagtatttcgatttcttggctttatatatcttgtggaaaggacgacaacgattatataacctctgtcta

SEQ ID NO: 2724 - DNA, 1034 bp, Homo sapiens
  source 1..1034: mol_type = genomic DNA
accgccaccatgaaagtgtgtgagaaagttcaacgaaaaggtacaacatcgtacaatgaagtcgctgatgagctggtgtcagagttcaccaattcaaataaccatttggctgctgattcggcttatgatcagaagaacattaggcgaagagtttatgatgctttaaatgtgctaatggcaatgaacataatttcaaaggaaaaaaaagaaatcaagtggattggcctgcctaccaattctgctcaggaatgtcagaatctggagatagagaagcagaggcggatagaacggataaagcagaagcgggcccagctgcaagaacttctcctacagcaaatcgctttcaaaaacctggtacagagaaatcgacaaaatgagcagcaaaaccagggcccgccggctctgaactctaccattcagctgccattcataatcatcaatacaagcagaaaaacagtcatagattgcagcatctccagtgacaagtttgagtatcttttcaattttgacaacacctttgagatccatgatgacatagaagtactaaagcggatgggaatgtcgtttggcctggagtcaggcaaatgctctctggaggatctgaaacttgcgaaatccctggtgccaaaggctttagaaggttatatcacagatatctccacaggaccttcttggttaaatcagggactacttctgaactctacccaatcagtttcaaatttagacctgaccactggtgccaccttaccccagtcaagtgtaaaccaagggttatgcttggatgcagaagtggccttagcaactgggcagttcctggccccaaacagtcaccagtccagcagtgcggcctctcactgctccgagtcccgaggcgagaccccctgttcgttcaatgatgaagatgaggaagatgatgaggaggattcctcctccccagaatagtaatgaactagtccgtaacttgaaagtatttcgatttcttggctttatatatcttgtggaaaggacgaagccacaaaggtctttgcataaga

SEQ ID NO: 2725 - DNA, 1259 bp, Homo sapiens
  source 1..1259: mol_type = genomic DNA
accgccaccatgattataagcacaccacagagactaaccagttcaggaagtgttctgattgggagtccatatacccctgcaccagcaatggttactcagacacacatagcagaagctactggctgggtccctggtgatagaaaacgggctagaaaatttatagactctgatttttcagaaagtaaacgaagcaaaaaaggagataaaaatgggaaaggcttgagacacttttcaatgaaagtgtgtgagaaagttcaacgaaaaggtacaacatcgtacaatgaagtcgctgatgagctggtgtcagagttcaccaattcaaataaccatttggctgctgattcggcttatgatcagaagaacattaggcgaagagtttatgatgctttaaatgtgctaatggcaatgaacataatttcaaaggaaaaaaaagaaatcaagtggattggcctgcctaccaattctgctcaggaatgtcagaatctggagatagagaagcagaggcggatagaacggataaagcagaagcgggcccagctgcaagaacttctcctacagcaaatcgctttcaaaaacctggtacagagaaatcgacaaaatgagcagcaaaaccagggcccgccggctctgaactctaccattcagctgccattcataatcatcaatacaagcagaaaaacagtcatagattgcagcatctccagtgacaagtttgagtatcttttcaattttgacaacacctttgagatccatgatgacatagaagtactaaagcggatgggaatgtcgtttggcctggagtcaggcaaatgctctctggaggatctgaaacttgcgaaatccctggtgccaaaggctttagaaggttatatcacagatatctccacaggaccttcttggttaaatcagggactacttctgaactctacccaatcagtttcaaatttagacctgaccactggtgccaccttaccccagtcaagtgtaaaccaagggttatgcttggatgcagaagtggccttagcaactgggcagttcctggccccaaacagtcaccagtccagcagtgcggcctctcactgctccgagtcccgaggcgagaccccctgttcgttcaatgatgaagatgaggaagatgatgaggaggattcctcctccccagaatagtaatgaactagtccgtaacttgaaagtatttcgatttcttggctttatatatcttgtggaaaggacgatggattcactgggctatagtctga

SEQ ID NO: 2726 - DNA, 1442 bp, Homo sapiens
  source 1..1442: mol_type = genomic DNA
accgccaccatgacggcaaaaaatgttggtttgacttccacaaatgcagaagtaagaggatttatagatcagaatctcagtccaacaaaaggcaacatttcatttgttgcatttccagtttccaataccaactcacctacaaagattttaccaaaaaccttaggaccaataaatgtgaatgttggaccccaaatgattataagcacaccacagagactaaccagttcaggaagtgttctgattgggagtccatatacccctgcaccagcaatggttactcagacacacatagcagaagctactggctgggtccctggtgatagaaaacgggctagaaaatttatagactctgatttttcagaaagtaaacgaagcaaaaaaggagataaaaatgggaaaggcttgagacacttttcaatgaaagtgtgtgagaaagttcaacgaaaaggtacaacatcgtacaatgaagtcgctgatgagctggtgtcagagttcaccaattcaaataaccatttggctgctgattcggcttatgatcagaagaacattaggcgaagagtttatgatgctttaaatgtgctaatggcaatgaacataatttcaaaggaaaaaaaagaaatcaagtggattggcctgcctaccaattctgctcaggaatgtcagaatctggagatagagaagcagaggcggatagaacggataaagcagaagcgggcccagctgcaagaacttctcctacagcaaatcgctttcaaaaacctggtacagagaaatcgacaaaatgagcagcaaaaccagggcccgccggctctgaactctaccattcagctgccattcataatcatcaatacaagcagaaaaacagtcatagattgcagcatctccagtgacaagtttgagtatcttttcaattttgacaacacctttgagatccatgatgacatagaagtactaaagcggatgggaatgtcgtttggcctggagtcaggcaaatgctctctggaggatctgaaacttgcgaaatccctggtgccaaaggctttagaaggttatatcacagatatctccacaggaccttcttggttaaatcagggactacttctgaactctacccaatcagtttcaaatttagacctgaccactggtgccaccttaccccagtcaagtgtaaaccaagggttatgcttggatgcagaagtggccttagcaactgggcagttcctggccccaaacagtcaccagtccagcagtgcggcctctcactgctccgagtcccgaggcgagaccccctgttcgttcaatgatgaagatgaggaagatgatgaggaggattcctcctccccagaatagtaatgaactagtccgtaacttgaaagtatttcgatttcttggctttatatatcttgtggaaaggacgatcggtgctatattactttgataat

SEQ ID NO: 2727 - DNA, 1358 bp, Homo sapiens
  source 1..1358: mol_type = genomic DNA
accgccaccatgcaaccagaaggcatcatctttgaagcagagaataaaccctcaccaggcactgaatctgccggcactttcattttggacctctcagcaacctccagaacaattataagcacaccacagagactaaccagttcaggaagtgttctgattgggagtccatatacccctgcaccagcaatggttactcagacacacatagcagaagctactggctgggtccctggtgatagaaaacgggctagaaaatttatagactctgatttttcagaaagtaaacgaagcaaaaaaggagataaaaatgggaaaggcttgagacacttttcaatgaaagtgtgtgagaaagttcaacgaaaaggtacaacatcgtacaatgaagtcgctgatgagctggtgtcagagttcaccaattcaaataaccatttggctgctgattcggcttatgatcagaagaacattaggcgaagagtttatgatgctttaaatgtgctaatggcaatgaacataatttcaaaggaaaaaaaagaaatcaagtggattggcctgcctaccaattctgctcaggaatgtcagaatctggagatagagaagcagaggcggatagaacggataaagcagaagcgggcccagctgcaagaacttctcctacagcaaatcgctttcaaaaacctggtacagagaaatcgacaaaatgagcagcaaaaccagggcccgccggctctgaactctaccattcagctgccattcataatcatcaatacaagcagaaaaacagtcatagattgcagcatctccagtgacaagtttgagtatcttttcaattttgacaacacctttgagatccatgatgacatagaagtactaaagcggatgggaatgtcgtttggcctggagtcaggcaaatgctctctggaggatctgaaacttgcgaaatccctggtgccaaaggctttagaaggttatatcacagatatctccacaggaccttcttggttaaatcagggactacttctgaactctacccaatcagtttcaaatttagacctgaccactggtgccaccttaccccagtcaagtgtaaaccaagggttatgcttggatgcagaagtggccttagcaactgggcagttcctggccccaaacagtcaccagtccagcagtgcggcctctcactgctccgagtcccgaggcgagaccccctgttcgttcaatgatgaagatgaggaagatgatgaggaggattcctcctccccagaatagtaatgaactagtccgtaacttgaaagtatttcgatttcttggctttatatatcttgtggaaaggacgaaacaacccgcacgtcacgccgcgg

SEQ ID NO: 2728 - DNA, 1334 bp, Homo sapiens
  source 1..1334: mol_type = genomic DNA
accgccaccatggcaaaagatgccggtctaattgaagccaacggagaactcaaggtcttcatagaccagaaccttagtcccgggaaaggcgtggtgtccctcgtggccgttcacccctccaccgtcaacccgctcgggaagcagctcttgccaaaaacctttggacagtccaatgtcaacattgcccagcaagtggtaattggtacgcctcagagaccggcagcgtcaaacaccctggtggtaggaagcccacacacccccagcactcactttgcctctcagaaccagccttccgactcctcaccttggtctgccgggaagcgcaacaggaaaggagagaagaatggcaagggcctacggcatttctccatgaaggtctgcgagaaggtgcagaggaaagggaccacttcctacaacgaagtggcagacgagctggttgcggagttcagtgctgccgacaaccacatcttaccaaacgagtcagcttatgaccagaaaaacataagacggcgcgtctacgatgccttaaacgtgctaatggccatgaacatcatctccaaggagaagaaggagatcaagtggattggtctgcccaccaactcggctcaggaatgtcagaacttagaggtggaaagacagaggagacttgaaagaataaaacagaaacagtctcaacttcaagaacttattctacagcaaattgccttcaagaacctggtgcagagaaaccggcatgcggagcagcaggccagccggccaccgccacccaactcagtcatccacctgcccttcatcatcgtcaacaccagcaagaagacggtcatcgactgcagcatctccaatgacaaatttgagtatctgtttaattttgacaacacatttgaaatccacgatgacatagaagtgctgaagcggatgggcatggcttgcgggctggagtcggggagctgctctgccgaagaccttaaaatggccagaagtctggtccccaaggctctggagccatacgtgacagaaatggctcagggaactgttggaggcgtgttcatcacgacggcaggttccacgtctaacggcacaaggttctctgccagtgacctgaccaacggtgcagatgggatgctggccacaagctccaatgggtctcagtacagcggctccagggtggagactccggtgtcctacgtcggggaggacgacgaggaggacgatgacttcaacgagaatgacgaggacgactagtaatgaactagtccgtaacttgaaagtatttcgatttcttggctttatatatcttgtggaaaggacgacatcaggatgtgctcacgcgcgac

SEQ ID NO: 2729 - DNA, 4922 bp, Homo sapiens
  source 1..4922: mol_type = genomic DNA
accgccaccatgtattcggcccacaggcccctgatgcccgcgtccagcgcggcctcccgtggcctcggcatgttcgtgtggacgaatgtggaacctcgctctgtggctgtgttcccttggcactccttagtccccttcctggcacccagccagcctgacccctccgtgcagccgagcgaggcccagcaacctgccagccacccagtggcctccaaccagagcaaagaacctgctgagtcggcagctgttgctcatgaacggccaccaggtgggacagggagtgctgaccctgagcggccccctggagccacatgccctgagagcccaggacccggacccccacaccctttgggggtggtggaatctggtaagggtccgcctcccaccacggaggaggaggcctccggccccccaggagagccccggctggacagtgagacagagagtgaccatgatgatgccttcctctccatcatgtctcctgagatccagttgcctctaccgcccggaaaacgtcggacccagtccctcagtgccctacccaaggaacgggactcatcttctgagaaggatggacgcagccccaacaagcgggagaaggaccacatccggcggcccatgaatgccttcatgatcttcagcaagcggcaccgggccctggtccaccagcgtcatcccaaccaggacaaccggaccgtcagcaagatcctgggcgagtggtggtatgccctggggcccaaggagaagcagaagtaccacgacctggccttccaggtgaaggaggcccacttcaaggcccacccagattggaagtggtgcaacaaggaccgaaagaagtccagctcagaggccaagcccacgagcctggggctggcaggagggcacaaggagacgcgggagcggagcatgtcggagacgggcactgctgctgcccctggggtgtcctctgagctcctgtccgttgcagcccagacactcctgagctcagacaccaaggctccggggagcagctcctgtggggcagaacggctacacacagttgggggacctggctcagcccggccccgagctttctcccacagcggggtacacagcctggacggcggagaagtagacagtcaggcgctacaggaactgacgcagatggtgtctggccctgcatcgtactctggcccaaagccttctacccagtatggagctccaggaccctttgcagcccctggtgagggaggtgccttggcggccactgggcggcccccgctgctgcccacccgagcttctcgttctcagcgtgcggccagtgaggacatgacgagtgatgaggagcgcatggtcatctgtgaggaggaaggggatgatgatgtcattgctgacgatggcttcggcaccactgacattgatctcaagtgcaaggagcgggtgaccgacagcgagagtggggacagctctggggaggacccagagggcaacaagggctttggtcggaaggtgttttcacctgtgatccgttcctcctttacccactgccgccccccactggaccctgagcccccagggcccccggatcctcctgtagcctttggcaaaggctatggttccgccccatcctcctctgcgtcctcgcctgcttcctcctcagcctcggcagccacctccttctcactgggctcaggaaccttcaaggcccaggagtctggtcagggcagcacagcgggccccctacggcccccaccccctggggctgggggtccagcgacaccttccaaggcaacccggttcctcccaatggatcctgccaccttccggcgcaagagacccgaaagtgtgggtggcctggagccaccaggcccctcagtcatcgcggcccctcccagcggaggaggaaacatcctgcagacactggtgctgcccccaaacaaggaggagcaagagggcggcggagccagagtgccctccgcccccgccccatcactggcctatggggccccagcagctcccctgtcccgtcctgccgccaccatggtcaccaatgtggtgcggcctgtcagcagcactcctgtgcccatcgcctctaagcccttccccacctctggccgggctgaggcgtctccaaatgacacagcaggtgccaggactgaaatgggcactgggtctcgggtgcctgggggctccccgctgggtgtcagcttagtgtattcggacaagaagtcggcagcagccacctcaccagccccacacttggtggctggacccctgctgggcactgtggggaaggcgcctgccactgtcactaacctactggtgggcaccccggggtatggggcccctgcgccccctgctgtccagttcattgcccagggggcccctggtggtgggaccactgcgggctcaggagcaggtgctgggagtggccccaatgggccagtacccctgggcatcctgcaaccaggtgccctgggcaaggctgggggaatcacccaggtacagtacatcctgcccacgctgccccagcagcttcaggtggcacctgccccagcaccagcccctgggaccaaggcagcggctcccagcggccctgcacccaccaccagcatccgtttcaccctcccaccgggcacttccaccaacggcaaagtcctggctgccactgcacccactcctggcatccccatcctgcagtctgtaccctccgccccaccccccaaagcccagtcagtttctcccgtgcaggccccgcccccgggtggctcagcccagctgctgcctgggaaggtcctagtgcctctggccgcccctagcatgtcagtgcggggtggaggggccggccagccactgccactggtgagcccgcccttctcagtacctgtgcagaatggtgcccagccccccagcaagatcatccagctgaccccggtgcctgtgagcacacccagcggcctggtgccgcccctgagcccagccacactccctggacccacctctcagcctcagaaggtcctgttgccctcctccaccagaatcacctatgtgcagtcagcgggcgggcacgcgctgcccctgggtaccagccctgcgtccagccaggctggaacagtcacctcgtacgggcccacgagctctgtagctctaggcttcacctcgctggggcccagcggccccgccttcgtgcagcccctgctctcaggccaagccccactgctggctcccggtcaggtgggcgtgtcacctgtgcccagtccccagctgccgcctgcctgtgcagcccccggaggtcctgtcataacagcattttactctggcagccctgcacccacctcctcagcacccctggcccagccatcccaggcccccccaagcctggtctacactgtggccaccagcacaaccccacctgcagccaccattctgcccaagggcccgccagcccctgccactgccaccccagccccgactagccctttccccagcgccacaggttccatgacctacagcttagtggcccccaaggcccagcggcccagcccgaaggccccccagaaagtgaaggcagccatcgccagcattcccgtggggtcctttgaggcaggtgcctctgggcggcctggccctgcaccccggcagcctctggagcctggcccagtccgagagccaactgccccagagtctgagcttgaggggcagcccacaccaccagcccctccacccctgccagagacctggactcccacggcccggagcagccccccactgcccccacctgctgaggagcggaccagcgccaagggccctgagaccatggccagcaaattccccagctcatcttcagactggcgcgtccctgggcagggcctggagaatcgtggggagcctcccactcctcccagcccggccccagctccagctgtagcccctggtggcagcagcgagagcagcagtgggcgggcagccggggacaccccggagcgcaaggaggcggctggtactggcaagaaggtgaaggtgcggcccccgcccctgaagaagacctttgactctgtggacaacagggtcctgtcagaagtggacttcgaagagcgctttgctgagttgcctgagtttcggcctgaggaggtgctgccctcccccaccctgcagtctctggccacctcaccccgggccatcctgggctcttaccgcaagaagaggaagaactccacggacctggattcagcacccgaggaccccacctcgcccaagcgcaagatgagaagacgctccagctgcagctcggagcccaacacccccaagagtgccaagtgcgagggggacatcttcacctttgaccgtacaggtacagaagccgaggacgtgcttggggagctagagtatgacaaggtgccatactcctccctgcggcgcaccctggaccagcgccgggccctggtcatgcagctctttcaggaccatggcttcttcccgtcagcccaggccacagccgccttccaggcccgctatgcagacatctttccctccaaggtttgtctgcagttgaagatccgtgaggtgcgccagaagatcatgcaggctgccactcccacggagcagccccctggagctgaggctcctctccctgtaccgccccccactggcaccgctgctgcccctgcccccactcccagccccgcagggggccctgaccccacctcacccagctcggactctggcacggcccaggctgccccgccactgcctccacccccagagtcggggcctggacagcctggctgggagggggctccccagccctcccccccacccccaggtccctccacagctgccacaggcaggtagtaatgaactagtccgtaacttgaaagtatttcgatttcttggctttatatatcttgtggaaaggacgatttctgttcgctgtaggtcaagca

SEQ ID NO: 2730 - DNA, 4928 bp, Homo sapiens
  source 1..4928: mol_type = genomic DNA
accgccaccatgtattcggcccacaggcccctgatgcccgcgtccagcgcggcctcccgtggcctcggcatgttcgtgtggacgaatgtggaacctcgctctgtggctgtgttcccttggcactccttagtccccttcctggcacccagccagcctgacccctccgtgcagccgagcgaggcccagcaacctgccagccacccagtggcctccaaccagagcaaagaacctgctgagtcggcagctgttgctcatgaacggccaccaggtgggacagggagtgctgaccctgagcggccccctggagccacatgccctgagagcccaggacccggacccccacaccctttgggggtggtggaatctggtaagggtccgcctcccaccacggaggaggaggcctccggccccccaggagagccccggctggacagtgagacagagagtgaccatgatgatgccttcctctccatcatgtctcctgagatccagttgcctctaccgcccggaaaacgtcggacccagtccctcagtgccctacccaaggaacgggactcatcttctgagaaggatggacgcagccccaacaagcgggagaaggaccacatccggcggcccatgaatgccttcatgatcttcagcaagcggcaccgggccctggtccaccagcgtcatcccaaccaggacaaccggaccgtcagcaagatcctgggcgagtggtggtatgccctggggcccaaggagaagcagaagtaccacgacctggccttccaggtgaaggaggcccacttcaaggcccacccagattggaagtggtgcaacaaggaccgaaagaagtccagctcagaggccaagcccacgagcctggggctggcaggagggcacaaggagacgcgggagcggagcatgtcggagacgggcactgctgctgcccctggggtgtcctctgagctcctgtccgttgcagcccagacactcctgagctcagacaccaaggctccggggagcagctcctgtggggcagaacggctacacacagttgggggacctggctcagcccggccccgagctttctcccacagcggggtacacagcctggacggcggagaagtagacagtcaggcgctacaggaactgacgcagatggtgtctggccctgcatcgtactctggcccaaagccttctacccagtatggagctccaggaccctttgcagcccctggtgagggaggtgccttggcggccactgggcggcccccgctgctgcccacccgagcttctcgttctcagcgtgcggccagtgaggacatgacgagtgatgaggagcgcatggtcatctgtgaggaggaaggggatgatgatgtcattgctgacgatggcttcggcaccactgacattgatctcaagtgcaaggagcgggtgaccgacagcgagagtggggacagctctggggaggacccagagggcaacaagggctttggtcggaaggtgttttcacctgtgatccgttcctcctttacccactgccgccccccactggaccctgagcccccagggcccccggatcctcctgtagcctttggcaaaggctatggttccgccccatcctcctctgcgtcctcgcctgcttcctcctcagcctcggcagccacctccttctcactgggctcaggaaccttcaaggcccaggagtctggtcagggcagcacagcgggccccctacggcccccaccccctggggctgggggtccagcgacaccttccaaggcaacccggttcctcccaatggatcctgccaccttccggcgcaagagacccgaaagtgtgggtggcctggagccaccaggcccctcagtcatcgcggcccctcccagcggaggaggaaacatcctgcagacactggtgctgcccccaaacaaggaggagcaagagggcggcggagccagagtgccctccgcccccgccccatcactggcctatggggccccagcagctcccctgtcccgtcctgccgccaccatggtcaccaatgtggtgcggcctgtcagcagcactcctgtgcccatcgcctctaagcccttccccacctctggccgggctgaggcgtctccaaatgacacagcaggtgccaggactgaaatgggcactgggtctcgggtgcctgggggctccccgctgggtgtcagcttagtgtattcggacaagaagtcggcagcagccacctcaccagccccacacttggtggctggacccctgctgggcactgtggggaaggcgcctgccactgtcactaacctactggtgggcaccccggggtatggggcccctgcgccccctgctgtccagttcattgcccagggggcccctggtggtgggaccactgcgggctcaggagcaggtgctgggagtggccccaatgggccagtacccctgggcatcctgcaaccaggtgccctgggcaaggctgggggaatcacccaggtacagtacatcctgcccacgctgccccagcagcttcaggtggcacctgccccagcaccagcccctgggaccaaggcagcggctcccagcggccctgcacccaccaccagcatccgtttcaccctcccaccgggcacttccaccaacggcaaagtcctggctgccactgcacccactcctggcatccccatcctgcagtctgtaccctccgccccaccccccaaagcccagtcagtttctcccgtgcaggccccgcccccgggtggctcagcccagctgctgcctgggaaggtcctagtgcctctggccgcccctagcatgtcagtgcggggtggaggggccggccagccactgccactggtgagcccgcccttctcagtacctgtgcagaatggtgcccagccccccagcaagatcatccagctgaccccggtgcctgtgagcacacccagcggcctggtgccgcccctgagcccagccacactccctggacccacctctcagcctcagaaggtcctgttgccctcctccaccagaatcacctatgtgcagtcagcgggcgggcacgcgctgcccctgggtaccagccctgcgtccagccaggctggaacagtcacctcgtacgggcccacgagctctgtagctctaggcttcacctcgctggggcccagcggccccgccttcgtgcagcccctgctctcagcaggccaagccccactgctggctcccggtcaggtgggcgtgtcacctgtgcccagtccccagctgccgcctgcctgtgcagcccccggaggtcctgtcataacagcattttactctggcagccctgcacccacctcctcagcacccctggcccagccatcccaggcccccccaagcctggtctacactgtggccaccagcacaaccccacctgcagccaccattctgcccaagggcccgccagcccctgccactgccaccccagccccgactagccctttccccagcgccacagcaggttccatgacctacagcttagtggcccccaaggcccagcggcccagcccgaaggccccccagaaagtgaaggcagccatcgccagcattcccgtggggtcctttgaggcaggtgcctctgggcggcctggccctgcaccccggcagcctctggagcctggcccagtccgagagccaactgccccagagtctgagcttgaggggcagcccacaccaccagcccctccacccctgccagagacctggactcccacggcccggagcagccccccactgcccccacctgctgaggagcggaccagcgccaagggccctgagaccatggccagcaaattccccagctcatcttcagactggcgcgtccctgggcagggcctggagaatcgtggggagcctcccactcctcccagcccggccccagctccagctgtagcccctggtggcagcagcgagagcagcagtgggcgggcagccggggacaccccggagcgcaaggaggcggctggtactggcaagaaggtgaaggtgcggcccccgcccctgaagaagacctttgactctgtggacaacagggtcctgtcagaagtggacttcgaagagcgctttgctgagttgcctgagtttcggcctgaggaggtgctgccctcccccaccctgcagtctctggccacctcaccccgggccatcctgggctcttaccgcaagaagaggaagaactccacggacctggattcagcacccgaggaccccacctcgcccaagcgcaagatgagaagacgctccagctgcagctcggagcccaacacccccaagagtgccaagtgcgagggggacatcttcacctttgaccgtacaggtacagaagccgaggacgtgcttggggagctagagtatgacaaggtgccatactcctccctgcggcgcaccctggaccagcgccgggccctggtcatgcagctctttcaggaccatggcttcttcccgtcagcccaggccacagccgccttccaggcccgctatgcagacatctttccctccaaggtttgtctgcagttgaagatccgtgaggtgcgccagaagatcatgcaggctgccactcccacggagcagccccctggagctgaggctcctctccctgtaccgccccccactggcaccgctgctgcccctgcccccactcccagccccgcagggggccctgaccccacctcacccagctcggactctggcacggcccaggctgccccgccactgcctccacccccagagtcggggcctggacagcctggctgggagggggctccccagccctcccccccacccccaggtccctccacagctgccacaggcaggtagtaatgaactagtccgtaacttgaaagtatttcgatttcttggctttatatatcttgtggaaaggacgacaaccgccaaaggaccgctgcgac

SEQ ID NO: 2731 - DNA, 1619 bp, Homo sapiens
  source 1..1619: mol_type = genomic DNA
accgccaccatgaccacgctggccggcgctgtgcccaggatgatgcggccgggcccggggcagaactacccgcgtagcgggttcccgctggaagtgtccactcccctcggccagggccgcgtcaaccagctcggcggtgtttttatcaacggcaggccgctgcccaaccacatccgccacaagatcgtggagatggcccaccacggcatccggccctgcgtcatctcgcgccagctgcgcgtgtcccacggctgcgtctccaagatcctgtgcaggtaccaggagactggctccatacgtcctggtgccatcggcggcagcaagcccaagcaggtgacaacgcctgacgtggagaagaaaattgaggaatacaaaagagagaacccgggcatgttcagctgggaaatccgagacaaattactcaaggacgcggtctgtgatcgaaacaccgtgccgtcagtgagttccatcagccgcatcctgagaagtaaattcgggaaaggtgaagaggaggaggccgacttggagaggaaggaggcagaggaaagcgagaagaaggccaaacacagcatcgacggcatcctgagcgagcgagcctcagcaccccaatcagatgaaggctctgatattgactctgaaccagatttaccactaaagaggaaacagcgcagaagccgaaccaccttcacagcagaacagctggaggaactggagcgtgcttttgagagaactcattaccctgacatttatactagggaggaactggcccagagggcgaagctcaccgaggcccgagtacaggtctggtttagcaaccgccgtgcaagatggaggaagcaagctggggccaatcaactgatggctttcaaccatctcattcccggggggttccctcccactgccatgccgaccttgccaacgtaccagctgtcggagacctcttaccagcccacatctattccacaagctgtgtcagatcccagcagcaccgttcacagacctcaaccgcttcctccaagcactgtacaccaaagcacgattccttccaacccagacagcagctctgcctactgcctccccagcaccaggcatggattttccagctatacagacagctttgtgcctccgtcggggccctccaaccccatgaaccccaccattggcaatggcctctcacctcaggtaatgggactcctgaccaaccacggtggggtacctcatcagccccagactgattacgcgctctcccctctcaccgggggtctggaacctaccaccacggtgtcggccagctgcagtcagagactagaccatatgaagagcttggacagtctgccaacatctcagtcctactgtccacccacctatagcaccacaggctacagtatggaccctgtcacaggctaccaatatgggcagtatggacaaagtgcctttcattatctcaagccagatatcgcttggtttcaaatccttttgaacacgttcgacaaaagcagtggagaagaggaagacctggagcaatagtaatgaactagtccgtaacttgaaagtatttcgatttcttggctttatatatcttgtggaaaggacgactcggccctctaccggatcgggta

SEQ ID NO: 2732 - DNA, 1541 bp, Homo sapiens
  source 1..1541: mol_type = genomic DNA
accgccaccatgaccacgctggccggcgctgtgcccaggatgatgcggccgggcccggggcagaactacccgcgtagcgggttcccgctggaagtgtccactcccctcggccagggccgcgtcaaccagctcggcggtgtttttatcaacggcaggccgctgcccaaccacatccgccacaagatcgtggagatggcccaccacggcatccggccctgcgtcatctcgcgccagctgcgcgtgtcccacggctgcgtctccaagatcctgtgcaggtaccaggagactggctccatacgtcctggtgccatcggcggcagcaagcccaagcaggtgacaacgcctgacgtggagaagaaaattgaggaatacaaaagagagaacccgggcatgttcagctgggaaatccgagacaaattactcaaggacgcggtctgtgatcgaaacaccgtgccgtcagtgagttccatcagccgcatcctgagaagtaaattcgggaaaggtgaagaggaggaggccgacttggagaggaaggaggcagaggaaagcgagaagaaggccaaacacagcatcgacggcatcctgagcgagcgagcctcagcaccccaatcagatgaaggctctgatattgactctgaaccagatttaccactaaagaggaaacagcgcagaagccgaaccaccttcacagcagaacagctggaggaactggagcgtgcttttgagagaactcattaccctgacatttatactagggaggaactggcccagagggcgaagctcaccgaggcccgagtacaggtctggtttagcaaccgccgtgcaagatggaggaagcaagctggggccaatcaactgatggctttcaaccatctcattcccggggggttccctcccactgccatgccgaccttgccaacgtaccagctgtcggagacctcttaccagcccacatctattccacaagctgtgtcagatcccagcagcaccgttcacagacctcaaccgcttcctccaagcactgtacaccaaagcacgattccttccaacccagacagcagctctgcctactgcctccccagcaccaggcatggattttccagctatacagacagctttgtgcctccgtcggggccctccaaccccatgaaccccaccattggcaatggcctctcacctcaggtaatgggactcctgaccaaccacggtggggtacctcatcagccccagactgattacgcgctctcccctctcaccgggggtctggaacctaccaccacggtgtcggccagctgcagtcagagactagaccatatgaagagcttggacagtctgccaacatctcagtcctactgtccacccacctatagcaccacaggctacagtatggaccctgtcacaggctaccaatatgggcagtatggacaaagtaagccttggactttttagtaatgaactagtccgtaacttgaaagtatttcgatttcttggctttatatatcttgtggaaaggacgaagtctttgggtgtctgttacgtgg

SEQ ID NO: 2733 - DNA, 1313 bp, Homo sapiens
  source 1..1313: mol_type = genomic DNA
accgccaccatgaccacgctggccggcgctgtgcccaggatgatgcggccgggcccggggcagaactacccgcgtagcgggttcccgctggaagtgtccactcccctcggccagggccgcgtcaaccagctcggcggtgtttttatcaacggcaggccgctgcccaaccacatccgccacaagatcgtggagatggcccaccacggcatccggccctgcgtcatctcgcgccagctgcgcgtgtcccacggctgcgtctccaagatcctgtgcaggtaccaggagactggctccatacgtcctggtgccatcggcggcagcaagcccaagcaggtgacaacgcctgacgtggagaagaaaattgaggaatacaaaagagagaacccgggcatgttcagctgggaaatccgagacaaattactcaaggacgcggtctgtgatcgaaacaccgtgccgtcagtgagttccatcagccgcatcctgagaagtaaattcgggaaaggtgaagaggaggaggccgacttggagaggaaggaggcagaggaaagcgagaagaaggccaaacacagcatcgacggcatcctgagcgagcgagcctcagcaccccaatcagatgaaggctctgatattgactctgaaccagatttaccactaaagaggaaacagcgcagaagccgaaccaccttcacagcagaacagctggaggaactggagcgtgcttttgagagaactcattaccctgacatttatactagggaggaactggcccagagggcgaagctcaccgaggcccgagtacaggtctggtttagcaaccgccgtgcaagatggaggaagcaagctggggccaatcaactgatggctttcaaccatctcattcccggggggttccctcccactgccatgccgaccttgccaacgtaccagctgtcggagacctcttaccagcccacatctattccacaagctgtgtcagatcccagcagcaccgttcacagacctcaaccgcttcctccaagcactgtacaccaaagcacgattccttccaacccagacagcagctctgcctactgcctccccagcaccaggcatggattttccagctatacagacagctttgtgcctccgtcggggccctccaaccccatgaaccccaccattggcaatggcctctcacctcaggtgcctttcattatctcaagccagatatcgcgtaagtagtaatgaactagtccgtaacttgaaagtatttcgatttcttggctttatatatcttgtggaaaggacgatggtagtgattgttcaatctatga

SEQ ID NO: 2734 - DNA, 722 bp, Homo sapiens
  source 1..722: mol_type = genomic DNA
accgccaccatgaccacgctggccggcgctgtgcccaggatgatgcggccgggcccggggcagaactacccgcgtagcgggttcccgctggaagtgtccactcccctcggccagggccgcgtcaaccagctcggcggtgtttttatcaacggcaggccgctgcccaaccacatccgccacaagatcgtggagatggcccaccacggcatccggccctgcgtcatctcgcgccagctgcgcgtgtcccacggctgcgtctccaagatcctgtgcaggtaccaggagactggctccatacgtcctggtgccatcggcggcagcaagcccaagcaggtgacaacgcctgacgtggagaagaaaattgaggaatacaaaagagagaacccgggcatgttcagctgggaaatccgagacaaattactcaaggacgcggtctgtgatcgaaacaccgtgccgtcagtgagttccatcagccgcatcctgagaagtaaattcgggaaaggtgaagaggaggaggccgacttggagaggaaggaggcagaggaaagcgagaagaaggccaaacacagcatcgacggcatcctgagcgagcgaggaaaggccctggtctccggagtttcctcgcattagtaatgaactagtccgtaacttgaaagtatttcgatttcttggctttatatatcttgtggaaaggacgatttgatatcgtacttctcacaaat

SEQ ID NO: 2735 - DNA, 1553 bp, Homo sapiens
  source 1..1553: mol_type = genomic DNA
accgccaccatgaccacgctggccggcgctgtgcccaggatgatgcggccgggcccggggcagaactacccgcgtagcgggttcccgctggaagtgtccactcccctcggccagggccgcgtcaaccagctcggcggtgtttttatcaacggcaggccgctgcccaaccacatccgccacaagatcgtggagatggcccaccacggcatccggccctgcgtcatctcgcgccagctgcgcgtgtcccacggctgcgtctccaagatcctgtgcaggtaccaggagactggctccatacgtcctggtgccatcggcggcagcaagcccaaggtgacaacgcctgacgtggagaagaaaattgaggaatacaaaagagagaacccgggcatgttcagctgggaaatccgagacaaattactcaaggacgcggtctgtgatcgaaacaccgtgccgtcagtgagttccatcagccgcatcctgagaagtaaattcgggaaaggtgaagaggaggaggccgacttggagaggaaggaggcagaggaaagcgagaagaaggccaaacacagcatcgacggcatcctgagcgagcgagcctcagcaccccaatcagatgaaggctctgatattgactctgaaccagatttaccactaaagaggaaacagcgcagaagccgaaccaccttcacagcagaacagctggaggaactggagcgtgcttttgagagaactcattaccctgacatttatactagggaggaactggcccagagggcgaagctcaccgaggcccgagtacaggtctggtttagcaaccgccgtgcaagatggaggaagcaagctggggccaatcaactgatggctttcaaccatctcattcccggggggttccctcccactgccatgccgaccttgccaacgtaccagctgtcggagacctcttaccagcccacatctattccacaagctgtgtcagatcccagcagcaccgttcacagacctcaaccgcttcctccaagcactgtacaccaaagcacgattccttccaacccagacagcagctctgcctactgcctccccagcaccaggcatggattttccagctatacagacagctttgtgcctccgtcggggccctccaaccccatgaaccccaccattggcaatggcctctcacctcaggtaatgggactcctgaccaaccacggtggggtacctcatcagccccagactgattacgcgctctcccctctcaccgggggtctggaacctaccaccacggtgtcggccagctgcagtcagagactagaccatatgaagagcttggacagtctgccaacatctcagtcctactgtccacccacctatagcaccacaggctacagtatggaccctgtcacaggctaccaatatgggcagtatggacaaagtgcctttcattatctcaagccagatatcgcgtagtaatgaactagtccgtaacttgaaagtatttcgatttcttggctttatatatcttgtggaaaggacgacgatgatcagggctgcgcccgtac

SEQ ID NO: 2736 - DNA, 1556 bp, Homo sapiens
  source 1..1556: mol_type = genomic DNA
accgccaccatgaccacgctggccggcgctgtgcccaggatgatgcggccgggcccggggcagaactacccgcgtagcgggttcccgctggaagtgtccactcccctcggccagggccgcgtcaaccagctcggcggtgtttttatcaacggcaggccgctgcccaaccacatccgccacaagatcgtggagatggcccaccacggcatccggccctgcgtcatctcgcgccagctgcgcgtgtcccacggctgcgtctccaagatcctgtgcaggtaccaggagactggctccatacgtcctggtgccatcggcggcagcaagcccaagcaggtgacaacgcctgacgtggagaagaaaattgaggaatacaaaagagagaacccgggcatgttcagctgggaaatccgagacaaattactcaaggacgcggtctgtgatcgaaacaccgtgccgtcagtgagttccatcagccgcatcctgagaagtaaattcgggaaaggtgaagaggaggaggccgacttggagaggaaggaggcagaggaaagcgagaagaaggccaaacacagcatcgacggcatcctgagcgagcgagcctcagcaccccaatcagatgaaggctctgatattgactctgaaccagatttaccactaaagaggaaacagcgcagaagccgaaccaccttcacagcagaacagctggaggaactggagcgtgcttttgagagaactcattaccctgacatttatactagggaggaactggcccagagggcgaagctcaccgaggcccgagtacaggtctggtttagcaaccgccgtgcaagatggaggaagcaagctggggccaatcaactgatggctttcaaccatctcattcccggggggttccctcccactgccatgccgaccttgccaacgtaccagctgtcggagacctcttaccagcccacatctattccacaagctgtgtcagatcccagcagcaccgttcacagacctcaaccgcttcctccaagcactgtacaccaaagcacgattccttccaacccagacagcagctctgcctactgcctccccagcaccaggcatggattttccagctatacagacagctttgtgcctccgtcggggccctccaaccccatgaaccccaccattggcaatggcctctcacctcaggtaatgggactcctgaccaaccacggtggggtacctcatcagccccagactgattacgcgctctcccctctcaccgggggtctggaacctaccaccacggtgtcggccagctgcagtcagagactagaccatatgaagagcttggacagtctgccaacatctcagtcctactgtccacccacctatagcaccacaggctacagtatggaccctgtcacaggctaccaatatgggcagtatggacaaagtgcctttcattatctcaagccagatatcgcgtagtaatgaactagtccgtaacttgaaagtatttcgatttcttggctttatatatcttgtggaaaggacgaccgagcgttagtcctgcctcatcg

SEQ ID NO: 2737 - DNA, 1325 bp, Homo sapiens
  source 1..1325: mol_type = genomic DNA
accgccaccatgaccacgctggccggcgctgtgcccaggatgatgcggccgggcccggggcagaactacccgcgtagcgggttcccgctggaagtgtccactcccctcggccagggccgcgtcaaccagctcggcggtgtttttatcaacggcaggccgctgcccaaccacatccgccacaagatcgtggagatggcccaccacggcatccggccctgcgtcatctcgcgccagctgcgcgtgtcccacggctgcgtctccaagatcctgtgcaggtaccaggagactggctccatacgtcctggtgccatcggcggcagcaagcccaagcaggtgacaacgcctgacgtggagaagaaaattgaggaatacaaaagagagaacccgggcatgttcagctgggaaatccgagacaaattactcaaggacgcggtctgtgatcgaaacaccgtgccgtcagtgagttccatcagccgcatcctgagaagtaaattcgggaaaggtgaagaggaggaggccgacttggagaggaaggaggcagaggaaagcgagaagaaggccaaacacagcatcgacggcatcctgagcgagcgagcctcagcaccccaatcagatgaaggctctgatattgactctgaaccagatttaccactaaagaggaaacagcgcagaagccgaaccaccttcacagcagaacagctggaggaactggagcgtgcttttgagagaactcattaccctgacatttatactagggaggaactggcccagagggcgaagctcaccgaggcccgagtacaggtctggtttagcaaccgccgtgcaagatggaggaagcaagctggggccaatcaactgatggctttcaaccatctcattcccggggggttccctcccactgccatgccgaccttgccaacgtaccagctgtcggagacctcttaccagcccacatctattccacaagctgtgtcagatcccagcagcaccgttcacagacctcaaccgcttcctccaagcactgtacaccaaagcacgattccttccaacccagacagcagctctgcctactgcctccccagcaccaggcatggattttccagctatacagacagctttgtgcctccgtcggggccctccaaccccatgaaccccaccattggcaatggcctctcacctcaggtgcctttcattatctcaagccagatatcgcttggtttcaaatccttttagtaatgaactagtccgtaacttgaaagtatttcgatttcttggctttatatatcttgtggaaaggacgattcggctgaccgtgtcttaacaac

SEQ ID NO: 2738 - DNA, 749 bp, Homo sapiens
  source 1..749: mol_type = genomic DNA
accgccaccatgaccacgctggccggcgctgtgcccaggatgatgcggccgggcccggggcagaactacccgcgtagcgggttcccgctggaagtgtccactcccctcggccagggccgcgtcaaccagctcggcggtgtttttatcaacggcaggccgctgcccaaccacatccgccacaagatcgtggagatggcccaccacggcatccggccctgcgtcatctcgcgccagctgcgcgtgtcccacggctgcgtctccaagatcctgtgcaggtaccaggagactggctccatacgtcctggtgccatcggcggcagcaagcccaagcaggtgacaacgcctgacgtggagaagaaaattgaggaatacaaaagagagaacccgggcatgttcagctgggaaatccgagacaaattactcaaggacgcggtctgtgatcgaaacaccgtgccgtcagtgagttccatcagccgcatcctgagaagtaaattcgggaaaggtgaagaggaggaggccgacttggagaggaaggaggcagaggaaagcgagaagaaggccaaacacagcatcgacggcatcctgagcgagcgaggtaagcggtggcgccttgggcggcgcacttgctgggtgacttggagggcatcggctagctagtaatgaactagtccgtaacttgaaagtatttcgatttcttggctttatatatcttgtggaaaggacgaaggaggcgtgaacgtattgacgta

SEQ ID NO: 2739 - DNA, 1310 bp, Homo sapiens
  source 1..1310: mol_type = genomic DNA
accgccaccatggcggcagcagccgctctgagggcgcctgctcagagcagtgtgacctttgaagatgtggctgtaaacttttccctggaggaatggagtcttcttaatgaggctcagagatgcctgtaccgtgacgtgatgctggagaccttgacacttatatcctccctgggttgttggcatggaggggaagatgaggcagcaccttctaagcagagcacgtgtatacatatatacaaagaccagggaggtcatagtggagaaaggccttatgagtgtggggaatataggaaattatttaagaacaagtcctgcctcactgaacccagaagagatcacaaacacaggaatgttcgcactggagaaaggccttatgagtgcagcaaatatgggaaattatttcaccaaaagcctacactccatattcatgagagatttcatactgggcaaaagacctatgagtgcagtgagtgtggaaaatcatttcaccaaagctcttcactcttgcagcgtcagacacttcacactagagaaaggccttatgagtgtattgaatgtgggaaagcctttgctgaaaagtccagtctcattaaccacaggaaagttcactctggagcaaagcgttatgaatgcaatgaatgtgggaagtcctttgcttatacatctagtctcattaaacacaggaggattcacactggagagaggccttatgagtgcagtgaatgtgggagatcctttgctgaaaactccagtcttattaaacacttgagagttcacacaggagaaaggccttatgaatgcgttgagtgtggaaaatcatttcgccgaagctcttcactcttgcagcatcagagagttcacactagagaaaggccttatgaatgtagtgaatgtgggaaatcctttagcttaaggtccaacctcattcaccatcagcgagttcatactggagaaaggcatgagtgcgggcagtgtgggaaatcctttagccgaaaatctagccttattatacatctgagagttcacactggagaaaggccttatgagtgcagtgactgtgggaaatcctttgctgaaaactccagccttattaaacacttgagagttcacactggagaaaggccatatgaatgcattgattgtggaaaatcatttcgccacagttcttcgttccgtcgccatcagagagttcatactggaatgaggccttataagtagtaatgaactagtccgtaacttgaaagtatttcgatttcttggctttatatatcttgtggaaaggacgaggagcgctagaatggtccgtctca

SEQ ID NO: 2740 - DNA, 1181 bp, Homo sapiens
  source 1..1181: mol_type = genomic DNA
accgccaccatgctggagaccttgacacttatatcctccctgggttgttggcatggaggggaagatgaggcagcaccttctaagcagagcacgtgtatacatatatacaaagaccagggaggtcatagtggagaaaggccttatgagtgtggggaatataggaaattatttaagaacaagtcctgcctcactgaacccagaagagatcacaaacacaggaatgttcgcactggagaaaggccttatgagtgcagcaaatatgggaaattatttcaccaaaagcctacactccatattcatgagagatttcatactgggcaaaagacctatgagtgcagtgagtgtggaaaatcatttcaccaaagctcttcactcttgcagcgtcagacacttcacactagagaaaggccttatgagtgtattgaatgtgggaaagcctttgctgaaaagtccagtctcattaaccacaggaaagttcactctggagcaaagcgttatgaatgcaatgaatgtgggaagtcctttgcttatacatctagtctcattaaacacaggaggattcacactggagagaggccttatgagtgcagtgaatgtgggagatcctttgctgaaaactccagtcttattaaacacttgagagttcacacaggagaaaggccttatgaatgcgttgagtgtggaaaatcatttcgccgaagctcttcactcttgcagcatcagagagttcacactagagaaaggccttatgaatgtagtgaatgtgggaaatcctttagcttaaggtccaacctcattcaccatcagcgagttcatactggagaaaggcatgagtgcgggcagtgtgggaaatcctttagccgaaaatctagccttattatacatctgagagttcacactggagaaaggccttatgagtgcagtgactgtgggaaatcctttgctgaaaactccagccttattaaacacttgagagttcacactggagaaaggccatatgaatgcattgattgtggaaaatcatttcgccacagttcttcgttccgtcgccatcagagagttcatactggaatgaggccttataagtagtaatgaactagtccgtaacttgaaagtatttcgatttcttggctttatatatcttgtggaaaggacgactcggctatcccatcgtgcagtat

SEQ ID NO: 2741 - DNA, 2285 bp, Homo sapiens
  source 1..2285: mol_type = genomic DNA
accgccaccatggaaagtgaagacacaaagaaaacacaagaaatgaagactgacctgaacttattattggagtgtctaaagtatcaaatggacaatgctttttcacaaaaggaagctttggtcactattcattcaatttgtcaacaaaacagtaatgcaagtgtttattttcgggaaattggtggtttgatgtttgtaaaaaatcttgcaaagtcaagtgaacatagcatggtaaaagaagcagccttatatacattaggagctattgcagagaaaaatgtttactgtcagcagactttgtgtacttcagagttgtttgaagacttaacttggttcttatctaatgattcaaacataaatttgaaaagaatgtctgtttatgttattttggttctggtttcaaataataggaccggacaaacacttgtgagagaaacaggttgtattacagttctgtcacggttattcaggacagttatttcaaaacatgagttggatttgtcagataaaaatgttttccagagttatcagttgtggtcttcagtgtgtagtactctgtgtgtctgtgtcaacaatcctcaaaatgatgagaatcaaatgttttgctgttccctttttccacatgctaatgaatggctaaaaaattgcacgacacctgagataattcgccctatttgctcatttattggactcactcttgcaaataacacatatgttcagaaatacttcgtatctgtgggcggactggatgtattgtctcaagttctcatgcagctggaatctgattcacatgagactctttccagtgctaaacttgcagtggttgtgacgaagactgtggatgcatgcattgctgataatcctacttttgggatagtactctccaagtaccacattgtttctaaacttctggcattactgcttcatgaaagtctggattcaggagaaaaatttagcatcatgcttactcttggtcattgcacagaggattgtgaggaaaatcagtatgacctttttaaaaacaatgggcttccactcatgattcaagccttaactgaatcgcagaatgaggaactgaacaaagctgccacatttgtgcttcacaactgcaaaaaaattactgagaaattatctctaagtctaggagaatatccttttgatgaaaatgaaacacagcaattaaaggacataagtgtgaaggagaataatcttgaagagcactggaggaaagcaaaggaaattctacacagaatagaacagcttgaaagagaaggaaatgaggaagaaatacaaagagaaaactatcaggataatatttcatctatgaacataagtattcagaatacatggaaacatctccatgcagatcggattggtcgaggtagcaaagcagaagatgaggataaaagccattctagacagttacagagttataagtcccatggagtcatgtctaaagcatgtacaaatgatgaccaaatgaagacaccgttaaagagcgcaaatccagtccatgcttgttacagggagagtgagcaaaataagactttatataaagccaagtcaagctgcaatcaaaacttacatgaagaaactacttttgaaaagaattttgtttctcaatcaagtgaccatgtttttaaacacccagttcacattgccaaaaatataaagcagcagttaccagtaacagatccatttacattatgttcagatataataaataaagaagtagtcagttttctagcaactcccagttgttccgaaatgttgacgtataggtgctcaggttgcatagcagtagaaaaatccctgaatagccgaaactttagcaagctcttgcactcttgcccataccaatgtgatcgtcacaaagtcattgtggaagctgaagacagatataaaagtgaactaaggaaatcacttatctgtaacaaaaaaattctgctgaccccacgtagaagacaacgactcagtaatgaatctactacccctggaggaataaaaaaaagaagaattcgcaaaaactttactgaagaagaagtaaattaccttttcaatggagttaagaaaatgggaaatcactggaattcaattttgtggtctttcccctttcagcaaggacggaaggctgtggaccttgctcacaaataccacaagctgaccaaacaccccacgtgtgcagcttcttagtaatgaactagtccgtaacttgaaagtatttcgatttcttggctttatatatcttgtggaaaggacgagcaccaaatccgtgacaggagggt

SEQ ID NO: 2742 - DNA, 2012 bp, Homo sapiens
  source 1..2012: mol_type = genomic DNA
accgccaccatggcggcggaagaggaggctgcggcgggaggtaaagtgttgagagaggagaaccagtgcattgctcctgtggtttccagccgcgtgagtccagggacaagaccaacagctatggggtctttcagctcacacatgacagagtttccacgaaaacgcaaaggaagtgattcagacccatcccagtcaggaatcatgacagaaaaagtggtggaaaagctttctcagaatccccttacctatcttctttcaacaaggatagaaatatcagcctccagtggcagcagagtggaagatggtgaacaccaagttaaaatgaaggccttcagagaagctcatagccaaactgaaaagcggaggagagataaaatgaataacctgattgaagaactgtctgcaatgatccctcagtgcaaccccatggcgcgtaaactggacaaacttacagttttaagaatggctgttcaacacttgagatctttaaaaggcttgacaaattcttatgtgggaagtaattatagaccatcatttcttcaggataatgagctcagacatttaatccttaagactgcagaaggcttcttatttgtggttggatgtgaaagaggaaaaattctcttcgtttctaagtcagtctccaaaatacttaattatgatcaggctagtttgactggacaaagcttatttgacttcttacatccaaaagatgttgccaaagtaaaggaacaactttcttcttttgatatttcaccaagagaaaagctaatagatgccaaaactggtttgcaagttcacagtaatctccacgctggaaggacacgtgtgtattctggctcaagacgatcttttttctgtcggataaagagttgtaaaatctctgtcaaagaagagcatggatgcttacccaactcaaagaagaaagagcacagaaaattctatactatccattgcactggttacttgagaagctggcctccaaatattgttggaatggaagaagaaaggaacagtaagaaagacaacagtaattttacctgccttgtggccattggaagattacagccatatattgttccacagaacagtggagagattaatgtgaaaccaactgaatttataacccggtttgcagtgaatggaaaatttgtctatgtagatcaaagggcaacagcgattttaggatatctgcctcaggaacttttgggaacttcttgttatgaatattttcatcaagatgaccacaataatttgactgacaagcacaaagcagttctacagagtaaggagaaaatacttacagattcctacaaattcagagcaaaagatggctcttttgtaactttaaaaagccaatggtttagtttcacaaatccttggacaaaagaactggaatatattgtatctgtcaacactttagttttgggacatagtgagcctggagaagcatcatttttaccttgtagctctcaatcatcagaagaatcctctagacagtcctgtatgagtgtacctggaatgtctactggaacagtacttggtgctggtagtattggaacagatattgcaaatgaaattctggatttacagaggttacagtcttcttcataccttgatgattcgagtccaacaggtttaatgaaagatactcatactgtaaactgcaggagtatgtcaaataaggagttgtttccaccaagtccttctgaaatgggggagctagaggctaccaggcaaaaccagagtactgttgctgtccacagccatgagccactcctcagtgatggtgcacagttggatttcgatgccctatgtgacaatgatgacacagccatggctgcatttatgaattacttagaagcagaggggggcctgggagaccctggggacttcagtgacatccagtggaccctctagtaatgaactagtccgtaacttgaaagtatttcgatttcttggctttatatatcttgtggaaaggacgatagacggagtacgtcgcccgtacg

SEQ ID NO: 2743 - DNA, 1970 bp, Homo sapiens
  source 1..1970: mol_type = genomic DNA
accgccaccatggcggcggaagaggaggctgcggcgggaggtaaagtgttgagagaggagaaccagtgcattgctcctgtggtttccagccgcgtgagtccagggacaagaccaacagctatggggtctttcagctcacacatgacagagtttccacgaaaacgcaaaggaagtgattcagacccatcccagtcaggaatcatgacagaaaaagtggtggaaaagctttctcagaatccccttacctatcttctttcaacaaggatagaaatatcagcctccagtggcagcagagaagctcatagccaaactgaaaagcggaggagagataaaatgaataacctgattgaagaactgtctgcaatgatccctcagtgcaaccccatggcgcgtaaactggacaaacttacagttttaagaatggctgttcaacacttgagatctttaaaaggcttgacaaattcttatgtgggaagtaattatagaccatcatttcttcaggataatgagctcagacatttaatccttaagactgcagaaggcttcttatttgtggttggatgtgaaagaggaaaaattctcttcgtttctaagtcagtctccaaaatacttaattatgatcaggctagtttgactggacaaagcttatttgacttcttacatccaaaagatgttgccaaagtaaaggaacaactttcttcttttgatatttcaccaagagaaaagctaatagatgccaaaactggtttgcaagttcacagtaatctccacgctggaaggacacgtgtgtattctggctcaagacgatcttttttctgtcggataaagagttgtaaaatctctgtcaaagaagagcatggatgcttacccaactcaaagaagaaagagcacagaaaattctatactatccattgcactggttacttgagaagctggcctccaaatattgttggaatggaagaagaaaggaacagtaagaaagacaacagtaattttacctgccttgtggccattggaagattacagccatatattgttccacagaacagtggagagattaatgtgaaaccaactgaatttataacccggtttgcagtgaatggaaaatttgtctatgtagatcaaagggcaacagcgattttaggatatctgcctcaggaacttttgggaacttcttgttatgaatattttcatcaagatgaccacaataatttgactgacaagcacaaagcagttctacagagtaaggagaaaatacttacagattcctacaaattcagagcaaaagatggctcttttgtaactttaaaaagccaatggtttagtttcacaaatccttggacaaaagaactggaatatattgtatctgtcaacactttagttttgggacatagtgagcctggagaagcatcatttttaccttgtagctctcaatcatcagaagaatcctctagacagtcctgtatgagtgtacctggaatgtctactggaacagtacttggtgctggtagtattggaacagatattgcaaatgaaattctggatttacagaggttacagtcttcttcataccttgatgattcgagtccaacaggtttaatgaaagatactcatactgtaaactgcaggagtatgtcaaataaggagttgtttccaccaagtccttctgaaatgggggagctagaggctaccaggcaaaaccagagtactgttgctgtccacagccatgagccactcctcagtgatggtgcacagttggatttcgatgccctatgtgacaatgatgacacagccatggctgcatttatgaattacttagaagcagaggggggcctgggagaccctggggacttcagtgacatccagtggaccctctagtaatgaactagtccgtaacttgaaagtatttcgatttcttggctttatatatcttgtggaaaggacgaatagacgcgatggtaactatattt

SEQ ID NO: 2744 - DNA, 1724 bp, Homo sapiens
  source 1..1724: mol_type = genomic DNA
accgccaccatggcggcggaagaggaggctgcggcgggaggtgaggttgccggtggcgaggcgacggccccaggtaaagtgttgagagaggagaaccagtgcattgctcctgtggtttccagccgcgtgagtccagggacaagaccaacagctatggggtctttcagctcacacatgacagagtttccacgaaaacgcaaaggaagtgattcagacccatcccaagaagctcatagccaaactgaaaagcggaggagagataaaatgaataacctgattgaagaactgtctgcaatgatccctcagtgcaaccccatggcgcgtaaactggacaaacttacagttttaagaatggctgttcaacacttgagatctttaaaaggcttgacaaattcttatgtgggaagtaattatagaccatcatttcttcaggataatgagctcagacatttaatccttaagactgcagaaggcttcttatttgtggttggatgtgaaagaggaaaaattctcttcgtttctaagtcagtctccaaaatacttaattatgatcaggctagtttgactggacaaagcttatttgacttcttacatccaaaagatgttgccaaagtaaaggaacaactttcttcttttgatatttcaccaagagaaaagctaatagatgccaaaactggtttgcaagttcacagtaatctccacgctggaaggacacgtgtgtattctggctcaagacgatcttttttctgtcggataaagagttgtaaaatctctgtcaaagaagagcatggatgcttacccaactcaaagaagaaagagcacagaaaattctatactatccattgcactggttacttgagaagctggcctccaaatattgttggaatggaagaagaaaggaacagtaagaaagacaacagtaattttacctgccttgtggccattggaagattacagccatatattgttccacagaacagtggagagattaatgtgaaaccaactgaatttataacccggtttgcagtgaatggaaaatttgtctatgtagatcaaagggcaacagcgattttaggatatctgcctcaggaacttttgggaacttcttgttatgaatattttcatcaagatgaccacaataatttgactgacaagcacaaagcagttctacagagtaaggagaaaatacttacagattcctacaaattcagagcaaaagatggctcttttgtaactttaaaaagccaatggtttagtttcacaaatccttggacaaaagaactggaatatattgtatctgtcaacactttagttttgggacatagtgagcctggagaagcatcatttttaccttgtagctctcaatcatcagaagaatcctctagacagtcctgtatgagtgtacctggaatgtctactggaacagtacttggtgctggtagtattggaacagatattgcaaatgaaattctggatttacagaggttacagtcttcttcataccttgatgattcgagtccaacaggtttaatgaaagatactcatactgtaaactgcaggagtgtgatggtgcacagttggatttcgatgccctatgtgacaatgatgacacagccatggctgcatttatagtaatgaactagtccgtaacttgaaagtatttcgatttcttggctttatatatcttgtggaaaggacgatttgtatccgagactttcaattgt

SEQ ID NO: 2745 - DNA, 2315 bp, Homo sapiens
  source 1..2315: mol_type = genomic DNA
accgccaccatggaacagttccgccacttgccaatgcctttccactggaagcaggaagaactcaagtttaagacaggcttgcggaggctgcagcaccgagtaggggagatccaccttctccgagaagccctgcagaagggggctgaggctggccaagtgtctctgcacagcttgatagaaactcctgctaatgggactgggccaagtgaggccctggccatgctactgcaggagaccactggagagctagaggcagccaaagccctagtgctgaagaggatccagatttggaaacggcagcagcagctggcagggaatggcgcaccgtttgaggagagcctggccccactccaggagaggtgtgaaagcctggtggacatttattcccagctacagcaggaggtaggggcggctggtggggagcttgagcccaagacccgggcatcgctgactggccggctggatgaagtcctgagaaccctcgtcaccagttgcttcctggtggagaagcagcccccccaggtactgaagactcagaccaagttccaggctggagttcgattcctgttgggcttgaggttcctgggggccccagccaagcctccgctggtcagggccgacatggtgacagagaagcaggcgcgggagctgagtgtgcctcagggtcctggggctggagcagaaagcactggagaaatcatcaacaacactgtgcccttggagaacagcattcctgggaactgctgctctgccctgttcaagaacctgcttctcaagaagatcaagcggtgtgagcggaagggcactgagtctgtcacagaggagaagtgcgctgtgctcttctctgccagcttcacacttggccccggcaaactccccatccagctccaggccctgtctctgcccctggtggtcatcgtccatggcaaccaagacaacaatgccaaagccactatcctgtgggacaatgccttctctgagatggaccgcgtgccctttgtggtggctgagcgggtgccctgggagaagatgtgtgaaactctgaacctgaagttcatggctgaggtggggaccaaccgggggctgctcccagagcacttcctcttcctggcccagaagatcttcaatgacaacagcctcagtatggaggccttccagcaccgttctgtgtcctggtcgcagttcaacaaggagatcctgctgggccgtggcttcaccttttggcagtggtttgatggtgtcctggacctcaccaaacgctgtctccggagctactggtctgaccggctgatcattggcttcatcagcaaacagtacgttactagccttcttctcaatgagcccgacggaacctttctcctccgcttcagcgactcagagattgggggcatcaccattgcccatgtcatccggggccaggatggctctccacagatagagaacatccagccattctctgccaaagacctgtccattcgctcactgggggaccgaatccgggatcttgctcagctcaaaaatctctatcccaagaagcccaaggatgaggctttccggagccactacaagcctgaacagatgggtaaggatggcaggggttatgtcccagctaccatcaagatgaccgtggaaagggaccaaccacttcctaccccagagctccagatgcctaccatggtgccttcttatgaccttggaatggcccctgattcctccatgagcatgcagcttggcccagatatggtgccccaggtgtacccaccacactctcactccatccccccgtatcaaggcctctccccagaagaatcagtcaacgtgttgtcagccttccaggagcctcacctgcagatgccccccagcctgggccagatgagcctgccctttgaccagcctcacccccagggcctgctgccgtgccagcctcaggagcatgctgtgtccagccctgaccccctgctctgctcagatgtgaccatggtggaagacagctgcctgagccagccagtgacagcgtttcctcagggcacttggattggtgaagacatattccctcctctgctgcctcccactgaacaggacctcactaagcttctcctggaggggcaaggggagtcggggggagggtccttgggggcacagcccctcctgcagccctcccactatgggcaatctgggatctcaatgtcccacatggacctaagggccaaccccagttggtagtaatgaactagtccgtaacttgaaagtatttcgatttcttggctttatatatcttgtggaaaggacgatgttacgatgagcagctaattgag

SEQ ID NO: 2746 - DNA, 2270 bp, Homo sapiens
  source 1..2270: mol_type = genomic DNA
accgccaccatggcccaatggaatcagctacagcagcttgacacacggtacctggagcagctccatcagctctacagtgacagcttcccaatggagctgcggcagtttctggccccttggattgagagtcaagattgggcatatgcggccagcaaagaatcacatgccactttggtgtttcataatctcctgggagagattgaccagcagtatagccgcttcctgcaagagtcgaatgttctctatcagcacaatctacgaagaatcaagcagtttcttcagagcaggtatcttgagaagccaatggagattgcccggattgtggcccggtgcctgtgggaagaatcacgccttctacagactgcagccactgcggcccagcaagggggccaggccaaccaccccacagcagccgtggtgacggagaagcagcagatgctggagcagcaccttcaggatgtccggaagagagtgcaggatctagaacagaaaatgaaagtggtagagaatctccaggatgactttgatttcaactataaaaccctcaagagtcaaggagacatgcaagatctgaatggaaacaaccagtcagtgaccaggcagaagatgcagcagctggaacagatgctcactgcgctggaccagatgcggagaagcatcgtgagtgagctggcggggcttttgtcagcgatggagtacgtgcagaaaactctcacggacgaggagctggctgactggaagaggcggcaacagattgcctgcattggaggcccgcccaacatctgcctagatcggctagaaaactggataacgtcattagcagaatctcaacttcagacccgtcaacaaattaagaaactggaggagttgcagcaaaaagtttcctacaaaggggaccccattgtacagcaccggccgatgctggaggagagaatcgtggagctgtttagaaacttaatgaaaagtgcctttgtggtggagcggcagccctgcatgcccatgcatcctgaccggcccctcgtcatcaagaccggcgtccagttcactactaaagtcaggttgctggtcaaattccctgagttgaattatcagcttaaaattaaagtgtgcattgacaaagactctggggacgttgcagctctcagaggatcccggaaatttaacattctgggcacaaacacaaaagtgatgaacatggaagaatccaacaacggcagcctctctgcagaattcaaacacttgaccctgagggagcagagatgtgggaatgggggccgagccaattgtgatgcttccctgattgtgactgaggagctgcacctgatcacctttgagaccgaggtgtatcaccaaggcctcaagattgacctagagacccactccttgccagttgtggtgatctccaacatctgtcagatgccaaatgcctgggcgtccatcctgtggtacaacatgctgaccaacaatcccaagaatgtaaacttttttaccaagcccccaattggaacctgggatcaagtggccgaggtcctgagctggcagttctcctccaccaccaagcgaggactgagcatcgagcagctgactacactggcagagaaactcttgggacctggtgtgaattattcagggtgtcagatcacatgggctaaattttgcaaagaaaacatggctggcaagggcttctccttctgggtctggctggacaatatcattgaccttgtgaaaaagtacatcctggccctttggaacgaagggtacatcatgggctttatcagtaaggagcgggagcgggccatcttgagcactaagcctccaggcaccttcctgctaagattcagtgaaagcagcaaagaaggaggcgtcactttcacttgggtggagaaggacatcagcggtaagacccagatccagtccgtggaaccatacacaaagcagcagctgaacaacatgtcatttgctgaaatcatcatgggctataagatcatggatgctaccaatatcctggtgtctccactggtctatctctatcctgacattcccaaggaggaggcattcggaaagtattgtcggccagagagccaggagcatcctgaagctgacccaggtagcgctgccccatacctgaagaccaagtttatctgtgtgacaccattcattgatgcagtttggaaatagtaatgaactagtccgtaacttgaaagtatttcgatttcttggctttatatatcttgtggaaaggacgatgcgaagacccggttccatatcgt

SEQ ID NO: 2747 - DNA, 2411 bp, Homo sapiens
  source 1..2411: mol_type = genomic DNA
accgccaccatggcccaatggaatcagctacagcagcttgacacacggtacctggagcagctccatcagctctacagtgacagcttcccaatggagctgcggcagtttctggccccttggattgagagtcaagattgggcatatgcggccagcaaagaatcacatgccactttggtgtttcataatctcctgggagagattgaccagcagtatagccgcttcctgcaagagtcgaatgttctctatcagcacaatctacgaagaatcaagcagtttcttcagagcaggtatcttgagaagccaatggagattgcccggattgtggcccggtgcctgtgggaagaatcacgccttctacagactgcagccactgcggcccagcaagggggccaggccaaccaccccacagcagccgtggtgacggagaagcagcagatgctggagcagcaccttcaggatgtccggaagagagtgcaggatctagaacagaaaatgaaagtggtagagaatctccaggatgactttgatttcaactataaaaccctcaagagtcaaggagacatgcaagatctgaatggaaacaaccagtcagtgaccaggcagaagatgcagcagctggaacagatgctcactgcgctggaccagatgcggagaagcatcgtgagtgagctggcggggcttttgtcagcgatggagtacgtgcagaaaactctcacggacgaggagctggctgactggaagaggcggcaacagattgcctgcattggaggcccgcccaacatctgcctagatcggctagaaaactggataacgtcattagcagaatctcaacttcagacccgtcaacaaattaagaaactggaggagttgcagcaaaaagtttcctacaaaggggaccccattgtacagcaccggccgatgctggaggagagaatcgtggagctgtttagaaacttaatgaaaagtgcctttgtggtggagcggcagccctgcatgcccatgcatcctgaccggcccctcgtcatcaagaccggcgtccagttcactactaaagtcaggttgctggtcaaattccctgagttgaattatcagcttaaaattaaagtgtgcattgacaaagactctggggacgttgcagctctcagaggatcccggaaatttaacattctgggcacaaacacaaaagtgatgaacatggaagaatccaacaacggcagcctctctgcagaattcaaacacttgaccctgagggagcagagatgtgggaatgggggccgagccaattgtgatgcttccctgattgtgactgaggagctgcacctgatcacctttgagaccgaggtgtatcaccaaggcctcaagattgacctagagacccactccttgccagttgtggtgatctccaacatctgtcagatgccaaatgcctgggcgtccatcctgtggtacaacatgctgaccaacaatcccaagaatgtaaacttttttaccaagcccccaattggaacctgggatcaagtggccgaggtcctgagctggcagttctcctccaccaccaagcgaggactgagcatcgagcagctgactacactggcagagaaactcttgggacctggtgtgaattattcagggtgtcagatcacatgggctaaattttgcaaagaaaacatggctggcaagggcttctccttctgggtctggctggacaatatcattgaccttgtgaaaaagtacatcctggccctttggaacgaagggtacatcatgggctttatcagtaaggagcgggagcgggccatcttgagcactaagcctccaggcaccttcctgctaagattcagtgaaagcagcaaagaaggaggcgtcactttcacttgggtggagaaggacatcagcggtaagacccagatccagtccgtggaaccatacacaaagcagcagctgaacaacatgtcatttgctgaaatcatcatgggctataagatcatggatgctaccaatatcctggtgtctccactggtctatctctatcctgacattcccaaggaggaggcattcggaaagtattgtcggccagagagccaggagcatcctgaagctgacccaggcgctgccccatacctgaagaccaagtttatctgtgtgacaccaacgacctgcagcaataccattgacctgccgatgtccccccgcactttagattcattgatgcagtttggaaataatggtgaaggtgctgaaccctcagcaggagggcagtttgagtccctcacctttgacatggagttgacctcggagtgcgctacctcccccatgtagtaatgaactagtccgtaacttgaaagtatttcgatttcttggctttatatatcttgtggaaaggacgaaacgagagcaatgctcggagtgtc

SEQ ID NO: 2748 - DNA, 2645 bp, Homo sapiens
  source 1..2645: mol_type = genomic DNA
accgccaccatggcgcagtgggaaatgctgcagaatcttgacagcccctttcaggatcagctgcaccagctttactcgcacagcctcctgcctgtggacattcgacagtacttggctgtctggattgaagaccagaactggcaggaagctgcacttgggagtgatgattccaaggctaccatgctattcttccacttcttggatcagctgaactatgagtgtggccgttgcagccaggacccagagtccttgttgctgcagcacaatttgcggaaattctgccgggacattcaggatcctacccagttggctgagatgatctttaacctccttctggaagaaaaaagaattttgatccaggctcagagggcccaattggaacaaggagagccagttctcgaaacacctgtggagagccagcaacatgagattgaatcccggatcctggatttaagggctatgatggagaagctggtaaaatccatcagccaactgaaagaccagcaggatgtcttctgcttccgatataagatccaggccaaagggaagacaccctctctggacccccatcagaccaaagagcagaagattctgcaggaaactctcaatgaactggacaaaaggagaaaggaggtgctggatgcctccaaagcactgctaggccgattaactaccctaatcgagctactgctgccaaagttggaggagtggaaggcccagcagcaaaaagcctgcatcagagctcccattgaccacgggttggaacagctggagacatggttcacagctggagcaaagctgttgtttcacctgaggcagctgctgaaggagctgaagggactgagttgcctggttagctatcaggatgaccctctgaccaaaggggtggacctacgcaacgcccaggtcacagagttgctacagcgtctgctccacagagcctttgtggtagaaacccagccctgcatgccccaaactccccatcgacccctcatcctcaagactggcagcaagttcaccgtccgaacaaggctgctggtgagactccaggaaggcaatgagtcactgactgtggaagtctccattgacaggaatcctcctcaattacaaggcttccggaagttcaacattctgacttcaaaccagaaaactttgacccccgagaaggggcagagtcagggtttgatttgggactttggttacctgactctggtggagcaacgttcaggtggttcaggaaagggcagcaataaggggccactaggtgtgacagaggaactgcacatcatcagcttcacggtcaaatatacctaccagggtctgaagcaggagctgaaaacggacaccctccctgtggtgattatttccaacatgaaccagctctcaattgcctgggcttcagttctctggttcaatttgctcagcccaaaccttcagaaccagcagttcttctccaacccccccaaggccccctggagcttgctgggccctgctctcagttggcagttctcctcctatgttggccgaggcctcaactcagaccagctgagcatgctgagaaacaagctgttcgggcagaactgtaggactgaggatccattattgtcctgggctgacttcactaagcgagagagccctcctggcaagttaccattctggacatggctggacaaaattctggagttggtacatgaccacctgaaggatctctggaatgatggacgcatcatgggctttgtgagtcggagccaggagcgccggctgctgaagaagaccatgtctggcacctttctactgcgcttcagtgaatcgtcagaagggggcattacctgctcctgggtggagcaccaggatgatgacaaggtgctcatctactctgtgcaaccgtacacgaaggaggtgctgcagtcactcccgctgactgaaatcatccgccattaccagttgctcactgaggagaatatacctgaaaacccactgcgcttcctctatccccgaatcccccgggatgaagcttttgggtgctactaccaggagaaagttaatctccaggaacggaggaaatacctgaaacacaggctcattgtggtctctaatagacaggtggatgaactgcaacaaccgctggagcttaagccagagccagagctggagtcattagagctggaactagggctggtgccagagccagagctcagcctggacttagagccactgctgaaggcagggctggatctggggccagagctagagtctgtgctggagtccactctggagcctgtgatagagcccacactatgcatggtatcacaaacagtgccagagccagaccaaggacctgtatcacagccagtgccagagccagatttgccctgtgatctgagacatttgaacactgagccaatggaaatcttcagaaactgtgtaaagattgaagaaatcatgccgaatggtgacccactgttggctggccagaacaccgtggatgaggtttacgtctcccgccccagccacttctacactgatggacccttgatgccttctgacttctagtaatgaactagtccgtaacttgaaagtatttcgatttcttggctttatatatcttgtggaaaggacgacatcacgcggaagtgtgacgcgtg

SEQ ID NO: 2749 - DNA, 2657 bp, Homo sapiens
  source 1..2657: mol_type = genomic DNA
accgccaccatggcgcagtgggaaatgctgcagaatcttgacagcccctttcaggatcagctgcaccagctttactcgcacagcctcctgcctgtggacattcgacagtacttggctgtctggattgaagaccagaactggcaggaagctgcacttgggagtgatgattccaaggctaccatgctattcttccacttcttggatcagctgaactatgagtgtggccgttgcagccaggacccagagtccttgttgctgcagcacaatttgcggaaattctgccgggacattcagcccttttcccaggatcctacccagttggctgagatgatctttaacctccttctggaagaaaaaagaattttgatccaggctcagagggcccaattggaacaaggagagccagttctcgaaacacctgtggagagccagcaacatgagattgaatcccggatcctggatttaagggctatgatggagaagctggtaaaatccatcagccaactgaaagaccagcaggatgtcttctgcttccgatataagatccaggccaaagggaagacaccctctctggacccccatcagaccaaagagcagaagattctgcaggaaactctcaatgaactggacaaaaggagaaaggaggtgctggatgcctccaaagcactgctaggccgattaactaccctaatcgagctactgctgccaaagttggaggagtggaaggcccagcagcaaaaagcctgcatcagagctcccattgaccacgggttggaacagctggagacatggttcacagctggagcaaagctgttgtttcacctgaggcagctgctgaaggagctgaagggactgagttgcctggttagctatcaggatgaccctctgaccaaaggggtggacctacgcaacgcccaggtcacagagttgctacagcgtctgctccacagagcctttgtggtagaaacccagccctgcatgccccaaactccccatcgacccctcatcctcaagactggcagcaagttcaccgtccgaacaaggctgctggtgagactccaggaaggcaatgagtcactgactgtggaagtctccattgacaggaatcctcctcaattacaaggcttccggaagttcaacattctgacttcaaaccagaaaactttgacccccgagaaggggcagagtcagggtttgatttgggactttggttacctgactctggtggagcaacgttcaggtggttcaggaaagggcagcaataaggggccactaggtgtgacagaggaactgcacatcatcagcttcacggtcaaatatacctaccagggtctgaagcaggagctgaaaacggacaccctccctgtggtgattatttccaacatgaaccagctctcaattgcctgggcttcagttctctggttcaatttgctcagcccaaaccttcagaaccagcagttcttctccaacccccccaaggccccctggagcttgctgggccctgctctcagttggcagttctcctcctatgttggccgaggcctcaactcagaccagctgagcatgctgagaaacaagctgttcgggcagaactgtaggactgaggatccattattgtcctgggctgacttcactaagcgagagagccctcctggcaagttaccattctggacatggctggacaaaattctggagttggtacatgaccacctgaaggatctctggaatgatggacgcatcatgggctttgtgagtcggagccaggagcgccggctgctgaagaagaccatgtctggcacctttctactgcgcttcagtgaatcgtcagaagggggcattacctgctcctgggtggagcaccaggatgatgacaaggtgctcatctactctgtgcaaccgtacacgaaggaggtgctgcagtcactcccgctgactgaaatcatccgccattaccagttgctcactgaggagaatatacctgaaaacccactgcgcttcctctatccccgaatcccccgggatgaagcttttgggtgctactaccaggagaaagttaatctccaggaacggaggaaatacctgaaacacaggctcattgtggtctctaatagacaggtggatgaactgcaacaaccgctggagcttaagccagagccagagctggagtcattagagctggaactagggctggtgccagagccagagctcagcctggacttagagccactgctgaaggcagggctggatctggggccagagctagagtctgtgctggagtccactctggagcctgtgatagagcccacactatgcatggtatcacaaacagtgccagagccagaccaaggacctgtatcacagccagtgccagagccagatttgccctgtgatctgagacatttgaacactgagccaatggaaatcttcagaaactgtgtaaagattgaagaaatcatgccgaatggtgacccactgttggctggccagaacaccgtggatgaggtttacgtctcccgccccagccacttctacactgatggacccttgatgccttctgacttctagtaatgaactagtccgtaacttgaaagtatttcgatttcttggctttatatatcttgtggaaaggacgatagccgtcgacgttgtaagatgta

SEQ ID NO: 2750 - DNA, 2354 bp, Homo sapiens
  source 1..2354: mol_type = genomic DNA
accgccaccatgtctcagtggtacgaacttcagcagcttgactcaaaattcctggagcaggttcaccagctttatgatgacagttttcccatggaaatcagacagtacctggcacagtggttagaaaagcaagactgggagcacgctgccaatgatgtttcatttgccaccatccgttttcatgacctcctgtcacagctggatgatcaatatagtcgcttttctttggagaataacttcttgctacagcataacataaggaaaagcaagcgtaatcttcaggataattttcaggaagacccaatccagatgtctatgatcatttacagctgtctgaaggaagaaaggaaaattctggaaaacgcccagagatttaatcaggctcagtcggggaatattcagagcacagtgatgttagacaaacagaaagagcttgacagtaaagtcagaaatgtgaaggacaaggttatgtgtatagagcatgaaatcaagagcctggaagatttacaagatgaatatgacttcaaatgcaaaaccttgcagaacagagaacacgagaccaatggtgtggcaaagagtgatcagaaacaagaacagctgttactcaagaagatgtatttaatgcttgacaataagagaaaggaagtagttcacaaaataatagagttgctgaatgtcactgaacttacccagaatgccctgattaatgatgaactagtggagtggaagcggagacagcagagcgcctgtattggggggccgcccaatgcttgcttggatcagctgcagaactggttcactatagttgcggagagtctgcagcaagttcggcagcagcttaaaaagttggaggaattggaacagaaatacacctacgaacatgaccctatcacaaaaaacaaacaagtgttatgggaccgcaccttcagtcttttccagcagctcattcagagctcgtttgtggtggaaagacagccctgcatgccaacgcaccctcagaggccgctggtcttgaagacaggggtccagttcactgtgaagttgagactgttggtgaaattgcaagagctgaattataatttgaaagtcaaagtcttatttgataaagatgtgaatgagagaaatacagtaaaaggatttaggaagttcaacattttgggcacgcacacaaaagtgatgaacatggaggagtccaccaatggcagtctggcggctgaatttcggcacctgcaattgaaagaacagaaaaatgctggcaccagaacgaatgagggtcctctcatcgttactgaagagcttcactcccttagttttgaaacccaattgtgccagcctggtttggtaattgacctcgagacgacctctctgcccgttgtggtgatctccaacgtcagccagctcccgagcggttgggcctccatcctttggtacaacatgctggtggcggaacccaggaatctgtccttcttcctgactccaccatgtgcacgatgggctcagctttcagaagtgctgagttggcagttttcttctgtcaccaaaagaggtctcaatgtggaccagctgaacatgttgggagagaagcttcttggtcctaacgccagccccgatggtctcattccgtggacgaggttttgtaaggaaaatataaatgataaaaattttcccttctggctttggattgaaagcatcctagaactcattaaaaaacacctgctccctctctggaatgatgggtgcatcatgggcttcatcagcaaggagcgagagcgtgccctgttgaaggaccagcagccggggaccttcctgctgcggttcagtgagagctcccgggaaggggccatcacattcacatgggtggagcggtcccagaacggaggcgaacctgacttccatgcggttgaaccctacacgaagaaagaactttctgctgttactttccctgacatcattcgcaattacaaagtcatggctgctgagaatattcctgagaatcccctgaagtatctgtatccaaatattgacaaagaccatgcctttggaaagtattactccaggccaaaggaagcaccagagccaatggaacttgatggccctaaaggaactggatatatcaagactgagttgatttctgtgtctgaagttcacccttctagacttcagaccacagacaacctgctccccatgtctcctgaggagtttgacgaggtgtctcggatagtgggctctgtagaattcgacagtatgatgaacacagtatagtaatgaactagtccgtaacttgaaagtatttcgatttcttggctttatatatcttgtggaaaggacgacaactcctagggtcccacacaacc

SEQ ID NO: 2751 - DNA, 3071 bp, Homo sapiens
  source 1..3071: mol_type = genomic DNA
accgccaccatggctcgtccggttcagctggctccgggttctctggctctggttctgtgccgtctggaagctcagaaagctgctggtgctgctgaagaaccgggtggtcgtgctgttttccgtgctttccgtcgtgctaacgctcgttgcttctggaacgctcgtctggctcgtgctgcttctcgtctggctttccagggttggctgcgtcgtggtgttctgctggttcgtgctccgccggcttgcctgcaggttctgcgtgacgcttggcgtcgtcgtgctctgcgtccgccgcgtggtttccgtatccgtgctgttggtgacgttttcccggttcagatgaacccgatcacccagtctcagttcgttccgctgggtgaagttctgtgctgcgctatctctgacatgaacaccgctcagatcgttgttacccaggaatctctgctggaacgtctgatgaaacactacccgggtatcgctatcccgtctgaagacatcctgtacaccaccctgggtaccctgatcaaagaacgtaaaatctaccacaccggtgaaggttacttcatcgttaccccgcagacctacttcatcaccaacaccaccacccaggaaaacaaacgtatgctgccgtctgatgaaagtcgcctgatgccagcttccatgacatatctggtgagcatggagagctgtgcagagtcagcccaagagaatgctgcccccatatcccactgtcagtcttgccagtgtttccgggacatgcacactcaggatgttcaggaagcaccagttgctgcagaagtgactaggaagagtcacagaggtcttggggaatccgtatcttgggtacagaatggggcagtttcagtgtctgcggagcaccacatttgtgagagcaccaaacctttaccatacacaagagataaagaaaaaggcaagaagtttggttttagtctcttatggcgcagcttatctagaaaggagaagcccaaaacagaacacagcagtttctctgctcagttcccacctgaagaatggcccgtccgagatgaagatgacttggacaatatccctcgagatgttgaacatgagataatcaaacgaattaaccccattttgactgttgacaatttaatcaaacacactgtcctaatgcaaaaatacgaagaacagaaaaaatataatagccagggcacttccactgacatgctgacaatcgggcataagtatccttcaaaagagggggttaagaaaaggcagggtctgtctgcaaaacctcaagggcagggccattctcgaagggatagacacaaagccaggaatcagggaagtgagtttcagccaggaagcattagactggagaaacaccccaagctccctgctacacagcccatccccagaattaaaagcccaaatgaaatggtaggtcagaaaccacttggtgagattacaacagtgctaggttcccatttgatttacaaaaagcgaatcagtaatcctttccagggtttgtctcaccgaggaagcacaatatccaaagggcacaaaattcagaagacgagtgatctgaaacccagccagactggaccaaaggaaaagcctttccaaaagcctaggtccttggattcctcaagaatctttgatggtaaagccaaagagccatatgctgaacaacctaatgataaaatggaagcagaatccatttacataaatgaccctactgtcaaacccatcaatgatgacttcagaggtcacctcttcagtcaccctcaacagagcatgttgcaaaatgatggtaaatgctgtccctttatggaaagcatgttgagatatgaagtgtatggtggagaaaatgaggtaattcctgaagtcttgaggaaaagtcattcccactttgacaaattaggggagaccaaacagactccgcatagtctgccatcacgaggtgcctccttttcagaccgaacaccctctgcttgtagattagtggataacacaatacaccagtttcaaaatcttggccttttggattacccagttggcgtgaaccctttaagacaagctgcaagacaagacaaagactcagaagaattattgagaaaaggatttgtccaggatgcagagactacaagcctagaaaatgaacagctttctaacgatgaccaggccttgtatcagaatgaagtggaagatgatgatggtgcctgtagttcattatatctagaggaggatgacatttctgagaatgacgacttacgtcaaatgctgcctggccacagtcagtattccttcacaggtggaagccagggaaatcatttaggaaaacaaaaagtgattgagagatctctgaccgagtacaacagcacaatggagagggttgagtctcaggtgcttaaaagaaatgaatgctacaaacccactgggctgcatgctaccccaggtgaaagccaagaacctaacctctctgctgaaagttgtggcctaaattcaggggcccagtttggttttaactacgaagaagaacccagtgttgctaaatgtgtacaggcctcagcacctgctgatgaaagaatctttgattactatagcgcaagaaaagccagttttgaagctgaagtcatacaagacactattggtgacacaggaaagaagccagctagctggagtcagagtcctcagaatcaggaaatgagaaaacatttcccacaaaagttccaacttttcaacacttcacatatgccagtgttggctcaggatgtccaatatgaacacagtcacttggaagggacagaaaatcacagcatggcaggagatagtggaatagattctccacggacacagagtctgggatctaataattcagtcattttggatggactaaaaagaagacagaattttctgcaaaatgtcgaaggcacaaagagcagtcaaccactcacatctaattccttactaccgctaactccagtcataaacgtttagtaatgaactagtccgtaacttgaaagtatttcgatttcttggctttatatatcttgtggaaaggacgaagccatgcaattctagttcggata

SEQ ID NO: 2752 - DNA, 785 bp, Homo sapiens
  source 1..785: mol_type = genomic DNA
accgccaccatggctcgtccggttcagctggctccgggttctctggctctggttctgtgccgtctggaagctcagaaagctgctggtgctgctgaagaaccgggtggtcgtgctgttttccgtgctttccgtcgtgctaacgctcgttgcttctggaacgctcgtctggctcgtgctgcttctcgtctggctttccagggttggctgcgtcgtggtgttctgctggttcgtgctccgccggcttgcctgcaggttctgcgtgacgcttggcgtcgtcgtgctctgcgtccgccgcgtggtttccgtatccgtgctgttggtgacgttttcccggttcagatgaacccgatcacccagtctcagttcgttccgctgggtgaagttctgtgctgcgctatctctgacatgaacaccgctcagatcgttgttacccaggaatctctgctggaacgtctgatgaaacactacccgggtatcgctatcccgtctgaagacatcctgtacaccaccctgggtaccctgatcaaagaacgtaaaatctaccacaccggtgaaggttacttcatcgttaccccgcagacctacttcatcaccaacaccaccacccaggaaaacaaacgtatgctgccgtctgacgaatctcgtctgatgccggcttctatgacctacctggacaccgaatctggtatctagtaatgaactagtccgtaacttgaaagtatttcgatttcttggctttatatatcttgtggaaaggacgacaaacctactctattatcctatgt

SEQ ID NO: 2753 - DNA, 611 bp, Homo sapiens
  source 1..611: mol_type = genomic DNA
accgccaccatggctcgtccggttcaactcgctccaggttctctcgctctggttctctgtcgtctcgaagctcaaaaagctgctggtgctgctgaagaaccgggcggtcgtgctgtttttcgtgcatttcgccgtgctaatgctcgttgtttttggaatgctcgtctcgctcgtgctgcttctcgtctcgcttttcaaggttggctccgtcgtggtgttctcctcgttcgtgctccgccggcttgtctccaagttctccgtgacgcttggcgtcgtcgtgctctccgtccaccacgtggttttcgtattcgtgctgttggcgacgttttcccggttcagatgaacccgatcacccagtcccaatttgttccgctgggcgaggtactgtgttgcgcaatctccgacatgaacaccgcacaaatcgttgttacccaagagtctctgctggaacgcctgatgaagcactatccgggtcatcgtgtttgggacctgatcatccaatctttctggatggattagtaatgaactagtccgtaacttgaaagtatttcgatttcttggctttatatatcttgtggaaaggacgatatacgcagcgcgacatttctgcg

SEQ ID NO: 2754 - DNA, 2186 bp, Homo sapiens
  source 1..2186: mol_type = genomic DNA
accgccaccatggagaataaaagcctggagagctcccagacagacctgaagctggtggcccacccccgcgccaagagcaaggtgtggaagtatttcggcttcgacaccaacgccgagggatgcatcctgcagtggaagaaaatctactgccgcatctgcatggcccagatcgcctactccggaaacacctccaacctgtcctaccacctggagaagaaccaccccgaggaattctgcgagttcgtcaagagcaacacggagcagatgcgtgaagccttcgccaccgccttctccaagctgaagcccgagtcgtcccagcagcccgggcaggacgcgctggccgtcaaggccggccacggctacgacagcaagaagcagcaggagctgacggccgccgtgctgggcctcatctgcgaggggctgtacccagcctccatcgtggacgagcccaccttcaaggtgctgctgaagacggccgacccccggtatgagctgcccagccggaagtacatctctaccaaggccatccctgagaagtacggggccgtccgggaggtgatcctgaaggagctggccgaggccacctggtgtggcatctccaccgacatgtggaggagtgagaatcagaaccgcgcctacgtcacgctggccgcccacttcctgggcctgggcgcccccaactgcctgtccatgggctcccgctgcctgaagaccttcgaggtgcccgaagagaacacggcggagaccatcacgcgagtgctctatgaggtcttcatcgagtggggcatcagcgccaaggtcttcggggccaccaccaactatggcaaggacatcgtgaaggcgtgctccctgctggacgtcgcagtgcacatgccctgcctgggccacaccttcaatgccggcatccagcaggccttccagctcccgaagctgggggcgctgctgtcgcgctgccgcaaactggtggagtacttccagcagtctgccgtggccatgtacatgctctatgagaagcagaagcagcagaacgtggcccactgcatgctggtgagcaaccgcgtctcctggtgggggagcacgctggccatgctgcagcgcctcaaggagcagcagttcgtcatcgccggggtcttggtggaggacagcaacaaccaccacctcatgctggaggccagcgagtgggccaccatcgaggggctggtggagctcctgcagcccttcaagcaggtggccgagatgctgtcggcctccaggtaccccaccatcagcatggtgaagccgctgctgcacatgctcctgaacaccacgctcaacatcaaggagaccgactccaaggagctcagcatggccaaggaggtcatcgccaaggagctttccaagacctaccaggagacgcccgagatcgacatgtttctcaacgtggccaccttcctggacccccgctacaagaggctgcccttcctctccgccttcgagcggcagcaggtggagaatcgcgtggtggaagaggccaagggcctgctggacaaggtcaaagacggcggctaccggccggctgaggacaagatcttcccggtgcccgaggagcctcccgtcaagaagctcatgcggacatccacgccgccgcccgccagcgtcatcaacaacatgctggccgagatcttctgccagacaggcggcgtggaggaccaggaagagtggcatgcccaggtggtggaggagctgagcaacttcaagtcccagaaggtgcttggcctcaacgaagaccccctcaagtggtggtcagaccgcctggccctcttccccctgctgcccaaggtgctgcagaagtactggtgcgtgacggccacgcgcgtcgcccctgagcgtctcttcggatccgccgccaacgtggtcagcgccaagaggaaccggctggctcccgcgcacgtggacgagcaggtgtttctgtatgagaacgcccggagtggggcagaggcggaacccgaggaccaggacgagggggagtggggcctggaccaggagcaggtgttctccttgggggatggcgtcagcggcggtttctttggcattagggacagcagcttcctgtagtaatgaactagtccgtaacttgaaagtatttcgatttcttggctttatatatcttgtggaaaggacgaaaatctaaagaaagctaatggtct

SEQ ID NO: 2755 - DNA, 758 bp, Homo sapiens
  source 1..758: mol_type = genomic DNA
accgccaccatgatgaggcgggaagacgaggaagaggagggaacaatgatgaaggcaaaaggggacttagagatgaaggaggaggaagagattagtgagacaggagaactggttggcccttttgtgagtgctatgcccactccaatgccccacaacaagggcacccggttctctgaggcatgggaatatttccacctagctcctgctcgtgctgggcaccatcccaaccagtatgccacctgccgcctgtgtggcaggcaggtgagccgtggccctggggtcaacgtgggcaccactgcactgtggaagcatctgaaaagcatgcacagagaggagctggagaagagtggccatggtcaggctgggcagcgccaggatccaaggccccacgggccccagctccccacaggcattgagggtaactggggtaggctcctggagcaggtgggcaccatggctttgtgggccagccaaagggaaaaggaggtgcttaggagggaaagggcagtggaatggcgggagagggctgtggaaaaaagggagcgagccctggaggaggtggaaagggccatcctggagatgaagtggaaggtgagggctgagaaggaggcatgccagcgggagaaagagctgcctgcagcagtacatcccttccattttgtttagtaatgaactagtccgtaacttgaaagtatttcgatttcttggctttatatatcttgtggaaaggacgactcgtgtagcgacgaagatgctga

SEQ ID NO: 2756 - DNA, 806 bp, Homo sapiens
  source 1..806: mol_type = genomic DNA
accgccaccatgaggagtggcgagccggcctgcaccatggaccaggcccgcgggctggacgacgcggcggcgcggggcggtcagtgtccgggactggggccggcgccgacgccgacgcctcccggccgcctgggggcgccatactccgaggcctggggctacttccacctggcgccggggcgccccgggcatccgtcgggccactgggccacctgccgtctgtgcggggagcaggtgggccgcggcccgggcttccacgcggggacctcggcgttgtggaggcacctgaggagcgcgcaccggcgggagctggagagcagcggcgccgggagctccccacctgccgcgccctgcccgccgccgcccggccccgctgcggcccccgagggcgactgggcgcgcctgctggaacagatgggcgcgctggccgtgcgcggcagccggcgggagcgggagctggagcggcgcgagctggccgtggagcagggcgagcgcgccctggagcggaggcggagggcgctgcaggaggaagagcgcgccgcggcccaggcgcgccgggaactgcaggccgagcgggaggcgctgcaggcgcggctgcgggatgtgagccgccgtgagggcgccctgggctgggcccccgctgcgccgccgccgctcaaggacgaccccgagggtgacagggacggctgcgtcatcacaaaggtcctcctgtagtaatgaactagtccgtaacttgaaagtatttcgatttcttggctttatatatcttgtggaaaggacgagcaaactggtctcgggtgttatag

SEQ ID NO: 2757 - DNA, 3617 bp, Homo sapiens
  source 1..3617: mol_type = genomic DNA
accgccaccatggagaataacttgaaaacttgtcccaaagaggacggtgatttcgtttctgataaaataaagtttaaaatagaagaggaagatgatgatggaattcctcctgatagtttggaaagaatggactttaaaagcgagcaggaggacatgaagcagacagacagcggtggggagcgagcgggcctcggtgggacgggttgcagctgcaagcccccggggaagtacttgtctgcagagagtgaggatgactatggcgcgctgttctcccagtacagcagcaccctatacgacgtggccatggaggccgtgacccagagcctcctttccagccggaacatgagctccaggaagaagtctccagcctggaagcatttttttatctctccccgagacagcactaaagcaatatgcatgtactgtgtgaaggagttcagcagaggcaaaaacgagaaagacttgagtaccagttgtctcatgaggcacgtgaggcgcgcacacccgaccgtgctcattcaggaaaatggcagtgtgtctgccgtgtcctcgttcccctctccctcactcctgcttccaccacagcctgcggacgcgggtgacctcagcaccatcctctcacccatcaaacttgtccagaaagtggcgtctaagatcccgtcccccgatcgaataacagaggagtctgtgtctgtagtttcttctgaagaaatctcctctgacatgtccgtttcggagaagtgcggcagagaagaagccctggtggggtcgtctccccacctccctgctctccattacgatgaacctgcagagaacttagcggagaagagccttccacttccaaagagcacctctgggtccaggagaaggtccgctgtctggaagcacttctacctgtcgccactggacaactccaaagctgtctgcattcactgcatgaacgagttcagccgggggaagaatgggaaggacctgggcacgagctgcctcatcaggcacatgtggagggcacaccgcgccatcgtgttgcaggagaacgggggcacgggcatcccgccactgtactccacccctcccactctgctgccttccttgctgccgccggagggggagctcagctctgtgtcctcgtctccagtaaagccggtcagagagtccccttcggcctcctcctcccctgacaggctgactgaggacttgcagtctcacttgaaccctggagatgggctgatggaagacgtggcggccttctcatcttccgatgacataggggaggcctcggcgtcctctcctgagaagcagcaggctgatgggctgagtcctagattgtttgaatctggcgccatcttccagcagaataaaaaggtcatgaaaagactgaagtcggaggtctggcatcacttctccctggcccccatggacagcctcaaggccgagtgtcggtactgcggctgtgccatcagccgggggaagaagggtgatgtgggcaccagctgcctgatgagacatctctaccggcgccatccagaagttgtcgggagccagaagggcttcctgggtgcaagtctggcaaactctccgtatgccactttggcctctgcagaaagttcctcttccaaattgactgacttgccaacagtggtcacaaaaaacaatcaagttatgtttcctgttaatagcaaaaagacctcgaagctgtggaatcatttttctatttgctccgcagactccacaaaagtcgtgtgcttgcactgtggccggaccatcagccgggggaagaagccgactaacttgggtaccagctgtcttctgagacatttacagcggttccatagcaacgtgctgaaaactgaggtctcggagacggctcggccctcctctccggacacccgggtgccgcggggcacagaattatcaggcgcttcctcttttgatgacaccaatgagaagttttacgattctcacccagttgccaaaaaaatcacaagtctcatagctgaaatgattgcacttgacctccagccatattcttttgtagacaacgttggctttaacaggctgcttgaatacttgaaacctcagtactccctccccgccccttcctacttctccaggacagctatcccaggtatgtatgataatgtgaagcagataattatgtcccaccttaaggaagctgagagtggtgtgatccacttcacgtctggaatatggatgagtaaccagacccgtgagtacctgaccctcacggcccactgggtttccttcgagtcgccagcccggccgcgctgtgacgaccaccactgctcggcgctgttggacgtgtcgcaggtggactgcgactacagtggcaacagcattcagaagcagctggagtgctggtgggaagcgtgggtgacctccaccggccttcaggtgggcatcaccgtcaccgacaacgccagcatcgggaagacgctgaacgagggggagcactcgagcgtgcagtgcttcagccatacggtgaacctgatcgtcagcgaggccattaagagccagcggatggtgcagaacctgctgagcctcgcccggaagatctgcgagcgggtgcaccggtcgcccaaggcgaaggagaaactggccgagctgcagagggagtacgcgctgcctcagcatcacctcatccaggacgtcccgtccaagtggagcacttccttccacatgctcgagcggctcattgagcagaaaagggccattaacgagatgtccgtcgagtgtaacttccgagagctgatcagctgcgaccagtgggaggtcatgcagtccgtgtgccgtgcgctaaagcccttcgaggctgcgagccgggagatgagcacgcagatgtccaccctcagccaggtcatccccatggtacacatcctcaacaggaaggtggagatgctcttcgaggagacgatgggcatcgacaccatgctgcgctctctgaaggaggccatggtgagccgcctgtctgccaccctccacgacccgcggtacgtcttcgccacgctgctggatcctcgctacaaggcctccctgtttacggaggaggaggcggagcagtacaaacaggatttaatcagggaactcgaactcatgaattctacctcagaggacgtggctgcctcccacaggtgtgatgctggctccccgtcgaaagactctgccgcagaggagaacctgtggtcacttgtggccaaggtgaagaagaaagacccaagagaaaagctgcctgaagccatggtgcttgcgtatctggaggaggaggtgcttgaacacagctgtgacccgctcacctactggaacctgaagaaggcgtcctggccggggctgtccgcgctggccgtcagatttttgggctgccccccaagcatcgtcccttcagaaaagctgttcaacacacccactgagaacggtagccttggccaatccaggctcatgatggaacattttgaaaaacttatctttttgaaagtgaatcttcccttaatatactttcagtattagtaatgaactagtccgtaacttgaaagtatttcgatttcttggctttatatatcttgtggaaaggacgataaatgcttactgctggaattgga

SEQ ID NO: 2758 - DNA, 3041 bp, Homo sapiens
  source 1..3041: mol_type = genomic DNA
accgccaccatgagtgtatgtactctaagtgtaccagtttcttcactctctcctggcagaagatgcaacacttttagtgattctgggattctgggatgtgttcctattaattctaatacagatgaagaagatgtggtagaggaaaagatggtagcagaaggagtgaataaagaggcaaaacagcctgctaaaaagaaaagaaagaagggtttgcgaattaaggggaaaaggcgtcgaaaaaaattgattcttgccaaaaagtttagtaaggatttgggatctgggaggcctgttgcagatgcccctgctttgttagcttccaatgaccctgagcaggatgaagaaagtctttttgagagcaatatagaaaaacagatctatctacctagtactagagccaagacctccattgtgtggcacttctttcatgttgacccccagtacacctggcgggccatttgtaacctctgtgagaaaagcgtcagcaggggtaaaccaggtagccatcttggtacatctactcttcaacgacatctgcaagcaaggcattcacctcattggaccagggccaacaagtttggagttgctagtggagaggaggactttaccttggatgtgtctttatctccctcttctggaagcaatggaagctttgaatatattcctactgatccattagatgataatagaatgggcaagaagcatgataaatcagcatctgatgccctaagggcagaaagagggagatttctcatcaaaagtaacattgtcaagcatgctttaattcctggaactagagccaagacatctgccgtttggaattttttttacactgatcctcagcacatctcaagagctgtgtgtaatatatgtaaaagaagtgtgagccggggtaggccagggtcccacttagggacttcaacacttcaacgacacctgcaagccacacatcctatccattgggctgttgccaacaaagacagtggtgctgttgcaaatggattagatgaagctgagactgagagaagtgatctcttgagtgataccttgcatggagaaaagtctacaggcagccaagatttaacagctgaggaccttagtgactctgattcagatgaacctatgttagaggttgaaaacagatctgaaagtcctattcccgttgcagagcaaggcactctgatgcgtgcgcaggagagagaaacaacatgttgtggaaatccagtctcaagtcacataagtcaggcaattatccaaatgattgtggaggatatgcatccttacaactatttctcaaccccagcctttcagaggttcatgcagattgtggcccctgattataggttgccatcagagacttactttttcactaaggctgtacctcagttatatgattgtgtcagagaaaaaattttcttaactttagagaatgttcaaagccaaaagatacacctgactgttgacatatggacccatgacccatccactgactattttattgtgactgtacactgggtttctttggaaactgcgtcttttctcaataatggcaggatccccgattttagaaagtgggcagtgctttgtgttacaggtttggctaaagactgtttgataaccaatattttacaagaattaaatgaccagattggtctgtggctttctccaaatttccttatccctagcttcattgtttctgacaattcctctaatgtggtacatgcaatcaaagatggtggttttacccatgtgccatgcttcctgcattgtttaaatatggtcattcaggactttttctgcgagcacaaaagcattgagaatatgttagtggctgccaggaaaacttgtcatcattttagtcattcggtcaaggcccgtcagatactgcaagagttccaaaatgatcaccaacttccatggaagaatttgaagcaggacgaaactggccattggatttctactttttatatgttaaaatggctcttggagcattgctactcagttcaccatagtcttggtagagccagtggagttgtgctcacctcccttcagtggactctaatgacttatgtttgtgatattcttaagccatttgaggaggctacccagaaagtgagcgtgaagaccgcaggattgaatcaggtgctacccctaatccatcatctactcctttccctgcagaaactcagagaagattttcaagtcagaggtattactcaggccctcaatctggtggatagtttatctctgaaacttgaaacagataccctactaagtgccatgcttaaatccaagccctgtatcttggctactttgttagatccttgctttaaaaacagtttggaagacttttttcctcaaggtgctgatttagaaacttataagcagttccttgcagaagaggtctgtaattatatggaatcttcaccagagatctgccaaattccaacttcagaagcttcttgtccctcagttacagtgggagctgattcatttacctcatctctaaaagaaggcacctccagttcaggttctgttgatagctcagctgtagacaatgttgcccttggaagcaaaagcttcatgttcccttctgctgtagcagttgtggatgagtacttcaaagagaagtattcagagttctcaggaggtgatgaccctttaatttactggcagaggaagataagcatatggccggctttgacccaggttgccatccagtatctaagttgccccatgtgtagttggcaatctgaatgtatctttactaaaaatagccactttcatccaaaacagatcatgagcctggactttgacaatatagaacaactgatgtttctgaaaatgaacttgaaaaatgttaactacgattattctacgttggttctgagctgggatcctgagcagaatgaagttgttcaaagcagtgaaaaagaaatactgccttagtaatgaactagtccgtaacttgaaagtatttcgatttcttggctttatatatcttgtggaaaggacgaatggtcatcacgatcttaaatagg

SEQ ID NO: 2759 - DNA, 5651 bp, Homo sapiens
  source 1..5651: mol_type = genomic DNA
accgccaccatggcggtctccaggctagatcgcctttttattttactggatactggcactactcctgttacaagaaaagctgctgcacagcaacttggagaagtggtgaagcttcatccccatgaactaaataatctcctgtctaaagtgttgatatatttaaggagtgcaaattgggatacccggattgcagcaggacaagctgttgaagctatagtgaaaaatgtacctgagtggaatccagtgccgagaaccagacaagaacctacttccgaaagttctatggaagattcacctactacagagcgattgaattttgacagatttgatatatgtagattgttacaacatggtgcatcactcctgggatctgctggtgccgaatttgaagtccaagatgaaaaatcaggtgaagtggatcctaaagagaggatagcacgccaacgaaaattattacagaagaaacttggccttaatatgggagaagcaattggaatgagtactgaagaacttttcaatgatgaggatttggattataccccaacttcagcatcctttgttaacaaacaacctactcttcaggcagctgaattgattgactcagagtttcgagcaggaatgagcaatagacaaaagaacaaagctaaaagaatggccaagttatttgcaaaacagagatccagggatgcagtggaaactaatgagaagagcaatgatagcactgatggggagccagaagaaaagagacggaaaatagcaaatgttgttattaatcagtctgcaaatgattccaaagtcttgattgataatattccagacagctcttccttaattgaagagacaaatgaatggcctttggaaagcttttgtgaagaactttgcaatgacctttttaatccctcctgggaggttcgacatggtgcaggcactggacttagggaaattcttaaagctcatgggaaaagtggtggtaaaatgggtgacagcactttagaagagatgattcagcagcatcaagagtggttggaagacttggttattagactcctttgtgtttttgcattagacagatttggagactttgtttctgatgaagttgtggcaccagttcgtgaaacttgtgctcaaacattaggtgtggttttaaaacacatgaacgaaacaggagttcataagactgtggatgtgctgctaaaattacttacacaagaacaatgggaagttagacatggtggtctgctgggaataaaatatgctttggcagtccgtcaggatgtaattaatactttattgcctaaagttttaactagaataattgaaggactccaggatcttgatgatgatgtcagagctgttgctgcagcatcattagtgcctgtagtagaaagccttgtctatcttcagacacaaaaggtgcccttcattataaatacattgtgggatgctcttctggaattagatgatctaacagcttcaacaaatagtattatgactctcctttcatccttgttaacttaccctcaggtccaacaatgcagtattcagcagtcactgacagttttagttccacgtgtctggccttttttgcatcacactatatcatcagttcgaagagcagcattggaaactctgtttacgttattatcaacacaggaccagaactcttcatcttggcttatacctatactgcctgatatgctccgacacatttttcagttctgtgttttggaaagcagccaggaaattctggaccttattcacaaggtttggatggaactgttgagtaaggcttcagttcagtatgtggtagcagctgcttgcccatggatgggtgcttggctttgcttgatgatgcagccttctcatttacctatcgatttaaatatgttgctagaagtaaaagctagagccaaggaaaaaacaggtggtaaggtgcgccaaggccaaagccagaataaagaagtacttcaggagtatattgcaggtgccgacaccatcatggaagacccagccaccagggattttgtagttatgcgggccagaatgatggcagccaagttgttaggagcactttgttgctgtatttgtgatccaggtgtaaatgtggtaactcaagaaattaaaccagctgaatccctgggccagttactactcttccatttgaactccaagtctgctttacagaggattagtgtagctttggtaatctgtgaatgggctgctttacaaaaggagtgtaaagctgttaccttagctgtgcagccgcgtttacttgatatcctttcagaacatttatattatgacgaaattgccgttccattcacacgaatgcagaatgaatgtaaacaacttatatcatcattagctgatgtacatattgaagttggtaatcgagtaaacaacaatgttttaacaatagatcaagctagtgacttggtcactactgtttttaatgaagccacatcatctttcgatttaaatcctcaagtgttacaacagttagatagtaaacgacagcaggtccaaatgacagttacagagaccaaccaggagtggcaagtgttgcagttgagagtgcatacttttgctgcctgtgcagttgtgagcttgcagcagcttccggagaaattaaatcctatcataaaaccattaatggagacaattaaaaaagaagagaatacactagtgcaaaactatgcagctcagtgcatagctaaactccttcagcagtgcacaacaaggacgccctgtcccaattcaaaaattattaaaaacctctgtagctcactttgtgtggacccatatctaactccttgtgtcacatgtccagtaccaacacaaagtggccaggaaaattctaaaggatccacctcagaaaaagatggaatgcaccatactgtcaccaagcacagaggtataattacactctacaggcaccagaaagctgcctttgctatcacaagtaggcgaggtcctacccccaaagcagtaaaagctcaaatagcagatcttcctgcaggaagtagtggaaatattcttgttgaacttgatgaggcccagaagccttacctggtacaacggagaggagctgaatttgctttgacaactatagtaaagcattttggtggtgaaatggcagtgaagttgccacatctctgggatgctatggttggcccattgaggaatacaatcgacataaataattttgatggaaaatccctcctggataagggagatagccctgctcaagaattggtgaattctctgcaggtttttgaaacagcagcagcttcaatggattctgagcttcatcccttgttggtccagcatttgccacatctttatatgtgccttcaataccccagtactgcagtgaggcacatggctgctcgttgtgtaggtgtcatgagcaaaatagctaccatggaaacaatgaatatttttttggagaaggttcttccgtggctgggagcaattgatgacagtgtcaaacaagagggtgcaattgaagcacttgcctgtgtaatggaacaactagatgttggtattgttccatatattgtccttttagttgttcctgtattaggaagaatgagtgatcagacagacagtgtgagattcatggccacgcagtgctttgcaacgctaattagactcatgccacttgaggcaggcattccagaccctccaaacatgtcagcagaattaatccaattgaaagccaaggagcgacactttttggagcaattgttagatgggaaaaaattggaaaattataaaattccagtaccaatcaatgctgaactcagaaaatatcagcaggatggtgtgaactggttagcatttcttaataagtataaacttcatggaattctgtgtgatgacatgggtttaggaaaaactttacagtccatctgcattctagcaggagatcattgtcatagggcccaggaatatgcaagatcaaaattagcagaatgtatgccacttccttccttagtggtttgtccgccaacattaacaggccattgggtggatgaagtaggtaaattttgctctagagaatatctcaacccgttgcattacactggacctcccactgaaagaataaggttacagcaccaagtaaaaaggcacaatctaatagtggcttcatatgatgttgtgaggaatgacatagatttctttagaaatattaaatttaactactgcattcttgatgaaggccatgtcatcaaaaatggaaaaacaaagttgtcaaaagcagtaaaacaactgactgctaattataggattattctttctggaacaccaatccagaacaacgttttggagctgtggtcattatttgatttcctcatgccaggatttttgggtactgaacgccagtttgctgctcgatatggtaaacctatattagcaagtagggatgctcgaagctccagtcgagagcaagaagcaggtgttcttgctatggatgcgctgcaccgccaagtactaccgtttcttttgagaagaatgaaagaagatgttttgcaggatcttccacctaaaattattcaagactattattgtactcttagtcctctccaggttcagctctatgaagattttgctaagtctcgtgccaagtgtgatgttgatgaaacagtttcttcagctacactttctgaagaaactgaaaaaccaaagcttaaagctacaggccacgtattccaggcattacagtacttacgtaaactgtgcaaccatccagcattagtcttaacacctcaacatccagaattcaagaccactgccgaaaaactggcagttcagaattcttctctacatgatattcaacatgcccctaagctctcagctttgaaacaattgctgttggactgcggtttgggaaatggcagcacttccgagagtggcacagagtctgttgtggcccagcacaggatactgatattctgtcagctgaaaagcatgcttgatatagtagagcatgatctcctcaaacctcacttgccctctgtcacttatttgagattagatggcagcatacctcctggtcagaggcattccattgtttcccggtttaataatgatccatctatagacgttctgttacttaccactcacgttggtggcctgggacttaatttgacaggcgctgacacagtagtatttgtggagcatgactggaatcctatgcgagatctacaagccatggaccgggcccatcgcattgggcagaaacgtgtggttaacgtataccgattgataaccagaggaacattggaagaaaaaataatggggttgcagaaattcaagatgaacatagcgaatactgttattagccaagagaattctagtttgcagagcatggggactgatcagcttcttgatctgtttactcttgataaggatggcaaagcagaaaaagctgacacctctacttctgggaaagcaagtatgaaatcaattcttgaaaacctgagtgatctttgggatcaagagcagtatgattcagagtacagcctggaaaattttatgcattctctcaagtagtaatgaactagtccgtaacttgaaagtatttcgatttcttggctttatatatcttgtggaaaggacgacttctcccacaacgccggtccgaa

SEQ ID NO: 2760 - DNA, 1250 bp, Homo sapiens
  source 1..1250: mol_type = genomic DNA
accgccaccatgctgacccgcctgttcagcgagcccggccttctctcggacgtgcccaagttcgccagctggggcgacggcgaagacgacgagccgaggagcgacaagggcgacgcgccgccaccgccaccgcctgcgcccgggccaggggctccggggccagcccgggcggccaagccagtccctctccgtggagaagaggggacggaggccacgttggccgaggtcaaggaggaaggcgagctggggggagaggaggaggaggaagaggaggaggaagaaggactggacgaggcggagggcgagcggcccaagaagcgcgggcccaagaagcgcaagatgaccaaggcgcgcttggagcgctccaagcttcggcggcagaaggcgaacgcgcgggagcgcaaccgcatgcacgacctgaacgcagccctggacaacctgcgcaaggtggtgccctgctactccaagacgcagaagctgtccaagatcgagacgctgcgcctagccaagaactatatctgggcgctctcggagatcctgcgctccggcaagcggccagacctagtgtcctacgtgcagactctgtgcaagggtctgtcgcagcccaccaccaatctggtggccggctgtctgcagctcaactctcgcaacttcctcacggagcaaggcgccgacggtgccggccgcttccacggctcgggcggcccgttcgccatgcacccctacccgtacccgtgctcgcgcctggcgggcgcacagtgccaggcggccggcggcctgggcggcggcgcggcgcacgccctgcggacccacggctactgcgccgcctacgagacgctgtatgcggcggcaggcggtggcggcgcgagcccggactacaacagctccgagtacgagggcccgctcagccccccgctctgtctcaatggcaacttctcactcaagcaggactcctcgcccgaccacgagaaaagctaccactactctatgcactactcggcgctgcccggttcgcggcccacgggccacgggctagtcttcggctcgtcggctgtgcgcgggggcgtccactcggagaatctcttgtcttacgatatgcaccttcaccacgaccggggccccatgtacgaggagctcaatgcgttttttcataactagtaatgaactagtccgtaacttgaaagtatttcgatttcttggctttatatatcttgtggaaaggacgagccactggttccaactacgccacg

SEQ ID NO: 2761 - DNA, 1097 bp, Homo sapiens
  source 1..1097: mol_type = genomic DNA
accgccaccatgtcaaaaacttttgtaaaatccaaggagatgggagagctagtcaacacaccatcctggatggataaaggtctgggctcccaaaatgaggtgaaggaggaagagagcagaccaggtacttatgggatgctcagcagcttaactgaagagcatgacagtattgaggaagaagaagaagaggaagaagatggggagaaacctaagagaaggggtcccaagaaaaagaagatgaccaaagctcgccttgagagattcagggctcgaagagtcaaggctaatgccagagaacggacccggatgcatggcctgaatgacgccctggataacctgaggcgagtcatgccatgctactctaaaacccaaaaactttccaagatagagactcttagactggccaggaactatatttgggctttatctgaagtcctggagactggccagacacctgaagggaaaggctttgtggagatgctgtgtaaagggctctctcagcccacaagcaacctggtggctggatgtctccaactgggccctcagtctgtcctcctggagaagcacgaggataaatctcctatttgtgactctgccatctctgtccacaacttcaactatcagtctccggggcttcctagccctccttatggtcatatggaaacacatctccttcatctcaagccccaagtattcaagagtttgggagaatcgtcctttgggagccatctgcctgactgcagtacacccccttatgagggcccactcactccacccctgagcatcagtgggaacttctccttgaagcaagatgggtctcctgacctagaaaaatcctacagcttcatgccacattacccttcttcaagtctaagctcagggcatgtgcattcaactccttttcaggctggtaccccccgttatgatgttcctatagacatgtcctatgattcctacccccatcatggtattgggacccaactcaatacagtcttcactgagtagtaatgaactagtccgtaacttgaaagtatttcgatttcttggctttatatatcttgtggaaaggacgaattgatggcatcgcgagcgcacgt

SEQ ID NO: 2762 - DNA, 524 bp, Homo sapiens
  source 1..524: mol_type = genomic DNA
accgccaccatgcggcaaccgtatctcagttctcgcgaggtttcgtcttcccggaagcgttggaggacattccctgttgactgcgtcgcgatgtgtggcgactgtgtggagaaggaatatcccaaccggggtaatacctgcctggagaatggatctttcttactgaactttacaggctgtgcagtgtgcagtaagcgggattttatgctgatcacaaacaaatccttgaaagaagaagatggagaagaaatagttacctatgatccagatttgtgtaagaattgtcatcatgtaatagccagacatgagtatacattcagtatcatggatgaatttcaggagtataccatgctgtgtctgttatgcggcaaagccgaagatactatcagtattctccctgatgacccccgacaaatgactctcttattctagtaatgaactagtccgtaacttgaaagtatttcgatttcttggctttatatatcttgtggaaaggacgagtcatgagccgacatcactgagat

SEQ ID NO: 2763 - DNA, 521 bp, Homo sapiens
  source 1..521: mol_type = genomic DNA
accgccaccatgcggcaaccgtatctcagttctcgcgaggtttcgtcttcccggaagcgttggaggacattccctgttgactgcgtcgcgatgtgtggcgactgtgtggagaaggaatatcccaaccggggtaatacctgcctggagaatggatctttcttactgaactttacaggctgtgcagtgtgcagtaagcgggattttatgctgatcacaaacaaatccttgaaagaagaagatggagaagaaatagttacctatgatcatttgtgtaagaattgtcatcatgtaatagccagacatgagtatacattcagtatcatggatgaatttcaggagtataccatgctgtgtctgttatgcggcaaagccgaagatactatcagtattctccctgatgacccccgacaaatgactctcttattctagtaatgaactagtccgtaacttgaaagtatttcgatttcttggctttatatatcttgtggaaaggacgagtagtcttggacgtaataagtccc

SEQ ID NO: 2764 - DNA, 419 bp, Homo sapiens
  source 1..419: mol_type = genomic DNA
accgccaccatgcggcaaccgtatctcagttctcgcgaggtttcgtcttcccggaagcgttggaggacattccctgttgactgcgtcgcgatgtgtggcgactgtgtggagaaggaatatcccaaccggggtaatacctgcctggagaatggatctttcttactgaactttacaggctgtgcagtgtgcagtaagcgggattttatgctgatcacaaacaaatccttgaaagaagaagatggagaagaaatagttacctatgatcgagtataccatgctgtgtctgttatgcggcaaagccgaagatactatcagtattctccctagtaatgaactagtccgtaacttgaaagtatttcgatttcttggctttatatatcttgtggaaaggacgaccctcggtacgcaacgtattcccg

SEQ ID NO: 2765 - DNA, 1610 bp, Homo sapiens
  source 1..1610: mol_type = genomic DNA
accgccaccatggaaactcttcaggaatccttaaacacattacttaaacagctagaagaagaaaagaagactcttgaaagtcaagtgaaatactatgcacttaaactggaacaagaatcaaaggcttaccagaagatcaacaatgaacgccgtacatacctagctgaaatgtctcagggttctggtttacatcaagtttctaaaaggcaacaggtggatcaactgcctaggatgcaagagaatctagtgaaaaccctcctcttaaaagaagaattggaccctttaaaggcaaaaatagacatcttattagttggagatgtcactgtgggctacctggctgatactgtacagaaactatttgcaaacatagcagaagtcaccatcaccatcagtgacacgaaggaggcagcagcgcttttggatgattgcatattcaacatggttctcttgaaggtgccttcttcactaagtgccgaggagctggaagccatcaagttaattagatttggcaaaaagaaaaatacacattcactgtttgtttttataatccctgaaaattttaaaggttgtatttcagggcatggaatggatattgctttaactgaaccactgacaatggaaaaaatgagtaatgtggtaaaatactggacaacatgtccctcaaacactgttaagactgaaaacgcaactgggcctgaagaacttggattgcccctgcagaggtcctacagcgaacacctgggatattttcctactgatctatttgcctgctctgaatctttaaggaatggcaatgggcttgaattaaatgcttcgttgtcagagttcgagaaaaacaaaaagatctctcttcttcattcaagcaaggaaaaactaagaagggaaagaatcaaatattgctgtgagcagctgcgtactctcttgccgtatgtaaaagggagaaagaatgatgcggcttcagttcttgaggcaacagttgattatgtgaaatatatccgggagaaaatctctccagccgttatggcccagattacagaagcacttcagagcaacatgaggttttgtaagaaacaacaaacacccattgagctgtctctcccaggcactgtcatggcacagcgggaaaacagtgtgatgagcacttactcccctgagagagggctccaattcctgactaatacgtgctggaatgggtgctccactcctgatgcagagagctccttggatgaagctgtgagagttccatcaagctccgcctcagagaatgctattggtgatccatataaaactcacatttccagtgcagcgctgtctctgaattccttgcatactgtcagatattattctaaagtcaccccttcctacgatgcaactgctgtaacaaatcagaacatttcaattcatttaccttcagccatgcccccggtctcaaagcttctccctcggcactgcacttctgggttgggccagacgtgcactacacatcccaactgtctgcaacagttttgggcgtattagtaatgaactagtccgtaacttgaaagtatttcgatttcttggctttatatatcttgtggaaaggacgacaaacggcgcagattcaatctatc

SEQ ID NO: 2766 - DNA, 1004 bp, Homo sapiens
  source 1..1004: mol_type = genomic DNA
accgccaccatgcattcactaaagaaagtgacttttgaagatgtagctattgacttcacccaggaagagtgggccatgatggacacatccaagagaaagctgtacagagatgtgatgctggaaaatatcagtcacctggtgtccctcgggtaccagataagcaaatcctatataattttgcagctggagcaaggaaaagagctgtggcgggaaggaagagaatttcttcaagaccagaatccagacagggaaagtgcccttaagaaaaaacacatgatatccatgcatcctatcaccagaaaagacgcatccaccagtatgacaatggagaactctctcattctggaggatccttttgaatgtaatgattcgggagaagattgcactcacagttccacaataactcagcgtttgttaactcacagtggaaagaaaccctatgtcagcaaacagtgtggaaaatctcttcgtaatcttttctcccctaaaccacataaacaaattcatactaaaggtaaatcatatcaatgtaatctatgtgaaaaggcctatactaattgctttcgccttagacggcacaagatgactcacactggagagaggccatatgcatgtcatctatgtggaaaagccttcactcagtgttctcaccttagaagacatgagaaaactcacacgggagagagaccatataagtgtcatcaatgtgggaaagcctttattcaatcctttaaccttcgaagacatgagagaactcaccttggaaaaaagtgttatgaatgtgataaaagtgggaaagcctttagtcaaagctctggctttagaggaaacaaaataattcacactggagagaaaccacatgcttgtcttctatgtgggaaggccttcagtctgtcttccgaccttagatagtaatgaactagtccgtaacttgaaagtatttcgatttcttggctttatatatcttgtggaaaggacgacatcccttagattgatcgggtacc

SEQ ID NO: 2767 - DNA, 1466 bp, Homo sapiens
  source 1..1466: mol_type = genomic DNA
accgccaccatgactaaaagagaagcagaggagctgatagaaattgagattgatggaacagagaaagcagagtgcacagaagaaagcattgtagaacaaacctacgcgccagctgaatgtgtaagccaggccatagacatcaatgaaccaataggcaatttaaagaaactgctagaaccaagactacagtgttctttggatgctcatgaaatttgtctgcaagatatccagctggatccagaacgaagtttatttgaccaaggagtaaaaacagatggaactgtacagcttagtgtacaggtaatttcttaccaaggaattgaaccaaagttaaacatccttgaaattgttaaacctgcggacactgttgaggttgttattgatccagatgcccaccatgctgaatcagaagcacatcttgttgaagaagctcaagtgataactcttgatggcacaaaacacatcacaaccatttcagatgaaacttcagaacaagtgacaagatgggctgctgcactggaaggctataggaaagaacaagaacgccttgggataccctatgatcccatacagtggtccacagaccaagtcctgcattgggtggtttgggtaatgaaggaattcagcatgaccgatatagacctcaccacactcaacatttcggggagagaattatgtagtctcaaccaagaagatttttttcagcgggttcctcggggagaaattctctggagtcatctggaacttctccgaaaatatgtattggcaagtcaagaacaacagatgaatgaaatagttacaattgatcaacctgtgcaaattattccagcatcagtgcaatctgctacacctactaccattaaagttataaatagtagtgcgaaagcagccaaagtacaaagagcgccgaggatttcaggagaagatagaagctcacctgggaacagaacaggaaacaatggccaaatccaactatggcagtttttgctagaacttcttactgataaggacgctcgagactgcatttcttgggttggtgatgaaggtgaatttaagctaaatcagcctgaactggttgcacagaaatggggacagcgtaaaaataagcctacgatgaactatgagaaactcagtcgtgcattaagatattattacgatggggacatgatttgtaaagttcaaggcaagagatttgtgtacaagtttgtctgtgacttgaagactcttattggatacagtgcagcggagttgaaccgtttggtcacagaatgtgaacagaagaaacttgcaaagatgcagctccatggaattgcccagccagtcacagcagtagctctggctactgcttctctgcaaacggaaaaggataattagtaatgaactagtccgtaacttgaaagtatttcgatttcttggctttatatatcttgtggaaaggacgactggaacctttgccaacctcgaaa

SEQ ID NO: 2768 - DNA, 4490 bp, Homo sapiens
  source 1..4490: mol_type = genomic DNA
accgccaccatgtaccaaccagaagacgacaacaacagtgacgtgaccagcgacgacgacatgacccggaacagaagagagtcctcaccacctcactcagtccattctttcagtgaccgggactgggaccggaggggcagaagcagagacatggagccacgagaccgctggtcccacaccaggaacccaagaagcaggatgcctccgcgggatctttcccttcctgtggtggcgaaaacaagctttgaaatggacagagaggacgacagggactccagggcttatgagtcccgatctcaggatgctgaatcataccaaaatgtggtggacctcgctgaggacaggaaacctcacaacacaatccaggacaacatggaaaactacaggaagctgctctccctcgtgcagcttgctgaagacgatggccactcccacatgacgcagggccactcatcaagatccaagagaagtgcctacccaagcaccagtcgaggtctaaaaactatgcctgaagccaaaaaatcaacccaccggcgggggatttgtgaagatgaatcttcccacggagtgataatggaaaaattcatcaaggatgtgtcacgcagttccaaatcgggaagagcaagggagtcaagcgaccggtcacagagattccccagaatgtcagatgataactggaaggacatttcattgaacaagagggagtcagtgatccagcagcgggtttatgaagggaatgcatttaggggaggctttaggtttaattcaacccttgtttccagaaagagagttcttgaaagaaagaggcgctatcattttgacacagatgggaagggctcgattcacgatcaaaaaggctgtcccaggaagaagccctttgaatgtggtagtgagatgagaaaagccatgagcgtgagcagcctgagcagcctcagctccccctcctttaccgagtcacagccaattgattttggggcaatgccatatgtatgtgatgagtgtgggaggtcgttcagtgtcatctcagaatttgttgagcaccagatcatgcatactagagagaacctctatgagtatggtgagtcctttatccacagtgtggctgtcagtgaagttcagaaaagtcaggttggagggaaacgttttgaatgtaaggactgtggagagaccttcaataagagtgccgccttggctgaacatcggaagattcatgctagaggttatcttgtggaatgtaagaatcaggaatgtgaggaagccttcatgcctagccccacctttagtgagcttcagaaaatatatggcaaagacaaattctacgagtgcagggtgtgtaaggaaaccttccttcatagttctgccctgattgagcaccagaaaatccactttggggatgacaaagataatgagcgtgaacatgaacgtgaacgtgaacgtgagcgcggggaaacctttaggcccagcccagcccttaatgagtttcagaaaatgtatggtaaagagaaaatgtacgaatgtaaggtgtgtggggagactttccttcatagctcatccctgaaagaacatcagaaaatccatactagagggaacccatttgaaaacaagggtaaagtgtgtgaggaaacctttattcctggtcagtcccttaaaaggcgtcagaaaacttacaataaggagaagctctgtgactttacagatggccgggatgccttcatgcaaagctcagagctcagtgagcatcagaaaattcattctcgaaagaacctctttgaaggcagagggtatgagaaatctgtcattcatagtgggccattcactgaatctcagaagagtcatactataacaagacctcttgaaagtgatgaggacgaaaaggcgttcaccattagctctaacccctatgaaaaccagaagattcccactaaggaaaatgtctatgaggcaaaatcatatgagaggtctgttattcatagcttagcctctgtggaagctcagaaaagtcacagtgtagcagggcccagtaaaccaaaagtaatggcagagtctaccattcagagcttcgatgctatcaaccatcagagagttcgtgctggagggaacacctctgaaggaagggaatacagtaggtctgttatccatagcttagtggcttccaaacctccaagaagtcacaatggaaatgaattggtggaatctaatgagaagggagaatcctccatttatatctcagaccttaatgataagcgacagaagattcctgccagagagaacccttgtgaagggggcagtaagaatcgcaactatgaagactctgtcatacagagtgtattccgtgccaaacctcagaaaagtgttcctggagagggatctggtgagtttaagaaggatggcgaattctctgttcccagctcaaatgtccgtgaataccagaaggctcgtgctaaaaagaaatacattgagcataggagcaatgagacctctgtaattcactctctgccttttggtgaacaaacatttcgccctcgagggatgctctatgaatgtcaggagtgtggggagtgctttgctcatagctctgacctcactgagcaccagaagattcatgatagggagaagccctctggaagcagaaactatgaatggtctgtcattcgcagcttggcccctactgaccctcaaacaagttacgcccaagagcagtatgctaaagagcaagcgcggaacaaatgtaaggacttcagacaattttttgctaccagcgaagacctcaacacaaaccagaaaatctatgaccaagagaagtctcatggcgaggagtctcaaggcgagaatactgatggggaggagacccacagcgaggagacccatggtcaggagacaattgaagaccctgtcattcaaggctcagacatggaagaccctcagaaggatgaccctgatgacaaaatctatgaatgtgaggactgtggcctgggctttgtggatctcacagacctcacagaccatcagaaagtccacagcaggaagtgcctggttgacagtcgggagtacacacattctgtaattcacacccattccatcagcgagtatcagagagattacactggagagcagctgtatgaatgtccaaagtgtggggaatcttttattcatagctcattccttttcgagcatcagagaatccatgaacaagaccagttgtattccatgaaggggtgtgatgatggttttattgccctcttgcccatgaagccacggaggaatcgtgctgcagagaggaatcctgctcttgctgggtcggccattcgatgccttttgtgtggacaaggcttcattcatagctctgcccttaatgagcatatgagacttcatagggaagatgatttactggagcagagccagatggctgaggaagctatcattccaggcttagccctcactgagtttcagagaagtcagaccgaagagagactctttgaatgtgcagtctgtggagaatctttcgtcaacccagcagaacttgcagatcacgtaactgttcataagaatgagccctatgagtacgggtcctcctatactcacacctcatttcttactgagcccctcaaaggagctataccattctatgaatgcaaggattgtggtaagtcctttattcatagcacagtcctcactaaacataaggagcttcatctggaagaagaagaagaagatgaagcagcagcagctgcagcagcagcagcccaggaagttgaagccaatgtccatgttccacaagtagttctgaggattcagggcttaaacgtagaggctgctgagccagaagtggaggctgccgagccagaagtggaggctgctgagccagaagtggaggctgctgagccaaacggagaggctgaagggccagatggagaggctgcagagcccattggagaggctggacagccaaatggagaggccgagcagccaaatggggatgctgatgagccagatggtgcaggtattgaagacccagaagaaagagctgaagagccagagggaaaagctgaagagccagagggagatgccgacgagcctgacggtgtgggaattgaagacccagaagaaggtgaagatcaagagattcaggtagaagaaccatactatgactgccatgaatgcacagaaaccttcacttccagcacagcattcagtgaacacctgaaaactcatgccagcatgatcatatttgagcctgcaaatgcctttggggagtgctcaggctacatcgaacgtgccagcaccagcacaggtggtgccaatcaagctgatgagaagtacttcaaatgtgacgtctgtgggcagctcttcaatgaccgcctgtccctcgccagacaccagaatacccacactggctagtaatgaactagtccgtaacttgaaagtatttcgatttcttggctttatatatcttgtggaaaggacgagcgtgcaataaacgacaagctcgg

SEQ ID NO: 2769 - DNA, 4868 bp, Homo sapiens
  source 1..4868: mol_type = genomic DNA
accgccaccatgctgcctccaaagcacttgtctgccaccaaacctaagaagtcctgggccccaaatctgtatgagctagacagtgacttgactaaggagccggatgtcatcataggagaaggtccaactgactctgagttttttcatcagaggtttcggaacctaatctatgtggaatttgttgggcctcggaagaccctgatcaaactccgaaacctctgcctcgattggttgcagccggagacccgcaccaaggaggagatcatcgagctcttggtccttgagcagtacctgaccatcatccctgaaaagctcaagccttgggtgcgagcaaaaaagccggagaactgtgagaagctcgtcactctgctggagaattacaaggagatgtaccaaccagaagacgacaacaacagtgacgtgaccagcgacgacgacatgacccggaacagaagagagtcctcaccacctcactcagtccattctttcagtgaccgggactgggaccggaggggcagaagcagagacatggagccacgagaccgctggtcccacaccaggaacccaagaagcaggatgcctccgcgggatctttcccttcctgtggtggcgaaaacaagctttgaaatggacagagaggacgacagggactccagggcttatgagtcccgatctcaggatgctgaatcataccaaaatgtggtggacctcgctgaggacaggaaacctcacaacacaatccaggacaacatggaaaactacaggaagctgctctccctcgtgcagcttgctgaagacgatggccactcccacatgacgcagggccactcatcaagatccaagagaagtgcctacccaagcaccagtcgaggtctaaaaactatgcctgaagccaaaaaatcaacccaccggcgggggatttgtgaagatgaatcttcccacggagtgataatggaaaaattcatcaaggatgtgtcacgcagttccaaatcgggaagagcaagggagtcaagcgaccggtcacagagattccccagaatgtcagatgataactggaaggacatttcattgaacaagagggagtcagtgatccagcagcgggtttatgaagggaatgcatttaggggaggctttaggtttaattcaacccttgtttccagaaagagagttcttgaaagaaagaggcgctatcattttgacacagatgggaagggctcgattcacgatcaaaaaggctgtcccaggaagaagccctttgaatgtggtagtgagatgagaaaagccatgagcgtgagcagcctgagcagcctcagctccccctcctttaccgagtcacagccaattgattttggggcaatgccatatgtatgtgatgagtgtgggaggtcgttcagtgtcatctcagaatttgttgagcaccagatcatgcatactagagagaacctctatgagtatggtgagtcctttatccacagtgtggctgtcagtgaagttcagaaaagtcaggttggagggaaacgttttgaatgtaaggactgtggagagaccttcaataagagtgccgccttggctgaacatcggaagattcatgctagaggttatcttgtggaatgtaagaatcaggaatgtgaggaagccttcatgcctagccccacctttagtgagcttcagaaaatatatggcaaagacaaattctacgagtgcagggtgtgtaaggaaaccttccttcatagttctgccctgattgagcaccagaaaatccactttggggatgacaaagataatgagcgtgaacatgaacgtgaacgtgaacgtgagcgcggggaaacctttaggcccagcccagcccttaatgagtttcagaaaatgtatggtaaagagaaaatgtacgaatgtaaggtgtgtggggagactttccttcatagctcatccctgaaagaacatcagaaaatccatactagagggaacccatttgaaaacaagggtaaagtgtgtgaggaaacctttattcctggtcagtcccttaaaaggcgtcagaaaacttacaataaggagaagctctgtgactttacagatggccgggatgccttcatgcaaagctcagagctcagtgagcatcagaaaattcattctcgaaagaacctctttgaaggcagagggtatgagaaatctgtcattcatagtgggccattcactgaatctcagaagagtcatactataacaagacctcttgaaagtgatgaggacgaaaaggcgttcaccattagctctaacccctatgaaaaccagaagattcccactaaggaaaatgtctatgaggcaaaatcatatgagaggtctgttattcatagcttagcctctgtggaagctcagaaaagtcacagtgtagcagggcccagtaaaccaaaagtaatggcagagtctaccattcagagcttcgatgctatcaaccatcagagagttcgtgctggagggaacacctctgaaggaagggaatacagtaggtctgttatccatagcttagtggcttccaaacctccaagaagtcacaatggaaatgaattggtggaatctaatgagaagggagaatcctccatttatatctcagaccttaatgataagcgacagaagattcctgccagagagaacccttgtgaagggggcagtaagaatcgcaactatgaagactctgtcatacagagtgtattccgtgccaaacctcagaaaagtgttcctggagagggatctggtgagtttaagaaggatggcgaattctctgttcccagctcaaatgtccgtgaataccagaaggctcgtgctaaaaagaaatacattgagcataggagcaatgagacctctgtaattcactctctgccttttggtgaacaaacatttcgccctcgagggatgctctatgaatgtcaggagtgtggggagtgctttgctcatagctctgacctcactgagcaccagaagattcatgatagggagaagccctctggaagcagaaactatgaatggtctgtcattcgcagcttggcccctactgaccctcaaacaagttacgcccaagagcagtatgctaaagagcaagcgcggaacaaatgtaaggacttcagacaattttttgctaccagcgaagacctcaacacaaaccagaaaatctatgaccaagagaagtctcatggcgaggagtctcaaggcgagaatactgatggggaggagacccacagcgaggagacccatggtcaggagacaattgaagaccctgtcattcaaggctcagacatggaagaccctcagaaggatgaccctgatgacaaaatctatgaatgtgaggactgtggcctgggctttgtggatctcacagacctcacagaccatcagaaagtccacagcaggaagtgcctggttgacagtcgggagtacacacattctgtaattcacacccattccatcagcgagtatcagagagattacactggagagcagctgtatgaatgtccaaagtgtggggaatcttttattcatagctcattccttttcgagcatcagagaatccatgaacaagaccagttgtattccatgaaggggtgtgatgatggttttattgccctcttgcccatgaagccacggaggaatcgtgctgcagagaggaatcctgctcttgctgggtcggccattcgatgccttttgtgtggacaaggcttcattcatagctctgcccttaatgagcatatgagacttcatagggaagatgatttactggagcagagccagatggctgaggaagctatcattccaggcttagccctcactgagtttcagagaagtcagaccgaagagagactctttgaatgtgcagtctgtggagaatctttcgtcaacccagcagaacttgcagatcacgtaactgttcataagaatgagccctatgagtacgggtcctcctatactcacacctcatttcttactgagcccctcaaaggagctataccattctatgaatgcaaggattgtggtaagtcctttattcatagcacagtcctcactaaacataaggagcttcatctggaagaagaagaagaagatgaagcagcagcagctgcagcagcagcagcccaggaagttgaagccaatgtccatgttccacaagtagttctgaggattcagggcttaaacgtagaggctgctgagccagaagtggaggctgccgagccagaagtggaggctgctgagccagaagtggaggctgctgagccaaacggagaggctgaagggccagatggagaggctgcagagcccattggagaggctggacagccaaatggagaggccgagcagccaaatggggatgctgatgagccagatggtgcaggtattgaagacccagaagaaagagctgaagagccagagggaaaagctgaagagccagagggagatgccgacgagcctgacggtgtgggaattgaagacccagaagaaggtgaagatcaagagattcaggtagaagaaccatactatgactgccatgaatgcacagaaaccttcacttccagcacagcattcagtgaacacctgaaaactcatgccagcatgatcatatttgagcctgcaaatgcctttggggagtgctcaggctacatcgaacgtgccagcaccagcacaggtggtgccaatcaagctgatgagaagtacttcaaatgtgacgtctgtgggcagctcttcaatgaccgcctgtccctcgccagacaccagaatacccacactggctagtaatgaactagtccgtaacttgaaagtatttcgatttcttggctttatatatcttgtggaaaggacgactggtggacgtgtgcggttatggt

SEQ ID NO: 2770 - DNA, 4496 bp, Homo sapiens
  source 1..4496: mol_type = genomic DNA
accgccaccatgtaccaaccagaagacgacaacaacagtgacgtgaccagcgacgacgacatgacccggaacagaagagagtcctcaccacctcactcagtccattctttcagtggtgaccgggactgggaccggaggggcagaagcagagacatggagccacgagaccgctggtcccacaccaggaacccaagaagcaggatgcctccgcgggatctttcccttcctgtggtggcgaaaacaagctttgaaatggacagagaggacgacagggactccagggcttatgagtcccgatctcaggatgctgaatcataccaaaatgtggtggacctcgctgaggacaggaaacctcacaacacaatccaggacaacatggaaaactacaggaagctgctctccctcggagtgcagcttgctgaagacgatggccactcccacatgacgcagggccactcatcaagatccaagagaagtgcctacccaagcaccagtcgaggtctaaaaactatgcctgaagccaaaaaatcaacccaccggcgggggatttgtgaagatgaatcttcccacggagtgataatggaaaaattcatcaaggatgtgtcacgcagttccaaatcgggaagagcaagggagtcaagcgaccggtcacagagattccccagaatgtcagatgataactggaaggacatttcattgaacaagagggagtcagtgatccagcagcgggtttatgaagggaatgcatttaggggaggctttaggtttaattcaacccttgtttccagaaagagagttcttgaaagaaagaggcgctatcattttgacacagatgggaagggctcgattcacgatcaaaaaggctgtcccaggaagaagccctttgaatgtggtagtgagatgagaaaagccatgagcgtgagcagcctgagcagcctcagctccccctcctttaccgagtcacagccaattgattttggggcaatgccatatgtatgtgatgagtgtgggaggtcgttcagtgtcatctcagaatttgttgagcaccagatcatgcatactagagagaacctctatgagtatggtgagtcctttatccacagtgtggctgtcagtgaagttcagaaaagtcaggttggagggaaacgttttgaatgtaaggactgtggagagaccttcaataagagtgccgccttggctgaacatcggaagattcatgctagaggttatcttgtggaatgtaagaatcaggaatgtgaggaagccttcatgcctagccccacctttagtgagcttcagaaaatatatggcaaagacaaattctacgagtgcagggtgtgtaaggaaaccttccttcatagttctgccctgattgagcaccagaaaatccactttggggatgacaaagataatgagcgtgaacatgaacgtgaacgtgaacgtgagcgcggggaaacctttaggcccagcccagcccttaatgagtttcagaaaatgtatggtaaagagaaaatgtacgaatgtaaggtgtgtggggagactttccttcatagctcatccctgaaagaacatcagaaaatccatactagagggaacccatttgaaaacaagggtaaagtgtgtgaggaaacctttattcctggtcagtcccttaaaaggcgtcagaaaacttacaataaggagaagctctgtgactttacagatggccgggatgccttcatgcaaagctcagagctcagtgagcatcagaaaattcattctcgaaagaacctctttgaaggcagagggtatgagaaatctgtcattcatagtgggccattcactgaatctcagaagagtcatactataacaagacctcttgaaagtgatgaggacgaaaaggcgttcaccattagctctaacccctatgaaaaccagaagattcccactaaggaaaatgtctatgaggcaaaatcatatgagaggtctgttattcatagcttagcctctgtggaagctcagaaaagtcacagtgtagcagggcccagtaaaccaaaagtaatggcagagtctaccattcagagcttcgatgctatcaaccatcagagagttcgtgctggagggaacacctctgaaggaagggaatacagtaggtctgttatccatagcttagtggcttccaaacctccaagaagtcacaatggaaatgaattggtggaatctaatgagaagggagaatcctccatttatatctcagaccttaatgataagcgacagaagattcctgccagagagaacccttgtgaagggggcagtaagaatcgcaactatgaagactctgtcatacagagtgtattccgtgccaaacctcagaaaagtgttcctggagagggatctggtgagtttaagaaggatggcgaattctctgttcccagctcaaatgtccgtgaataccagaaggctcgtgctaaaaagaaatacattgagcataggagcaatgagacctctgtaattcactctctgccttttggtgaacaaacatttcgccctcgagggatgctctatgaatgtcaggagtgtggggagtgctttgctcatagctctgacctcactgagcaccagaagattcatgatagggagaagccctctggaagcagaaactatgaatggtctgtcattcgcagcttggcccctactgaccctcaaacaagttacgcccaagagcagtatgctaaagagcaagcgcggaacaaatgtaaggacttcagacaattttttgctaccagcgaagacctcaacacaaaccagaaaatctatgaccaagagaagtctcatggcgaggagtctcaaggcgagaatactgatggggaggagacccacagcgaggagacccatggtcaggagacaattgaagaccctgtcattcaaggctcagacatggaagaccctcagaaggatgaccctgatgacaaaatctatgaatgtgaggactgtggcctgggctttgtggatctcacagacctcacagaccatcagaaagtccacagcaggaagtgcctggttgacagtcgggagtacacacattctgtaattcacacccattccatcagcgagtatcagagagattacactggagagcagctgtatgaatgtccaaagtgtggggaatcttttattcatagctcattccttttcgagcatcagagaatccatgaacaagaccagttgtattccatgaaggggtgtgatgatggttttattgccctcttgcccatgaagccacggaggaatcgtgctgcagagaggaatcctgctcttgctgggtcggccattcgatgccttttgtgtggacaaggcttcattcatagctctgcccttaatgagcatatgagacttcatagggaagatgatttactggagcagagccagatggctgaggaagctatcattccaggcttagccctcactgagtttcagagaagtcagaccgaagagagactctttgaatgtgcagtctgtggagaatctttcgtcaacccagcagaacttgcagatcacgtaactgttcataagaatgagccctatgagtacgggtcctcctatactcacacctcatttcttactgagcccctcaaaggagctataccattctatgaatgcaaggattgtggtaagtcctttattcatagcacagtcctcactaaacataaggagcttcatctggaagaagaagaagaagatgaagcagcagcagctgcagcagcagcagcccaggaagttgaagccaatgtccatgttccacaagtagttctgaggattcagggcttaaacgtagaggctgctgagccagaagtggaggctgccgagccagaagtggaggctgctgagccagaagtggaggctgctgagccaaacggagaggctgaagggccagatggagaggctgcagagcccattggagaggctggacagccaaatggagaggccgagcagccaaatggggatgctgatgagccagatggtgcaggtattgaagacccagaagaaagagctgaagagccagagggaaaagctgaagagccagagggagatgccgacgagcctgacggtgtgggaattgaagacccagaagaaggtgaagatcaagagattcaggtagaagaaccatactatgactgccatgaatgcacagaaaccttcacttccagcacagcattcagtgaacacctgaaaactcatgccagcatgatcatatttgagcctgcaaatgcctttggggagtgctcaggctacatcgaacgtgccagcaccagcacaggtggtgccaatcaagctgatgagaagtacttcaaatgtgacgtctgtgggcagctcttcaatgaccgcctgtccctcgccagacaccagaatacccacactggctagtaatgaactagtccgtaacttgaaagtatttcgatttcttggctttatatatcttgtggaaaggacgataggccgccgaatcccatcctctg

SEQ ID NO: 2771 - DNA, 1745 bp, Homo sapiens
  source 1..1745: mol_type = genomic DNA
accgccaccatggcacgtttaacaaaaagacgacaggcggatacaaaagctatccagcatctttgggcagccattgagattatacggaaccagaagcagattgccaacattgaccgtattacaaagtatatgtctcgagtccacggtatgcaccctaaagagaccacccgtcagctgagcttagctgtgaaagatggtcttattgtcgaaactctaacagtgggctgcaaaggttcaaaagctggtattgaacaagaaggatattggttgccaggagatgagattagcattaagaagaagaatacaaacaaacaggagatgggcacatacctcagattcattgtctcccgcatgaaggagagggctatagatcttaataaaaaggggaaggacaataaacacccgatgtacaggaggctggtgcactcagctgtggacgttcccaccattcaagagaaagtgaatgaagggaaataccgaagttatgaagagttcaaagctgatgcccaattgcttctccacaataccgtgattttctatggagacagtgagcaagctgacattgcgaggatgctatataaagacacatgtcatgagctggatgaactgcagctttgcaagaattgcttttacttgtcaaatgctcgtcctgacaactggttctgttatccttgtatacctaatcatgagctggtttgggctaaaatgaaaggttttgggttttggccagccaaagtcatgcagaaagaagacaatcaagtcgacgttcgcttctttggccaccaccaccagagggcctggattccttctgaaaacattcaagatatcacagtcaacattcatcggctgcacgtgaagcgcagtatgggttggaaaaaggcctgtgatgagctggagctgcatcagcgtttcctacgagaagggagattttggaaatctaagaatgaggaccgaggtgaggaagaggcagaatccagtatctcctccaccagtaatgagcagctaaaggtcactcaagaaccaagagcaaagaaaggacgacgtaatcaaagtgtggagcccaaaaaggaagaaccagagcctgaaacagaagcagtaagttctagccaggaaatacccacgatgcctcagcccatcgaaaaagtctccgtgtcaactcagacaaagaagttaagtgcctcttcaccaagaatgctgcatcggagcacccagaccacaaacgacggcgtgtgtcagagcatgtgccatgacaaatacaccaagatcttcaatgacttcaaagaccggatgaagtcggaccacaagcgggagacagagcgtgttgtccgagaagctctggagaagctgcgttctgaaatggaagaagaaaagagacaagctgtaaataaagctgtagccaacatgcagggtgagatggacagaaaatgtaagcaagtaaaggaaaagtgtaaggaagaatttgtagaagaaatcaagaagctggcaacacagcacaagcaactgatttctcagaccaagaagaagcagtggtgctacaactgtgaggaggaggccatgtaccactgctgctggaacacatcctactgctccatcaagtgccagcaggagcactggcacgcggagcacaagcgcacctgccgccggaaaagatagtaatgaactagtccgtaacttgaaagtatttcgatttcttggctttatatatcttgtggaaaggacgatctcctaagatagtttgttggccg

SEQ ID NO: 2772 - DNA, 1808 bp, Homo sapiens
  source 1..1808: mol_type = genomic DNA
accgccaccatggcacgtttaacaaaaagacgacaggcggatacaaaagctatccagcatctttgggcagccattgagattatacggaaccagaagcagattgccaacattgaccgtattacaaagtatatgtctcgagtccacggtatgcaccctaaagagaccacccgtcagctgagcttagctgtgaaagatggtcttattgtcgaaactctaacagtgggctgcaaaggttcaaaagctggtattgaacaagaaggatattggttgccaggagatgagattgactgggaaacagaaaatcatgactggtattgttttgaatgccatttgcctggagaggtgttgatatgtgacctgtgttttcgtgtgtatcattccaagtgtttgtctgatgagttcaggcttagagacagcagtagtccctggcagtgcccagtttgcaggagcattaagaagaagaatacaaacaaacaggagatgggcacatacctcagattcattgtctcccgcatgaaggagagggctatagatcttaataaaaaggggaaggacaataaacacccgatgtacaggaggctggtgcactcagctgtggacgttcccaccattcaagagaaagtgaatgaagggaaataccgaagttatgaagagttcaaagctgatgcccaattgcttctccacaataccgtgattttctatggagcagacagtgagcaagctgacattgcgaggatgctatataaagacacatgtcatgagctggatgaactgcagctttgcaagaattgcttttacttgtcaaatgctcgtcctgacaactggttctgttatccttgtatacctaatcatgagctggtttgggctaaaatgaaaggttttgggttttggccagccaaagtcatgcagaaagaagacaatcaagtcgacgttcgcttctttggccaccaccaccagagggcctggattccttctgaaaacattcaagatatcacagtcaacattcatcggctgcacgtgaagcgcagtatgggttggaaaaaggcctgtgatgagctggagctgcatcagcgtttcctacgagaagggagattttggaaatctaagaatgaggaccgaggtgaggaagaggcagaatccagtatctcctccaccagtaatgagcagctaaaggtcactcaagaaccaagagcaaagaaaggacgacgtaatcaaagtgtggagcccaaaaaggaagaaccagagcctgaaacagaagcagtaagttctagccaggaaatacccacgatgcctcagcccatcgaaaaagtctccgtgtcaactcagacaaagaagttaagtgcctcttcaccaagaatgctgcatcggagcacccagaccacaaacgacggcgtgtgtcagagcatgtgccatgacaaatacaccaagatcttcaatgacttcaaagaccggatgaagtcggaccacaagcgggagacagagcgtgttgtccgagaagctctggagaagctgcgttctgaaatggaagaagaaaagagacaagctgtaaataaagctgtagccaacatgcagggtgagatggacagaaaatgtaagcaagtaaaggaaaagtgtaaggaagaatttgtagaagaaatcaagaagctggcaacacagcacaagcaactgatttctcagaccaagaagaagcagtgggtaaataccagtcttttttagtaatgaactagtccgtaacttgaaagtatttcgatttcttggctttatatatcttgtggaaaggacgacctttatgtagcgatccgagcagc

SEQ ID NO: 2773 - DNA, 1655 bp, Homo sapiens
  source 1..1655: mol_type = genomic DNA
accgccaccatggcacgtttaacaaaaagacgacaggcggatacaaaagctatccagcatctttgggcagccattgagattatacggaaccagaagcagattgccaacattgaccgtattacaaagtatatgtctcgagtccacggtatgcaccctaaagagaccacccgtcagctgagcttagctgtgaaagatggtcttattgtcgaaactctaacagtgggctgcaaaggttcaaaagctggtattgaacaagaaggatattggttgccaggagatgagattagcattaagaagaagaatacaaacaaacaggagatgggcacatacctcagattcattgtctcccgcatgaaggagaggaaagtgaatgaagggaaataccgaagttatgaagagttcaaagctgatgcccaattgcttctccacaataccgtgattttctatggagcagacagtgagcaagctgacattgcgaggatgctatataaagacacatgtcatgagctggatgaactgcagctttgcaagaattgcttttacttgtcaaatgctcgtcctgacaactggttctgttatccttgtatacctaatcatgagctggtttgggctaaaatgaaaggttttgggttttggccagccaaagtcatgcagaaagaagacaatcaagtcgacgttcgcttctttggccaccaccaccagagggcctggattccttctgaaaacattcaagatatcacagtcaacattcatcggctgcacgtgaagcgcagtatgggttggaaaaaggcctgtgatgagctggagctgcatcagcgtttcctacgagaagggagattttggaaatctaagaatgaggaccgaggtgaggaagaggcagaatccagtatctcctccaccagtaatgagcagctaaaggtcactcaagaaccaagagcaaagaaaggacgacgtaatcaaagtgtggagcccaaaaaggaagaaccagagcctgaaacagaagcagtaagttctagccaggaaatacccacgatgcctcagcccatcgaaaaagtctccgtgtcaactcagacaaagaagttaagtgcctcttcaccaagaatgctgcatcggagcacccagaccacaaacgacggcgtgtgtcagagcatgtgccatgacaaatacaccaagatcttcaatgacttcaaagaccggatgaagtcggaccacaagcgggagacagagcgtgttgtccgagaagctctggagaagctgcgttctgaaatggaagaagaaaagagacaagctgtaaataaagctgtagccaacatgcagggtgagatggacagaaaatgtaagcaagtaaaggaaaagtgtaaggaagaatttgtagaagaaatcaagaagctggcaacacagcacaagcaactgatttctcagaccaagaagaagcagtggtgctacaactgtgaggaggaggccatgtaccactgctgctggaacacatcctactgctccatcaagtgccagcaggagcactggcacgcggagcacaagcgcacctgccgccggaaaagatagtaatgaactagtccgtaacttgaaagtatttcgatttcttggctttatatatcttgtggaaaggacgatcttccgtccatccctagctacct

SEQ ID NO: 2774 - DNA, 1910 bp, Homo sapiens
  source 1..1910: mol_type = genomic DNA
accgccaccatggcacgtttaacaaaaagacgacaggcggatacaaaagctatccagcatctttgggcagccattgagattatacggaaccagaagcagattgccaacattgaccgtattacaaagtatatgtctcgagtccacggtatgcaccctaaagagaccacccgtcagctgagcttagctgtgaaagatggtcttattgtcgaaactctaacagtgggctgcaaaggttcaaaagctggtattgaacaagaaggatattggttgccaggagatgagattgactgggaaacagaaaatcatgactggtattgttttgaatgccatttgcctggagaggtgttgatatgtgacctgtgttttcgtgtgtatcattccaagtgtttgtctgatgagttcaggcttagagacagcagtagtccctggcagtgcccagtttgcaggagcattaagaagaagaatacaaacaaacaggagatgggcacatacctcagattcattgtctcccgcatgaaggagagggctatagatcttaataaaaaggggaaggacaataaacacccgatgtacaggaggctggtgcactcagctgtggacgttcccaccattcaagagaaagtgaatgaagggaaataccgaagttatgaagagttcaaagctgatgcccaattgcttctccacaataccgtgattttctatggagcagacagtgagcaagctgacattgcgaggatgctatataaagacacatgtcatgagctggatgaactgcagctttgcaagaattgcttttacttgtcaaatgctcgtcctgacaactggttctgttatccttgtatacctaatcatgagctggtttgggctaaaatgaaaggttttgggttttggccagccaaagtcatgcagaaagaagacaatcaagtcgacgttcgcttctttggccaccaccaccagagggcctggattccttctgaaaacattcaagatatcacagtcaacattcatcggctgcacgtgaagcgcagtatgggttggaaaaaggcctgtgatgagctggagctgcatcagcgtttcctacgagaagggagattttggaaatctaagaatgaggaccgaggtgaggaagaggcagaatccagtatctcctccaccagtaatgagcagctaaaggtcactcaagaaccaagagcaaagaaaggacgacgtaatcaaagtgtggagcccaaaaaggaagaaccagagcctgaaacagaagcagtaagttctagccaggaaatacccacgatgcctcagcccatcgaaaaagtctccgtgtcaactcagacaaagaagttaagtgcctcttcaccaagaatgctgcatcggagcacccagaccacaaacgacggcgtgtgtcagagcatgtgccatgacaaatacaccaagatcttcaatgacttcaaagaccggatgaagtcggaccacaagcgggagacagagcgtgttgtccgagaagctctggagaagctgcgttctgaaatggaagaagaaaagagacaagctgtaaataaagctgtagccaacatgcagggtgagatggacagaaaatgtaagcaagtaaaggaaaagtgtaaggaagaatttgtagaagaaatcaagaagctggcaacacagcacaagcaactgatttctcagaccaagaagaagcagtggtgctacaactgtgaggaggaggccatgtaccactgctgctggaacacatcctactgctccatcaagtgccagcaggagcactggcacgcggagcacaagcgcacctgccgccggaaaagatagtaatgaactagtccgtaacttgaaagtatttcgatttcttggctttatatatcttgtggaaaggacgagattagagcaagattatccgcaac

SEQ ID NO: 2775 - DNA, 1859 bp, Homo sapiens
  source 1..1859: mol_type = genomic DNA
accgccaccatggtgatttttacatcattacacagatatgtcattttcattagttgtatcattgttataaactggtatatgtctcgagtccacggtatgcaccctaaagagaccacccgtcagctgagcttagctgtgaaagatggtcttattgtcgaaactctaacagtgggctgcaaaggttcaaaagctggtattgaacaagaaggatattggttgccaggagatgagattgactgggaaacagaaaatcatgactggtattgttttgaatgccatttgcctggagaggtgttgatatgtgacctgtgttttcgtgtgtatcattccaagtgtttgtctgatgagttcaggcttagagacagcagtagtccctggcagtgcccagtttgcaggagcattaagaagaagaatacaaacaaacaggagatgggcacatacctcagattcattgtctcccgcatgaaggagagggctatagatcttaataaaaaggggaaggacaataaacacccgatgtacaggaggctggtgcactcagctgtggacgttcccaccattcaagagaaagtgaatgaagggaaataccgaagttatgaagagttcaaagctgatgcccaattgcttctccacaataccgtgattttctatggagcagacagtgagcaagctgacattgcgaggatgctatataaagacacatgtcatgagctggatgaactgcagctttgcaagaattgcttttacttgtcaaatgctcgtcctgacaactggttctgttatccttgtatacctaatcatgagctggtttgggctaaaatgaaaggttttgggttttggccagccaaagtcatgcagaaagaagacaatcaagtcgacgttcgcttctttggccaccaccaccagagggcctggattccttctgaaaacattcaagatatcacagtcaacattcatcggctgcacgtgaagcgcagtatgggttggaaaaaggcctgtgatgagctggagctgcatcagcgtttcctacgagaagggagattttggaaatctaagaatgaggaccgaggtgaggaagaggcagaatccagtatctcctccaccagtaatgagcagctaaaggtcactcaagaaccaagagcaaagaaaggacgacgtaatcaaagtgtggagcccaaaaaggaagaaccagagcctgaaacagaagcagtaagttctagccaggaaatacccacgatgcctcagcccatcgaaaaagtctccgtgtcaactcagacaaagaagttaagtgcctcttcaccaagaatgctgcatcggagcacccagaccacaaacgacggcgtgtgtcagagcatgtgccatgacaaatacaccaagatcttcaatgacttcaaagaccggatgaagtcggaccacaagcgggagacagagcgtgttgtccgagaagctctggagaagctgcgttctgaaatggaagaagaaaagagacaagctgtaaataaagctgtagccaacatgcagggtgagatggacagaaaatgtaagcaagtaaaggaaaagtgtaaggaagaatttgtagaagaaatcaagaagctggcaacacagcacaagcaactgatttctcagaccaagaagaagcagtggtgctacaactgtgaggaggaggccatgtaccactgctgctggaacacatcctactgctccatcaagtgccagcaggagcactggcacgcggagcacaagcgcacctgccgccggaaaagatagtaatgaactagtccgtaacttgaaagtatttcgatttcttggctttatatatcttgtggaaaggacgaaatctctctagcgtaagctttctc

SEQ ID NO: 2776 - DNA, 1805 bp, Homo sapiens
  source 1..1805: mol_type = genomic DNA
accgccaccatggcacgtttaacaaaaagacgacaggcggatacaaaagctatccagcatctttgggcagccattgagattatacggaaccagaagcagattgccaacattgaccgtattacaaagtatatgtctcgagtccacggtatgcaccctaaagagaccacccgtcagctgagcttagctgtgaaagatggtcttattgtcgaaactctaacagtgggctgcaaaggttcaaaagctggtattgaacaagaaggatattggttgccaggagatgagattgactgggaaacagaaaatcatgactggtattgttttgaatgccatttgcctggagaggtgttgatatgtgacctgtgttttcgtgtgtatcattccaagtgtttgtctgatgagttcaggcttagagacagcagtagtccctggcagtgcccagtttgcaggagcattaagaagaagaatacaaacaaacaggagatgggcacatacctcagattcattgtctcccgcatgaaggagagggctatagatcttaataaaaaggggaaggacaataaacacccgatgtacaggaggctggtgcactcagctgtggacgttcccaccattcaagagaaagtgaatgaagggaaataccgaagttatgaagagttcaaagctgatgcccaattgcttctccacaataccgtgattttctatggagacagtgagcaagctgacattgcgaggatgctatataaagacacatgtcatgagctggatgaactgcagctttgcaagaattgcttttacttgtcaaatgctcgtcctgacaactggttctgttatccttgtatacctaatcatgagctggtttgggctaaaatgaaaggttttgggttttggccagccaaagtcatgcagaaagaagacaatcaagtcgacgttcgcttctttggccaccaccaccagagggcctggattccttctgaaaacattcaagatatcacagtcaacattcatcggctgcacgtgaagcgcagtatgggttggaaaaaggcctgtgatgagctggagctgcatcagcgtttcctacgagaagggagattttggaaatctaagaatgaggaccgaggtgaggaagaggcagaatccagtatctcctccaccagtaatgagcagctaaaggtcactcaagaaccaagagcaaagaaaggacgacgtaatcaaagtgtggagcccaaaaaggaagaaccagagcctgaaacagaagcagtaagttctagccaggaaatacccacgatgcctcagcccatcgaaaaagtctccgtgtcaactcagacaaagaagttaagtgcctcttcaccaagaatgctgcatcggagcacccagaccacaaacgacggcgtgtgtcagagcatgtgccatgacaaatacaccaagatcttcaatgacttcaaagaccggatgaagtcggaccacaagcgggagacagagcgtgttgtccgagaagctctggagaagctgcgttctgaaatggaagaagaaaagagacaagctgtaaataaagctgtagccaacatgcagggtgagatggacagaaaatgtaagcaagtaaaggaaaagtgtaaggaagaatttgtagaagaaatcaagaagctggcaacacagcacaagcaactgatttctcagaccaagaagaagcagtgggtaaataccagtcttttttagtaatgaactagtccgtaacttgaaagtatttcgatttcttggctttatatatcttgtggaaaggacgaacaatgcatcgttaataaacgaag

SEQ ID NO: 2777 - DNA, 1748 bp, Homo sapiens
  source 1..1748: mol_type = genomic DNA
accgccaccatggcacgtttaacaaaaagacgacaggcggatacaaaagctatccagcatctttgggcagccattgagattatacggaaccagaagcagattgccaacattgaccgtattacaaagtatatgtctcgagtccacggtatgcaccctaaagagaccacccgtcagctgagcttagctgtgaaagatggtcttattgtcgaaactctaacagtgggctgcaaaggttcaaaagctggtattgaacaagaaggatattggttgccaggagatgagattagcattaagaagaagaatacaaacaaacaggagatgggcacatacctcagattcattgtctcccgcatgaaggagagggctatagatcttaataaaaaggggaaggacaataaacacccgatgtacaggaggctggtgcactcagctgtggacgttcccaccattcaagagaaagtgaatgaagggaaataccgaagttatgaagagttcaaagctgatgcccaattgcttctccacaataccgtgattttctatggagcagacagtgagcaagctgacattgcgaggatgctatataaagacacatgtcatgagctggatgaactgcagctttgcaagaattgcttttacttgtcaaatgctcgtcctgacaactggttctgttatccttgtatacctaatcatgagctggtttgggctaaaatgaaaggttttgggttttggccagccaaagtcatgcagaaagaagacaatcaagtcgacgttcgcttctttggccaccaccaccagagggcctggattccttctgaaaacattcaagatatcacagtcaacattcatcggctgcacgtgaagcgcagtatgggttggaaaaaggcctgtgatgagctggagctgcatcagcgtttcctacgagaagggagattttggaaatctaagaatgaggaccgaggtgaggaagaggcagaatccagtatctcctccaccagtaatgagcagctaaaggtcactcaagaaccaagagcaaagaaaggacgacgtaatcaaagtgtggagcccaaaaaggaagaaccagagcctgaaacagaagcagtaagttctagccaggaaatacccacgatgcctcagcccatcgaaaaagtctccgtgtcaactcagacaaagaagttaagtgcctcttcaccaagaatgctgcatcggagcacccagaccacaaacgacggcgtgtgtcagagcatgtgccatgacaaatacaccaagatcttcaatgacttcaaagaccggatgaagtcggaccacaagcgggagacagagcgtgttgtccgagaagctctggagaagctgcgttctgaaatggaagaagaaaagagacaagctgtaaataaagctgtagccaacatgcagggtgagatggacagaaaatgtaagcaagtaaaggaaaagtgtaaggaagaatttgtagaagaaatcaagaagctggcaacacagcacaagcaactgatttctcagaccaagaagaagcagtggtgctacaactgtgaggaggaggccatgtaccactgctgctggaacacatcctactgctccatcaagtgccagcaggagcactggcacgcggagcacaagcgcacctgccgccggaaaagatagtaatgaactagtccgtaacttgaaagtatttcgatttcttggctttatatatcttgtggaaaggacgaactgtccggcttgccagtggatgg

SEQ ID NO: 2778 - DNA, 1409 bp, Homo sapiens
  source 1..1409: mol_type = genomic DNA
accgccaccatagcgtccaacagctggaacgccagcagcagccccggggaggcccgggaggatgggcccgagggcctggacaaggggctggacaacgatgcggagggcgtgtggagcccggacatcgagcagagcttccaggaggccctggccatctacccgccctgcggccggcggaagatcatcctgtcagacgagggcaagatgtacggccgaaatgagttgattgcacgctatattaaactgaggacggggaagactcggacgagaaaacaggtgtccagccacatacaggttctagctcggaagaaggtgcgggagtaccaggttggcatcaaggccatgaacctggaccaggtctccaaggacaaagcccttcagagcatggcgtccatgtcctctgcccagatcgtctctgccagtgtcctgcagaacaagttcagcccaccttcccctctgccccaggccgtcttctccacttcctcgcggttctggagcagcccccctctcctgggacagcagcctggaccctctcaggacatcaagccctttgcacagccagcctaccccatccagccgcccctgccgccgacgctcagcagttatgagcccctggccccgctcccctcagctgctgcctctgtgcctgtgtggcaggaccgtaccattgcctcctcccggctgcggctcctggagtattcagccttcatggaggtgcagcgagaccctgacacgtacagcaaacacctgtttgtgcacatcggccagacgaaccccgccttctcagacccacccctggaggcagtagatgtgcgccagatctatgacaaattccccgagaaaaagggaggattgaaggagctctatgagaaggggccccctaatgccttcttccttgtcaagttctgggccgacctcaacagcaccatccaggagggcccgggagccttctatggggtcagctctcagtacagctctgctgatagcatgaccatcagcgtctccaccaaggtgtgctcctttggcaaacaggtggtagagaaggtggagactgagtatgccaggctggagaacgggcgctttgtgtaccgtatccaccgctcgcccatgtgcgagtacatgatcaacttcatccacaagctgaagcacctgcccgagaagtacatgatgaacagcgtgctggagaacttcaccatcctgcaggtggtcacgagccgggactcccaggagaccctgcttgtcattgcttttgtcttcgaagtctccaccagtgagcacggggcccagcaccatgtctacaagctcgtcaaagactagtaatgaactagtccgtaacttgaaagtatttcgatttcttggctttatatatcttgtggaaaggacgaccctaagtccgggtcagatgtttg

SEQ ID NO: 2779 - DNA, 1457 bp, Homo sapiens
  source 1..1457: mol_type = genomic DNA
accgccaccatgggggaaccccgggctggggccgccctggacgatggcagcggctggacgggcagtgaggaaggcagtgaggagggtaccggcggcagtgagggggctgggggtgacgggggcccggatgcagagggggtgtggagcccagacattgagcagagcttccaggaggccctggccatctatccaccctgcggccgccggaaaataattttgtctgatgaaggcaagatgtatggtcggaatgaactgatcgcccgctacatcaagctgagaacggggaagacccgaactcgaaaacaggtttctagtcacatccaggttttggcccgaaggaaatcaagggaaatccagtccaagttgaaggctctgaacgtggaccaggtttccaaggacaaggctttccagacaatggcaaccatgtcctctgcccagctcatctccgcgccttctctgcaggccaaactgggtcccactggtcctcaggcctctgagcttttccagttttggtctggaggatctgggcccccctggaatgttccagatgtgaagccattctcacagacaccgttcaccttgtcactgactcccccatctactgacctcccagggtacgagcccccccaagccctctcacccctgcccccacctaccccatcgcccccagcctggcaggctcggggcctgggcaccgcccggttgcagctggtagagttctcagccttcgtggaaccgccagatgcagttgattcttaccagaggcacctgttcgtgcacatcagccagcactgccccagccccggagcgccgccgctcgagagtgtggacgtccggcagatctacgacaaattccctgagaaaaagggtggcctccgagagctatatgatcgtggccccccccatgccttcttcctggtcaagttctgggcggacctgaactggggcccaagtggtgaggaggcaggggccggtggcagcatcagcagtggtggcttctacggagtgagcagccagtatgagagcctggaacacatgaccctcacctgttcctccaaggtctgctcttttggcaagcaggtggtggagaaggtggagacggaacgggcccagctggaggacggcagatttgtgtaccgcctgctgcgctcgcccatgtgcgagtacctggtgaatttcttgcacaagttgcggcagctgcctgagcgatacatgatgaacagcgtcctggaaaacttcaccatcctccaggtggtgacaaacagagacacccaggaactgctgctctgcaccgcctatgtcttcgaggtctccaccagcgagcgtggggcccagcatcacatttaccgcctggtcagggactagtaatgaactagtccgtaacttgaaagtatttcgatttcttggctttatatatcttgtggaaaggacgactgccgggtctcattcgtgcgtca

SEQ ID NO: 2780 - DNA, 1454 bp, Homo sapiens
  source 1..1454: mol_type = genomic DNA
accgccaccatgggggaaccccgggctggggccgccctggacgatggcagcggctggacgggcagtgaggaaggcagtgaggagggtaccggcggcagtgagggggctgggggtgacgggggcccggatgcagagggggtgtggagcccagacattgagcagagcttccaggaggccctggccatctatccaccctgcggccgccggaaaataattttgtctgatgaaggcaagatgtatggtcggaatgaactgatcgcccgctacatcaagctgagaacggggaagacccgaactcgaaaacaggtttctagtcacatccaggttttggcccgaaggaaatcaagggaaatccagtccaagttgaaggaccaggtttccaaggacaaggctttccagacaatggcaaccatgtcctctgcccagctcatctccgcgccttctctgcaggccaaactgggtcccactggtcctcaggtggtccaggcctctgagcttttccagttttggtctggaggatctgggcccccctggaatgttccagatgtgaagccattctcacagacaccgttcaccttgtcactgactcccccatctactgacctcccagggtacgagcccccccaagccctctcacccctgcccccacctaccccatcgcccccagcctggcaggctcggggcctgggcaccgcccggttgcagctggtagagttctcagccttcgtggaaccgccagatgcagttgattcttaccagaggcacctgttcgtgcacatcagccagcactgccccagccccggagcgccgccgctcgagagtgtggacgtccggcagatctacgacaaattccctgagaaaaagggtggcctccgagagctatatgatcgtggccccccccatgccttcttcctggtcaagttctgggcggacctgaactggggcccaagtggtgaggaggcaggggccggtggcagcatcagcagtggtggcttctacggagtgagcagccagtatgagagcctggaacacatgaccctcacctgttcctccaaggtctgctcttttggcaagcaggtggtggagaaggtggagacggaacgggcccagctggaggacggcagatttgtgtaccgcctgctgcgctcgcccatgtgcgagtacctggtgaatttcttgcacaagttgcggcagctgcctgagcgatacatgatgaacagcgtcctggaaaacttcaccatcctccaggtggtgacaaacagagacacccaggaactgctgctctgcaccgcctatgtcttcgaggtctccaccagcgagcgtggggcccagcatcacatttaccgcctggtcagggactagtaatgaactagtccgtaacttgaaagtatttcgatttcttggctttatatatcttgtggaaaggacgattcctttacatgcttacgttgttc

SEQ ID NO: 2781 - DNA, 1061 bp, Homo sapiens
  source 1..1061: mol_type = genomic DNA
accgccaccatggcaaccatgtcctctgcccagctcatctccgcgccttctctgcaggccaaactgggtcccactggtcctcaggtggtccaggcctctgagcttttccagttttggtctggaggatctgggcccccctggaatgttccagatgtgaagccattctcacagacaccgttcaccttgtcactgactcccccatctactgacctcccagggtacgagcccccccaagccctctcacccctgcccccacctaccccatcgcccccagcctggcaggctcggggcctgggcaccgcccggttgcagctggtagagttctcagccttcgtggaaccgccagatgcagttgattcttaccagaggcacctgttcgtgcacatcagccagcactgccccagccccggagcgccgccgctcgagagtgtggacgtccggcagatctacgacaaattccctgagaaaaagggtggcctccgagagctatatgatcgtggccccccccatgccttcttcctggtcaagttctgggcggacctgaactggggcccaagtggtgaggaggcaggggccggtggcagcatcagcagtggtggcttctacggagtgagcagccagtatgagagcctggaacacatgaccctcacctgttcctccaaggtctgctcttttggcaagcaggtggtggagaaggtggagacggaacgggcccagctggaggacggcagatttgtgtaccgcctgctgcgctcgcccatgtgcgagtacctggtgaatttcttgcacaagttgcggcagctgcctgagcgatacatgatgaacagcgtcctggaaaacttcaccatcctccaggtggtgacaaacagagacacccaggaactgctgctctgcaccgcctatgtcttcgaggtctccaccagcgagcgtggggcccagcatcacatttaccgcctggtcagggactagtaatgaactagtccgtaacttgaaagtatttcgatttcttggctttatatatcttgtggaaaggacgattgagtgtgtacacaatcggtaag

SEQ ID NO: 2782 - DNA, 1382 bp, Homo sapiens
  source 1..1382: mol_type = genomic DNA
accgccaccattgagcccagcagctggagcggcagtgagagccctgccgaaaacatggaaaggatgagtgactctgcagataagccaattgacaatgatgcagaaggggtctggagccccgacatcgagcaaagctttcaggaggccctggctatctatccaccatgtgggaggaggaaaatcatcttatcagacgaaggcaaaatgtatggtaggaatgaattgatagccagatacatcaaactcaggacaggcaagacgaggaccagaaaacaggtgtctagtcacattcaggttcttgccagaaggaaatctcgtgattttcattccaagctaaaggatcagactgcaaaggataaggccctgcagcacatggcggccatgtcctcagcccagatcgtctcggccactgccattcataacaagctggggctgcctgggattccacgcccgaccttcccaggggcgccggggttctggccgggaatgattcaaacagggcagccaggatcctcacaagacgtcaagccttttgtgcagcaggcctaccccatccagccagcggtcacagcccccattccagggtttgagcctgcatcggccccagctccctcagtccctgcctggcaaggtcgctccattggcacaaccaagcttcgcctggtggaattttcagcttttctcgagcagcagcgagacccagactcgtacaacaaacacctcttcgtgcacattgggcatgccaaccattcttacagtgacccattgcttgaatcagtggacattcgtcagatttatgacaaatttcctgaaaagaaaggtggcttaaaggaactgtttggaaagggccctcaaaatgccttcttcctcgtaaaattctgggctgatttaaactgcaatattcaagatgatgctggggctttttatggtgtaaccagtcagtacgagagttctgaaaatatgacagtcacctgttccaccaaagtttgctcctttgggaagcaagtagtagaaaaagtagagacggagtatgcaaggtttgagaatggccgatttgtataccgaataaaccgctccccaatgtgtgaatatatgatcaacttcatccacaagctcaaacacttaccagagaaatatatgatgaacagtgttttggaaaacttcacaattttattggtggtaacaaacagggatacacaagaaactctactctgcatggcctgtgtgtttgaagtttcaaatagtgaacacggagcacaacatcatatttacaggcttgtaaaggactagtaatgaactagtccgtaacttgaaagtatttcgatttcttggctttatatatcttgtggaaaggacgagacagttctttcaaccacgggtac

SEQ ID NO: 2783 - DNA, 1019 bp, Homo sapiens
  source 1..1019: mol_type = genomic DNA
accgccaccatggctgccatgtcgtctgcacagatcatctccgccacggccttccacagtagcatggccctcgcccggggccccggccgcccagcagtctcagggttttggcaaggagctttgccaggccaagccggaacgtcccatgatgtgaagcctttctctcagcaaacctatgctgtccagcctccgctgcctctgccagggtttgagtctcctgcagggcccgccccatcgccctctgcgcccccggcacccccatggcagggccgcagcgtggccagctccaagctctggatgttggagttctctgccttcctggagcagcagcaggacccggacacgtacaacaagcacctgttcgtgcacattggccagtccagcccaagctacagcgacccctacctcgaagccgtggacatccgccaaatctatgacaaattcccggagaaaaagggtggactcaaggatctcttcgaacggggaccctccaatgccttttttcttgtgaagttctgggcagacctcaacaccaacatcgaggatgaaggcagctccttctatggggtctccagccagtatgagagccccgagaacatgatcatcacctgctccacgaaggtctgctctttcggcaagcaggtggtggagaaagttgagacagagtatgctcgctatgagaatggacactactcttaccgcatccaccggtccccgctctgtgagtacatgatcaacttcatccacaagctcaagcacctccctgagaagtacatgatgaacagcgtgctggagaacttcaccatcctgcaggtggtcaccaacagagacacacaggagaccttgctgtgcattgcctatgtctttgaggtgtcagccagtgagcacggggctcagcaccacatctacaggctggtgaaagaatagtaatgaactagtccgtaacttgaaagtatttcgatttcttggctttatatatcttgtggaaaggacgagtcaagggctttcacgcacactgt

SEQ ID NO: 2784 - DNA, 665 bp, Homo sapiens
  source 1..665: mol_type = genomic DNA
accgccaccatgccatctctgcctcactcccacagggtaatgttggactcggtgacacacagcaccttcctgcctaatgcatccttctgcgatcccctgatgtcgtggactgatctgttcagcaatgaagagtactaccctgcctttgagcatcagacaggttactccttttttaatgacgctgaagaaagcaaggccaccatcaaagactatgctgattccaactgcttgaaaacaagtggcatcaaaagtcaagactgtcacagtcatagtagaacaagcctccaaagttctcatctatgggaatttgtacgagacctgcttctatctcctgaagaaaactgtggcattctggaatgggaagatagggaacaaggaatttttcgggtggttaaatcggaagccctggcaaagatgtggggacaaaggaagaaaaatgacagaatgacatatgaaaagttgagcagagccctgagatactactataaaacaggaattttggagcgggttgaccgaaggttagtgtacaaatttggaaaaaatgcacacgggtggcaggaagacaagctatagtaatgaactagtccgtaacttgaaagtatttcgatttcttggctttatatatcttgtggaaaggacgaatgctagaacaactcgcagagtgg

SEQ ID NO: 2785 - DNA, 584 bp, Homo sapiens
  source 1..584: mol_type = genomic DNA
accgccaccatgttggactcggtgacacacagcaccttcctgcctaatgcatccttctgcgatcccctgatgtcgtggactgatctgttcagcaatgaagagtactaccctgcctttgagcatcagacagatgctgattccaactgcttgaaaacaagtggcatcaaaagtcaagactgtcacagtcatagtagaacaagcctccaaagttctcatctatgggaatttgtacgagacctgcttctatctcctgaagaaaactgtggcattctggaatgggaagatagggaacaaggaatttttcgggtggttaaatcggaagccctggcaaagatgtggggacaaaggaagaaaaatgacagaatgacatatgaaaagttgagcagagccctgagatactactataaaacaggaattttggagcgggttgaccgaaggttagtgtacaaatttggaaaaaatgcacacgggtggcaggaagacaagctatagtaatgaactagtccgtaacttgaaagtatttcgatttcttggctttatatatcttgtggaaaggacgagcacatatagttattctagaagtt

SEQ ID NO: 2786 - DNA, 899 bp, Homo sapiens
  source 1..899: mol_type = genomic DNA
accgccaccatgccatctctgcctcactcccacagggtaatgttggactcggtgacacacagcaccttcctgcctaatgcatccttctgcgatcccctgatgtcgtggactgatctgttcagcaatgaagagtactaccctgcctttgagcatcagacagcctgtgactcatactggacatcagtccaccctgaatactggactaagcgccatgtgtgggagtggctccagttctgctgcgaccagtacaagttggacaccaattgcatctccttctgcaacttcaacatcagtggcctgcagctgtgcagcatgacacaggaggagttcgtcgaggcagctggcctctgcggcgagtacctgtacttcatcctccagaacatccgcacacaaggttactccttttttaatgacgctgaagaaagcaaggccaccatcaaagactatgctgattccaactgcttgaaaacaagtggcatcaaaagtcaagactgtcacagtcatagtagaacaagcctccaaagttctcatctatgggaatttgtacgagacctgcttctatctcctgaagaaaactgtggcattctggaatgggaagatagggaacaaggaatttttcgggtggttaaatcggaagccctggcaaagatgtggggacaaaggaagaaaaatgacagaatgacatatgaaaagttgagcagagccctgagatactactataaaacaggaattttggagcgggttgaccgaaggttagtgtacaaatttggaaaaaatgcacacgggtggcaggaagacaagctatagtaatgaactagtccgtaacttgaaagtatttcgatttcttggctttatatatcttgtggaaaggacgagaagcggtgatggaactcccgagg

SEQ ID NO: 2787 - DNA, 1034 bp, Homo sapiens
  source 1..1034: mol_type = genomic DNA
accgccaccatgagccagcaactgaagaaacgggcaaagacaagacaccagaaaggcctgggtggaagagcccccagtggggctaagcccaggcaaggcaagtcaagccaagacctgcaggcggaaatagaacctgtcagcgcggtgtgggccttatgtgatggctatgtgtgctatgagcctggccctcaggctctcggaggggatgatttctcagactgttacatagaatgcgtcataaggggtgagttttctcaacccatcctggaagaggactcactttttgagtccttggaatacctaaagaaaggatcagaacaacagctttctcaaaaggttttcgaagcaagctcccttgaatgttctttggaatacatgaaaaaaggggtaaagaaagagcttccacaaaagatagttggagagaattcgcttgagtattctgagtacatgacaggcaagaagcttccgcctggaggaatacctggcattgacctatcagatcctaaacagctcgcagaatttgctagaaagaagccccccataaataaagaatatgacagtctgagcgcaatcgcttgtcctcagagtggatgcactaggaagttgaggaatagagctgccctgagaaagcatctcctcattcatggtccccgagaccacgtctgtgcggaatgtgggaaagcgttcgttgagagctcaaaactaaagagacatttcctggttcatactggagagaagccgtttcggtgcacttttgaagggtgcggaaagcgcttctctctggactttaatttgcgtacgcacgtgcgcatccacacgggggagaaacgtttcgtgtgtccctttcaaggctgcaacaggaggtttattcagtcaaataacctgaaagcccacatcctaacgcatgcaaatacgaacaagaatgaacaagagggaaagtagtaatgaactagtccgtaacttgaaagtatttcgatttcttggctttatatatcttgtggaaaggacgagaggcggacaacagtgtagtatag

SEQ ID NO: 2788 - DNA, 1265 bp, Homo sapiens
  source 1..1265: mol_type = genomic DNA
accgccaccatggtggtagaaagagatgacggaagcacattaatggaaatagatggcgataaaggcaaacaaggcggtcccacctactacatagatactaatgctctgcgtgttccgagggagaatatggaggccatttcacctctaaaaaatgggatggttgaagactgggatagtttccaagctattttggatcatacctacaaaatgcatgtcaaatcagaagccagtctccatcctgttctcatgtcagaggcaccgtggaatactagagcaaagagagagaaactgacagagttaatgtttgaacactacaacatccctgccttcttcctttgcaaaactgcagttttgacagcatttgctaatggtcgttctactgggctgattttggacagtggagccactcataccactgcaattccagtccacgatggctatgtccttcaacaaggcattgtgaaatcccctcttgctggagactttattactatgcagtgcagagaactcttccaagaaatgaatattgaattggttcctccatatatgattgcatcaaaagaagctgttcgtgaaggatctccagcaaactggaaaagaaaagagaagttgcctcaggttacgaggtcttggcacaattatatgtgtaattgtgttatccaggattttcaagcttcggtacttcaagtgtcagattcaacttatgatgaacaagtggctgcacagatgccaactgttcattatgaattccccaatggctacaattgtgattttggtgcagagcggctaaagattccagaaggattatttgacccttccaatgtaaaggggttatcaggaaacacaatgttaggagtcagtcatgttgtcaccacaagtgttgggatgtgtgatattgacatcagaccaggtctctatggcagtgtaatagtggcaggaggaaacacactaatacagagttttactgacaggttgaatagagagctgtctcagaaaactcctccaagtatgcggttgaaattgattgcaaataatacaacagtggaacggaggtttagctcatggattggcggctccattctagcctctttgggtacctttcaacagatgtggatttccaagcaagaatatgaagaaggagggaagcagtgtgtagaaagaaaatgcccttagtaatgaactagtccgtaacttgaaagtatttcgatttcttggctttatatatcttgtggaaaggacgactgatgagatctgtacgcaatctg

SEQ ID NO: 2789 - DNA, 8249 bp, Homo sapiens
  source 1..8249: mol_type = genomic DNA
accgccaccatggcggcggcggcgggcggcggcagttgccccgggcctggctccgcgcggggccgcttcccgggccggccgcggggcgccggcgggggcgggggccgcggcggacggggcaacggggccgaaagagtgcgggtagctctgcggcgcggcggtggcgcgacggggccgggcggagccgagcccggggaggacacggccctgctccgtttgctggggctccgccggggcctgcgccggctccgccgcctgtgggccggcccgcgggtccagcggggccggggacggggtcggggccggggctggggcccgagtcgaggctgcgtgccggaggaggagagcagtgacggggaatccgacgaggaggagtttcagggttttcattcagatgaagatgtggcccccagttccctgcgctctgcgctccgatcccagcgaggtcgagcgccccgaggtcggggtcgcaagcataagacgaccccccttcctcctcctcgcctagcagatgtggctcctacccccccaaagacccctgcccggaaacggggtgaggaaggcacagaacggatggtgcaggcactgactgaacttctccggcgggcccaggcaccccaagcaccccggagccgggcatgtgagccctccaccccccggcggtctcggggacggcccccaggacggccagcaggcccctgcaggaggaagcagcaagcagtagtggtggcagaagcagctgtgacaatccccaaacctgagcccccacctcctgtggttccagtgaaacatcagactggcagctggaaatgcaaggaggggcccggtccaggacctgggacccccaggcgtggaggacagtcaagccgtggaggccgtggaggcaggggccgcggccgaggtggtgggctcccctttgtgatcaagtttgtttcaagggccaaaaaagtaaagatgggacaattgtccttgggactcgaatcaggtcaaggtcaaggtcaacatgaggaaagttggcaggatgtcccccaaagaagagttggatctggacagggagggagcccttgctggaaaaagcaggaacagaagctggatgacgaggaagaagagaagaaagaagaagaagaaaaagacaaggagggagaagagaaggaagaaagagctgtagctgaggagatgatgccagctgcggaaaaggaagaggcaaagctgccaccaccgcctctgactcctccagccccttcacctcctccacccctcccacccccttcgacatctcctccacccccactctgccctccaccaccacccccagtgtccccaccacctctaccatcccctccaccgcctcctgcccaagaggagcaggaggaatcccctcctcctgtggtcccagctacgtgctccaggaagaggggccggcctcccctgactcccagccagcgggcggagcgggaagctgctcgggcagggccagagggcacctctcctcccactccaacccccagcaccgccacgggaggccctccggaagacagtcccaccgtggcccccaaaagcaccaccttcctgaagaatatccggcagtttattatgcctgtggtgagtgcccgctcctcccgtgtcatcaagacaccccggcgatttatggatgaagacccccccaaacccccaaaggtggaggtctcacctgtcctgcgacctcccattaccacctccccacctgttccccaggagccagcaccagtcccctctccaccacgtgccccaactcctccatctaccccagttccactccctgagaagagacggtccatcctaagggaacccacatttcgctggacctcactgacccgggagctgccccctcctcccccagcccctccacctcccccggccccctccccaccccctgctcctgccacctcctcccggaggcccctactccttcgggcccctcagtttaccccaagcgaagcccacctgaagatctacgaatcggtgcttactcctcctcctcttggggctcctgaagcccctgagccagagcctcctcctgccgatgactctccagctgagcctgagcctcgggcagtgggccgcaccaaccacctcagcctgcctcgattcgcccctgtggtcaccactcctgttaaggccgaggtgtcccctcacggggctccagctctgagcaacgggccacagacacaggctcagctactgcagcccctgcaggccttgcaaacccagctcctgccccaggcactaccgccaccacagccacagctgcagccaccgccgtcaccacagcagatgcctcccctggaaaaagcccggattgcgggcgtgggttccttgccgctgtctggggtagaggagaagatgttcagcctcctcaagagagccaaagtgcagctattcaagatcgatcagcagcagcagcagaaggtggcagcttccatgccgctgagccctggagggcagatggaggaggtggccggggctgtcaagcagatctccgacagaggccctgtccggtctgaagatgagtcggtggaagctaagagagagcggccctcaggtcccgagtcccctgtgcaaggtccccgcatcaaacatgtctgccgtcatgctgctgtggccctgggtcaggcccgggccatggtgcctgaagatgtccctcgcctcagtgccctccctctccgggatcggcaggacctcgccacagaggatacatcatcggcgtccgagactgagagtgtcccgtcacggtcccggcggggaaaggtggaggcagcaggccctgggggagaatcagagcccacaggttctggagggaccctggcccacacaccccggcgctcactgccctcccatcacggcaagaagatgcgcatggctcgatgtggacactgtcggggctgcctacgtgtgcaggactgtgggtcctgtgtcaactgcctagacaagcccaagtttgggggccctaacaccaagaagcagtgctgtgtataccggaagtgtgacaaaatagaggctcggaagatggaacgactggctaaaaaaggccggacgatagtgaagacgctgttgccctgggattccgatgaatctcctgaggcctcccctggtcctccaggcccacgccggggggcgggagctggggggccccgggaggaggtggtggcccacccagggcccgaggagcaggactccctcctgcagcgcaagtcagctcggcgctgcgtcaaacagcgaccctcctatgatatcttcgaggattcggatgactcggagcccgggggcccccctgctcctcggcgtcggaccccccgagaaaatgagctgccactgccagaacctgaggagcagagccggccccgcaaacctaccctgcagcctgtgttgcagctcaaggcccgaaggcgcctggacaaggatgctttggcccctggcccctttgcttcttttcccaatggctggactggaaagcagaagtctcccgatggtgtgcaccgcgtccgtgtggattttaaggaggattgtgatttagagaacgtgtggctgatggggggcctgagtgtgctcacctctgtgccagggggccccccgatggtgtgcttgctgtgtgccagcaaaggactccacgagctggtgttctgtcaagtctgctgtgacccattccacccattctgcctggaggaggccgagcggcccctgccccagcatcacgacacctggtgctgccgtcgctgcaaattctgccacgtctgtggacgcaaaggtcgtggatccaagcacctcctggagtgcgagcgctgccgccatgcataccacccggcctgtctggggcccagctatccaacccgggccacgcgcaaacggcgccactggatctgttcagcctgtgtgcgctgtaagagctgtggggcaactccaggcaagaactgggacgtcgagtggtctggagattacagcctctgccccaggtgcacccagctatatgagaaaggaaactactgcccgatctgtacacgctgctatgaagacaacgactatgagagcaagatgatgcagtgcgcacagtgcgatcactgggtgcatgccaagtgcgaggggctctcagatgaagactacgagatcctttcaggactgccagactcggtgctgtacacctgcggaccgtgtgctggggcagcgcagccccgctggcgagaggccctgagcggggccctccaggggggcctgcgccaggtgctccagggcctgctgagctccaaggtggtgggcccactgctgctctgcacccagtgtgggccagatgggaagcaactgcacccaggaccctgcggcctgcaagctgtgagtcagcgcttcgaggatggccactacaagtctgtgcacagcttcatggaggacatggtgggcatcctcatgcggcactcggaggagggagagaccccggaccgccgggctggaggccagatgaaggggctcctgctgaagctgctagaatctgcgttcggctggttcgacgcccacgaccccaagtactggcgacggagtacccggctgccaaacggagtccttcccaatgcggtgttgcccccatccctggatcatgtctatgcgcagtggagacagcaggaaccagagaccccagaatcagggcagcctccaggggatccctcagcagcattccagggcaaggatccggctgccttctcacacctggaggacccccgtcagtgtgcactctgcctcaaatacggggatgcagactccaaggaggcggggcggctcttgtacatcgggcagaacgagtggacacacgtcaactgtgccatctggtcggcggaagtcttcgaggagaacgacggctccctcaagaatgtgcatgctgctgtggcccgagggaggcagatgcgctgcgagctctgcctgaagcctggcgccacggtgggctgctgcctgtcctcctgcctcagcaacttccacttcatgtgtgcccgggccagctactgcatcttccaggatgacaagaaagtcttctgccagaaacacactgatctcctggatggcaaggaaattgtgaaccccgatggttttgatgttctccgccgagtctatgtggacttcgagggcatcaacttcaagcggaagttcttgacggggcttgaacccgatgccatcaacgtgctcattggttccatccgcattgactccctgggtactctgtctgatctctcggactgcgagggacggctcttccccattggctaccagtgctcccgtctgtactggagcacagtggatgctcggaggcgctgctggtatcggtgccgaattctggagtatcggccatgggggccgagggaagagccagctcacctggaggctgcagaggagaaccagaccattgtgcacagccccgccccttcctcagagcccccaggtggtgaggaccccccactggacacagatgttcttgtccctggagctcctgagcgccactcgcccattcagaacctggaccctccactgcggccagattcaggcagcgcccctcctccagccccccgttctttttcgggggctcgaatcaaagtgcccaactactcgccatcccggaggcccttggggggtgtctcctttggccccctgccctcccctggaagtccatcttcactgacccaccacatccccacagtgggagacccggacttcccagctccccccagacgttcccgtcgtcccagccctttggctcccaggccgcctccatcacggtgggcctcccctcctctaaaaacctcccctcagctcagggtgccccctcctacctcagtcgtcacagccctcacacctacctcaggggagctggctccccctggcccggccccatctccaccaccccctgaagacctgggcccagacttcgaggacatggaggtggtgtcaggactgagtgctgctgacctggacttcgcggccagcctgctggggactgagcccttccaggaagagattgtagccgctggggccatggggagcagccacgggggcccgggggacagctccgaggaggagtccagccccacctcccgctacatccacttccctgtgactgtggtgtccgcccctggtctggcccccagcgctacccctggagccccccgcattgaacagctggacggcgtggacgacggcactgacagtgaggctgaggcggtgcagcagcctcggggccagggcacgcctccttcggggccaggagtagtccgggcaggggtccttggggctgcaggggacagggcccggcctcctgaggacctgccatcggaaattgtggattttgtgttgaagaacctagggggtcctggggatggaggtgctggccctagagaggagtcactccccccggcgcctcccctggctaatggcagccagccctcccaaggcctgaccgccagcccagctgaccccacccgcacatttgcctggctcccaggggccccaggggtccgggtgttaagccttggccctgcccctgagccccccaaacccgccacatccaaaatcatacttgtcaacaagctggggcaagtatttgtgaagatggctggggagggtgaacctgtcccacccccagtgaagcagccacctttgccccccaccatttcccccacggctcccacctcctggactctgcccccaggccccctcctcggcgtgctgcccgtggtcggagtggtccgccctgccccgcccccgccaccccctcccctgacgctggtgctgagcagtgggccagccagcccgccccgccaggccatccgcgtcaagagggtgtccactttctccggccggtccccgccagcacctcccccatacaaagccccccggctggatgaagatggagaggcctcagaggatacccctcaggttccagggcttggcagtggcgggtttagccgtgtgaggatgaaaacccccacagtgcgtggggtccttgacctggatcggcctggggagcccgctggggaagaaagtcctgggcccctccaggaacggtcccctttgctgccacttccggaagatggtcctccccaggtccccgatggtcccccagacctgctgcttgagtcccagtggcaccactattcaggtgaggcttcgagctctgaggaagagcctccatccccagatgataaagagaaccaggccccaaaacggactggcccacatctgcgcttcgagatcagcagtgaggatgggttcagcgttgaggcagagagcttggagggggcgtggagaactctgatcgagaaagtgcaagaggcccgagggcatgcccgactcagacatctctcctttagtggaatgagtggggcgagactcctgggcatccaccatgatgctgtcatcttcctggccgagcagctccccggagcccagcgttgccagcactataagttccgttaccaccagcagggagagggccaggaggagccgcccctgaatccccatggggctgctcgggcagaggtctatctccggaagtgcacctttgacatgttcaacttcctggcctcccagcaccgggtgctccctgagggggccacctgtgatgaggaagaggatgaggtgcagctcaggtcaaccagacgtgccaccagcctggagctgcccatggccatgcgttttcgtcaccttaagaagacgtccaaagaagctgtgggtgtctacagatcagccatccacgggcgaggcctgttctgtaagcgcaacatcgacgcgggggagatggtcatcgagtactctggcattgtcatccgctcggtgttgactgacaagcgggagaagttctacgatgggaagggcatcgggtgctatatgttccgcatggatgactttgatgtagtggacgccacgatgcatggcaatgccgcccgcttcatcaaccactcctgtgagcccaactgcttctctcgggtcatccacgtggagggccagaaacacattgttatcttcgccctgcgccgcatcctgcgtggtgaggagctcacctacgactacaagttccccatcgaggatgccagcaacaagctgccctgcaactgtggcgccaagcgctgccgtcggttccttaactagtaatgaactagtccgtaacttgaaagtatttcgatttcttggctttatatatcttgtggaaaggacgaaaggagtgtgccgactgactatca

SEQ ID NO: 2790 - DNA, 1478 bp, Homo sapiens
  source 1..1478: mol_type = genomic DNA
accgccaccatggattcggtagaactttgccttcctgaatctttttccctgcactacgaggaagagcttctctgcagaatgtcaaacaaagatcgacacattgattccagctgttcgtccttcatcaagacggaaccttccagcccagcctccctgacggacagcgtcaaccaccacagccctggtggctcttcagacgccagtgggagctacagttcaaccatgaatggccatcagaacggacttgactcgccacctctctacccttctgctcctatcctgggaggtagtgggcctgtcaggaaactgtatgatgactgctccagcaccattgttgaagatccccagaccaagtgtgaatacatgctcaactcgatgcccaagagactgtgtttagtgtgtggtgacatcgcttctgggtaccactatggggtagcatcatgtgaagcctgcaaggcattcttcaagaggacaattcaaggcaatatagaatacagctgccctgccacgaatgaatgtgaaatcacaaagcgcagacgtaaatcctgccaggcttgccgcttcatgaagtgtttaaaagtgggcatgctgaaagaaggggtgcgtcttgacagagtacgtggaggtcggcagaagtacaagcgcaggatagatgcggagaacagcccatacctgaaccctcagctggttcagccagccaaaaagccatataacaagattgtctcacatttgttggtggctgaaccggagaagatctatgccatgcctgaccctactgtccccgacagtgacatcaaagccctcactacactgtgtgacttggccgaccgagagttggtggttatcattggatgggcgaagcatattccaggcttctccacgctgtccctggcggaccagatgagccttctgcagagtgcttggatggaaattttgatccttggtgtcgtataccggtctctttcgtttgaggatgaacttgtctatgcagacgattatataatggacgaagaccagtccaaattagcaggccttcttgatctaaataatgctatcctgcagctggtaaagaaatacaagagcatgaagctggaaaaagaagaatttgtcaccctcaaagctatagctcttgctaattcagactccatgcacatagaagatgttgaagccgttcagaagcttcaggatgtcttacatgaagcgctgcaggattatgaagctggccagcacatggaagaccctcgtcgagctggcaagatgctgatgacactgccactcctgaggcagacctctaccaaggccgtgcagcatttctacaacatcaaactagaaggcaaagtcccaatgcacaaactttttttggaaatgttggaggccaaggtctagtaatgaactagtccgtaacttgaaagtatttcgatttcttggctttatatatcttgtggaaaggacgattggaacacttgatagggatagaa

SEQ ID NO: 2791 - DNA, 1514 bp, Homo sapiens
  source 1..1514: mol_type = genomic DNA
accgccaccatgtggcgagaatgtgattggggtcttggagcagtcaagtctgatctggcctgtgttccttcagctaaaaggcttctctgcagaatgtcaaacaaagatcgacacattgattccagctgttcgtccttcatcaagacggaaccttccagcccagcctccctgacggacagcgtcaaccaccacagccctggtggctcttcagacgccagtgggagctacagttcaaccatgaatggccatcagaacggacttgactcgccacctctctacccttctgctcctatcctgggaggtagtgggcctgtcaggaaactgtatgatgactgctccagcaccattgttgaagatccccagaccaagtgtgaatacatgctcaactcgatgcccaagagactgtgtttagtgtgtggtgacatcgcttctgggtaccactatggggtagcatcatgtgaagcctgcaaggcattcttcaagaggacaattcaaggcaatatagaatacagctgccctgccacgaatgaatgtgaaatcacaaagcgcagacgtaaatcctgccaggcttgccgcttcatgaagtgtttaaaagtgggcatgctgaaagaaggggtgcgtcttgacagagtacgtggaggtcggcagaagtacaagcgcaggatagatgcggagaacagcccatacctgaaccctcagctggttcagccagccaaaaagccattgctctggtctgatcctgcagataacaagattgtctcacatttgttggtggctgaaccggagaagatctatgccatgcctgaccctactgtccccgacagtgacatcaaagccctcactacactgtgtgacttggccgaccgagagttggtggttatcattggatgggcgaagcatattccaggcttctccacgctgtccctggcggaccagatgagccttctgcagagtgcttggatggaaattttgatccttggtgtcgtataccggtctctttcgtttgaggatgaacttgtctatgcagacgattatataatggacgaagaccagtccaaattagcaggccttcttgatctaaataatgctatcctgcagctggtaaagaaatacaagagcatgaagctggaaaaagaagaatttgtcaccctcaaagctatagctcttgctaattcagactccatgcacatagaagatgttgaagccgttcagaagcttcaggatgtcttacatgaagcgctgcaggattatgaagctggccagcacatggaagaccctcgtcgagctggcaagatgctgatgacactgccactcctgaggcagacctctaccaaggccgtgcagcatttctacaacatcaaactagaaggcaaagtcccaatgcacaaactttttttggaaatgttggaggccaaggtctagtaatgaactagtccgtaacttgaaagtatttcgatttcttggctttatatatcttgtggaaaggacgacatgcgggattctatgggcgcagg

SEQ ID NO: 2792 - DNA, 1292 bp, Homo sapiens
  source 1..1292: mol_type = genomic DNA
accgccaccatgtcaaacaaagatcgacacattgattccagctgttcgtccttcatcaagacggaaccttccagcccagcctccctgacggacagcgtcaaccaccacagccctggtggctcttcagacgccagtgggagctacagttcaaccatgaatggccatcagaacggacttgactcgccacctctctacccttctgctcctatcctgggaggtagtgggcctgtcaggaaactgtatgatgactgctccagcaccattgttgaagatccccagaccaagtgtgaatacatgctcaactcgatgcccaagagactgtgtttagtgtgtggtgacatcgcttctgggtaccactatggggtagcatcatgtgaagcctgcaaggcattcttcaagaggacaattcaaggggtgcgtcttgacagagtacgtggaggtcggcagaagtacaagcgcaggatagatgcggagaacagcccatacctgaaccctcagctggttcagccagccaaaaagccatataacaagattgtctcacatttgttggtggctgaaccggagaagatctatgccatgcctgaccctactgtccccgacagtgacatcaaagccctcactacactgtgtgacttggccgaccgagagttggtggttatcattggatgggcgaagcatattccaggcttctccacgctgtccctggcggaccagatgagccttctgcagagtgcttggatggaaattttgatccttggtgtcgtataccggtctctttcgtttgaggatgaacttgtctatgcagacgattatataatggacgaagaccagtccaaattagcaggccttcttgatctaaataatgctatcctgcagctggtaaagaaatacaagagcatgaagctggaaaaagaagaatttgtcaccctcaaagctatagctcttgctaattcagactccatgcacatagaagatgttgaagccgttcagaagcttcaggatgtcttacatgaagcgctgcaggattatgaagctggccagcacatggaagaccctcgtcgagctggcaagatgctgatgacactgccactcctgaggcagacctctaccaaggccgtgcagcatttctacaacatcaaactagaaggcaaagtcccaatgcacaaactttttttggaaatgttggaggccaaggtctagtaatgaactagtccgtaacttgaaagtatttcgatttcttggctttatatatcttgtggaaaggacgatgactccgacacgtctcaatggct

SEQ ID NO: 2793 - DNA, 1373 bp, Homo sapiens
  source 1..1373: mol_type = genomic DNA
accgccaccatgtccagccaggtggtgggcattgagcctctctacatcaaggcagagccggccagccctgacagtccaaagggttcctcggagacagagaccgagcctcctgtggccctggcccctggtccagctcccactcgctgcctcccaggccacaaggaagaggaggatggggagggggctgggcctggcgagcagggcggtgggaagctggtgctcagctccctgcccaagcgcctctgcctggtctgtggggacgtggcctccggctaccactatggtgtggcatcctgtgaggcctgcaaagccttcttcaagaggaccatccaggggagcatcgagtacagctgtccggcctccaacgagtgtgagatcaccaagcggagacgcaaggcctgccaggcctgccgcttcaccaagtgcctgcgggtgggcatgctcaaggagggagtgcgcctggaccgcgtccggggtgggcggcagaagtacaagcggcggccggaggtggacccactgcccttcccgggccccttccctgctgggcccctggcagtcgctggaggcccccggaagacagcagccccagtgaatgcactggtgtctcatctgctggtggttgagcctgagaagctctatgccatgcctgaccccgcaggccctgatgggcacctcccagccgtggctaccctctgtgacctctttgaccgagagattgtggtcaccatcagctgggccaagagcatcccaggcttctcatcgctgtcgctgtctgaccagatgtcagtactgcagagcgtgtggatggaggtgctggtgctgggtgtggcccagcgctcactgccactgcaggatgagctggccttcgctgaggacttagtcctggatgaagagggggcacgggcagctggcctgggggaactgggggctgccctgctgcaactagtgcggcggctgcaggccctgcggctggagcgagaggagtatgttctactaaaggccttggcccttgccaattcagactctgtgcacatcgaagatgccgaggctgtggagcagctgcgagaagctctgcacgaggccctgctggagtatgaagccggccgggctggccccggagggggtgctgagcggcggcgggcgggcaggctgctgctcacgctaccgctcctccgccagacagcgggcaaagtgctggcccatttctatggggtgaagctggagggcaaggtgcccatgcacaagctgttcttggagatgctcgaggccatgatggactagtaatgaactagtccgtaacttgaaagtatttcgatttcttggctttatatatcttgtggaaaggacgatctcatcgaattaccacagaatag

SEQ ID NO: 2794 - DNA, 1370 bp, Homo sapiens
  source 1..1370: mol_type = genomic DNA
accgccaccatgtccagccaggtggtgggcattgagcctctctacatcaaggcagagccggccagccctgacagtccaaagggttcctcggagacagagaccgagcctcctgtggccctggcccctggtccagctcccactcgctgcctcccaggccacaaggaagaggaggatggggagggggctgggcctggcgagcagggcggtgggaagctggtgctcagctccctgcccaagcgcctctgcctggtctgtggggacgtggcctccggctaccactatggtgtggcatcctgtgaggcctgcaaagccttcttcaagaggaccatccaggggagcatcgagtacagctgtccggcctccaacgagtgtgagatcaccaagcggagacgcaaggcctgccaggcctgccgcttcaccaagtgcctgcgggtgggcatgctcaaggagggagtgcgcctggaccgcgtccggggtgggcggcagaagtacaagcggcggccggaggtggacccactgcccttcccgggccccttccctgctgggcccctggcagtcgctggaggcccccggaagacagccccagtgaatgcactggtgtctcatctgctggtggttgagcctgagaagctctatgccatgcctgaccccgcaggccctgatgggcacctcccagccgtggctaccctctgtgacctctttgaccgagagattgtggtcaccatcagctgggccaagagcatcccaggcttctcatcgctgtcgctgtctgaccagatgtcagtactgcagagcgtgtggatggaggtgctggtgctgggtgtggcccagcgctcactgccactgcaggatgagctggccttcgctgaggacttagtcctggatgaagagggggcacgggcagctggcctgggggaactgggggctgccctgctgcaactagtgcggcggctgcaggccctgcggctggagcgagaggagtatgttctactaaaggccttggcccttgccaattcagactctgtgcacatcgaagatgccgaggctgtggagcagctgcgagaagctctgcacgaggccctgctggagtatgaagccggccgggctggccccggagggggtgctgagcggcggcgggcgggcaggctgctgctcacgctaccgctcctccgccagacagcgggcaaagtgctggcccatttctatggggtgaagctggagggcaaggtgcccatgcacaagctgttcttggagatgctcgaggccatgatggactagtaatgaactagtccgtaacttgaaagtatttcgatttcttggctttatatatcttgtggaaaggacgaatgtctcgtctcgcgggctcgcat

SEQ ID NO: 2795 - DNA, 1628 bp, Homo sapiens
  source 1..1628: mol_type = genomic DNA
accgccaccatgtcctcggacgacaggcacctgggctccagctgcggctccttcatcaagactgagccgtccagcccgtcctcgggcatcgatgccctcagccaccacagccccagtggctcgtccgacgccagcggcggctttggcctggccctgggcacccacgccaacggtctggactcgccacccatgtttgcaggcgccgggctgggaggcaccccatgccgcaagagctacgaggactgtgccagcggcatcatggaggactcggccatcaagtgcgagtacatgctcaacgccatccccaagcgcctgtgcctcgtgtgcggggacattgcctctggctaccactacggcgtggcctcctgcgaggcttgcaaggccttcttcaagaggactatccaagggaacattgagtacagctgcccggccaccaacgagtgcgagatcaccaaacggaggcgcaagtcctgccaggcctgccgcttcatgaaatgcctcaaagtggggatgctgaaggaaggtgtgcgccttgatcgagtgcgtggaggccgtcagaaatacaagcgacggctggactcagagagcagcccatacctgagcttacaaatttctccacctgctaaaaagccattgaccaagattgtctcatacctactggtggctgagccggacaagctctatgccatgcctccccctggtatgcctgagggggacatcaaggccctgaccactctctgtgacctggcagaccgagagcttgtggtcatcattggctgggccaagcacatcccaggcttctcaagcctctccctgggggaccagatgagcctgctgcagagtgcctggatggaaatcctcatcctgggcatcgtgtaccgctcgctgccctatgacgacaagctggtgtacgctgaggactacatcatggatgaggagcactcccgcctcgcggggctgctggagctctaccgggccatcctgcagctggtacgcaggtacaagaagctcaaggtggagaaggaggagtttgtgacgctcaaggccctggccctcgccaactccgattccatgtacatcgaggatctagaggctgtccagaagctgcaggacctgctgcacgaggcactgcaggactacgagctgagccagcgccatgaggagccctggaggacgggcaagctgctgctgacactgccgctgctgcggcagacggccgccaaggccgtgcagcacttctatagcgtcaaactgcagggcaaagtgcccatgcacaaactcttcctggagatgctggaggccaaggttggccaagagcagcttagaggatctcccaaggatgaaagaatgtcaagccatgatggaaaatgccccttccaatcagctgccttcacaagcagggatcagagcaactccccggggatccccaatccacgcccttctagtccaacccccctcaatgagagaggcaggcagatctcacccagcactaggacaccaggaggccagggaaagcatctctggctcaccatgtagtaatgaactagtccgtaacttgaaagtatttcgatttcttggctttatatatcttgtggaaaggacgacttaatcgtactacgggaattata

SEQ ID NO: 2796 - DNA, 1541 bp, Homo sapiens
  source 1..1541: mol_type = genomic DNA
accgccaccatgctcttctggcacacgcagcccgagcactacaaccagcacaactccggcagctacctgcgtgatgtgctcgctctgcccatcttcaagcaggaggaaccccagctgtcccccgagaacgaggcccgcctgccacccctgcaatatgtgttgtgtgctgccacgtccccagccgtgaagctgcatgaagagacgctgacctacctcaaccaaggtcagtcttatgaaatccgactactggagaatcggaagctgggagactttcaagatctgaacacaaaatatgtcaagagcatcatccgtgtggtcttccatgaccgccggctgcagtatacggagcaccagcagctggagggctggcggtggagtcggccaggggaccggatcctggacatcgatattccactgtctgttggtatcttggaccccagggccagcccgacccagctgaatgcagtcgagtttttgtgggaccctgcgaagagagcttctgcattcattcaggtacactgcatcagcacagaattcacccccaggaagcacgggggcgagaagggagtgccctttcgagtccagattgacacgtttaagcagaacgagaatggggagtacacggagcacctgcactcagccagctgccagatcaaggtgttcaagccgaagggagccgatcggaaacagaagactgaccgggagaagatggagaaaagaactgcccaagagaaggagaaataccagccgtcctatgaaaccaccatcctcacagagtgctctccatggcccgacgtggcctaccaggtgaacagcgccccgtccccaagctacaatggttctccaaacagctttggcctcggcgaaggcaacgcctctccgacccacccggtggaggccctgcccgtgggcagtgaccacctgctcccatcagcttcgatccaggatgcccagcagtggcttcaccgcaacaggttctcgcagttctgccggctctttgccagcttctcaggtgctgacttgctgaagatgtcccgagatgatttggtccagatctgtggtcccgcagatgggatccggctcttcaacgccatcaaaggccggaatgtgaggccaaagatgaccatttatgtctgtcaggagctggagcagaatcgagtgcccctgcagcagaagcgggacggcagtggagacagcaacctgtctgtgtaccacgccatcttcctggaagagctgaccaccttggagctgattgagaagatcgccaacctgtacagcatctccccccagcacatccaccgagtctaccggcagggccccacgggcatccatgtggtggtgagcaacgagatggtgcagaacttccaagatgaatcctgttttgtcctcagcacaattaaagctgagagcaatgatggctaccacatcatcctgaaatgtggactctagtaatgaactagtccgtaacttgaaagtatttcgatttcttggctttatatatcttgtggaaaggacgatgaagcgaagccatttgaactgcc

SEQ ID NO: 2797 - DNA, 1442 bp, Homo sapiens
  source 1..1442: mol_type = genomic DNA
accgccaccatgttggagaactacagaaacctggtctccctgggtgttagtatctctaacccagacctggtcaccagtctggagcaaagaaaagagccctacaatttgaagatacatgaaacagcagccagacccccagctgtgtgttctcatttcacccaaaacctttggacagtgcagggcatagaagattcattccacaaacttataccaaaaggacatgagaaacgtggacatgagaatttaagaaaaacttgtaaaagtataaatgagtgtaaggtgcagaaaggtggttataatagaattaaccaatgcttattaactacccagaaaaaaacaattcaatctaatatatgtgtcaaagtttttcataaattttcaaattcaaacaaagataagataagatatactggagataaaacctttaaatgtaaagaatgtggcaaatcatttcacgtgctctcacgcctaactcaacacaaaagaattcatactggagagaacccctacacatgtgaagaatgtggcaaagcctttaattggtcctcaattcttactaaacataagagaattcatgccagagagaaattctacaagtgtgaagaatgtggtaaaggctttactcggtcctcacaccttactaaacataagagaattcatactggagagaaaccctacatatgtgaaaaatgtggtaaagcttttaaccaatcctcaacccttaatttacataagagaattcattctgcacaaaaatactacaaatgtgaagaatgtggtaaagcctttaagtggtcctcatcccttaatgaacataagagaattcatgctggagagaaacccttctcatgcgaagaatgtggcaatgtctttaccacatcctcagactttgctaaacataagagaattcatacaggagagaaaccctacaaatgtgaagaatgtggaaaatcctttaataggtccacaactcttacgacacataagagaatccatactggagagaaaccctacacatgtgaagaatgtggaaaagcctttaattggtcctcaacccttaatgtacacaagagaattcactctggaaaaaatccctacaaatgtgaagattgtggcaaagcctttaaagtgtttgcaaacctgcataatcataagaaaattcatactggagagaaaccctacatatgtaaacaatgtggcaaagcctttaaacagtcctcacacttgaataaacataagaaaattcacactgtagataaaccctacaaatgtaaagaatgcgggaaagcttttaagcagtactccaaccttcctcaacataagagaactcatactggaggaaaattttagtaatgaactagtccgtaacttgaaagtatttcgatttcttggctttatatatcttgtggaaaggacgaatcttacgcgcgtggtcggcactg

SEQ ID NO: 2798 - DNA, 1790 bp, Homo sapiens
  source 1..1790: mol_type = genomic DNA
accgccaccatgagcaatcagtaccaggaggagggctgctccgagaggcccgagtgcaaaagtaaatctccaactttgctctcctcctactgcatcgacagcatcctgggccggaggagcccgtgcaaaatgcggttgctgggagccgcgcagagcttgcctgctccgctgaccagccgcgccgacccggaaaaggccgtgcaaggctcccctaagagcagcagcgccccgttcgaggccgagctgcacctgccgcccaagctgcggcgcctgtacggcccgggcgggggccgcctccttcagggtgcggcagcggcggcggcggcggcggcggcggcggcggcagcggccgccacggccacggcgggtccacgcggggaggcccctccgccgccaccgccaaccgcgcggcccggggaacggccggacggcgcaggggccgccgcggcagccgcggccgcggccgccgcggcctgggacacgctcaagatcagccaggcgccgcaggtgagcatcagccgcagcaagtcgtaccgcgagaacggggcgcccttcgtgccgccgccgcccgcgctggacgagctgggcggcccggggggcgtcacgcacccggaggagcgcctcggcgtggccggcggcccgggcagcgccccggctgcgggtggtggcaccggcaccgaggacgacgaggaggagctgctggaggacgaagaagatgaggacgaggaagaggaactgctggaggacgacgaggaggagctgctggaggacgacgcccgcgcgctgctcaaggagccccggcgctgtcctgtggccgccactggcgccgtggccgcagcagctgccgctgcagtggccacagagggcggggagctgtcacccaaggaggagctgctgctgcacccggaagacgctgagggcaaggacggcgaggacagcgtgtgcctctctgcgggcagcgactcggaggaggggctgctgaaacgcaaacagaggcgctaccgcaccacgttcaccagctaccagctggaggaactggagcgggccttccagaagacgcactacccggacgtcttcaccagggaggaactggccatgaggctggacttgaccgaggcccgagtccaggtctggttccagaaccgtcgggccaagtggcgcaagcgggagaaggcaggcgcgcagacccacccccctgggctgcccttcccggggccgctctccgccacccacccgctcagcccctacctggacgccagccccttccctccgcaccacccggcgctcgactccgcttggactgccgctgccgccgccgccgccgccgccttcccgagcctacctccgcctccgggctcggccagcctgccgcccagcggggcgccgctgggcctgagcactttcctcggagcggcagtgttccgacacccagctttcatcagcccggcattcggcaggctcttttccacaatggcccccctgaccagcgcgtcgaccgcggccgcgctcctgagacagcccacacccgccgtggagggcgcagtggcatcgggcgccctggccgacccggccacggcggccgcagacagacgcgcctctagcatagccgcgctgaggctcaaggccaaggagcacgcggcgcagctcacgcagctcaacatcctgccgggcaccagcacgggcaaggaggtgtgctagtaatgaactagtccgtaacttgaaagtatttcgatttcttggctttatatatcttgtggaaaggacgatacgtccgagcttcactagagtgc

SEQ ID NO: 2799 - DNA, 1589 bp, Homo sapiens
  source 1..1589: mol_type = genomic DNA
accgccaccatggctaaaagaccgggaccccctggaagccgagaaatgggactgttgacattcagagacatagctatagaattttctctggcggaatggcaatgcctggatcatgctcagcagaatttatatagagatgtgatgttagagaactacagaaacctggtctccctgggtattgctgtctctaagccagacttgatcacctgtctggagcaaaataaagagccccagaatataaagagaaatgagatggtagccaaacacccagttacatgttctcatttcacccaagaccttcagtcagagcagggcataaaagattcactccaaaaagtgatactgagaagatatggaaaatgtggacaggaggatttacaagtaaaaaaatgctgtaaaagtgtaggtgagtgtgaggtgcacaaaggaggttataattatgttaaccaatgtttgtcagctacccaaaacaaaacatttcagactcataaatgcgtcaaagtctttggtaaattttcaaattccaatagacacaagacaagacatactggaaagaaacatttcaaatgtaaaaacgatggcaaatcattttgcatgctttcacgcctaaatcaacatcagataattcatactagggagaagtcttacaaatgtgaagaatgtggcaaatcctttaactgctcttcaacccttactagacataaaagaattcatactggagagaaaccctacagatgtgaggaatgtggcaaagcttttagctggtctgcatcccttactaaacataagagaattcatactggagagaaaccttacacatgtgaagaacgtggcaaagtctttagccgctcaacacttactaactacaagagaattcatactggagagaaaccctacacatgtgaagaatgtggcaaagcctttagccgctcttcaacacttactaaccacaagagaattcatactggagagagaccctacaaatgtgaagaatgtggcaaagcctttagcttatcctcaacccttaagaaacataagatagttcatactggggagaaactctacacatgtgaagaatgtgggaaagcctttaccttctcctcaactctaaatactcataagaggattcatactggagagaaaccctacacttgtgaagaatgtggcaaagcctttagcttaccctcaaccttcacttaccacaagagaactcatactggagagaaaccctacaaatgtgaagaatgtggcaaagcctttaactgctcctcaacccttaagaaacataagataattcatactggagagaaactctacaaatgtaaagaatgtgggaaagcctttaccttctcctcaactctaaatactcataagaggattcatactggagagaaaccctacaaatgtgaagaatgtgaccaaacttttaagtggcattcaagtcttgctaatcataagaatatgcatactggagagaaaccctacaaatatgaatagtaatgaactagtccgtaacttgaaagtatttcgatttcttggctttatatatcttgtggaaaggacgagctctatgggtaacccagtgttcg

SEQ ID NO: 2800 - DNA, 1616 bp, Homo sapiens
  source 1..1616: mol_type = genomic DNA
accgccaccatggagcggtcacagtgtggcagcagagaccgaggcgttagcggccgacctcacttggcccctgggctagtggtggctgcccctccgcccccgtccccggcgttgccggtaccatcggggatgcaggttcccccagcgttcctgcggccgcccagcctctttctgcgagcagcggccgcggccgccgccgccgctgccgccacctcgggaagcggaggctgcccgccggctcccgggctggagagcggggtaggcgcggtgggctgcggctacccgcggacgcccaagtgcgcccgctgtcgtaaccatggtgtggtgtcagcgctcaagggccacaagcgcttctgccgctggcgggactgcgcgtgtgccaagtgcaccctgatcgccgagcgccagcgcgtcatggccgcccaggtggcgctgcgcaggcagcaggcgcaggaggagagcgaagcccgggggctacagaggctcctgtgctcggggctctcctggccccccggtggtcgggcatccgggggcggcggcagagccgagaatccacagtccacgggcggccctgcggcgggggctgcgctgggactgggtgccttgagacaggccagtggttccgcgacccccgctttcgaagttttccagcaagattatcctgaggaaaaacaagaacaaaaagagagtaaatgtgagtcatgccagaatggacaagaagaactgatctccaaatcccatcagctttacctaggatcatcttctaggtctaatggtgtcattgggaaacaaagtatcgggtcatctatttcagaatactccaacaagcctgatagtatcctgtctcctcatcctggagagcaatcaggaggtgaagagagtcccaggtccttatcatcctctgatctggaatcaggaaatgaaagtgaatgggtcaaagacttgactgcgaccaaggcaagccttccgacagtgtcctcaagaccaagagatcctcttgatatccttactaagattttcccaaattacaggcgcagccggctagaaggcattctacggttctgcaaaggggatgtggtccaagccattgaacaggttttaaatggcaaagaacacaagccagacaacaggaacctagcaaactcagaagaactggaaaacacagcctttcagagagcttcaagttttagtcttgctggaattggttttggaactctaggtaataaatcagctttctctcctcttcaaactacttctgcttcttatggaggtgattcaagtctctacggcgtaaatcctagagtaggtatcagtccattaaggctggcatattcttctgcaggaagagggttatctggttttatgtcaccctacctaacacctgggttagtaccaaccttaccttttcggccagctttggattatgccttttcagggatgattagagattcttcctacctttccagtaaagactcaataacttgtggcagactgtacttcagaccaaatcaggacaatccgtagtaatgaactagtccgtaacttgaaagtatttcgatttcttggctttatatatcttgtggaaaggacgatctcgcatggtcccgctgctttcg

SEQ ID NO: 2801 - DNA, 2096 bp, Homo sapiens
  source 1..2096: mol_type = genomic DNA
accgccaccatggagggcttcatggactcagggacacagacggacgccgtggtggtgctgtccttggctcaggccgccgtgcttggcctggtctccgaaaatgagctctttggagctaccataagcgccgaggccttctacccggacctggggcccgagctttcaggggcagccatgggagagcccgagccaccaggccccgacgtctaccagctggcctgcaacgggagggccttggaggagccggcggaggaggaggtgctggaggtggaggcagcctgtgagaagcacacccggcggaagacgcggccacctgtgcggttggtgcccaaggtcaagttcgagaaggtggaggaggaggaacaggaggtctatgaggtttctgtgccaggtgacgacaaggacgcagggccagcagaagcccccgccgaggcggccagtggcggctgcgacgccctggtgcagagcagcgccgtcaagatgatcgacctcagcgccttcagccgcaagccccggacgctccggcatctgccccgaaccccgaggccggagctgaacgtggccccatatgaccctcacttcccggccccggcccgggatggcttccccgagcccagcatggcgctgcctgggccagaggccttgcccacagagtgtgggttcgagccaccccacctggcccccctgagtgaccccgaggcccccagcatggagtccccggagcctgtcaagccggaacagggcttcgtgtggcaggaggccagtgagttcgaggctgacacggcgggttcgaccgtggaacgccacaagaaggcccagctggatcggctggacatcaacgtgcagattgacgactcctatctggtggaggcgggcgaccgccagaagcgctggcagtgccgcatgtgcgagaagtcctacacgtccaagtacaacctggtgacgcacatcctgggccacaacggcatcaagccacactcgtgcccacactgcagcaagctcttcaagcagcccagccacctgcagacgcacctgctgacgcaccagggcacccggccccacaagtgccaggtatgccacaaggccttcacgcagaccagccacctcaagcgccacatgctgctgcactcggaggtcaagccctacagctgccacttctgcggccgcggcttcgcctaccccagcgagctcaaggcccacgaagtgaagcatgagagtggccgctgccatgtctgcgtcgagtgcggcctggacttctccaccctgacccagctcaagcgccacctggcctcccaccagggccccaccctctaccagtgcctcgagtgtgacaagtccttccactaccgcagccagttgcagaaccacatgctcaagcaccagaacgtgcgacccttcgtgtgcactgaatgcggcatggagttcagccagattcaccacctcaagcagcactccctcacccacaagggcgtgaaggagttcaagtgcgaggtgtgtggccgggagttcaccctacaggcgaacatgaagcggcacatgctgatccacaccagcgtccggccctaccagtgccacatctgcttcaagacctttgtacagaagcagactctcaagacccacatgattgtacactcgcccgtgaagccattcaaatgcaaggtgtgcgggaagtccttcaaccgcatgtacaacctgctgggccacatgcacctgcacgccggcagcaagcccttcaagtgcccctactgctccagcaagtttaatctcaagggcaacctgagccggcacatgaaggtcaagcatggcgtcatggacatcggcctggacagccaagaccccatgatggagctgacaggcactgacccttcagagctcgacggccagcaggagatggaggacttcgaggagaacgcctacagctatgcgagcgtggacagcagcgccgaggccagtgtcctcactgaacaggccatgaaagagatggcctactacaatgtgctatagtaatgaactagtccgtaacttgaaagtatttcgatttcttggctttatatatcttgtggaaaggacgaacctggacggcacatctaccgaga

SEQ ID NO: 2802 - DNA, 2525 bp, Homo sapiens
  source 1..2525: mol_type = genomic DNA
accgccaccatggattcaggcggtggaagtcttggattgcacacgccagactctagaatggcccataccatgattatgcaagattttgtggctggaatggctggtactgcacatatcgatggagaccatattgttgtttcagttcctgaagctgttttagtttctgatgttgtcacagatgatgggataactcttgatcatggccttgcagctgaagttgtccatggacctgatatcatcacagagactgatgtagtaacagaaggtgtgattgttcctgaagcggtacttgaagctgatgttgccattgaagaggatttagaggaagatgatggtgatcacatcttgacttctgaactaattacagaaaccgttagggtaccagagcaggttttcgtggctgaccttgttactggtcctaatggacacttagaacatgtggtccaagattgtgtttcaggagtcgactctcccacaatggtatcagaggaggttcttgtaactaattcagatacagaaactgtgattcaagcagctggaggtgttcctggttctacagttactataaaaaccgaagatgatgatgatgatgatgtcaagagcacttctgaagactacttaatgatatctttggatgatgttggagaaaaattagagcatatggggaatacaccattaaaaattggcagtgatggttcacaagaagatgctaaagaagatgggtttggttctgaagttataaaagtgtatatatttaaagcggaggctgaagatgatgttgaaataggtggaacagaaattgtcacagagagtgagtacaccagtggacattcagtagctggagtgcttgaccagagccgaatgcagcgggagaagatggtttacatggcagttaaagattcttctcaagaagaagatgatatcagttgcgctgaaatagcagatgaagtttacatggaagtcattgtaggggaagaggaaggaacttctctccctgagattcagcttgaggactctgatgttaataaaacagttgtccctgttgtctgggctgcggcatatggagatgaaagaagagtttcccgaaggtatgaagattgtcaagcatcaggaaatactttggactcagcattagaaagcagaagtagtacagcagcacagtaccttcaaatttgtgacggcattaatacaaataaagtacttaaacaaaaagccaaaaagaggagaaggggagaaaccaggcagtggcaaacagctgttataataggtcctgatggacagcccctcacagtgtacccttgccatatttgcacaaaaaagtttaaatccaggggattcttaaaaagacacatgaagaatcatcctgatcatttaatgagaaaaaaatatcagtgtacagattgtgactttacaactaacaagaaagtgagtttccataaccacttagaaagccataagctcataaacaaagtcgacaaaacccatgaatttacagaatacacacgaagatacagagaggctagtccactgagttccaataaacttattttaagagacaaggagccgaagatgcacaagtgcaaatactgtgactatgaaactgcagaacaaggactgttaaacaggcatttgttggccgttcacagcaagaattttcctcatgtttgtgttgagtgtgggaagggttttcgacatccttctgaactcaagaaacatatgagaacccatactggtgagaagccatatcagtgtcagtattgtattttcaggtgtgcagatcaatcaaatctgaaaactcacattaagtctaaacatggtaacaatttgccatataaatgtgagcattgtccccaagcatttggtgatgagagggagcttcaacgccatctggatttgtttcaaggacataagacacaccagtgtcctcattgtgaccataagagcaccaattcaagtgaccttaagcggcacatcatatctgtccatactaaggattttcctcacaaatgtgaggtctgtgataaaggttttcatcgtccttctgagctcaaaaagcatagtgatatccataagggtaggaagattcatcagtgcaggcactgtgactttaaaacatccgatccatttattcttagtggccatatcctttcagttcatactaaagatcagccattgaaatgtaaaaggtgcaagagaggattcagacaacaaaatgagctaaaaaaacatatgaagacccatactggaaggaagatttaccaatgtgagtattgtgaatacagcactacagatgcatctggctttaaacgacatgtgatatcaatacatacaaaagactatccacacaggtgtgaattctgcaagaagggattccgaagaccatcagaaaaaaatcagcatattatgaggcaccacaaagaggctcttatgtagtaatgaactagtccgtaacttgaaagtatttcgatttcttggctttatatatcttgtggaaaggacgattcggtcgcgaactgatttcgttt

SEQ ID NO: 2803 - DNA, 2387 bp, Homo sapiens
  source 1..2387: mol_type = genomic DNA
accgccaccatggattcaggcggtggaagtcttggattgcacacgccagactctagaatggcccataccatgattatgcaagattttgtggctggaatggctggtactgcacatatcgatggagaccatattgttgtttcagttcctgaagctgttttagtttctgatgttgtcacagatgatgggataactcttgatcatggccttgcagctgaagttgtccatggacctgatatcatcacagagactgatgtagtaacagaaggtgtgattgttcctgaagcggtacttgaagctgatgttgccattgaagaggatttagaggaagatgatggtgatcacatcttgacttctgaactaattacagaaaccgttagggtaccagagcaggttttcgtggctgaccttgttactggtcctaatggacacttagaacatgtggtccaagattgtgtttcaggagtcgactctcccacaatggtatcagaggaggttcttgtaactaattcagatacagaaactgtgattcaagcagctggaggtgttcctggttctacagttactataaaaaccgaagatgatgatgatgatgatgtcaagagcacttctgaagactacttaatgatatctttggatgatgttggagaaaaattagagcatatggggaatacaccattaaaaattggcagtgatggttcacaagaagatgctaaagaagatgggtttggttctgaagttataaaagtgtatatatttaaagcggaggctgaagatgatgttgaaataggtggaacagaaattgtcacagagagtgagtacaccagtggacattcagtagctggagtgcttgaccagagccgaatgcagcgggagaagatggtttacatggcagttaaagattcttctcaagaagaagatgatatcagagatgaaagaagagtttcccgaaggtatgaagattgtcaagcatcaggaaatactttggactcagcattagaaagcagaagtagtacagcagcacagtaccttcaaatttgtgacggcattaatacaaataaagtacttaaacaaaaagccaaaaagaggagaaggggagaaaccaggcagtggcaaacagctgttataataggtcctgatggacagcccctcacagtgtacccttgccatatttgcacaaaaaagtttaaatccaggggattcttaaaaagacacatgaagaatcatcctgatcatttaatgagaaaaaaatatcagtgtacagattgtgactttacaactaacaagaaagtgagtttccataaccacttagaaagccataagctcataaacaaagtcgacaaaacccatgaatttacagaatacacacgaagatacagagaggctagtccactgagttccaataaacttattttaagagacaaggagccgaagatgcacaagtgcaaatactgtgactatgaaactgcagaacaaggactgttaaacaggcatttgttggccgttcacagcaagaattttcctcatgtttgtgttgagtgtgggaagggttttcgacatccttctgaactcaagaaacatatgagaacccatactggtgagaagccatatcagtgtcagtattgtattttcaggtgtgcagatcaatcaaatctgaaaactcacattaagtctaaacatggtaacaatttgccatataaatgtgagcattgtccccaagcatttggtgatgagagggagcttcaacgccatctggatttgtttcaaggacataagacacaccagtgtcctcattgtgaccataagagcaccaattcaagtgaccttaagcggcacatcatatctgtccatactaaggattttcctcacaaatgtgaggtctgtgataaaggttttcatcgtccttctgagctcaaaaagcatagtgatatccataagggtaggaagattcatcagtgcaggcactgtgactttaaaacatccgatccatttattcttagtggccatatcctttcagttcatactaaagatcagccattgaaatgtaaaaggtgcaagagaggattcagacaacaaaatgagctaaaaaaacatatgaagacccatactggaaggaagatttaccaatgtgagtattgtgaatacagcactacagatgcatctggctttaaacgacatgtgatatcaatacatacaaaagactatccacacaggtgtgaattctgcaagaagggattccgaagaccatcagaaaaaaatcagcatattatgaggcaccacaaagaggctcttatgtagtaatgaactagtccgtaacttgaaagtatttcgatttcttggctttatatatcttgtggaaaggacgacgaatgctcgccaccttggtgaca

SEQ ID NO: 2804 - DNA, 2000 bp, Homo sapiens
  source 1..2000: mol_type = genomic DNA
accgccaccatgttacgtgaggaagcagctcagaagaggaaagaaaaggagccaggcatggctcttcctcagggacacttgacttttagggatgtggctatagaattctctttggaggagtggaaatgcctggaccctacgcagagggctttatacagggccatgatgttggagaactacaggaacctgcattctgtggatatctcttccaaatgcatgatgaagaagttctcatcaacagcgcaaggcaatacagaagtggacacagggacattagaaagacatgaaagtcatcacattggagatttttgcttccagaaaattgggaaagatattcatgactttgagtttcaatggcaagaagacaaaagaaatagccatgaagcaactatgacacaaatcaaaaagttgactggtagcaccgacagatatgatcgaaggcatcctggaaacaagcctatcaaagatcagcttggattaagctttcattcgcatcttcctgaactccacatatttcagaccaaagggaaagttggtaatcaagttgagaagtctatcaacgatgcttcctcagttctaacgtcccaaagaatttcttctaggcccaaaatccatatttctaataactatgaaaataatttcttccattcatcattactcacactaaaacaggaagtacacataagagaaaaatctttccaatgtaatgagagtggcaaagcctttaattgtagctcactcttaaggaaacatcagataatctatttaggagggaaacaatataaatgtgatgtatgtggcaaggtctttaatcagaagcgataccttgcatgccatcatagatgtcacactggtgagaaaccttacaagtgtaatgaatgtggcaaggtttttaatcaacaatcaaaccttgcaagtcatcatagacttcatactggagagaaaccttacaaatgtgaagaatgtgacaaagtttttagtcgcaaatcaaatcttgaaagacataggagaattcatactggagagaaaccatacaaatgtaaggtttgtgaaaaggctttcaggcgtgattcacacctcacacaacacactagaattcacactggagagaaaccttacaagtgtaatgagtgtggcaaagcctttagtgggcagtcaacacttattcaccatcaagcaatccatggtatagggaaactttataaatgtaatgattgtcacaaagtcttcagtaatgctacaaccattgcaaatcattggagaatccataatgaagagagatcttacaagtgtaataaatgtggcaaattttttagacgtcgttcatatctcgtagttcattggcgaactcatactggagagaaaccttacaagtgtaatgagtgtggcaagaccttccatcacaattcagcccttgtaattcataaggcaattcatactggagagaaaccttacaagtgtaatgagtgtggcaagaccttccgtcacaattcagcccttgtaattcataaggcaattcatactggagagaaaccttacaagtgtaatgaatgtggcaaggtttttaatcaacaagcaacccttgcacgtcatcatagacttcatactggagagaaaccttacaaatgtgaagaatgtgacacagttttcagtcgcaaatcacaccatgaaacacataagagaattcatactggagagaaaccttacaaatgtgatgattttgacgaggccttcagtcaagcttcatcttatgcaaaacaaaggagaattcatatgggagagaaacatcacaagtgtgatgattgtggcaaagcctttacttcacattcacatcgcattagacatcagagaatccataccggacagaaatcttacaaatgtcataagcgtggcaaggtcttcagttagtaatgaactagtccgtaacttgaaagtatttcgatttcttggctttatatatcttgtggaaaggacgattcgcccgtatagatacgtccata

SEQ ID NO: 2805 - DNA, 1433 bp, Homo sapiens
  source 1..1433: mol_type = genomic DNA
accgccaccatgccttctcagaatgctgttttttctcaggaggggaacatggaggaggaagaaatgaatgatggctcacagatggtgagatctcaggaatcactgacgtttcaggatgtggccgtggacttcaccagagaggagtgggaccagctgtaccctgcccaaaagaacctctatcgagacgtgatgctggagaactacaggaatctagttgcactggggtatcagctttgtaagccagaggtaatcgcgcagttggagctagaggaagaatgggtgatagaaagagacagcctgctggatactcatccagatggagaaaacagacccgaaatcaaaaagtcaaccacaagccagaatatttctgatgaaaatcaaacccatgagatgataatggagagactcgcaggagacagcttctggtactccatcctaggaggactctgggattttgattaccatccagagtttaaccaagaaaaccacaagagatatttaggacaagtaactttgacccacaaaaagatcacacaggagagaagccttgagtgtaataaatttgcagaaaactgtaatctgaactcaaaccttatgcagcagagaattccttccattaaaatacccctgaattctgacacacagggaaacagcatcaaacataattcagacttgatttactatcagggaaattatgtaagagagactccctatgaatatagtgagtgtggaaaaatcttcaatcaacatattcttcttactgatcatattcatactgcagagaaacccagtgagtgtgggaaggccttcagccacacctcatctcttagccagcctcagatgttgcttacaggagagaagccctataagtgtgatgaatgtggaaaaagattcagccagaggatacatctcattcaacatcagagaattcacacaggagaaaagccttttatatgcaatggatgtgggaaagccttccgtcagcattcatcctttactcaacatctgaggattcatactggagaaaagccctataaatgtaatcaatgtggtaaagcttttagccgcatcacatcccttactgaacatcatagacttcataccggagagaaaccttacgaatgtggtttctgtggcaaagccttcagtcagaggacacatctgaatcaacatgaaagaactcatacaggagagaaaccctataaatgtaatgaatgcgggaaagcctttagccagagtgcacaccttaatcaacacaggaaaatccatactcgggagaaattatgtgaatataaatgtgagcaaactgttcgccacagtccttcatttagcagcacatagtaatgaactagtccgtaacttgaaagtatttcgatttcttggctttatatatcttgtggaaaggacgagctcggtcggctgtcctcttaact

SEQ ID NO: 2806 - DNA, 1265 bp, Homo sapiens
  source 1..1265: mol_type = genomic DNA
accgccaccatggagcgccccccgccccgcgccgccggccgggaccccagtgcgctgcgggccgaggcgccgtggctgcgcgcggagggtccggggccgcgcgccgcgcccgtgacggtgcccacgccgccgcagggctcttccgtgggcggcggcttcgcgggcttggagttcgcgcggccgcaggagtcggagccgcgggcctcggacctgggggccccccggacgtggacgggggcggcggcggggccccggactccgtcggcgcacatccccgtcccagcgcagagagccaccccaggaaaagcccggctggacgaggtcatggctgccgctgcccttacaagcctgtccaccagccctctccttctgggggccccggttgcagccttcagcccagagcctggcctggagccctggaaggaggccctggtgcggcccccaggcagctacagcagcagcagcaacagtggagactggggatgggacctggccagtgaccagtcctctccgtccaccccgtcacccccactgccccccgaggcagcccactttctgtttggggagcccaccctgagaaaaaggaagagcccggcccaggtcatgttccagtgtctgtggaagagctgcgggaaggtgctgagcacggcgtcggcgatgcagagacacatccgcctggtgcacctggggaggcaggcagagcctgagcagagtgatggtgaggaggacttctactacacagagctggatgttggtgtggacacgctgaccgacgggctgtccagcctgactccagtgtcccccacggcctccatgccgcctgccttcccccgcctggagctgccagagctgctggagcccccagccctgcctagtcccctgcggccgcctgccccgcccctgcccccgccccctgtcctgagcaccgttgctaacccccagtcctgtcacagtgaccgtgtctaccagggctgcctgacgcccgcccgcctggagccgcagcccacggaggtcggagcctgcccacccgccttgtcctccaggatcggagtcaccctgaggaagccccgcggcgacgcgaagaagtgccggaaggtgtatggcatggagcgccgggacctctggtgcacagcctgccgctggaagaaagcctgccagcggttcctggactagtaatgaactagtccgtaacttgaaagtatttcgatttcttggctttatatatcttgtggaaaggacgacgtagatccggccatgctcccgct

SEQ ID NO: 2807 - DNA, 1454 bp, Homo sapiens
  source 1..1454: mol_type = genomic DNA
accgccaccatggcctgggctctgaagctgcctctggccgacgaagtgattgaatccgggttggtgcaggactttgatgctagcctgtccgggatcggccaggaactgggtgctggtgcctatagcatgagtgatgtccttgcattgcccatttttaagcaagaagagtcgagtttgcctcctgataatgagaataaaatcctgccttttcaatatgtgctttgtgctgctacctctccagcagtgaaactccatgatgaaaccctaacgtatctcaatcaaggacagtcttatgaaattcgaatgctagacaataggaaacttggagaacttccagaaattaatggcaaattggtgaagagtatattccgtgtggtgttccatgacagaaggcttcagtacactgagcatcagcagctagagggctggaggtggaaccgacctggagacagaattcttgacatagatatcccgatgtctgtgggtataatcgatcctagggctaatccaactcaactaaatacagtggagttcctgtgggaccctgcaaagaggacatctgtgtttattcagcccaaaggtgcagacagaaagcaaaaaacggatagggaaaaaatggagaaacgaacacctcatgaaaaggagaaatatcagccttcctatgagacaaccatactcacagagtgttctccatggcccgagatcacgtatgtcaataactccccatcacctggcttcaacagttcccatagcagtttttctcttggggaaggaaatggttcaccaaaccaccagccagagccaccccctccagtcacagataacctcttaccaacaaccacacctcaggaagctcagcagtggttgcatcgaaatcgtttttctacattcacaaggcttttcacaaacttctcaggggcagatttattgaaattaactagagatgatgtgatccaaatctgtggccctgcagatggaatcagactttttaatgcattaaaaggccggatggtgcgtccaaggttaaccatttatgtttgtcaggaatcactgcagttgagggagcagcaacaacagcagcagcaacagcagcagaagcatgaggatggagactcaaatggtactttcttcgtttaccatgctatctatctagaagaactaacagctgttgaattgacagaaaaaattgctcagcttttcagcatttccccttgccagatcagccagatttacaagcaggggccaacaggaattcatgtgctcatcagtgatgagatgatacagaactttcaggaagaagcatgttttattctggacacaatgaaagaaaccaatgatagctatcatatcatactgaagtagtaatgaactagtccgtaacttgaaagtatttcgatttcttggctttatatatcttgtggaaaggacgaccaggacttagacgtacgtcgcgc

SEQ ID NO: 2808 - DNA, 4286 bp, Homo sapiens
  source 1..4286: mol_type = genomic DNA
accgccaccatggcagccctgctgagatccgcgcgttggttgctgcgtgccggggcggccccgcgcctcccgctctccctgcgcctcctccctggcggcccgggccggctgcatgccgcctcctatctgcccgccgctcgcgccgggcccgtggccggaggactactgagcccagccaggctgtatgccattgctgccaaagaaaaagatattcaagaggagtccactttttcttctaggaagatttccaatcagtttgattgggctctaatgagactagatctttctgttcgaagaactggccgcattccaaagaagcttctacaaaaagtttttaatgatacctgccgctcaggtggcctaggtggtagtcatgccttgcttctactacgtagttgtggttctctcttgcctgaactaaagcttgaagagagaacagaatttgctcataggatatgggacacacttcagaaattaggtgctgtgtatgatgtgagtcactataatgctttacttaaagtctatcttcaaaatgaatataaattctcaccaactgatttcctggcaaaaatggaggaagcaaacattcaaccaaatcgagtgacataccagagattgattgcttcttattgtaatgtaggagatattgaaggtgccagcaagattcttggatttatgaaaactaaggatctcccagttacagaggcagtattcagtgcccttgtgacagggcatgccagagctggtgatatggagaatgcagaaaacattctcacagtgatgagagatgccggaattgagcctggtccagacacatacctcgcattattgaatgcatatgctgagaagggcgacattgaccatgttaagcagactctggagaaggtggagaagtccgagcttcaccttatggaccgtgatttactgcaaattatttttagcttcagtaaagctgggtatcctcagtatgtctcagaaattttggaaaaagttacatgtgaaagaagatatattccagatgcaatgaacctcattttacttttagtcactgaaaaattggaagatgtagcgttgcaaattttactagcatgccccgtatcaaaggaagatggcccaagtgtctttggcagtttctttttacaacactgtgtgactatgaatacgcctgtggagaagctaacagactactgtaagaagttaaaggaagtccagatgcactcctttcctctgcagttcaccctccattgtgctttactcgccaataaaactgatttggcaaaagccttaatgaaggctgtgaaggaggaaggttttcctatcagacctcactatttctggccattgctagttggacgtcggaaggaaaaaaatgttcaaggtataattgaaatcctcaaaggaatgcaagaattgggagtacatcctgatcaggaaacatatacagattatgtgattccatgctttgatagtgtaaactcagcacgagccattttgcaggaaaatggatgtctgtctgatagtgatatgttttctcaagctggattgagaagtgaagcagcaaatgggaacttagactttgtattatcatttttgaaatcaaatacattgcccatctcgctgcagtctataagaagtagcctactgctaggcttcaggaggtctatgaatataaatctttggagcgagataacagaattgttgtacaaggatggacgttattgccaggagcctcgaggaccgacggaagctgttggctattttctttataacttgattgacagcatgagtgactcagaggtacaggccaaggaggagcatttgagacaatacttccatcagctggagaagatgaatgtaaaaattcctgaaaatatctacagaggcattcgtaatctcctggaaagctaccatgttcctgaattgattaaggatgctcacttgttggttgagagtaagaatttagactttcaaaaaactgtgcaacttacatcatctgaattggagtccacacttgaaacactaaaagctgaaaatcaacctataagagatgtcctaaagcaactcatattagtgctttgttcagaagagaatatgcaaaaagcccttgaattgaaagcaaaatatgaatccgacatggttactggtggctatgcagctttaataaatttatgctgtcgacatgataaagtagaagatgccttgaacttgaaagaagaatttgaccgcttagattcatctgctgtccttgacaccggcaagtatgtaggccttgtaagagtattggcaaagcatggcaagctccaagatgctattaacattctgaaggagatgaaagagaaggatgttcttatcaaagatacaacagccttgtcctttttccacatgctaaatggcgcagctttaagaggtgaaattgaaacagtaaaacagttgcatgaagccatcgtgactctagggttagcagaaccatccaccaacataagtttcccattggtcactgtacacttggaaaagggcgacctatctactgctcttgaggtcgccattgactgctatgaaaagtataaagtattaccaaggattcatgatgtcttgtgtaaactggtagagaaaggcgagactgatctaattcagaaagcaatggactttgtgagccaagaacaaggtgaaatggtgatgctctatgatctcttctttgccttcctacaaacaggaaattacaaagaggccaagaagatcattgagactccagggattagagctcgatctgcaaggcttcagtggttttgtgacagatgtgttgcaaataatcaggttgaaactctggaaaaattagtggagctgacacagaagctatttgaatgtgatagagaccagatgtactacaatctgctaaaactgtataaaataaacggtgactggcaaagagctgatgcagtctggaataaaatccaagaagaaaatgttattcctcgtgaaaagacattaagattattagcagaaatccttagagagggtaaccaggaagttccgtttgacgtacctgagttgtggtatgaagatgaaaaacattccctgaattcttcgtcagcctcaaccacagaacctgatttccagaaagatatattgattgcctgccgattgaaccaaaaaaaaggggcatatgatattttcctgaatgcaaaagagcaaaacattgtgtttaatgctgaaacctacagcaatctcattaaattactgatgtcagaagattattttacacaagcaatggaagtgaaagcattcgcggagacccacatcaagggcttcacactgaacgatgctgccaacagccgcctcatcataacgcaagttaggcgggattatttgaaagaggctgtgacaacactgaaaacagtattggatcagcagcagaccccttctaggttagcagtgacccgtgtcatccaggcattggccatgaagggtgatgttgaaaacatagaagtagttcagaagatgttaaatggactcgaagactccattggactttcaaaaatggttttcatcaataacattgctttggctcaaataaagaataataacatagatgccgcaatagaaaacattgaaaatatgcttacttcagagaataaagtcattgaaccccaatacttcggcttggcatacttattcagaaaagtaatagaggagcagttggaaccagcagttgaaaagataagcatcatggcggagagattggccaatcagtttgcaatttataaacctgtcactgattttttccttcaacttgtggatgcaggcaaggtggatgatgccagagctctcctacagagatgtggtgcaattgctgaacaaaccccgattttgttgttgttcctccttaggaattctaggaaacaaggaaaggcatcaactgtgaaatctgtgttagaattgattcctgaattaaatgaaaaggaagaagcatacaattccctcatgaaaagctatgtctcagagaaagatgtcacatctgctaaagcactgtatgaacatttgactgcaaagaatacaaaattggatgatctgtttctaaagcgttacgcatctttgctgaagtatgctggagagcctgtccctttcattgaaccccctgaaagctttgaattttatgcacagcagctaagaaaattgagggaaaactcttcttagtaatgaactagtccgtaacttgaaagtatttcgatttcttggctttatatatcttgtggaaaggacgatgggaaggactatgccttaaccgg

SEQ ID NO: 2809 - DNA, 1526 bp, Homo sapiens
  source 1..1526: mol_type = genomic DNA
accgccaccatggctgctggtctcctcacagctgggccccggggatccacattcttcagcagtgtgacggtagcttttgcacaggaaaggtggaggtgcctcgtgtctactccacgggacaggttcaaggaggggataccaggaaagtccaggagccttgtcctactaggacttccagtttcccagcctggcatgaactcccagttggaacaaagggaaggcgcatggatgctggagggcgaagacctgcgaagtccctctccaggctggaagattatatctggatcaccaccagagcaagccctttctgaagcttcattccaagacccatgtgtagagatgccccctggggattcagaccacgggaccagtgaccttgagaagagcttcaatctgagaccagtcctctctccgcaacagagagtgcccgtggaagcgagacctcgcaaatgtgagacacacaccgagagcttcaagaactcggaaatcctgaaacctcacagagcaaaaccatatgcatgtaatgaatgtggcaaagccttcagttactgttcttccctttctcagcatcagaagagccacactggagagaagccctatgagtgcagtgaatgtgggaaggccttcagccagagctcatctctcattcagcaccagaggattcacactggagagaagccttacaagtgcagtgaatgtggaagagccttcagccagaacgccaacctcaccaaacaccagcgaacccacaccggagagaagccctacagatgcagcgagtgtgagaaagccttcagtgactgctcagctcttgttcagcatcagagaattcataccggagagaagccctacgaatgcagcgactgtgggaaggccttccgtcacagtgcaaacctcacgaaccatcagaggactcacaccggggagaagccctacaagtgcagcgagtgtgggaaggccttcagttactgcgcagcgttcattcagcaccagaggattcacaccggggagaagccctacagatgtgccgcgtgtgggaaggccttcagccagagtgcaaacctcacaaaccatcagaggactcacactggggagaaaccctacaagtgcagcgagtgtgggaaggccttcagccagagtaccaatctcataatccaccaaaagacccacaccggggagaagccatataaatgtaatgaatgtgggaaattcttcagtgagagctcagccctcattcggcatcatataatccacaccggagaaaaaccttatgagtgtaatgagtgtggtaaagcgtttaaccagagctcatcccttagtcagcatcagagaatccacacaggcgtgaaaccctacgaatgcagcgagtgtgggaaggccttccggtgcagctctgccttcgttagacatcagagactccacgccggagagtagtaatgaactagtccgtaacttgaaagtatttcgatttcttggctttatatatcttgtggaaaggacgactagttgttggcctaggcgttaac

SEQ ID NO: 2810 - DNA, 1598 bp, Homo sapiens
  source 1..1598: mol_type = genomic DNA
accgccaccatgctggaggaaggagtactgccttccccaggccctgcccttccccaagaggaaaacacaggagaggaaggaatggctgctggtctcctcacagctgggccccggggatccacattcttcagcagtgtgacggtagcttttgcacaggaaaggtggaggtgcctcgtgtctactccacgggacaggttcaaggaggggataccaggaaagtccaggagccttgtcctactaggacttccagtttcccagcctggcatgaactcccagttggaacaaagggaaggcgcatggatgctggagggcgaagacctgcgaagtccctctccaggctggaagattatatctggatcaccaccagagcaagccctttctgaagcttcattccaagacccatgtgtagagatgccccctggggattcagaccacgggaccagtgaccttgagaagagcttcaatctgagaccagtcctctctccgcaacagagagtgcccgtggaagcgagacctcgcaaatgtgagacacacaccgagagcttcaagaactcggaaatcctgaaacctcacagagcaaaaccatatgcatgtaatgaatgtggcaaagccttcagttactgttcttccctttctcagcatcagaagagccacactggagagaagccctatgagtgcagtgaatgtgggaaggccttcagccagagctcatctctcattcagcaccagaggattcacactggagagaagccttacaagtgcagtgaatgtggaagagccttcagccagaacgccaacctcaccaaacaccagcgaacccacaccggagagaagccctacagatgcagcgagtgtgagaaagccttcagtgactgctcagctcttgttcagcatcagagaattcataccggagagaagccctacgaatgcagcgactgtgggaaggccttccgtcacagtgcaaacctcacgaaccatcagaggactcacaccggggagaagccctacaagtgcagcgagtgtgggaaggccttcagttactgcgcagcgttcattcagcaccagaggattcacaccggggagaagccctacagatgtgccgcgtgtgggaaggccttcagccagagtgcaaacctcacaaaccatcagaggactcacactggggagaaaccctacaagtgcagcgagtgtgggaaggccttcagccagagtaccaatctcataatccaccaaaagacccacaccggggagaagccatataaatgtaatgaatgtgggaaattcttcagtgagagctcagccctcattcggcatcatataatccacaccggagaaaaaccttatgagtgtaatgagtgtggtaaagcgtttaaccagagctcatcccttagtcagcatcagagaatccacacaggcgtgaaaccctacgaatgcagcgagtgtgggaaggccttccggtgcagctctgccttcgttagacatcagagactccacgccggagagtagtaatgaactagtccgtaacttgaaagtatttcgatttcttggctttatatatcttgtggaaaggacgaaagaaacgacaccgacccaacgga

SEQ ID NO: 2811 - DNA, 1196 bp, Homo sapiens
  source 1..1196: mol_type = genomic DNA
accgccaccatgccccctggggattcagaccacgggaccagtgaccttgagaagagcttcaatctgagaccagtcctctctccgcaacagagagtgcccgtggaagcgagacctcgcaaatgtgagacacacaccgagagcttcaagaactcggaaatcctgaaacctcacagagcaaaaccatatgcatgtaatgaatgtggcaaagccttcagttactgttcttccctttctcagcatcagaagagccacactggagagaagccctatgagtgcagtgaatgtgggaaggccttcagccagagctcatctctcattcagcaccagaggattcacactggagagaagccttacaagtgcagtgaatgtggaagagccttcagccagaacgccaacctcaccaaacaccagcgaacccacaccggagagaagccctacagatgcagcgagtgtgagaaagccttcagtgactgctcagctcttgttcagcatcagagaattcataccggagagaagccctacgaatgcagcgactgtgggaaggccttccgtcacagtgcaaacctcacgaaccatcagaggactcacaccggggagaagccctacaagtgcagcgagtgtgggaaggccttcagttactgcgcagcgttcattcagcaccagaggattcacaccggggagaagccctacagatgtgccgcgtgtgggaaggccttcagccagagtgcaaacctcacaaaccatcagaggactcacactggggagaaaccctacaagtgcagcgagtgtgggaaggccttcagccagagtaccaatctcataatccaccaaaagacccacaccggggagaagccatataaatgtaatgaatgtgggaaattcttcagtgagagctcagccctcattcggcatcatataatccacaccggagaaaaaccttatgagtgtaatgagtgtggtaaagcgtttaaccagagctcatcccttagtcagcatcagagaatccacacaggcgtgaaaccctacgaatgcagcgagtgtgggaaggccttccggtgcagctctgccttcgttagacatcagagactccacgccggagagtagtaatgaactagtccgtaacttgaaagtatttcgatttcttggctttatatatcttgtggaaaggacgacgtaggagtgggacttgagcacat

SEQ ID NO: 2812 - DNA, 1442 bp, Homo sapiens
  source 1..1442: mol_type = genomic DNA
accgccaccatggaggttcccccagcaacaaagtttggtgagacctttgcatttgagaacaggttagagtcacaacaagggcttttcccaggggaggacctgggggacccttttcttcaggaaagaggtttggagcaaatggctgtgatctacaaggagatccctcttggtgagcaggacgaagaaaatgatgattacgaggggaatttcagtttgtgctcaagccctgttcagcatcaaagtatccccccaggaaccagaccccaggatgatgagctcttcggacaaaccttcctccagaaatccgacctcagcatgtgtcagataatccacagtgaagagcccagtccatgcgattgtgcagaaacagacagaggggactcaggacctaacgcacctcacagaaccccacaaccagccaagccctatgcgtgtcgagagtgtgggaaggccttcagccagagctcgcacctgctccgacacctggtgatccacactggggagaagccctatgagtgctgtgagtgcgggaaggccttcagccagagctcccacctgctcaggcaccagatcatccacaccggggagaagccctacgagtgccgggagtgtgggaaggccttccgccagagctcagccctcacgcaacaccaaaagatccacaccggaaagaggccctacgagtgcagggaatgcgggaaagatttcagccggagctccagcctcagaaaacacgagagaattcatacaggagagagaccttatcagtgtaaggaatgtgggaaatccttcaaccagagctcaggcctgagccagcatcggaagatccacaccctaaagaaacctcacgagtgcgatctctgtgggaaagccttttgtcacaggtcacacctcatccgacaccagcggatccacactgggaagaaaccatacaaatgcgatgagtgcgggaaggccttcagccagagctccaacctcattgagcaccgcaagacccacactggcgagaagccctacaaatgccagaagtgtgggaaagccttcagccagagctcctccctcattgagcaccagcgcatccacaccggtgagaagccctacgagtgctgtcagtgtggcaaggccttttgccacagctctgcgctgatccagcaccagagaatccacaccggcaagaagccctacacctgcgagtgtggcaaagccttccggcaccggtcagccctcattgagcactataaaacccacaccagagagaagccctacgtgtgcaatctgtgcggcaagtccttccgggggagctcgcacctgattcgccatcagaagattcattctggggagaagctatagtaatgaactagtccgtaacttgaaagtatttcgatttcttggctttatatatcttgtggaaaggacgattccaccctctaaatatggaccaa

SEQ ID NO: 2813 - DNA, 1649 bp, Homo sapiens
  source 1..1649: mol_type = genomic DNA
accgccaccatggagagcttggggctgcacacggtgacccttagtgatgggacaacagcctacgtccagcaagctgtcaaaggagagaagcttcttgaagggcaggtgatccagctcgaggatgggaccaccgcatacattcaccaggtgacggtacagaaagaagctctctcctttgaggatggtcagcctgtgcagctggaagatggcagcatggcttacatacaccgcacacccagagaaggctatgaccccagcaccctggaagccgtccaactggaagatggctccactgcctacattcaccaccctgtggctgtgccatcggagagcaccatcctggccgtacagacagaggtgggcttggaggacctggcagcagaggatgatgagggcttcagtgcagacgcagtggtggccctggagcagtatgccagcaaggttcttcatgacagccagattccccgtaatggaaaagggcagcaagttggagacagagcattccgctgtggctacaagggctgtgggcgtctctacaccaccgctcatcacttaaaggtgcatgaacgagctcatacaggtgaccgtccatacagatgtgacttccccagctgtggaaaggcctttgccacaggctatggactgaagagccacgttcgtacccacactggtgagaaaccatacaagtgcccagaggagctgtgcagcaaggccttcaagacctcaggagacctgcagaagcatgtccgtacccacactggtgaacgcccgttccagtgcccttttgagggctgtggccgctccttcaccacatctaacatccgcaaggtacatgtgcgcacccacacaggcgagaggccctacacctgcccggagccccactgtggccgcggcttcaccagcgccaccaactataagaatcacgtgcgcatccacacaggggagaagccatacgtttgcacggtgccaggctgcgggaaacgcttcaccgagtactcgagcttgtataagcaccacgtggtgcacacacactgcaagccctacacctgcagcacctgcggcaagacctaccggcagacctccaccttggccatgcacaagcgcagtgcccacggcgagctggaggccacggaggagagcgagcaggccctctatgagcagcagcaacttgaggccgcctctgcagccgaggagagtccgccacccaaacgaccccggatagcttacctttcggaggtgaaggaagagagagatgacatcccagcccaggtggcgatggtgactgaagaagatggggccccccaggtggctctgatcactcaggatggtgcccagcaggtcacaatcattacctctggggctgtggtggctgaggactcaagtgtagcatctcttcgtcatcaacaggtggcactgttggccacagccaacggaacgcacattgcagtgcagctggaggaacagcagaccttagaggaggccatcaatgtggccactgcggccatgcagcaaggggctgtgaccctggagacaacagtgtcggagagtggctgctagtaatgaactagtccgtaacttgaaagtatttcgatttcttggctttatatatcttgtggaaaggacgacttcaccacctttcccggattcaa

SEQ ID NO: 2814 - DNA, 2036 bp, Homo sapiens
  source 1..2036: mol_type = genomic DNA
accgccaccatggagatccctgccccggagcccgagaagacagctctttcctctcaggatcctgctctttccctgaaagagaatctcgaggatatatcgggttggggtcttcccgaagccaggtccaaggaatcggtgagtttcaaggatgtggctgtggacttcacccaggaggagtggggtcaactagactcccctcagagggccttgtaccgggatgtgatgttggagaactaccagaaccttcttgccctaggacctccactgcacaagccagatgtgatctctcatctggaacgaggcgaggagccatggagcatgcagagggaagtccccagagggccctgtccagaatgggagctgaaggcggtgccctctcaacagcagggcatttgcaaagaagaaccggcccaggagcccatcatggagcggcccctcggcggggcgcaggcgtgggggcgccaggcaggtgctctgcagaggagtcaggctgcgccctgggcgcccgcacctgccatggtctgggacgtccctgtagaggaattccccctcaggtgtcccctcttcgcccagcaacgcgttcccgaggggggacccttgctggacacacgcaagaacgtccaggccactgagggcagaaccaaggcccccgcgagactgtgtgcaggggaaaacgcctccacgccaagtgagccagaaaagttcccccaggtgcgccggcagcgcggggcgggcgccggggagggcgagttcgtgtgcggcgagtgcgggaaggcgttccgccagagctcctccctcacgctgcaccggcgctggcacagccgggagaaggcttacaagtgcgatgaatgcggcaaggccttcacctggagcaccaaccttctggagcaccggcgcatccacaccggcgagaagcccttcttctgcggcgagtgcgggaaggccttcagctgccactcgtccctcaacgtgcaccagcgcatccacacgggcgagcggccctacaagtgcagcgcctgcgagaaggccttcagctgcagctcgctgctcagcatgcacctgcgggtgcacaccggcgagaagccctaccggtgcggcgagtgcggcaaggccttcaaccagcgtacacacctcacacgccaccaccgcatccacacgggcgagaagccctaccagtgcggctcctgcggcaaggccttcacctgccactcatccctcaccgtgcatgagaagatccacagcggggacaagccgttcaagtgcagcgactgcgagaaggccttcaacagccgctcgcgcctcaccctccaccagaggacgcacacgggcgagaagcccttcaagtgcgccgactgcgggaagggcttcagctgccacgcgtacctgctcgtgcaccggcgcatccacagcggcgagaagcccttcaagtgcaacgagtgcggcaaagccttcagctcccacgcctacctcatcgtgcaccggcgcatccacacaggcgagaagcccttcgactgcagccagtgttggaaggccttcagctgccactcgtccctcatcgtgcaccagcgcatccacaccggtgagaagccctacaagtgcagcgagtgcggcagagccttcagccagaaccactgtctcattaaacatcagaaaatccactccggggagaagtcgtttaagtgtgagaaatgtggggagatgttcaactggagctcgcacctcactgagcaccagaggctgcacagcgaggggaagcccttggccatccagttcaacaaacacctgctcagcacatactacgtgcctggcagcctgctgggtgcaggggatgctggactgagggacgtggatcccatcgacgcgctggatgtggcaaagctcttgtgcgtggttccccccagagctggcaggaatttctccctggggagcaaacctcgaaactagtaatgaactagtccgtaacttgaaagtatttcgatttcttggctttatatatcttgtggaaaggacgaccttgggtaatatcgccgcagtga

SEQ ID NO: 2815 - DNA, 638 bp, Homo sapiens
  source 1..638: mol_type = genomic DNA
accgccaccatggagatccctgccccggagcccgagaagacaggaatcggtgagtttcaaggatgtggctgtggacttcacccaggaggagtggggtcaactagactcccctcagagggccttgtaccgggatgtgatgttggagaactaccagaaccttcttgccctaggacctccactgcacaagccagatgtgatctctcatctggaacgaggcgaggagccatggagcatgcagagggaagtccccagagggccctgtccagaatgggagctgaaggcggtgccctctcaacagcagggcatttgcaaagaagaaccggcccaggagcccatcatggagcggcccctcggcggggcgcaggcgtgggggcgccaggcaggtgctctgcagaggagtcaggctgcgccctgggcgcccgcacctgccatggtctgggacgtccctgtagaggaattccccctcaggtgtcccctcttcgcccagcaacgcgttcccgaggggggacccttgctggacacacgcaagaacgtccaggccactagtaatgaactagtccgtaacttgaaagtatttcgatttcttggctttatatatcttgtggaaaggacgaatagatagaaagtgctacttatca

SEQ ID NO: 2816 - DNA, 332 bp, Homo sapiens
  source 1..332: mol_type = genomic DNA
accgccaccatgaacaaatcccagggatcagtttcattcacggatgtgactgtggactttacccaggaggaatgggaacaactggacccctctcagaggatcctatacatggatgtgatgctggagaattatagcaacttactttcagtgggtaaggacggttttcagaagtgtggaaggctgatgaccagatggagagagaccacagaaacccagacgagcaggcgaggcaatttttagtaatgaactagtccgtaacttgaaagtatttcgatttcttggctttatatatcttgtggaaaggacgacctgttcaatcgaatagttaggat

SEQ ID NO: 2817 - DNA, 1226 bp, Homo sapiens
  source 1..1226: mol_type = genomic DNA
accgccaccatggatgtgatgctggagaattatagcaacttactttcagtggaagtgtggaaggctgatgaccagatggagagagaccacagaaacccagacgagcaggcgaggcaatttttaattcttaagaaccaaaccccaattgaggaaagaggcgatctctttggaaaagcacttaatctgaacacagactttgtttctttaagacaagtaccttataaatatgacttatatgaaaaaactttgaaatataattcagacttgcttaatagtaatagaagctatgcaggaaagcagactgatgagtgtaatgaatttggaaaagcacttctctacctgaagcaagagaaaacccacagtggagtagaatattctgaatacaataaaagtggaaaagccctcagccataaagcagccatttttaaacatcagaaaataaaaaacttggttcaacctttcatttgtacttactgtgacaaggctttctcctttaagtcactcctcattagtcataagagaatacatactggagaaaagccatatgaatgcaatgtatgtaagaaaaccttctcccataaggccaacctcatcaaacatcagagaattcacactggggagaaacctttcgagtgtccggaatgtggaaaagctttcacccaccagtcaaacctcattgtacaccagagagcacatatggagaagaagccctatgagtgcagtgaatgtggaaagacatttgcccaaaagtttgaactcaccacacaccagagaattcatacaggagagcgaccctatgagtgtaacgaatgtgcaaaaaccttctttaagaagtcaaaccttatcatacatcagaagattcacacgggggagaaacgctatgagtgcagtgaatgtggaaaatcctttatccagaactcacagctcatcatacacatgagaactcatacaggagagaaaccctatgaatgtactgagtgcggcaaaactttcagccagaggtcaactcttagattacacttgcgaatccacacaggagagaaaccatatgagtgttccgaatgtgggaaggcctttagcaggaagtcccgactcagtgtccatcagagagttcacatcggggagaaaccctagtaatgaactagtccgtaacttgaaagtatttcgatttcttggctttatatatcttgtggaaaggacgaagcatccttgactactgtctcggg

SEQ ID NO: 2818 - DNA, 1325 bp, Homo sapiens
  source 1..1325: mol_type = genomic DNA
accgccaccatgaacaaatcccagggatcagtttcattcacggatgtgactgtggactttacccaggaggaatgggaacaactggacccctctcagaggatcctatacatggatgtgatgctggagaattatagcaacttactttcagtggaagtgtggaaggctgatgaccagatggagagagaccacagaaacccagacgagcaggcgaggcaatttttaattcttaagaaccaaaccccaattgaggaaagaggcgatctctttggaaaagcacttaatctgaacacagactttgtttctttaagacaagtaccttataaatatgacttatatgaaaaaactttgaaatataattcagacttgcttaatagtaatagaagctatgcaggaaagcagactgatgagtgtaatgaatttggaaaagcacttctctacctgaagcaagagaaaacccacagtggagtagaatattctgaatacaataaaagtggaaaagccctcagccataaagcagccatttttaaacatcagaaaataaaaaacttggttcaacctttcatttgtacttactgtgacaaggctttctcctttaagtcactcctcattagtcataagagaatacatactggagaaaagccatatgaatgcaatgtatgtaagaaaaccttctcccataaggccaacctcatcaaacatcagagaattcacactggggagaaacctttcgagtgtccggaatgtggaaaagctttcacccaccagtcaaacctcattgtacaccagagagcacatatggagaagaagccctatgagtgcagtgaatgtggaaagacatttgcccaaaagtttgaactcaccacacaccagagaattcatacaggagagcgaccctatgagtgtaacgaatgtgcaaaaaccttctttaagaagtcaaaccttatcatacatcagaagattcacacgggggagaaacgctatgagtgcagtgaatgtggaaaatcctttatccagaactcacagctcatcatacacatgagaactcatacaggagagaaaccctatgaatgtactgagtgcggcaaaactttcagccagaggtcaactcttagattacacttgcgaatccacacaggagagaaaccatatgagtgttccgaatgtgggaaggcctttagcaggaagtcccgactcagtgtccatcagagagttcacatcggggagaaaccctagtaatgaactagtccgtaacttgaaagtatttcgatttcttggctttatatatcttgtggaaaggacgaagggtgcatgaaccgaagccgtct

SEQ ID NO: 2819 - DNA, 2030 bp, Homo sapiens
  source 1..2030: mol_type = genomic DNA
accgccaccatgtcagagccaggaatgctgggcaggaaggatgtgtgggttccgagagaaaccccgttcaccaaggccatggaagtggaggctgcagaggcccggtccccagcccccggctacaagcgctcgggccgccgctacaagtgcctgtcctgtaccaagacatttccaaacgcgcccagggcagcgcgccacgctgccacacatgggccggcagactgctctgaagaggtggccgaggtgaagccaaagccagagacagaagctaaggcagaggaagccagtggggagaaggtgtcaggctccgcggccaagcctaggccctatgcgtgtccgctatgccccaaggcctacaagacggcacccgagctgcgcagccacgggcgcagccacacgggggagaagccctttccgtgccccgagtgcggccgccgcttcatgcagcccgtgtgcctgcgcgtgcacctggcctcgcacgctggcgaactgcccttccgctgtgcgcactgcccgaaggcctatggcgcgctctccaagctcaagatccaccagcgtggccacacaggcgagcggccttacgcctgcgccgactgcggcaagagctttgctgacccttcagtgttccgcaagcaccggcgtactcacgctggcctgcggccctacagctgtgagcgttgcggcaaagcctatgcggagctcaaggacctccgcaaccatgagcggtcccacaccggcgagcgccccttcctctgctccgagtgcgggaagagcttctcccgctcatcctcgctcacgtgccaccagcgcatccacgcggcacagaagccctaccgctgcccggcctgcggcaagggcttcacgcagctcagttcctaccagagccacgagcgcacgcactcgggggagaagcccttcctgtgcccgcgctgcggccgcatgttctccgacccctcgagcttccgtcgccaccagcgcgcccatgaaggggtgaagccataccactgcgagaagtgcggcaaggacttccggcagccggcggacctggccatgcaccggcgtgtgcacacaggcgaccggccgttcaagtgcctgcaatgtgacaagacgttcgtggcgtcctgggacctcaagcggcacgcgctggtgcactctggccagcggcccttccgctgtgaggagtgcgggcgagccttcgccgagcgtgccagcctcacgaagcatagccgggtgcactcgggggagcgccccttccactgtaacgcatgtgggaaatcctttgtggtgtcgtcgagcctgaggaagcacgagcggacccatcgaagcagtgaggccgcgggtgtgccccctgcacaggagctggtggtggggttggcgctgcctgtgggcgtggcaggtgagagttcagccgccccggcagcaggggcggggctgggggaccctccagcagggctgctagggctgcccccggagtcaggtggtgtgatggccacacagtggcaggtggtgggcatgacggtggagcatgtggaatgccaagatgctggtgtccgggaggctcctggtcccttggaaggggcaggcgaggcggggggtgaggaggctgacgagaagcccccccagtttgtgtgccgagagtgcaaggagaccttctccacaatgacgctgctgcgtcggcacgagcgctcacacccggagctccggcccttcccctgcacccagtgcggcaagagcttctctgaccgggctgggctgcgcaaacacagccgcactcacagctcagtgcgcccctacacctgcccccattgtcccaaggccttcttgagtgccagcgacttgcgcaagcatgaacgcacccaccctgtgcccatggggacccccacacccctggagcccctggtggctttgctaggaatgcctgaagaggggccggcctagtaatgaactagtccgtaacttgaaagtatttcgatttcttggctttatatatcttgtggaaaggacgattcactgctatctctctaaaccag

SEQ ID NO: 2820 - DNA, 1961 bp, Homo sapiens
  source 1..1961: mol_type = genomic DNA
accgccaccatggaagtggaggctgcagaggcccggtccccagcccccggctacaagcgctcgggccgccgctacaagtgcctgtcctgtaccaagacatttccaaacgcgcccagggcagcgcgccacgctgccacacatgggccggcagactgctctgaagaggtggccgaggtgaagccaaagccagagacagaagctaaggcagaggaagccagtggggagaaggtgtcaggctccgcggccaagcctaggccctatgcgtgtccgctatgccccaaggcctacaagacggcacccgagctgcgcagccacgggcgcagccacacgggggagaagccctttccgtgccccgagtgcggccgccgcttcatgcagcccgtgtgcctgcgcgtgcacctggcctcgcacgctggcgaactgcccttccgctgtgcgcactgcccgaaggcctatggcgcgctctccaagctcaagatccaccagcgtggccacacaggcgagcggccttacgcctgcgccgactgcggcaagagctttgctgacccttcagtgttccgcaagcaccggcgtactcacgctggcctgcggccctacagctgtgagcgttgcggcaaagcctatgcggagctcaaggacctccgcaaccatgagcggtcccacaccggcgagcgccccttcctctgctccgagtgcgggaagagcttctcccgctcatcctcgctcacgtgccaccagcgcatccacgcggcacagaagccctaccgctgcccggcctgcggcaagggcttcacgcagctcagttcctaccagagccacgagcgcacgcactcgggggagaagcccttcctgtgcccgcgctgcggccgcatgttctccgacccctcgagcttccgtcgccaccagcgcgcccatgaaggggtgaagccataccactgcgagaagtgcggcaaggacttccggcagccggcggacctggccatgcaccggcgtgtgcacacaggcgaccggccgttcaagtgcctgcaatgtgacaagacgttcgtggcgtcctgggacctcaagcggcacgcgctggtgcactctggccagcggcccttccgctgtgaggagtgcgggcgagccttcgccgagcgtgccagcctcacgaagcatagccgggtgcactcgggggagcgccccttccactgtaacgcatgtgggaaatcctttgtggtgtcgtcgagcctgaggaagcacgagcggacccatcgaagcagtgaggccgcgggtgtgccccctgcacaggagctggtggtggggttggcgctgcctgtgggcgtggcaggtgagagttcagccgccccggcagcaggggcggggctgggggaccctccagcagggctgctagggctgcccccggagtcaggtggtgtgatggccacacagtggcaggtggtgggcatgacggtggagcatgtggaatgccaagatgctggtgtccgggaggctcctggtcccttggaaggggcaggcgaggcggggggtgaggaggctgacgagaagcccccccagtttgtgtgccgagagtgcaaggagaccttctccacaatgacgctgctgcgtcggcacgagcgctcacacccggagctccggcccttcccctgcacccagtgcggcaagagcttctctgaccgggctgggctgcgcaaacacagccgcactcacagctcagtgcgcccctacacctgcccccattgtcccaaggccttcttgagtgccagcgacttgcgcaagcatgaacgcacccaccctgtgcccatggggacccccacacccctggagcccctggtggctttgctaggaatgcctgaagaggggccggcctagtaatgaactagtccgtaacttgaaagtatttcgatttcttggctttatatatcttgtggaaaggacgactcttaccacaaatgggataccga

SEQ ID NO: 2821 - DNA, 1496 bp, Homo sapiens
  source 1..1496: mol_type = genomic DNA
accgccaccatggtgagtggactgcgcctggcttcccgaagtggagaagagggctggttgaaacctgctgtggcgcgactcgggcctccacgccatcggctccggaacctgcggaccgagtcgccgtggcgtagccggggctcagtcctcttctgttcagggccgggccgggcggggcgggcagcggaacccctgcatcctgtctgtacctgcgggcgccacttccgccggccggagccctgtcgggaacccctcgcctcccctatccaggactcggtggcttttgaggatgtggctgtgaactttacccaggaggaatgggctttgctagattcttctcagaagaatctctacagagaagtgatgcaggaaacctgcaggaacctggcttctgtaggaagccaatggaaagaccagaatattgaagatcacttcgaaaaacctgggaaagatataagaaatcatatcgtacagagactgtgtgaaagtaaagaagatggtcagtatggagaagttgtcagccaaattccaaatcttgatctgaacgagaacatttctactggattaaaaccatgtgaatgcagtatttgtggaaaagtctttgtacgtcattccctccttaataggcatatcctagctcactcaggatacaaaccatatggagagaagcaatataaatgtgaacagtgtgggaaattcttcgtttctgttccaggtgttagaagacacatgataatgcacagtggaaatccagcttataaatgtacgatatgtgggaaagctttttattttctcaattcagttgaaagacatcagagaactcacacaggagaaaaaccctataaatgtaaacaatgtggtaaagcattcactgtttccggttcttgtctaatacatgaacgaactcacactggagagaaaccctacgaatgtaaggaatgtgggaaaacattcagattttcttgttcttttaagacgcatgaaaggactcacactggagaaagaccctataaatgtaccaaatgtgataaagccttcagctgttccacttcccttcgttaccatggaagcattcatactggagagagaccctatgagtgtaaacaatgtggcaaagcctttagtcgtttgagttccctttgtaaccatagaagtactcataccggagagaaaccctatgaatgtaaacaatgtgatcaagccttcagtcgcctcagttcccttcacctccacgaaagaattcatactggagaaaaaccctatgaatgtaagaaatgcggtaaagcctacactcgttccagtcaccttactcgccatgaaagaagtcatgatatagaggctgggtgtagtgactcagcctataatcccagcactttgggaggccaaggcgtgtggattgcttagtaatgaactagtccgtaacttgaaagtatttcgatttcttggctttatatatcttgtggaaaggacgacgtcatacaatggcgttccacgac

SEQ ID NO: 2822 - DNA, 1238 bp, Homo sapiens
  source 1..1238: mol_type = genomic DNA
accgccaccatggactcggtggcttttgaggatgtggctgtgaactttacccaggaggaatgggctttgctagattcttctcagaagaatctctacagagaagtgatgcaggaaacctgcaggaacctggcttctgtaggaagccaatggaaagaccagaatattgaagatcacttcgaaaaacctgggaaagatataagaaatcatatcgtacagagactgtgtgaaagtaaagaagatggtcagtatggagaagttgtcagccaaattccaaatcttgatctgaacgagaacatttctactggattaaaaccatgtgaatgcagtatttgtggaaaagtctttgtacgtcattccctccttaataggcatatcctagctcactcaggatacaaaccatatggagagaagcaatataaatgtgaacagtgtgggaaattcttcgtttctgttccaggtgttagaagacacatgataatgcacagtggaaatccagcttataaatgtacgatatgtgggaaagctttttattttctcaattcagttgaaagacatcagagaactcacacaggagaaaaaccctataaatgtaaacaatgtggtaaagcattcactgtttccggttcttgtctaatacatgaacgaactcacactggagagaaaccctacgaatgtaaggaatgtgggaaaacattcagattttcttgttcttttaagacgcatgaaaggactcacactggagaaagaccctataaatgtaccaaatgtgataaagccttcagctgttccacttcccttcgttaccatggaagcattcatactggagagagaccctatgagtgtaaacaatgtggcaaagcctttagtcgtttgagttccctttgtaaccatagaagtactcataccggagagaaaccctatgaatgtaaacaatgtgatcaagccttcagtcgcctcagttcccttcacctccacgaaagaattcatactggagaaaaaccctatgaatgtaagaaatgcggtaaagcctacactcgttccagtcaccttactcgccatgaaagaagtcatgatatagaggctgggtgtagtgactcagcctataatcccagcactttgggaggccaaggcgtgtggattgcttagtaatgaactagtccgtaacttgaaagtatttcgatttcttggctttatatatcttgtggaaaggacgataccaggacacccgtggagtacga

SEQ ID NO: 2823 - DNA, 7976 bp, Homo sapiens
  source 1..7976: mol_type = genomic DNA
accgccaccatgttccgcagggcacgccttagcgtgaagccgaatgtcaggcctggtgtaggcgccaggggctccacagcttccaatccccagcgtggacgggagtctcccaggccgccggatcctgccacggactctgcttccaagcccgcggagcccacagatgtgcccacagtcgatttcggtggagcggagccccaagaaaaggctcctaggagcagtactgaaaagactggtggtgacaatgatgttgaagaatccagtagatcttcctctactgtttcacagagaagaaagcgaatatcaagtacttctagcctggttaagtctagtgtcagtgttccttcagaatctcatcccttatctacaattaatcaagaggctccacagccaactgccacttcaacaaaagagaaacagccatgctcagacagataccgaatatacaaagcccagaaactgagggaaatgttaaaagaagaattgagaaaagagaagaaacaatggaaaaacaaatatgctataaatgaaagtcagaggccaccagatcgttcaaaaatgactatgagagacttcatatattatctaccagataataatccaatgacttcttcactggaacaagaaaagaaaactgaaaagccatcgactccagtccagacaagagagcaagaaggtaagagtactcctaatgctgaagataatgaaatggaagaagagacagatgatgggccattactggttcctcgagtaaaagtggcagaagatggttccattattttggatgaagaaagtttaactgtagaagttttaagaacaaaaggcccttgtgttgttgaagaaaatgaccccatatttgagcgcggttctacaactacatactccagctttaggaaaaactattactctaaaccatggtcaaataaagaaacagatatgttttttttagccatcagcatggtaggaactgacttttctatgatcggacaactttttcctcacagagcaaggatagaaattaagaataaatttaaacgggaagagaaaacaaatggatggagaatagacaaagcattccaggaaaagcgcccttttgacttcgatttttttgctcatttgcttcagaaagttcttgctgaagaagagaaaagaaaacaaaaatctgttaaaaatcacagtttaaaggagaagaaatccaccaaaccacggaaaaatgtaaaagtgaaaaaagttgcctgtgaaggagtgaataatgatccagatgagtctatgagttctagaatttcagacacggaaagatctcagaaggatgctcagacagttgaagaagagtctctgaccttatcaagggaggatgcagagcaggttgcattagaagtagacctaaatcaaaagaaaagaaggaggaagaagcaagatggagctaatgaactgggagtaaacaatcttttagaaaatgccactgttcaggcgggtccttctaaaggagaaaaacacaagaataaatgtcaggctataaggcctgagctaaaggaaggtgaatgcagtaaggagcagatgctttcctgcacacaaaacatagatggcattgtgggttttgcctccactgaaaaagttgagaaaagaactgaccccatcctttcattaagtaatcaacaagatgccacatcagtagcaactgagtcttcagaatcaagcacttcagatttgccttcattcgaagttggaattagagcattgtgtgaggtgaataatgctgagggtagttgtatagaagaaagaaatgttgacctaaaaaataattcactggaaattgatcaaacagaaaatgttaaaccaatgttgagaggtcgcttccaaagacctaaacccaatttgtcaagggctgggaagaaatcagttctttcacaaggcaaaacagagtcagagagcaagaattcacattcaaaaacttcagttgaaaagaaccacgtggaaaaagataaaatgaatacattggacattttgagaatggagactacagagagagagaatccagaagctgaaactgtatctgttttgggtgaaaaaaattgtctgcaggaagggagtcaactaaaggctttaagacctgtacaagtgaggggccgattgcaaaagccaaagccaaatgcaggtaaagctgctgaaagaaaagaaattctcatatcacaggaagaaattggggccaatgtagagaagaatgaaaatgaatcctgtgctgatagagatactcctcaacacatggaagatcaatcgcgtaaagattttgaagaggaagatgtcatattacagcctgagaaaaatgattcttttcaaaatgtgcagccagatgagcccaaggttcttaatgaatgtctaagcgttcaagagaataataaggcaaataaacttaaccaagtcccaattctaaggactcgatttcagaaaccaaagccaaatataggaagaggaactggaaggagagaaatttcctcaaaggaagaggtactagagaagattcttgtctctggggaaatggcggcagcattgagagaaactgtaagactagacacctcaccaaaggagatggtaccagcagagattaatactaaagaaatgcagtcagatttaaaagaaactggaagaagagccatttctcccagggagaagattctagatgtgattgatgacaccatagaaatggagacaggtctgaaagcaatgggaagagagatttgtctaagggagaagacgccagaggtgattgatgccactgaggaaatagacaaagatttggaagaagctggaagaagagaaatatccccacagaaaaatggcccagaggaggttaagcctctaggtgaagtggagacagatttgaaagcaactggaaatgagagttccccaagggagaagacaccagaggtgactgatgccactgaggaaatagacaaaaatttggaagaaactggaagaagaaaaatatccccaagggaaaatggcccagaggaggtcaagcctgtagatgaaatggagacagatttgaacgcaactggaagagagagttctccaagggagaagacaccagaggtgattgatgctactgaggaaatagatttggaagaaactgaaagagaagtatccccacaggaaaatggactagaggaggtcaagcctctaggtgaaatggagacggatttgaaagcaactggaagagacagtttcccaagggggaagacaccagaggtgattgatgccattgaggaaatagagatagatttggaagaaactgaaagagaaatatccccacaggaaaatggcctagaggaggttaagcctctaggtgaaatgcaaacagatttgaaagcaaccggaagggagatttccccaagggagaagacaccagaggtgattgatgccactgaggaaatagacaaagatctggaagaaactggaagaagagaaatatccccagaggaaaatggcccagaggaggtcaagcctgtagatgaaatggagacagacttgaaaacaactggaagagagggttcctcaagggagaagacacgagaggtgattgatgctgctgaggtaatagagacagatttggaagaaactgaaagagaaatatcgccacaggaaaatggcccagaggaggtcaagcctgtaggtaaaatggagacagatttgaaagaaattagagaagaaatttcccaaagggaaaaggtgctagcagagttcagtgctataagggaaaaggagattgatttgaaagaaactggaaaaagagacattcccatcatggagaaagtatcaggaaagatggctgttgttgaagaaatggaggcagatttgaaagaaactggaaaagaaaattttagagagagaggatctgaagagatctgtgttactgaggaaaaggtggcagaattgaaacaaactggaaaaacagacatttctccaagggaaaacgagctagaggagaccagtacctcaagacaaactgacacacatttaatgcagagcggtagcaatgacttcagtgctgtgccttcactagatattcagaacattagcagtgaagtactgtcgatgatgcatacacctgtagaagaaaaaagaaattctgaaaaagaagtatcaagtcacttcagtcatttcaagatttcttcacagactcatgaatctgataaaacagaagtccaggggattcaatctccagatgttccagagcagttttcagatattaatttaagcaaatctcttcctcaagaacagaagccacttgaaattaaaccagcaccttttgtgaggagccgattcaaaagaccaaaaccaaacttagcaagagcagctttgaagagagagactacagaatcagaaaaatatatatatgagaagaaatcagaaaccaagaaaatggagactattgtgatgcaagaaaataatgaacaaactgatactctcccttctcaacatgatgaagcttccctaatgatatcaagagaaaaagacacattaggtcacaggaatgaggaggctgtgatattgccatgtacacagactgaaaggaacctttcaccttcaaattcttgtgaacctaaagaggagtctcagtcagcaccagtccagaaaaatgactcagttgtttctgtggggactaataatgtaaacactttccagcaagaaatgaaggaaagtgttatccaaactgctcgacaagtaaggggccgacttcagagaccgagaccaaatataagaaagacaggacagaggcaaatagtagacaaaggtgaagccaaaggcataattaaggaaggaagaacgatattaccaaaagatgaaactgaaaagaaagtcttaactgtgtcaaattctcaaattgaaactgaaattgaagttccatcgtccgcagttccagaacacagaatgtatgaaaatcaaagtcaggtggttcttgtagaaaaccttcatgttaacaaaacaaatgaaacaatcagacatgaaaataaaccgtatgttcctagttcagcacaaatgacaagaaggaaattccaaaaggctaagccaaatttgggaagagcacacagtaagaaagaggaaccagttttagaaaaagtcacaacagatcagagcaaggaaggcaagccagaagatcatttgctgcagaaaggagcttccaacacccagctccttctaaaagaaaaagctgagcttctgacatctctggaggtttcagcaagaaaagattgtgtaggttccaaagagtctgctttggcaaaaatagatgcggaattagaagaagttggaccatcaagaagggttggagaggaaactgtaggagataattcaccatcttcagttgttgaagagcaatatctcaataaactaacaagctgtccacaaccgttaaacgaaacaagttactctaaaattgccctggatgggaaaacaactatctcttctacatctgagtatgagagaaatcgtggtgaaaggagaagtcataaaaagttcaaaccaaatgtcaccagaggtcgtggatcaaaacgagttcggggtaagacctctaagaaggaacctagagcttccaaggccatgctggtgactcttcgggcttcccaggaagaagatgatgatgctgacgattttgagtctgactatgaggaagaaagctatcatcttgctcccgaagaagtaaacaaagctccagtatttgtacctgttggtctcagatctcctgaacctgtttctgctcagattgaggaaacaatggaagagcttgaaataactgtgaatgtcccagatgtaggatgcatagctgttgttgaacatgagctaccaaacacagatgtgactactgaagaaatgaaacaagaagaaaatttgagtgtaccgtttgaaatgaccacaagtgaacatatccaagatgaaccaggtaccaatgatggaagcaccgaagctgcaataactttacttacaatgggagatctagtattgcagtcagagatcagtagtgaacagggtgatgtaggagtatgtataattcctcatgttcattcaaaggataaaagccatattccttctagcctagataatgtaaatcacaaaattgttcatgaatgtcaggaactttcttcacctgtcattactacatctcctgcatcatttgaagaaaacaagattgtattggaggaacaaagttccagagaagaaataagtttaatggagaaagtaaaggagaatgctacaccaaccaggaatacaatttctaaagtgaccagtaatttgagaataagaagtaggcttgctaagcctaaaccaaatcttgagaagactttagggaccaacaggcttgatgattatcaggaagtttccagtttgtgtgtaaccaaaggggcagaaatggaaactcaaagagaaacagagaaaaatgcttccaaagcaacagaattggaaaataaaaacctcggaccagttacaacagcagagaataaggatcagagcaaattggcatgtgtacatggtatcaaagggaccagtatttcttcagaagtaaacctaactgaaagaaacgaaaatcaagaagagagctctcaggaggttcacatgttgtcagttgctccagttgcttcctctgagacagggccctgcacacttggtttggataggggtcttggtgaaaattctgttgaagagccccagataaaggactctaaaggagacagtgtgcttacacttcctgtgccagagtatacaccaacaagtattccagaagtccaacaagagaatataatcaatcctcaagacctaacagtgaatctagttgctaatgtacctcaagatggagaagatgaacaagcctttattttaactctggtggaaatcccagccaatgcagtagaagaatttactgatgccactgcacagttcatgccaaaccctttactgccagctcccatattggtcaaatcagtgaataccgaagaaaggggtgacatgagtatttgtttaccagcaacttcagttggtcaagatgccatgggtttatctatttctggaagagataattctaaaaagccgcctgataatttggatcttgtatctaggaagagatttcaatgcaggcttgataaaaatgaccacattcctcctgccaaaaaacgttcactcactttaagagatgactgtcaagaatataccactgaggtgcactcaaaggaattaacaaatgtttttgaggaaacaggggagtctcacaagggacaagatatttttcttacctcaggaagcacactgacaactccagaacctcaaagacagcaagttgaagcagcttttcagagtagaggatctagatctcctgatgcatgcatggacaagaatgtgcctcagttacctcaggatgaaatgattgtgtctgataaggaagaaagaactgatgctgctcctaagtctcagcaaatggatagcagaacatcgtcttctaaagcctcactatccagacctggcagaagacccctgggatttttatctttaatatgctcaaagaatagtttggagtctgatgaacctatgcaagtccatagtaagaaacgcctaaaacctcttatacctggattaagaaagaaattgaaaagatctaatccattcaatgaaagccaggaaaaaaatcgagagtcctctgatctgcttccatctccaagtgttattactactcaatctgagaatattagcagctcagcaactcaggtttcttgtgatcagcccttactgaaagaaggatataaaagtgcccaaaagcgggcccctcaaggggaggcaaccacagtctctgaatatttcttcaatgatatcttcattgaagtggatgaaacagaatagtaatgaactagtccgtaacttgaaagtatttcgatttcttggctttatatatcttgtggaaaggacgagataccgaggccaaacagcaatat

SEQ ID NO: 2824 - DNA, 1382 bp, Homo sapiens
  source 1..1382: mol_type = genomic DNA
accgccaccatgctggagaattatggggctgtggcttccctggcagcatttccatttcccaaaccggctctgatttcccagctggagcgaggggaaacaccctggtgctcggttcctcggggagctctggatggagaggccccaaggggcatctcctcaggatatccatttctaaagcctgctgggatttcccatcctgagcaggtggaagagccattaaacctgaaactgcaaggagagggtccaagcctgatttgtccggagggtgtgttgaagaggaagaaagaagattttattctgaaggaggaaattattgaggaagcacaggacctcatggtcctatcaagtggaccccagtggtgtggatcccaggaattatggtttgggaaaacctgtgaagagaaaagcaggttagggagatggcctggttacctcaatgggggacgtatggaaagttctacaaatgatattatagaagtgattgtcaaggatgagatgatctcagtagaagagagttcagggaatactgatgtcaataacctccttggtatacatcacaaaattctaaatgagcaaatattctatatatgtgaggaatgcggcaagtgttttgatcaaaatgaggactttgatcaacaccagaaaactcataatggagagaaggtctatggatgtaaggaatgtgggaaggctttcagttttcgatcacattgcattgcacatcagagaattcacagtggggtgaaaccctatgaatgtcaagaatgtgctaaggcctttgtttggaagtcaaacctgattcgtcaccagagaatacatactggagagaaaccctttgaatgtaaggaatgtgggaagggctttagtcagaacacaagccttacgcaacatcaacggatccacactggtgagaaaccatacacatgtaaggaatgtgggaaaagctttactcgaaacccagcccttcttcgacatcagagaatgcacactggggagaagccttacgaatgtaaggactgtgggaagggcttcatgtggaactcagatctttctcagcaccagagggtccacactggggacaagcctcatgaatgtactgactgtgggaaaagcttcttttgcaaggcacatcttattcgacatcaaagaatccatactggggaaagaccctataaatgtaatgactgtgggaaggccttcagtcagaattctgtcttaattaagcaccagaggcgccatgctagagacaaaccctataactgtcagatctctcaccttcttgaacattagtaatgaactagtccgtaacttgaaagtatttcgatttcttggctttatatatcttgtggaaaggacgaacttaataagagtctcagtagctc

SEQ ID NO: 2825 - DNA, 1460 bp, Homo sapiens
  source 1..1460: mol_type = genomic DNA
accgccaccatggcggccgtggcgctggcgagcgggacacgcctcggccttgtcctcgagctgctcccgggacagcccgcgctgccccgggcgcgccgggagtcagtgaccttcgaggatgtggccgtctacttctctgagaacgaatggatcggcctgggccctgctcagagagccctgtacagggatgtgatgctggagaattatggggctgtggcttccctggcatttccatttcccaaaccggctctgatttcccagctggagcgaggggaaacaccctggtgctcggttcctcggggagctctggatggagaggccccaaggggcatctcctcagagggtgtgttgaagaggaagaaagaagattttattctgaaggaggaaattattgaggaagcacaggacctcatggtcctatcaagtggaccccagtggtgtggatcccaggaattatggtttgggaaaacctgtgaagagaaaagcaggttagggagatggcctggttacctcaatgggggacgtatggaaagttctacaaatgatattatagaagtgattgtcaaggatgagatgatctcagtagaagagagttcagggaatactgatgtcaataacctccttggtatacatcacaaaattctaaatgagcaaatattctatatatgtgaggaatgcggcaagtgttttgatcaaaatgaggactttgatcaacaccagaaaactcataatggagagaaggtctatggatgtaaggaatgtgggaaggctttcagttttcgatcacattgcattgcacatcagagaattcacagtggggtgaaaccctatgaatgtcaagaatgtgctaaggcctttgtttggaagtcaaacctgattcgtcaccagagaatacatactggagagaaaccctttgaatgtaaggaatgtgggaagggctttagtcagaacacaagccttacgcaacatcaacggatccacactggtgagaaaccatacacatgtaaggaatgtgggaaaagctttactcgaaacccagcccttcttcgacatcagagaatgcacactggggagaagccttacgaatgtaaggactgtgggaagggcttcatgtggaactcagatctttctcagcaccagagggtccacactggggacaagcctcatgaatgtactgactgtgggaaaagcttcttttgcaaggcacatcttattcgacatcaaagaatccatactggggaaagaccctataaatgtaatgactgtgggaaggccttcagtcagaattctgtcttaattaagcaccagaggcgccatgctagagacaaaccctataactgtcagatctctcaccttcttgaacattagtaatgaactagtccgtaacttgaaagtatttcgatttcttggctttatatatcttgtggaaaggacgaggtgacaaatctgaggataatggt

SEQ ID NO: 2826 - DNA, 2891 bp, Homo sapiens
  source 1..2891: mol_type = genomic DNA
accgccaccatgatagataagaaagccatgtacaaagcaggaatggtacagagagtccaaaatgaggtgaaaatacattgccaattgaaacatccttctatcttggagctttataactattttgaagatagcaattatgtgtatctggtattagaaatgtgccataatggagaaatgaacaggtatctaaagaatagagtgaaacccttctcagaaaatgaagctcgacacttcatgcaccagatcatcacagggatgttgtatcttcattctcatggtatactacaccgggacctcacactttctaacctcctactgactcgtaatatgaacatcaagattgctgattttgggctggcaactcaactgaaaatgccacatgaaaagcactatacattatgtggaactcctaactacatttcaccagaaattgccactcgaagtgcacatggccttgaatctgatgtttggtccctgggctgtatgttttatacattacttatcgggagaccacccttcgacactgacacagtcaagaacacattaaataaagtagtattggcagattatgaaatgccatcttttttgtcaatagaggccaaggaccttattcaccagttacttcgtagaaatccagcagatcgtttaagtctgtcttcagtattggaccatccttttatgtcccgaaattcttcaacaaaaagtaaagatttaggaactgtggaagactcaattgatagtgggcatgccacaatttctactgcaattacagcttcttccagtaccagtataagtggtagtttatttgacaaaagaagacttttgattggtcagccactcccaaataaaatgactgtatttccaaagaataaaagttcaactgatttttcttcttcaggagatggaaacagtttttatactcagtggggaaatcaagaaaccagtaatagtggaaggggaagagtaattcaagatgcagaagaaaggccacattctcgataccttcgtagagcttattcctctgatagatctggcacttctaatagtcagtctcaagcaaaaacatatacaatggaacgatgtcactcagcagaaatgctttcagtgtccaaaagatcaggaggaggtgaaaatgaagagaggtactcacccacagacaacaatgccaacatttttaacttctttaaagaaaagacatccagtagttctggatcttttgaaagacctgataacaatcaagcactctccaatcatctttgtccaggaaaaactccttttccatttgcagacccgacacctcagactgaaaccgtacaacagtggtttgggaatctgcaaataaatgctcatttaagaaaaactactgaatatgacagcatcagcccaaaccgggacttccagggccatccagatttgcagaaggacacatcaaaaaatgcctggactgatacaaaagtcaaaaagaactctgatgcttctgataatgcacattctgtaaaacagcaaaataccatgaaatatatgactgcacttcacagtaaacctgagataatccaacaagaatgtgtttttggctcagatcctctttctgaacagagcaagactaggggtatggagccaccatggggttatcagaatcgtacattaagaagcattacatctccgttggttgctcacaggttaaaaccaatcagacagaaaaccaaaaaggctgtggtgagcatacttgattcagaggaggtgtgtgtggagcttgtaaaggagtatgcatctcaagaatatgtgaaagaagttcttcagatatctagtgatggaaatacgatcactatttattatccaaatggtggtagaggttttcctcttgctgatagaccaccctcacctactgacaacatcagtaggtacagctttgacaatttaccagaaaaatactggcgaaaatatcaatatgcttccaggtttgtacagcttgtaagatctaaatctcccaaaatcacttattttacaagatatgctaaatgcattttgatggagaattctcctggtgctgattttgaggtttggttttatgatggggtaaaaatacacaaaacagaagatttcattcaggtgattgaaaagacagggaagtcttacactttaaaaagtgaaagtgaagttaatagcttgaaagaggagataaaaatgtatatggaccatgctaatgagggtcatcgtatttgtttagcactggaatccataatttcagaagaggaaaggaaaactaggagtgctccctttttcccaataatcataggaagaaaacctggtagtactagttcacctaaggccttatcacctcctccttctgtggattcaaattacccaacgagagagagagcatctttcaacagaatggtcatgcatagtgctgcttctccaacacaggcaccaatccttaatccctctatggttacaaatgaaggacttggtcttacaactacagcttctggaacagacatctcttctaatagtctaaaagattgtcttcctaaatcagcacaacttttgaaatctgtttttgtgaaaaatgttggttgggctacacagttaactagtggagctgtgtgggttcagtttaatgatgggtcccagttggttgtgcaggcaggagtgtcttctatcagttatacctcaccaaatggtcaaacaactaggtatggagaaaatgaaaaattaccagactacatcaaacagaaattacagtgtctgtcttccatccttttgatgttttctaatccgactcctaattttcattagtaatgaactagtccgtaacttgaaagtatttcgatttcttggctttatatatcttgtggaaaggacgaaacttagaagctggattccttcgt

SEQ ID NO: 2827 - DNA, 3014 bp, Homo sapiens
  source 1..3014: mol_type = genomic DNA
accgccaccatggcgacctgcatcggggagaagatcgaggattttaaagttggaaatctgcttggtaaaggatcatttgctggtgtctacagagctgagtccattcacactggtttggaagttgcaatcaaaatgatagataagaaagccatgtacaaagcaggaatggtacagagagtccaaaatgaggtgaaaatacattgccaattgaaacatccttctatcttggagctttataactattttgaagatagcaattatgtgtatctggtattagaaatgtgccataatggagaaatgaacaggtatctaaagaatagagtgaaacccttctcagaaaatgaagctcgacacttcatgcaccagatcatcacagggatgttgtatcttcattctcatggtatactacaccgggacctcacactttctaacctcctactgactcgtaatatgaacatcaagattgctgattttgggctggcaactcaactgaaaatgccacatgaaaagcactatacattatgtggaactcctaactacatttcaccagaaattgccactcgaagtgcacatggccttgaatctgatgtttggtccctgggctgtatgttttatacattacttatcgggagaccacccttcgacactgacacagtcaagaacacattaaataaagtagtattggcagattatgaaatgccatcttttttgtcaatagaggccaaggaccttattcaccagttacttcgtagaaatccagcagatcgtttaagtctgtcttcagtattggaccatccttttatgtcccgaaattcttcaacaaaaagtaaagatttaggaactgtggaagactcaattgatagtgggcatgccacaatttctactgcaattacagcttcttccagtaccagtataagtggtagtttatttgacaaaagaagacttttgattggtcagccactcccaaataaaatgactgtatttccaaagaataaaagttcaactgatttttcttcttcaggagatggaaacagtttttatactcagtggggaaatcaagaaaccagtaatagtggaaggggaagagtaattcaagatgcagaagaaaggccacattctcgataccttcgtagagcttattcctctgatagatctggcacttctaatagtcagtctcaagcaaaaacatatacaatggaacgatgtcactcagcagaaatgctttcagtgtccaaaagatcaggaggaggtgaaaatgaagagaggtactcacccacagacaacaatgccaacatttttaacttctttaaagaaaagacatccagtagttctggatcttttgaaagacctgataacaatcaagcactctccaatcatctttgtccaggaaaaactccttttccatttgcagacccgacacctcagactgaaaccgtacaacagtggtttgggaatctgcaaataaatgctcatttaagaaaaactactgaatatgacagcatcagcccaaaccgggacttccagggccatccagatttgcagaaggacacatcaaaaaatgcctggactgatacaaaagtcaaaaagaactctgatgcttctgataatgcacattctgtaaaacagcaaaataccatgaaatatatgactgcacttcacagtaaacctgagataatccaacaagaatgtgtttttggctcagatcctctttctgaacagagcaagactaggggtatggagccaccatggggttatcagaatcgtacattaagaagcattacatctccgttggttgctcacaggttaaaaccaatcagacagaaaaccaaaaaggctgtggtgagcatacttgattcagaggaggtgtgtgtggagcttgtaaaggagtatgcatctcaagaatatgtgaaagaagttcttcagatatctagtgatggaaatacgatcactatttattatccaaatggtggtagaggttttcctcttgctgatagaccaccctcacctactgacaacatcagtaggtacagctttgacaatttaccagaaaaatactggcgaaaatatcaatatgcttccaggtttgtacagcttgtaagatctaaatctcccaaaatcacttattttacaagatatgctaaatgcattttgatggagaattctcctggtgctgattttgaggtttggttttatgatggggtaaaaatacacaaaacagaagatttcattcaggtgattgaaaagacagggaagtcttacactttaaaaagtgaaagtgaagttaatagcttgaaagaggagataaaaatgtatatggaccatgctaatgagggtcatcgtatttgtttagcactggaatccataatttcagaagaggaaaggaaaactaggagtgctccctttttcccaataatcataggaagaaaacctggtagtactagttcacctaaggccttatcacctcctccttctgtggattcaaattacccaacgagagagagagcatctttcaacagaatggtcatgcatagtgctgcttctccaacacaggcaccaatccttaatccctctatggttacaaatgaaggacttggtcttacaactacagcttctggaacagacatctcttctaatagtctaaaagattgtcttcctaaatcagcacaacttttgaaatctgtttttgtgaaaaatgttggttgggctacacagttaactagtggagctgtgtgggttcagtttaatgatgggtcccagttggttgtgcaggcaggagtgtcttctatcagttatacctcaccaaatggtcaaacaactaggtatggagaaaatgaaaaattaccagactacatcaaacagaaattacagtgtctgtcttccatccttttgatgttttctaatccgactcctaattttcattagtaatgaactagtccgtaacttgaaagtatttcgatttcttggctttatatatcttgtggaaaggacgagcaacgacttgctcggttctgaac

SEQ ID NO: 2828 - DNA, 2918 bp, Homo sapiens
  source 1..2918: mol_type = genomic DNA
accgccaccatggcgacctgcatcggggagaagatcgaggattttaaagttggaaatctgcttggtaaaggatcatttgctggtgtctacagagctgagtccattcacactggtttggaagttgcaatcaaaatgctttataactattttgaagatagcaattatgtgtatctggtattagaaatgtgccataatggagaaatgaacaggtatctaaagaatagagtgaaacccttctcagaaaatgaagctcgacacttcatgcaccagatcatcacagggatgttgtatcttcattctcatggtatactacaccgggacctcacactttctaacctcctactgactcgtaatatgaacatcaagattgctgattttgggctggcaactcaactgaaaatgccacatgaaaagcactatacattatgtggaactcctaactacatttcaccagaaattgccactcgaagtgcacatggccttgaatctgatgtttggtccctgggctgtatgttttatacattacttatcgggagaccacccttcgacactgacacagtcaagaacacattaaataaagtagtattggcagattatgaaatgccatcttttttgtcaatagaggccaaggaccttattcaccagttacttcgtagaaatccagcagatcgtttaagtctgtcttcagtattggaccatccttttatgtcccgaaattcttcaacaaaaagtaaagatttaggaactgtggaagactcaattgatagtgggcatgccacaatttctactgcaattacagcttcttccagtaccagtataagtggtagtttatttgacaaaagaagacttttgattggtcagccactcccaaataaaatgactgtatttccaaagaataaaagttcaactgatttttcttcttcaggagatggaaacagtttttatactcagtggggaaatcaagaaaccagtaatagtggaaggggaagagtaattcaagatgcagaagaaaggccacattctcgataccttcgtagagcttattcctctgatagatctggcacttctaatagtcagtctcaagcaaaaacatatacaatggaacgatgtcactcagcagaaatgctttcagtgtccaaaagatcaggaggaggtgaaaatgaagagaggtactcacccacagacaacaatgccaacatttttaacttctttaaagaaaagacatccagtagttctggatcttttgaaagacctgataacaatcaagcactctccaatcatctttgtccaggaaaaactccttttccatttgcagacccgacacctcagactgaaaccgtacaacagtggtttgggaatctgcaaataaatgctcatttaagaaaaactactgaatatgacagcatcagcccaaaccgggacttccagggccatccagatttgcagaaggacacatcaaaaaatgcctggactgatacaaaagtcaaaaagaactctgatgcttctgataatgcacattctgtaaaacagcaaaataccatgaaatatatgactgcacttcacagtaaacctgagataatccaacaagaatgtgtttttggctcagatcctctttctgaacagagcaagactaggggtatggagccaccatggggttatcagaatcgtacattaagaagcattacatctccgttggttgctcacaggttaaaaccaatcagacagaaaaccaaaaaggctgtggtgagcatacttgattcagaggaggtgtgtgtggagcttgtaaaggagtatgcatctcaagaatatgtgaaagaagttcttcagatatctagtgatggaaatacgatcactatttattatccaaatggtggtagaggttttcctcttgctgatagaccaccctcacctactgacaacatcagtaggtacagctttgacaatttaccagaaaaatactggcgaaaatatcaatatgcttccaggtttgtacagcttgtaagatctaaatctcccaaaatcacttattttacaagatatgctaaatgcattttgatggagaattctcctggtgctgattttgaggtttggttttatgatggggtaaaaatacacaaaacagaagatttcattcaggtgattgaaaagacagggaagtcttacactttaaaaagtgaaagtgaagttaatagcttgaaagaggagataaaaatgtatatggaccatgctaatgagggtcatcgtatttgtttagcactggaatccataatttcagaagaggaaaggaaaactaggagtgctccctttttcccaataatcataggaagaaaacctggtagtactagttcacctaaggccttatcacctcctccttctgtggattcaaattacccaacgagagagagagcatctttcaacagaatggtcatgcatagtgctgcttctccaacacaggcaccaatccttaatccctctatggttacaaatgaaggacttggtcttacaactacagcttctggaacagacatctcttctaatagtctaaaagattgtcttcctaaatcagcacaacttttgaaatctgtttttgtgaaaaatgttggttgggctacacagttaactagtggagctgtgtgggttcagtttaatgatgggtcccagttggttgtgcaggcaggagtgtcttctatcagttatacctcaccaaatggtcaaacaactaggtatggagaaaatgaaaaattaccagactacatcaaacagaaattacagtgtctgtcttccatccttttgatgttttctaatccgactcctaattttcattagtaatgaactagtccgtaacttgaaagtatttcgatttcttggctttatatatcttgtggaaaggacgatccggatcgggctctggttcaacc

SEQ ID NO: 2829 - DNA, 2138 bp, Homo sapiens
  source 1..2138: mol_type = genomic DNA
accgccaccatggctcttcctcagggacagttgacattcaaggatgtggccatagaattctctcaggaggagtggacatgcctggaccctgctcagaagactttgtacagggacgtcatgttggagaattataggaacctggtctccctggatatctcttgtaaatgtgtaaacacggatttgccaccaaaggggaagaacaatatgggagaagcgttctacacggtgaagttggagagacttgaaagctgtgacactgtaggcttgtccttccaggaagttcagaaaaatacatacgactttgagtgtcagtggaaagatgatgaaggaaattataaaacagtacttatgttgcaaaaagaaaatctccctggtagaagagctcaacgtgatagaagggctgcaggaaacaggcatattgaaaatcagcttggagtaagctttcagtcacatctccctgaactgcagcaatttcaacatgaagggaaaatttatgaatacaatcaagttgagaagtctcctaataatcgaggaaaacattataaatgtgatgaatgtggcaaggtcttcagtcaaaactcacggctaacaagtcataagagaattcatactggagagaagccttaccagtgtaataagtgtggcaaagcctttactgttcgttcaaacctaacaatccatcaggtcatccatactggagaaaaaccttacaaatgtaatgaatgtggaaaggtcttcagtcaaccttcaaaccttgcaggtcatcagagaattcatactggagagaaaccttacaagtgtaatgagtgtggcaaagcctttagagcacattcaaaactaactacacatcaggtcatccatactggagaaaaaccttacaaatgtaaggaatgtggcaagtgcttcactcaaaattcacaccttgcaagtcatcgaagaattcatactggggagaagccttacaagtgtaatgagtgtggcaaagcctttagtgttcgctcaagcctgactacccatcagacaatccacactggagaaaaaccttacaaatgtaatgaatgtggcaaggtcttcaggcacaattcataccttgcaaagcatcggcgaattcatactggtgagaaaccttacaagtgtaatgagtgtgggaaagccttcagtatgcattcaaacttaactaagcatcagatcatccataccggagaaaagcctttcaaatgtaatgaatgcgtcaaggttttcactcagtattcacacttagcaaatcatcgaagaattcatactggagagaaaccttacaggtgtgatgagtgtggcaaagcctttagtgtgcgatcaagcctaactacccatcaggcaattcatactggagaaaagccttacaaatgtaatgactgcggtaaggtcttcacacaaaattcacaccttgcaagtcatcggggaattcattctggagagaaaccttacaagtgtgatgaatgtggtaaagccttcagtcaaacatcacaacttgcaaggcattggagagttcatactggagaaaaaccttacaagtgtaatgagtgtggcaaagcctttagtgttcattcaagcctaactatacatcagacaatacatactggacaaaaaccatacaaatgtaatgattgcggcaaggtcttcagacacaattcgtaccttgcaattcatcagagaattcacactggtgagaaaccttataagtgtaatgagtgcggcaaagcatttagtgtacattcaaacctagctacccatcaggtcatccatactggagaaaaaccttacaaatgtaatgaatgtggcaaggtcttcactcaaaattcacatcttgcaaatcatagaagaattcacactggagaaaaaccttataggtgtaatgagtgtgggaaagccttcagtgttcgttcaaccctaactacccatatggcagtccatactggagacaaaccttacaaatgtaaccaatgtggcaaggtctttactcaaaattcaaaccttgcaaaacatcgaagaattcatagtggatagtaatgaactagtccgtaacttgaaagtatttcgatttcttggctttatatatcttgtggaaaggacgagctcgaggtccaaggcaccatagg

SEQ ID NO: 2830 - DNA, 1934 bp, Homo sapiens
  source 1..1934: mol_type = genomic DNA
accgccaccatgccttctgcacgggggaaatccaaatccaaggcacctataacatttggggacttagccatctacttctcccaggaggagtgggaatggctgagccccattcagaaggatttgtatgaagatgtcatgttggagaattaccggaacctggtctcgcttggtctttcctttcggagaccaaatgtgatcaccttattggagaaagggaaagcaccctggatggtagagccagtaagaagacgccgggctcctgactcggggtctaaatgtgagaccaagaagttacctccaaatcaatgcaacaaatctgggcaaagcatctgccagaaactagtttctgcacaacaaaaagctcctacacgaaagagtggctgcaacaaaaattcagtcctagtaaaacctaagaaagggcattcagggaagaaacctttaaaatgtaatgactgtggtaaaacctttagtcgaagcttctctcttaaacttcatcagaacattcatacaggagagaagccttttgaatgcagtaattgtagaaaagctttcagacagatctcatccatcctacttcatcagagaattcacagtggaaagaaaagccatgaatgcaataaatgtggggaaagcttcaatcaaagaacaacccttattctacatatgagaattcatgatggaaaggaaattcttgactgtgggaaggccttgagtcaatgtcagtctttcaatatacatcagaaaattcatgttgttgggaatgtctgccagtgcagaaagtgcggaaaagccttcaatcagatgtcatcccttttacttcataagaaaattcacaatggaaagaaaacacataaatataataaatgtgggagaggcttcaaaaagaaatcagtctttgttgtacataaaagaattcatgctggagagaaaatccctgaaaatgcgaaggccttaagtcagagtctacagcaaagaagtcaccatttagagaatccttttaaatgcagaaaatgtgggaaattatttaataggatttcacccctgatgcttcaccagagaattcacacttcagagaaaccgtacaaatgtgataaatgtgacaagttcttcaggcggctttcaacccttattctgcatctaagaattcataatggagaaaaactatacagatgcaataaatgtgagaaggtctgcaatcggcattcatcccttattcaacatcagaaagttcatacaaagaaaaagaaactatttgagtgtaaggaatgtgggaagatgttttctggaactgcaaaccttaaaatacatcagaatattcattctgaagagaaacctttcaaatgcaataaatgtagtaaagttttcggccgccaatcatttcttattgaacatcaaagaattcatactggagaaaaaccctaccagtgtgaggaatgtggaaaagccttcagccaccgaatatctctcacacgacataagagaattcatactgaagatagaccctatgaatgtgatcagtgtgggaaggccttcagccagagtgcacacctcgcccaacatgaaagaattcacactggagagaagccatatacatgcaaaacatgtggtaaggcctttagtcagcgcacatctcttattctacatgaaagaagtcatactggagagaaaccctatgaatgtaatgaatgtgggaaggcatttagcagtggctcagaccttattcgacatcagagaagtcattcttcagagaaaccctatgaatgtagtaaatgtgggaaggcatatagtcggagttcatccctgattcgacatcagaatacacattctgaagaaaaagcctagtaatgaactagtccgtaacttgaaagtatttcgatttcttggctttatatatcttgtggaaaggacgaccaaccgagagtctcgtcttccca

SEQ ID NO: 2831 - DNA, 2552 bp, Homo sapiens
  source 1..2552: mol_type = genomic DNA
accgccaccatgctggaaaactatttcaacttgatctcagtgggatgtcaagttcccaaaccagaagtcatcttcagcttggaacaagaagagccatgtatgttggatggtgagatccccagtcagagccgtccagatggggacattggttttggacctttacaacagaggatgtctgaagaagtttctttccagtctgagattaatattaatctcttcacaagagatgacccatattccattttagaagaattgtggaaagacgatgaacacacaagaaaatgtggagaaaaccagaacaaacctttaagtcgtgttgtcttcattaacaagaaaacactagctaatgacagcatctttgaatataaggacattggggaaatagttcatgtaaacacacacctggtttcctcaagaaaaagaccccataactgtaactcgtgtggaaagaatttggagcctatcataaccttatataatagaaacaatgcaacagaaaattctgataagactattggagatggtgatattttcactcatttgaattctcatacagaagtgactgcttgtgaatgtaaccaatgtgggaaacctctgcatcataagcaagctctcattcaacaacagaaaattcatactagagagagcctctatttgttttctgactacgtaaatgttttctccccgaagtcacatgcctttgcacatgagagtatttgtgctgaagaaaagcagcatgaatgccatgaatgtgaggcagtcttcactcagaagtcccagcttgatggcagtcagagggtttatgcaggaatatgcactgaatatgagaaggatttttccctcaagtcaaaccgtcagaaaactccttatgaggggaattactataaatgcagtgactatggaagagcctttatccagaagtcagatctgttcagatgccagagaattcattctggagaaaaaccttatgagtacagtgaatgtgagaaaaacctccctcagaattcaaaccttaatatacataaaaaaattcatactggagggaaacactttgaatgtactgaatgtggaaaagctttcacaaggaaatcaacactaagtatgcatcagaaaatccatacaggagaaaaaccttatgtatgtactgaatgtgggaaggcctttatccggaagtcacattttatcacacatgaaagaattcatactggagaaaaaccctatgaatgcagtgactgtgggaaatcctttattaaaaaatcacaactccatgtgcatcagcgaattcacacaggagagaatccctttatatgttcagaatgtgggaaggtcttcactcacaagacaaatctcattatacaccagaaaattcatacaggagaaagaccctatatatgtactgtgtgtggtaaggcctttactgacaggtcaaatctcattaagcaccaaaaaattcatactggagagaaaccttataaatgcagcgactgtggaaaatcattcacctggaagtctcggctcaggatacatcagaagtgtcatactggagagagacattatgaatgcagtgaatgtgggaaagcattcattcagaagtcaacattaagtatgcaccagagaattcatagaggggaaaaaccatatgtttgcactgaatgtggtaaggccttcttccacaaatcccattttattacacatgagagaattcatactggagagaaaccctatgaatgcagtatttgtgggaaatccttcactaagaaatcacagctccacgtacatcagcagattcacacaggagagaaaccctataggtgtgctgaatgtggaaaggcttttactgacagatcaaatctctttacacaccagaaaattcacactggagagaaaccttataaatgtagtgactgtgggaaagccttcactaggaagtcaggtctccatatacatcagcaatcccatactggagaaaggcattatgagtgcagtgaatgtgggaaagcctttgcaagaaaatcaacactaattatgcatcagagaattcatacaggagagaaaccctatatttgtaatgaatgtgggaaatccttcatccagaagtcacacttaaatagacacaggagaattcatactggagagaaaccctatgaatgcagtgactgtggcaagtctttcattaagaaatcacaactccatgagcatcatcgaattcacacaggagagaaaccatatatatgtgctgagtgtggaaaggccttcaccatcagatcaaatcttattaaacaccagaaaattcatactaaacagaaaccctataagtgcagtgacttggggaaagccttaaactggaagccacaactcagtatgcctcagaaatctgacaatggggaagtagagtgctccatgccacaattatggtgtggggactcagaaggtgaccaaggccaactttcttctatctagtaatgaactagtccgtaacttgaaagtatttcgatttcttggctttatatatcttgtggaaaggacgagatcgagccttctagggccatgta

SEQ ID NO: 2832 - DNA, 2666 bp, Homo sapiens
  source 1..2666: mol_type = genomic DNA
accgccaccatgtctgtcctgagccttccggaatcagtgtcattcaaggacgtaactgtagacttcagtagggatgagtggcaacaattagaccttgctcagaaaagcctgtacagagaagtgatgctggaaaactatttcaacttgatctcagtgggatgtcaagttcccaaaccagaagtcatcttcagcttggaacaagaagagccatgtatgttggatggtgagatccccagtcagagccgtccagatggggacattggttttggacctttacaacagaggatgtctgaagaagtttctttccagtctgagattaatattaatctcttcacaagagatgacccatattccattttagaagaattgtggaaagacgatgaacacacaagaaaatgtggagaaaaccagaacaaacctttaagtcgtgttgtcttcattaacaagaaaacactagctaatgacagcatctttgaatataaggacattggggaaatagttcatgtaaacacacacctggtttcctcaagaaaaagaccccataactgtaactcgtgtggaaagaatttggagcctatcataaccttatataatagaaacaatgcaacagaaaattctgataagactattggagatggtgatattttcactcatttgaattctcatacagaagtgactgcttgtgaatgtaaccaatgtgggaaacctctgcatcataagcaagctctcattcaacaacagaaaattcatactagagagagcctctatttgttttctgactacgtaaatgttttctccccgaagtcacatgcctttgcacatgagagtatttgtgctgaagaaaagcagcatgaatgccatgaatgtgaggcagtcttcactcagaagtcccagcttgatggcagtcagagggtttatgcaggaatatgcactgaatatgagaaggatttttccctcaagtcaaaccgtcagaaaactccttatgaggggaattactataaatgcagtgactatggaagagcctttatccagaagtcagatctgttcagatgccagagaattcattctggagaaaaaccttatgagtacagtgaatgtgagaaaaacctccctcagaattcaaaccttaatatacataaaaaaattcatactggagggaaacactttgaatgtactgaatgtggaaaagctttcacaaggaaatcaacactaagtatgcatcagaaaatccatacaggagaaaaaccttatgtatgtactgaatgtgggaaggcctttatccggaagtcacattttatcacacatgaaagaattcatactggagaaaaaccctatgaatgcagtgactgtgggaaatcctttattaaaaaatcacaactccatgtgcatcagcgaattcacacaggagagaatccctttatatgttcagaatgtgggaaggtcttcactcacaagacaaatctcattatacaccagaaaattcatacaggagaaagaccctatatatgtactgtgtgtggtaaggcctttactgacaggtcaaatctcattaagcaccaaaaaattcatactggagagaaaccttataaatgcagcgactgtggaaaatcattcacctggaagtctcggctcaggatacatcagaagtgtcatactggagagagacattatgaatgcagtgaatgtgggaaagcattcattcagaagtcaacattaagtatgcaccagagaattcatagaggggaaaaaccatatgtttgcactgaatgtggtaaggccttcttccacaaatcccattttattacacatgagagaattcatactggagagaaaccctatgaatgcagtatttgtgggaaatccttcactaagaaatcacagctccacgtacatcagcagattcacacaggagagaaaccctataggtgtgctgaatgtggaaaggcttttactgacagatcaaatctctttacacaccagaaaattcacactggagagaaaccttataaatgtagtgactgtgggaaagccttcactaggaagtcaggtctccatatacatcagcaatcccatactggagaaaggcattatgagtgcagtgaatgtgggaaagcctttgcaagaaaatcaacactaattatgcatcagagaattcatacaggagagaaaccctatatttgtaatgaatgtgggaaatccttcatccagaagtcacacttaaatagacacaggagaattcatactggagagaaaccctatgaatgcagtgactgtggcaagtctttcattaagaaatcacaactccatgagcatcatcgaattcacacaggagagaaaccatatatatgtgctgagtgtggaaaggccttcaccatcagatcaaatcttattaaacaccagaaaattcatactaaacagaaaccctataagtgcagtgacttggggaaagccttaaactggaagccacaactcagtatgcctcagaaatctgacaatggggaagtagagtgctccatgccacaattatggtgtggggactcagaaggtgaccaaggccaactttcttctatctagtaatgaactagtccgtaacttgaaagtatttcgatttcttggctttatatatcttgtggaaaggacgacccgcatccgtcacgagtaagtat

SEQ ID NO: 2833 - DNA, 1235 bp, Homo sapiens
  source 1..1235: mol_type = genomic DNA
accgccaccatgagctcccctggcaccgagagcgcgggaaagagcctgcagtaccgagtggaccacctgctgagcgccgtggagaatgagctgcaggcgggcagcgagaagggcgaccccacagagcgcgaactgcgcgtgggcctggaggagagcgagctgtggctgcgcttcaaggagctcaccaatgagatgatcgtgaccaagaacggcaggaggatgtttccggtgctgaaggtgaacgtgtctggcctggaccccaacgccatgtactccttcctgctggacttcgtggcggcggacaaccaccgctggaagtacgtgaacggggaatgggtgccggggggcaagccggagccgcaggcgcccagctgcgtctacatccaccccgactcgcccaacttcggggcccactggatgaaggctcccgtctccttcagcaaagtcaagctcaccaacaagctcaacggagggggccagatcatgctgaactccttgcataagtatgagcctcgaatccacatagtgagagttgggggtccacagcgcatgatcaccagccactgcttccctgagacccagttcatagcggtgactgcttatcagaacgaggagatcacagctcttaaaattaagtacaatccatttgcaaaagctttccttgatgcaaaggaaagaagtgatcacaaagagatgatggaggaacccggagacagccagcaacctgggtactcccaatcctattctgacaactcacctgcatgtttatccatgctgcaatcccatgacaattggtccagccttggaatgcctgcccatcccagcatgctccccgtgagccacaatgccagcccacctaccagctccagtcagtaccccagcctgtggtctgtgagcaacggcgccgtcaccccgggctcccaggcagcagccgtgtccaacgggctgggggcccagttcttccggggctcccccgcgcactacacacccctcacccatccggtctcggcgccctcttcctcgggatccccactgtacgaaggggcggccgcggccacagacatcgtggacagccagtacgacgccgcagcccaaggccgcctcatagcctcatggacacctgtgtcgccaccttccatgtagtaatgaactagtccgtaacttgaaagtatttcgatttcttggctttatatatcttgtggaaaggacgaacgggcctcgcagtattgaggtag

SEQ ID NO: 2834 - DNA, 1409 bp, Homo sapiens
  source 1..1409: mol_type = genomic DNA
accgccaccatgagctcccctggcaccgagagcgcgggaaagagcctgcagtaccgagtggaccacctgctgagcgccgtggagaatgagctgcaggcgggcagcgagaagggcgaccccacagagcgcgaactgcgcgtgggcctggaggagagcgagctgtggctgcgcttcaaggagctcaccaatgagatgatcgtgaccaagaacggcaggaggatgtttccggtgctgaaggtgaacgtgtctggcctggaccccaacgccatgtactccttcctgctggacttcgtggcggcggacaaccaccgctggaagtacgtgaacggggaatgggtgccggggggcaagccggagccgcaggcgcccagctgcgtctacatccaccccgactcgcccaacttcggggcccactggatgaaggctcccgtctccttcagcaaagtcaagctcaccaacaagctcaacggagggggccagatcatgctgaactccttgcataagtatgagcctcgaatccacatagtgagagttgggggtccacagcgcatgatcaccagccactgcttccctgagacccagttcatagcggtgactgcttatcagaacgaggagatcacagctcttaaaattaagtacaatccatttgcaaaagctttccttgatgcaaaggaaagaagtgatcacaaagagatgatggaggaacccggagacagccagcaacctgggtactcccaatgggggtggcttcttcctggaaccagcaccctgtgtccacctgcaaatcctcatcctcagtttggaggtgccctctccctcccctccacgcacagctgtgacaggtacccaaccctgaggagccaccggtcctcaccctaccccagcccctatgctcatcggaacaattctccaacctattctgacaactcacctgcatgtttatccatgctgcaatcccatgacaattggtccagccttggaatgcctgcccatcccagcatgctccccgtgagccacaatgccagcccacctaccagctccagtcagtaccccagcctgtggtctgtgagcaacggcgccgtcaccccgggctcccaggcagcagccgtgtccaacgggctgggggcccagttcttccggggctcccccgcgcactacacacccctcacccatccggtctcggcgccctcttcctcgggatccccactgtacgaaggggcggccgcggccacagacatcgtggacagccagtacgacgccgcagcccaaggccgcctcatagcctcatggacacctgtgtcgccaccttccatgtagtaatgaactagtccgtaacttgaaagtatttcgatttcttggctttatatatcttgtggaaaggacgagccggtcctaagaaacggatagta

SEQ ID NO: 2835 - DNA, 6344 bp, Homo sapiens
  source 1..6344: mol_type = genomic DNA
accgccaccatgagctcctccccctcccgcagtgccgccgacatctacatccgggagtatttccacagccacgtcagcggcggccaccccgaggccactcctctccgtgtgatgtacacggaccggccgctgagccagacggacccagtcacgctgcagtactgttgcctgaccgacgaccgccaggctttccgcccgcccacacgggcagagctggcgcggcaccgcgtggtggtcaccaccacctcccaggcccgtgagctcagggtgccggtcggcttcttctcccacattctcatcgatgaggcggcccagatgctggagtgcgaggccctcaccccgctggcctatgcctcgcacggcacccgcctcgtgctggcgggcgaccacatgcaggtcacaccccggctgttcagtgtggccagggcccgggcggccgagcacacgctgctgcaccgcctcttcctgtgctaccagcaggagactcacgaggtggcgcggcagagccgcctggtcttccacgagaactaccgctgcacggacgccattgtcagcttcatctcgcggcacttctacgtggccaagggcaaccccatccacgccaggggcaaggttccgccccacccccggcactacccgctcatgttctgccacgtggcgggcagcccagaccgggacatgtccatggcgtcctggctgaatctggctgagattgcgcaggtcgtcgagaaggtgcaggaggcctacaacacctggcccagctgctggggcggccgcgagcagaggtgcatctgtgtcgtttcccacggtgcccaggtcagtgcactgaggcaggagctgaggaggcgggacctaggccaggtgtctgtcggcagttttgagatcctgccagggcggcagttccgggtcgtggtgctcagcactgtgcacacctgccagagcctgctcagccctggggcactggcccctgagttcttcaccgacgcccgcgtgctcaacaccgtcctgacccgcgcccagtcccagctggtggtagtgggggacgccgtggccctctgctccttcggggcctgcggcaagctctgggagagcttcatccgtgagtgcgtggagcggcacagtgtctgccccgagggcctgtccatggagcaggtcgagcagggtgtggcgcagagacggcgctggcctccccgaggcacacaggctggggcagcggggaactgggaggctgccccagagccagtaggggacctggccgaggagcaggcggctgtggtgacggccatggtgaaggcagagccgggagatgaggctctgagcccagcatcccgtgacatcacggcaaccacagcgcagacggaggctgcggcagcaccagcaggagacgcagtgaaggaagacgtggtgcccggggcctgtgcggcaggagcggctgctgcagcgggcgtggagtccacggaggctgaggatgcagaggctgacttctggccgtgggacggggagctcaacgctgacgacgccatcctacgggagcttctggacgagagccagaaggtgatggtgaccgtcggggaggacgggctgctggacactgtcgccaggcccgagtccctgcagcaggcccggctgtacgagaacctgcccccggctgcgctacggaagctgctgcacgcggagcccgagcggtaccgccactgctctttcgtgccagagaccttcgagcgggcgtcagccatcccgctggacgatgcctcctcgggccccatccaggtcaggggccgcctggactgtgggatggccttcgccggggatgaggtgctggtgcagctcctttcgggagacaaggcgcccgaggggcggcttcggggccgcgtgctgggcgtgctgaagaggaagaggcacgagctggcgtttgtgtgccgcatggacacgtgggacccgcgcatcatggtccccatcaatggctccgtgaccaagatcttcgtggccgagctgaaggacccatcgcaggtccccatctacagcctccggaagggccggctgcagcgtgtggggcttgagaggctcaccgccgaggcccggcacagccggctcttctgggtccaaattgtcctgtggcggcaaggcttctactacccgctgggcatcgtccgggaggtgctgcctgaggccagcacctgggagcagggcctccgcatcctcggcctggagtacagcttgagggtgcccccgtcggaccaggccaccatcaccaaggtgctgcagaaataccacacggagcttggccgggttgccggccgccgagaggactgccgcgccttcttgaccttcactgtggacccccagggcgcctgcaacctcgatgatgccctcagtgtccgagacctgggtcccaggtgcgaggtggctgtgcacatcactgatgtggccagcttcgtgcccagggacggggtgctggacgtggaggcgcgaaggcagggcgctgcgttctatgcccccggcagggagccagtgcccatgctgccggccagcctctgccaggacgtcctcagcctcctgcctggccgggaccgcctggccatctccctgttcctcaccatggagaaggccagtggccagctgaagagcctgcgctttgcaccctccgtggtccagtctgaccgccagctgtcctacgaggaggcggaggaggtgatcaggcagcacccgggtgccggccgtgagctgccggcccgcctggactccgtggacgcctgcgtcgtggccgcgtgctacttctctcggctgctgcgccggcaccgcctgcggtccgactgcttctatgagcagccggacgaggacggcaccctgggcttccgcgcggcccacatcatggtgaaggagtacatgattcagtttaataggctcgtggctgagttcctggtgggcagcgagtgcacgcggacggtcacgcctctgcggtggcagccagcaccccgcagccagcagctcaaggccctgtgtgagaagcatggggaccgggtgcccctgtcactgcacctcggccaccacctgcacggcggcgggggcagtccccccgacacgcggctgcacctcctggcctccctctggaagcaggtccagtttgctgcccgcacccaggactacgaacagatggtggacttggtcaccacggacgacatgcacccattcctggctcctgcaggccgcgacctccgcaaggccctggagcgctcggcgttcggccgctgcgcccggggccaccagcagcagggcggccactactcgctgcaggtggactggtacacgtgggccacctcgcccatccgcaggtacctggacgtggtgttgcagcggcagatcctgctggcgctgggccatgggggctctgcctactctgccagggacatcgatgggctctgccaggccttcagcctccagcacgcacttgcccagagctatcagcggcgggcgcgcagcctgcacctggccgtgcagctcaaggcccagcctctggacaagctgggcttcgtggtggacgtggaggcgggctcccgctgcttccggctgctcttccccagcaaccgggagacgctgcctgacccctgccccgtcccctacggctccctgcagctggccgagcacccccacgccctggcaggccggccgggcctgcggctcctgtggcggcgccgtgtctactcagcgcagggatccagcccgcccctgccactgcctggcactgtgccggacccacacaccctggccgtggagacggccctgtggaagcagctgctggagctggtggagctgcagcgctggccggaggcggctgctctcatccaggagaagggcgaggcgtcccagcggcgggagctggtgcaggtgcagcggagccactgtggccatttcctggaggtggcccgggagctgggcagtggggacaccctgcaggtgcagctcggcaccagcctgcagcacggcttcctggtaccgagccctcagctctggacggtggcaccgggcttcagcctctgcctggagcacgtggagcggcccggagactgcttctcaggccgtgtgtaccgggccccgagggaccggtaccgcgacgtggatgagtacgcctgcgtgtgggaaccattctgcgccctggagtcggccaccggcgcggttgccgagaatgactccgtcacacttcagcacctgagtgtctcctgggaggcgtcacggacgccgcaggggcagctgcagggcgccttccgcctggaggccgccttcctcgaggagaactgtgccgacatcaacttcagctgctgctacctctgcatccggctcgaggggctgccggctcccacggccagcccacgccctgggcccagcagcctcggccctggcctgaatgttgaccccggcacgtatacctgggtggcccacgggcagacgcaggactgggaccaggagcgccgggcagaccggcaggaggctcccagacgggtgcacctcttcgtccaccacatgggcatggagaaggttccggaagaggtgctgaggccgggcaccctgttcaccgttgagctgctgcccaagcagcttcctgatctccgcaaggaggaagccgtgcgtggactagaggaggcgtccccgctggtcaccagcatcgcactgggccggcctgtcccgcagcccctctgcagagtgatccccagcaggttcctggagcggcagacctacaacatccccggaggccgccacaagctgaaccccagccagaacgtggcggtcagggaggctctggagaagcctttcacggtcattcagggcccaccaggtacagggaagacgatcgtgggcctccacatcgtattctggtttcataaatcaaaccaggagcaggtgcagcccggaggccccccccgtggggagaagcggctggggggtccctgcatcttgtactgcggcccctccaacaagtcggtggatgtcctggcaggactgctcctgagaaggatggagctgaagcccctccgtgtgtacagtgagcaggctgaggccagcgagttcccagtgccgcgtgtgggcagcaggaagctgctcaggaagagcccccgggaggggaggccgaaccagagcctcaggagcatcaccctgcaccaccggatccggcaggcccccaacccttactcgtcggaaatcaaggcctttgacacccggctgcagagaggggagctcttctccagggaggacctggtctggtacaagaaggtcttgtgggaggctcggaagttcgagctggaccggcatgaggtcatcctctgcacctgctcctgtgcagcctctgccagcctcaaaatcctggacgtgaggcagatccttgttgacgaggcaggcatggccacggaacctgaaaccctcatccccctggtgcagttcccacaggccgagaaggtggttcttctcggagaccacaagcagctgcggcctgtggtcaagaatgagcggctgcaaaacctgggtctggaccggtctctgttcgagcggtaccacgaggacgcacatatgctggacactcagtaccgcatgcatgagggcatctgtgccttcccctctgtggcgttctacaagagcaagctgaagacgtggcagggcctgaggaggccgcccagtgtcctgggccacgctggcaaggagagctgccctgtcatctttggccacgtgcagggccacgagcggagcctgctggtgtccacggacgaagggaatgagaactccaaggccaacctggaggaggtggctgaggtggtccgtatcaccaagcagctgaccctggggaggaccgtagagccccaggacatcgccgtcctcacgccctacaacgcgcaggcctctgagatcagcaaggcccttcggcgagagggcatcgccggggtggccgtgtcctccatcaccaagagccaggggagcgagtggcgctatgtgctggtgagcaccgtccgcacctgtgccaagagcgacctggaccagcggcccaccaagagctggctcaagaagtttctgggcttcgttgtggaccccaaccaagtgaatgtggctgtcacgcgggcccaggaggggctctgcctgatcggagaccacctccttctgcgctgctgccccctctggcgtagcctcctggacttctgcgaggctcagcagaccctcgtgcctgccggccaggtgcgcgtctgcaggaggccaactatgccttcctagtaatgaactagtccgtaacttgaaagtatttcgatttcttggctttatatatcttgtggaaaggacgatcaggtaatcgtagacatataact

SEQ ID NO: 2836 - DNA, 8051 bp, Homo sapiens
  source 1..8051: mol_type = genomic DNA
accgccaccatggctgtgtgggaggccgagcagctgggtggcctccagcggggggacctgctcacaccccctgcccctgatggcgacgggcgcacggccccccttggccagccccctggggcccagctgtactgcccggcctgcttggtcacctgccactctcaggaggccttcgagaaccactgcgcatcctcggagcacgcacagatggtggccttcgaccaggccctgccctgggagcaccgttccccacccccgggactctccaagttcgagctctgcccaaagcctgacctctgtgagtatggggacgcctgcaccaaggcacactcagcacaggagctgcaggagtgggtccggcgcacgcaggctgtggagctgcgggggcaggcggcctggcaggacgggctggtgccctaccaggagcggctgctggccgagtaccagcgcagcagcagtgaggtccttgtgctggcagagacccttgatggagtgcgtgtcacctgcaaccagcccctgatgtaccaggcccaggagaggaagacccagtacagctggacgtttgccgtccactctgaggagcccctgctacacgtggccctgctgaagcaggagccaggagccgacttctctctggtggctcccggcctcccgccaggccggctctacgcacggggtgagcgcttccgtgtgcccagctccactgccgacttccaggtgggagtgcgtgtgcaggctgcctcgttcggcacctttgagcaatgggtggtcttcgactttggccgccggccggtgctgctacaaaagctggggctgcagctgggccaggggcgtcgcccaggaccctgcaggaatctggcgctcggccaccctgaggagatggagcgctggcacactggcaaccgccacgtggtgcctggcgtggagcggacggccgagcagacggccctgatggccaagtacaagggccctgccctggccctggagttcaaccgcagcagcgtggcctcgggccccatctcaccaaccaactatcggcagaggatgcaccagtttctctatgaggaggaggcggctcagcagcagctggtggccaagctgaccctgcggggccaggtgttcctgaagacggcattgcagacgccagcgctgaacatgctcttcgcgcctccgggagcactgtacgcagaggtccccgtcccctcctccctgatgccagacacagaccagggcttcctgctgggccgggcggtcagcacagccctggtggcccctgtacctgcacccgacaatacggtgttcgaggtgcggctggagaggcgggccagctcagagcaggcgctgtggctgctgcttccggcccgctgctgcttggccctggggctgcagcctgaggcccgcctggtcctggaggtgcagttccagattgacccgatgaccttccgcctctggcaccaggcagtggacacactgcctgaggagcagctggtggtgcccgacttgcccacctgcgccctgcccagaccttggtctgtcccacccttgcggcgtggcaaccgcaagcaggagctggccgtggcgctcatcgcgggctggggccctggggatgggaggcgtgtccccccgctactcatctatggcccctttggcaccggcaagacctacacgctggccatggcctccctggaggtcatccggaggcctgaaaccaaggtgctcatctgcacacacaccaacagtgccgccgacatctacatccgggagtatttccacagccacgtcagcggcggccaccccgaggccactcctctccgtgtgatgtacacggaccggccgctgagccagacggacccagtcacgctgcagtactgttgcctgaccgacgaccgccaggctttccgcccgcccacacgggcagagctggcgcggcaccgcgtggtggtcaccaccacctcccaggcccgtgagctcagggtgccggtcggcttcttctcccacattctcatcgatgaggcggcccagatgctggagtgcgaggccctcaccccgctggcctatgcctcgcacggcacccgcctcgtgctggcgggcgaccacatgcaggtcacaccccggctgttcagtgtggccagggcccgggcggccgagcacacgctgctgcaccgcctcttcctgtgctaccagcaggagactcacgaggtggcgcggcagagccgcctggtcttccacgagaactaccgctgcacggacgccattgtcagcttcatctcgcggcacttctacgtggccaagggcaaccccatccacgccaggggcaaggttccgccccacccccggcactacccgctcatgttctgccacgtggcgggcagcccagaccgggacatgtccatggcgtcctggctgaatctggctgagattgcgcaggtcgtcgagaaggtgcaggaggcctacaacacctggcccagctgctggggcggccgcgagcagaggtgcatctgtgtcgtttcccacggtgcccaggtcagtgcactgaggcaggagctgaggaggcgggacctaggccaggtgtctgtcggcagttttgagatcctgccagggcggcagttccgggtcgtggtgctcagcactgtgcacacctgccagagcctgctcagccctggggcactggcccctgagttcttcaccgacgcccgcgtgctcaacaccgtcctgacccgcgcccagtcccagctggtggtagtgggggacgccgtggccctctgctccttcggggcctgcggcaagctctgggagagcttcatccgtgagtgcgtggagcggcacagtgtctgccccgagggcctgtccatggagcaggtcgagcagggtgtggcgcagagacggcgctggcctccccgaggcacacaggctggggcagcggggaactgggaggctgccccagagccagtaggggacctggccgaggagcaggcggctgtggtgacggccatggtgaaggcagagccgggagatgaggctctgagcccagcatcccgtgacatcacggcaaccacagcgcagacggaggctgcggcagcaccagcaggagacgcagtgaaggaagacgtggtgcccggggcctgtgcggcaggagcggctgctgcagcgggcgtggagtccacggaggctgaggatgcagaggctgacttctggccgtgggacggggagctcaacgctgacgacgccatcctacgggagcttctggacgagagccagaaggtgatggtgaccgtcggggaggacgggctgctggacactgtcgccaggcccgagtccctgcagcaggcccggctgtacgagaacctgcccccggctgcgctacggaagctgctgcacgcggagcccgagcggtaccgccactgctctttcgtgccagagaccttcgagcgggcgtcagccatcccgctggacgatgcctcctcgggccccatccaggtcaggggccgcctggactgtgggatggccttcgccggggatgaggtgctggtgcagctcctttcgggagacaaggcgcccgaggggcggcttcggggccgcgtgctgggcgtgctgaagaggaagaggcacgagctggcgtttgtgtgccgcatggacacgtgggacccgcgcatcatggtccccatcaatggctccgtgaccaagatcttcgtggccgagctgaaggacccatcgcaggtccccatctacagcctccggaagggccggctgcagcgtgtggggcttgagaggctcaccgccgaggcccggcacagccggctcttctgggtccaaattgtcctgtggcggcaaggcttctactacccgctgggcatcgtccgggaggtgctgcctgaggccagcacctgggagcagggcctccgcatcctcggcctggagtacagcttgagggtgcccccgtcggaccaggccaccatcaccaaggtgctgcagaaataccacacggagcttggccgggttgccggccgccgagaggactgccgcgccttcttgaccttcactgtggacccccagggcgcctgcaacctcgatgatgccctcagtgtccgagacctgggtcccaggtgcgaggtggctgtgcacatcactgatgtggccagcttcgtgcccagggacggggtgctggacgtggaggcgcgaaggcagggcgctgcgttctatgcccccggcagggagccagtgcccatgctgccggccagcctctgccaggacgtcctcagcctcctgcctggccgggaccgcctggccatctccctgttcctcaccatggagaaggccagtggccagctgaagagcctgcgctttgcaccctccgtggtccagtctgaccgccagctgtcctacgaggaggcggaggaggtgatcaggcagcacccgggtgccggccgtgagctgccggcccgcctggactccgtggacgcctgcgtcgtggccgcgtgctacttctctcggctgctgcgccggcaccgcctgcggtccgactgcttctatgagcagccggacgaggacggcaccctgggcttccgcgcggcccacatcatggtgaaggagtacatgattcagtttaataggctcgtggctgagttcctggtgggcagcgagtgcacgcggacggtcacgcctctgcggtggcagccagcaccccgcagccagcagctcaaggccctgtgtgagaagcatggggaccgggtgcccctgtcactgcacctcggccaccacctgcacggcggcgggggcagtccccccgacacgcggctgcacctcctggcctccctctggaagcaggtccagtttgctgcccgcacccaggactacgaacagatggtggacttggtcaccacggacgacatgcacccattcctggctcctgcaggccgcgacctccgcaaggccctggagcgctcggcgttcggccgctgcgcccggggccaccagcagcagggcggccactactcgctgcaggtggactggtacacgtgggccacctcgcccatccgcaggtacctggacgtggtgttgcagcggcagatcctgctggcgctgggccatgggggctctgcctactctgccagggacatcgatgggctctgccaggccttcagcctccagcacgcacttgcccagagctatcagcggcgggcgcgcagcctgcacctggccgtgcagctcaaggcccagcctctggacaagctgggcttcgtggtggacgtggaggcgggctcccgctgcttccggctgctcttccccagcaaccgggagacgctgcctgacccctgccccgtcccctacggctccctgcagctggccgagcacccccacgccctggcaggccggccgggcctgcggctcctgtggcggcgccgtgtctactcagcgcagggatccagcccgcccctgccactgcctggcactgtgccggacccacacaccctggccgtggagacggccctgtggaagcagctgctggagctggtggagctgcagcgctggccggaggcggctgctctcatccaggagaagggcgaggcgtcccagcggcgggagctggtgcaggtgcagcggagccactgtggccatttcctggaggtggcccgggagctgggcagtggggacaccctgcaggtgcagctcggcaccagcctgcagcacggcttcctggtaccgagccctcagctctggacggtggcaccgggcttcagcctctgcctggagcacgtggagcggcccggagactgcttctcaggccgtgtgtaccgggccccgagggaccggtaccgcgacgtggatgagtacgcctgcgtgtgggaaccattctgcgccctggagtcggccaccggcgcggttgccgagaatgactccgtcacacttcagcacctgagtgtctcctgggaggcgtcacggacgccgcaggggcagctgcagggcgccttccgcctggaggccgccttcctcgaggagaactgtgccgacatcaacttcagctgctgctacctctgcatccggctcgaggggctgccggctcccacggccagcccacgccctgggcccagcagcctcggccctggcctgaatgttgaccccggcacgtatacctgggtggcccacgggcagacgcaggactgggaccaggagcgccgggcagaccggcaggaggctcccagacgggtgcacctcttcgtccaccacatgggcatggagaaggttccggaagaggtgctgaggccgggcaccctgttcaccgttgagctgctgcccaagcagcttcctgatctccgcaaggaggaagccgtgcgtggactagaggaggcgtccccgctggtcaccagcatcgcactgggccggcctgtcccgcagcccctctgcagagtgatccccagcaggttcctggagcggcagacctacaacatccccggaggccgccacaagctgaaccccagccagaacgtggcggtcagggaggctctggagaagcctttcacggtcattcagggcccaccaggtacagggaagacgatcgtgggcctccacatcgtattctggtttcataaatcaaaccaggagcaggtgcagcccggaggccccccccgtggggagaagcggctggggggtccctgcatcttgtactgcggcccctccaacaagtcggtggatgtcctggcaggactgctcctgagaaggatggagctgaagcccctccgtgtgtacagtgagcaggctgaggccagcgagttcccagtgccgcgtgtgggcagcaggaagctgctcaggaagagcccccgggaggggaggccgaaccagagcctcaggagcatcaccctgcaccaccggatccggcaggcccccaacccttactcgtcggaaatcaaggcctttgacacccggctgcagagaggggagctcttctccagggaggacctggtctggtacaagaaggtcttgtgggaggctcggaagttcgagctggaccggcatgaggtcatcctctgcacctgctcctgtgcagcctctgccagcctcaaaatcctggacgtgaggcagatccttgttgacgaggcaggcatggccacggaacctgaaaccctcatccccctggtgcagttcccacaggccgagaaggtggttcttctcggagaccacaagcagctgcggcctgtggtcaagaatgagcggctgcaaaacctgggtctggaccggtctctgttcgagcggtaccacgaggacgcacatatgctggacactcagtaccgcatgcatgagggcatctgtgccttcccctctgtggcgttctacaagagcaagctgaagacgtggcagggcctgaggaggccgcccagtgtcctgggccacgctggcaaggagagctgccctgtcatctttggccacgtgcagggccacgagcggagcctgctggtgtccacggacgaagggaatgagaactccaaggccaacctggaggaggtggctgaggtggtccgtatcaccaagcagctgaccctggggaggaccgtagagccccaggacatcgccgtcctcacgccctacaacgcgcaggcctctgagatcagcaaggcccttcggcgagagggcatcgccggggtggccgtgtcctccatcaccaagagccaggggagcgagtggcgctatgtgctggtgagcaccgtccgcacctgtgccaagagcgacctggaccagcggcccaccaagagctggctcaagaagtttctgggcttcgttgtggaccccaaccaagtgaatgtggctgtcacgcgggcccaggaggggctctgcctgatcggagaccacctccttctgcgctgctgccccctctggcgtagcctcctggacttctgcgaggctcagcagaccctcgtgcctgccggccaggtgcgcgtctgcaggaggccaactatgccttcctagtaatgaactagtccgtaacttgaaagtatttcgatttcttggctttatatatcttgtggaaaggacgaatatgaacgtatggcatagcgtga

SEQ ID NO: 2837 - DNA, 935 bp, Homo sapiens
  source 1..935: mol_type = genomic DNA
accgccaccatggacactaaccgcccgggcgcgttcgtgctgagcagtgccccgctggccgcgctgcacaacatggccgagatgaagacgtcgctgttcccctacgcgctgcagggtccggccggcttcaaggcgcccgcgctggggggcctgggcgcgcagctcccgctcgggaccccgcacggcatcagcgacatcctgggccggcccgtgggcgcggcgggcgggggcctcctgggggggctgccccggctcaacgggctcgcgtcgtccgccggcgtttacttcgggcccgcggccgctgtggcgcgcggctaccccaagcccctggccgagctgccggggcgcccgcccatcttctggcccggcgtggtgcagggcgcgccctggagggacccgcgtctggctggcccggccccggccggcggcgtcctggacaaggacgggaagaagaagcactcgcgcccgaccttctcgggccagcagatcttcgcgctggagaaaaccttcgagcagaccaagtacctggcgggcccggagcgcgcgcgtctcgcctactcgctgggcatgaccgagagccaggtgaaggtctggttccagaaccgccggaccaagtggcgcaagcggcacgcggtggagatggcgtcggccaagaagaagcaggactcggacgccgagaagctgaaggtgggcggctcggacgcggaggacgacgacgaatacaaccggcccctggaccccaactcggacgacgagaagatcacgcggctgctcaagaagcacaaaccctcgaacttggcgctggtcagcccgtgcggcggcggcgcgggggacgccttgtagtaatgaactagtccgtaacttgaaagtatttcgatttcttggctttatatatcttgtggaaaggacgacgtgtagcgttctctccgttggag

SEQ ID NO: 2838 - DNA, 899 bp, Homo sapiens
  source 1..899: mol_type = genomic DNA
accgccaccatggagtccaacctgcaggggacgttcctgctgaacaacacgccgctggctcagtttccggagatgaaggccccggtgtgccagtactctgtgcagaactccttctacaagctcagccccccagggctgggcccccagctggccgccggaaccccccacgggatcacggacatcctgagcaggcccgtggctgcgccgaacaacagcctcctctccggctacccccacgtggcaggctttggggggctcagctcgcagggggtctactacagcccccaggtagggaatttttccaaggctgggaacgagtacccgacccggacccggaactgctgggcggacacgggccaagactggcgaggcgggcggcagtgcagcaacaccccagaccccctgagtgacagcatacacaagaagaagcacacccggcccaccttcacggggcaccagatctttgccctggagaaaacctttgagcagaccaagtacttggctggccccgagagggcacggctggcatactcactgggcatgaccgagtcgcaggtcaaggtgtggttccagaaccgcaggaccaagtggcggaagaagagcgccctggagccctcgtcctccacgccccgggccccgggcggcgcgggtgcaggcgcaggcggggaccgcgcaccctcggagaacgaggacgacgagtacaacaagccgctggaccccgactcggacgacgagaagatccgcctgctgctgcgcaagcaccgcgccgccttctcggtgctcagcctgggagcgcacagcgtctagtaatgaactagtccgtaacttgaaagtatttcgatttcttggctttatatatcttgtggaaaggacgaaaacgaaagtccagtaggcccaag

SEQ ID NO: 2839 - DNA, 509 bp, Homo sapiens
  source 1..509: mol_type = genomic DNA
accgccaccatgcagcaggggcagctggcacctgggtctaggctttgctcagggccctggggcctccccgagctccaacccgctgcgccctcctcatcagccgctcagctgccctggggcgagagctggggggaagaagcagacactcctgcatgtctttctgcttctggggtgtggttccagaaccgcaggaccaagtggcggaagaagagcgccctggagccctcgtcctccacgccccgggccccgggcggcgcgggtgcaggcgcaggcggggaccgcgcaccctcggagaacgaggacgacgagtacaacaagccgctggaccccgactcggacgacgagaagatccgcctgctgctgcgcaagcaccgcgccgccttctcggtgctcagcctgggagcgcacagcgtctagtaatgaactagtccgtaacttgaaagtatttcgatttcttggctttatatatcttgtggaaaggacgattcttctctatgaagggcattcta

SEQ ID NO: 2840 - DNA, 1205 bp, Homo sapiens
  source 1..1205: mol_type = genomic DNA
accgccaccatgttagcggtgggggcaatggagggcacccggcagagcgcattcctgctcagcagccctcccctggccgccctgcacagcatggccgagatgaagaccccgctgtaccctgccgcgtatcccccgctgcctgccggccccccctcctcctcgtcctcgtcgtcgtcctcctcgtcgccctccccgcctctgggcacccacaacccaggcggcctgaagcccccggccacgggggggctctcatccctcggcagccccccgcagcagctctcggccgccaccccacacggcatcaacgatatcctgagccggccctccatgcccgtggcctcgggggccgccctgccctccgcctcgccctccggttcctcctcctcctcttcctcgtccgcctctgcctcctccgcctctgccgccgccgcggctgctgccgcggccgcagccgccgcctcatccccggcggggctgctggccggactgccacgctttagcagcctgagcccgccgccgccgccgcccgggctctacttcagccccagcgccgcggccgtggccgccgtgggccggtaccccaagccgctggctgagctgcctggccggacgcccatcttctggcccggagtgatgcagagcccgccctggagggacgcacgcctggcctgtacccctcatcaaggatccattttgttggacaaagacgggaagagaaaacacacgagacccactttttccggacagcagatcttcgccctggagaagactttcgaacaaacaaaatacttggcggggcccgagagggctcgtttggcctattcgttggggatgacagagagtcaggtcaaggtctggttccagaaccgccggaccaagtggaggaagaagcacgctgccgagatggccacggccaagaagaagcaggactcggagacagagcgcctcaagggggcctcggagaacgaggaagaggacgacgactacaataagcctctggatcccaactcggacgacgagaaaatcacgcagctgttgaagaagcacaagtccagcagcggcggcggcggcggcctcctactgcacgcgtccgagccggagagctcatcctagtaatgaactagtccgtaacttgaaagtatttcgatttcttggctttatatatcttgtggaaaggacgatagttgggaaggagaattcatctt

SEQ ID NO: 2841 - DNA, 1085 bp, Homo sapiens
  source 1..1085: mol_type = genomic DNA
accgccaccatggaggtggcggtgcccgtgaagcaggaggccgagggcctggcgctggactccccgtggcaccgcttccgccgcttccacctgggcgacgcgccgggcccgcgggaggcgctggggctgctccgcgccctgtgccgggactggctgcggcccgaggtgcacaccaaggagcagatgttggagctgctggtgctggaacagttcctgagcgcgctgcccgccgacacgcaggcctgggtgtgcagccggcagccgcagagcggggaggaggcggtggccctgctggaggagctctgggggccagcagcctcccccgatgggtcgtcagcaacgagggtgcctcaggatgtgacgcagggccctggggccacaggtggaaaggaggacagtgggatgattcccttagcaggcaccgcccctggggctgaggggccggcgcctggggactcccaggctgtgcgcccctacaagcaggagcccagcagccccccgctggcgcctggcctgcccgccttcctagcggccccgggcaccacgtcctgccccgagtgcggcaaaacgtccctgaaaccagctcacctgctgcgccaccggcagagccactcgggcgagaagccgcacgcctgccctgagtgcgggaaggcctttcggcgcaaggagcacctgcggcgccaccgcgacacgcaccccggcagccccggcagccccgggcccgcgctgcgccctctgcccgcccgtgagaagccccacgcgtgctgcgagtgtggcaagaccttctactggcgcgagcacctggtgcgccaccgcaagacgcactcgggagcgcggccctttgcctgctgggagtgtggcaagggcttcgggcgccgcgagcacgtgctgcgccaccagcgcatccacggccgggcagcggccagcgcgcagggggcggtagctccgggcccggatggtggaggccccttcccgccctggcccttgggttagtaatgaactagtccgtaacttgaaagtatttcgatttcttggctttatatatcttgtggaaaggacgatttagtatggaatgaggtccttac

SEQ ID NO: 2842 - DNA, 1082 bp, Homo sapiens
  source 1..1082: mol_type = genomic DNA
accgccaccatggaggtggcggtgcccgtgaagcaggaggccgagggcctggcgctggactccccgtggcaccgcttccgccgcttccacctgggcgacgcgccgggcccgcgggaggcgctggggctgctccgcgccctgtgccgggactggctgcggcccgaggtgcacaccaaggagcagatgttggagctgctggtgctggaacagttcctgagcgcgctgcccgccgacacgcaggcctgggtgtgcagccggcagccgcagagcggggaggaggcggtggccctgctggaggagctctgggggccagcagcctcccccgatgggtcgtcagcaacgagggtgcctcaggatgtgacgcagggccctggggccacaggtggaaaggaggacagtgggatgattcccttaggcaccgcccctggggctgaggggccggcgcctggggactcccaggctgtgcgcccctacaagcaggagcccagcagccccccgctggcgcctggcctgcccgccttcctagcggccccgggcaccacgtcctgccccgagtgcggcaaaacgtccctgaaaccagctcacctgctgcgccaccggcagagccactcgggcgagaagccgcacgcctgccctgagtgcgggaaggcctttcggcgcaaggagcacctgcggcgccaccgcgacacgcaccccggcagccccggcagccccgggcccgcgctgcgccctctgcccgcccgtgagaagccccacgcgtgctgcgagtgtggcaagaccttctactggcgcgagcacctggtgcgccaccgcaagacgcactcgggagcgcggccctttgcctgctgggagtgtggcaagggcttcgggcgccgcgagcacgtgctgcgccaccagcgcatccacggccgggcagcggccagcgcgcagggggcggtagctccgggcccggatggtggaggccccttcccgccctggcccttgggttagtaatgaactagtccgtaacttgaaagtatttcgatttcttggctttatatatcttgtggaaaggacgaaataactactcttgactcaccggc

SEQ ID NO: 2843 - DNA, 3197 bp, Homo sapiens
  source 1..3197: mol_type = genomic DNA
accgccaccatgcctccaggcaggtggcatgctgcctatccagctcaggcccagtcttcgagggagcgagggcggcttcagacagtaaagaaggaagaagaggatgaaagctatactccagtgcaggctgccaggccacagactctcaaccgccctggccaggagctgttccgccagctcttcagacagcttcgctaccatgagtcttcagggcccctagaaactctgagccggctccgggaactctgtcgctggtggctgaggcctgacgttctctccaaggcacagatcctagagctgctggtgctggaacagttcctgagcatcctgcctggggagctccgggtttgggtgcagcttcataaccctgagagtggcgaggaggctgtggccttgctggaggagctgcagagggaccttgatgggacatcctggagggacccgggccctgcccagagcccagatgtgcattggatgggtacaggagccctgcgatctgcacagatatggtcccttgcttcacctctcaggagcagctctgctctgggggaccacctggagcctccctatgaaatagaagcacgtgacttcctggctgggcaatccgatactcctgctgcccagatgcctgcccttttcccgagagaggggtgcccgggagaccaggtaacaccaaccaggtccctgacagcccagctccaggagaccatgactttcaaggatgtggaggtgaccttctcccaggacgagtgggggtggctggactctgctcagaggaacctgtacagggatgtgatgctggagaattataggaacatggcttccctggtgggaccattcaccaaacctgctctgatctcctggttggaagcaagggagccatggggcctgaacatgcaggcagctcagcctaaggggaatccagttgctgctcctacaggagatgacctccagagtaaaacaaacaaattcatcttaaatcaggaacctttggaagaagcagaaaccttagctgtgtcatcaggatgtcctgcgacaagtgtttctgagggaattgggctcagagaatcttttcaacagaagagcaggcagaaggatcaatgtgaaaatcccatacaagtaagagttaagaaagaagagaccaatttcagtcacaggacaggaaaagactctgaagtatcaggaagtaatagtcttgacttaaaacatgttacatatttgagagtttctggaagaaaggaatcccttaaacatggctgtggcaaacacttcagaatgagttcacaccactatgactacaagaaatatgggaaggggctcagacacatgattgggggcttcagcctacatcagagaattcatagtggactgaaagggaacaaaaaggacgtgtgtggaaaagacttcagccttagctctcatcaccaacgtgggcagagtcttcacacagtgggagtgtcatttaagtgcagtgactgtggaaggactttcagtcatagctcccatcttgcgtatcatcagagacttcacactcaagagaaagcatttaaatgtagggtgtgtgggaaagccttccggtggagttccaactgtgcgcggcatgagaaaattcacactggagtgaagccttataaatgcgatttatgtgagaaagctttccgacgcctgtcagcctaccgtctgcaccgagaaacccatgctaagaagaaatttcttgaattgaatcagtatagggcagctctcacctacagctcagggtttgatcatcatttgggagaccaaagtggggagaaactctttgactgcagccagtgcaggaaatccttccactgtaagtcatatgttcttgaacatcaaaggattcacacccaggagaagccctataaatgtaccaaatgtaggaaaacctttagatggagatcaaactttactcgtcatatgaggttgcatgaggaggaaaaattctacaaacaagatgaatgtcgtgaaggcttcaggcaatctcctgactgcagtcagccccagggtgctcccgctgtggagaaaacatttctgtgtcagcagtgtgggaaaacttttactagaaagaaaactctcgttgaccaccagagaattcacacaggtgagaaaccttaccagtgtagcgattgtgggaaggactttgcctataggtcagcctttattgttcataagaagaagcatgccatgaaaagaaaacctgagggcgggccatcttttagtcaggacacagtgttccaggttcctcagagcagtcactccaaagaggagccctacaaatgcagccagtgtggcaaggccttccgcaatcactcattcctcctcatccatcagagagttcacactggagagaagccatataagtgcagggagtgtgggaaagccttcagatggagttccaatctctaccgacatcagaggattcactctcttcaaaaacagtatgattgccatgaaagtgaaaagactccaaatgtggagccaaaaatcctcactggtgagaaacgtttttggtgtcaagaatgtgggaaaacctttacacgtaaaagaacccttttagatcataagggaatacacagtggagagaagcgctataaatgtaatctatgtgggaaatcttatgatagaaactatcgccttgttaaccatcagaggatccactctacagagagacctttcaaatgtcagtggtgtgggaaagagttcattgggagacataccctttccagtcaccagaggaaacacaccagagcagcacaggctgaacgtagcccgcctgcacggtcttcctctcaggacacaaagttgagattacagaagctaaaaccaagtgaagagatgcccctcgaagactgcaaagaagcttgcagccagagctccaggctcactggactccaggacataagcattgggaaaaagtgccacaaatgcagcatatgtgggaaaacttttaacaagagttcacaactcattagccacaagagatttcatactcgagagaggcccttcaaatgcagcaagtgtggaaagaccttcaggtggtcttcgaacctggctcggcatatgaaaaaccatattagagattagtaatgaactagtccgtaacttgaaagtatttcgatttcttggctttatatatcttgtggaaaggacgagcgccctgtgtgcgccgtgcacaa

SEQ ID NO: 2844 - DNA, 1454 bp, Homo sapiens
  source 1..1454: mol_type = genomic DNA
accgccaccatgccatcccctctgggtcccccatgcctgcccgtcatggacccagagaccacccttgaggagcctgagactgcccgcctccgcttccgagggttctgctaccaggaggtggcaggtccccgagaagccctggcccggctgcgtgagctgtgttgccagtggctgcagcctgaggcacactccaaggagcagatgctggagatgctggtgctggagcagttcctgggcacactgcctcccgagatccaggcctgggtgcgcggtcagcggccaggcagtcctgaggaggccgctgccctagtcgaaggactgcagcatgaccctgggcaactgttgggctggatcacagcccatgtcctgaagcaggaggtgctccctgcagcccagaagacagaggaaccacttgggagcccccacccctcagggacagtggagtcccctggggaaggtccccaggacaccagaatagaggggtctgtccagctcagctgcagtgtgaaggaggagcccaatgtcgatggacaggaagtggcaccctccagccctccacttgcagcacagtcccctgaggggaaccatggacaccaagaaccagcctccacatccttccacccacccaggattcaggaggagtgggggctgctggaccggtcacagaaggaactgtactgggatgcgatgctggagaagtacggcacagtggtctccctggggttaccgccccaccagccagaggcacaggcccagtcagagctggggatgctgctcacggggacaggcgtctgcagaagcctgcgctcgggaaatgagagtgagggtccacctggctgcccagaggcccagccgccccagggcccagggccggcagcctgggagggcttgtctggggctgccactcctgcccccactgtgcgcccagggacaccgccagtgcccactcagcccacacctgcagagacgagactggagccggctgccacccccaggaagccctacacgtgcgagcagtgtggccgcggcttcgactggaagtcagtgttcgtcatccaccaccggacacacacgagtgggccaggtgtgcagtccccggggctagccaccggggaaagcacagagaagccaccacaaggggaggtggcctttccgcaccacccccgacgctcactcacaggcccccggagttacccgtgtgaggagtgcgggtgcagcttcagctggaagtcgcagctggtcatccaccgcaagagccacacaggccagcggcgtcacttctgcagtgactgtggccgcgccttcgactggaagtcgcagctggtcatccaccgcaagggccaccggccggaggttccatagtaatgaactagtccgtaacttgaaagtatttcgatttcttggctttatatatcttgtggaaaggacgacccatgcgcgccgccttcagtaga

SEQ ID NO: 2845 - DNA, 1889 bp, Homo sapiens
  source 1..1889: mol_type = genomic DNA
accgccaccatggacccagtggcttttaaggatgtggctgtgaacttcacccaggaggagtgggctttgctggatatttcccagaggaaactctacagggaagtgatgctggaaactttcaggaacctgacctctttaggaaaaaggtggaaagaccagaacattgaatatgagcaccaaaaccccaggagaaacttcaggagtctcatagaagaaaaagtcaatgaaattaaagatgacagtcattgtggagaaacttttaccccagttccagatgacagactgaacttccaggagaagaaagcttctcctgaagtaaaatcatgtgaaagctttgtgtgtggagaagttggcctaggtaactcatcttttaatatgaacatcagaggtgacattggacacaaggcatatgagtatcaggaatatggaccaaagccatgtaagtgtcaacaacctaaaaaagccttcagataccgcccctcctttagaacacaagaaagggatcacactggagagaaacccaatgcttgtaaagtatgtggaaaaacctttatttcccattcaagtgttcgaagacacatggtaatgcacagtggggatggaccttataaatgtaagttttgtgggaaagcattccattgtctcagattatatcttatccatgaaagaattcacactggagagaaaccatgtgaatgtaaacagtgtggtaaatcctttagttattctgctacccatcgaatacataaaagaactcacactggagaaaagccttatgaatatcaggagtgtgggaaagcatttcatagtcccagatcctatcgtagacatgaaaggattcacatgggagaaaaggcttatcaatgtaaggaatgtggaaaagcattcacgtgtccccgttatgttcgtatacatgaaaggacccactctaggaaaaatctctatgaatgtaagcagtgtgggaaagcattatcctctcttacaagttttcaaacacacgtaagattgcactctggagaaagaccttatgaatgtaagatatgtggaaaagacttttgttctgtgaattcatttcaaagacatgaaaaaattcacagtggagagaaaccctataaatgtaagcagtgtggtaaagccttccctcattccagttcccttcgatatcatgaaaggactcacactggagagaaaccctatgagtgtaagcaatgtgggaaagccttcagatctgcctcacaccttcgagtgcatggtaggactcacactggagagaaaccgtatgaatgtaaggaatgtgggaaagccttcagatatgtgaataaccttcaaagtcatgaaaggacacaaacacacataagaatacactctggagaaagacgttataaatgtaagatatgtgggaaaggcttttattgtcccaaatcatttcaaagacatgaaaaaactcacactggagagaaactctatgaatgcaagcaacgttcagtagttccttcagtagttccagttccttttgatatcatgaaaggactcacactggagagaagccctataaatgcgagcaatgtgggaaagccttcagagctgtgtcaatcctttgaatgcatggtaggactcaccctgaagagaaaccctatgagtgtgagcaatgacggaaagccttcagatctgccccacacctttgaatacgtggtaggacacacaatggagagaagccctatgcatgtaaggaatgtgggaaacccttcggatctgcccagaaccttcgaattcatgaaaggacacaaacacacatagtaatgaactagtccgtaacttgaaagtatttcgatttcttggctttatatatcttgtggaaaggacgatgcatatcacccactacaaacgag

SEQ ID NO: 2846 - DNA, 1265 bp, Homo sapiens
  source 1..1265: mol_type = genomic DNA
accgccaccatgacaatggaaggggccagcgggtcgagttttggaatagacacgattttgtccagtgccagttcaggcagcccaggcatgatgaatggagatttccgcccgctcggtgaggccaggaccgcggattttaggagtcaggccaccccatctccctgttcggagattgataccgtagggacggcgccttcttctcctatctcagtcaccatggagcccccggagccgcatctggtagcagacgcgacccagcatcatcaccacctccaccacagccagcagccgccgccgccggccgcggccccgacgcaaagtttgcagcctttgccccaacagcagcagccgctgccgccacagcagccgccgccgccgcccccccagcagctgggctcggccgcctcggcccccaggacttccacgtcttcttttttaattaaggacatcttgggcgacagcaaacctctggcggcatgtgcaccctacagcaccagcgtatcctctccccaccacaccccgaagcaggagagcaacgcagtgcacgagagcttcaggccaaagctcgagcaggaggacagcaagaccaaactcgacaagcgggaggattcccagagcgacatcaaatgccacgggacaaaggaggaaggagaccgggagattacgagtagccgtgagagtccccctgtgagagccaagaagcctcgaaaagcaaggacagctttttccgaccaccagctcaatcaactggagcgtagctttgagcggcagaagtacctgagcgtgcaggatcgcatggacctggctgcagcgctcaacctcactgacacccaagtcaagacctggtaccagaaccgcaggaccaagtggaagcggcagacagcggtgggcctggagttgctggccgaggcagggaactactcggcgctgcagaggatgtttccatcgccttatttctatcacccaagcctgctgggcagcatggacagcactacggcggcggcggctgccgctgccatgtacagcagcatgtaccggactcctccagcaccccatccccagctgcagcggcccctggtgccccgtgtgctcatccacggcctagggcctgggggacagccagcccttaatccattgtccagccccatcccaggcaccccacacccccggtagtaatgaactagtccgtaacttgaaagtatttcgatttcttggctttatatatcttgtggaaaggacgatcccgcagaaactcagttacgctt

SEQ ID NO: 2847 - DNA, 1085 bp, Homo sapiens
  source 1..1085: mol_type = genomic DNA
accgccaccatggaaggctccaatggctttgggatcgactccattctctcccaccgcgcgggcagccccgcccttcccaagggggaccccttgctcggggactgccgttcgcccctggagctgagtccacgctcagagagcagcagcgactgctcttcgccagcctctccaggaagggactgtttggagacggggaccccacggcctggcggggcatccggcccaggtttggactcccacctgcagcccgggcagctctcagccccggcccagtcgcgcaccgtcacctcctcctttctgatcagggacatccttgccgactgcaaaccactcgcggcctgtgcaccctactctagcagcgggcagccggcagcccctgagcctgggggccgccttgcggccaaggccgcggaggactttagagacaagctggacaaaagtggcagcaacgcctcatcggactctgagtataaagtgaaggaggagggcgaccgcgagatctccagctccagggacagtcccccggtgcgcctgaaaaagccacgcaaggcgcgcacggccttcaccgaccatcagctggcgcagctggagcgcagcttcgagcggcagaagtacctgagcgtgcaggaccgcatggagctcgccgcctcgctcaacctcaccgacacgcaggtcaagacctggtaccagaaccgcaggactaaatggaagcgacagacggccgtcgggttggagctgctggcggaggcaggcaattactcagcgctccagcggatgttcccgtcgccttatttctacccgcagagtctggtttccaacctggaccccggcgcggcgctctacctgtaccgcggccccagcgcgccgccgcctgctctccagagacctctggtgccccgcatcctcatccacggactccagggcgccagcgagccgcccccgccgctgccccccctggccggcgtcctcccacgcgccgcgcagcctcggtagtaatgaactagtccgtaacttgaaagtatttcgatttcttggctttatatatcttgtggaaaggacgaagggcactatcacgggaagacact

SEQ ID NO: 2848 - DNA, 2117 bp, Homo sapiens
  source 1..2117: mol_type = genomic DNA
accgccaccatggcctcagtggctttagaggatgtggctgtgaacttcacccgagaagagtgggctttgctgggtccttgtcagaagaatctctacaaagatgtgatgcaggaaaccatcaggaacctggattgtgtagtaatgaaatggaaagaccagaacattgaagatcaatatagatatcccaggaaaaatctaagatgtcgtatgttagagagatttgttgaaagtaaagatggaactcaatgtggagaaacatctagccagattcaagatagtattgtgaccaagaacactcttcctggagtaggtccttgtgaaagcagtatgagaggagaaaaagtcatgggtcattcatcccttaattgttacatcagagttggtgctgggcacaaaccacatgagtatcatgaatgtggagagaagccagatacgcataaacaacgtgggaaagccttcagttaccacaactcatttcaaacacatgagaggcttcacactggaaagaaaccatatgattgtaaagaatgtgggaagtccttcagttctttgggaaaccttcaaagacacatggcagtgcagcgtggagatggaccttataaatgtaagttgtgtgggaaagcgtttttttggcccagtttattacatatgcatgaaagaacgcacactggagagaaaccatatgaatgtaagcagtgttctaaagccttttctttttacagttcctatctaagacatgaaagaacacatactggggagaaaccgtatgaatgtaaacagtgttctaaagcctttcctttttacagttcctatctaagacatgaaagaacacatactggggagaaaccatataaatgtaagcagtgttctaaagccttccctgattccagttcttgtctaatacatgaaagaactcacactggagagaaaccctatacatgtaaacaatgtgggaaagccttcagtgtttccggttcccttcaaagacatgaaaccactcacagtgcagagaaaccctatgcatgtcagcaatgtgggaaagcgtttcatcatctgggaagctttcaaagacacatgataaggcacactggaaatggacctcataaatgtaagatatgtgggaaaggctttgattgtcctagttcactgcaaagtcatgaaagaactcacactggagagaaaccctatgaatgcaagcagtgtgggaaagcattatctcatcgctcaagctttcgaagtcatatgataatgcacactggagatggacctcataaatgcaaggtatgtgggaaagcctttgtttatcccagtgtatttcaaagacatgaaaggactcacactgcagagaaaccctataaatgtaaacaatgtggcaaagcctaccgtatttccagttcccttcgaaggcatgaaacaactcatactggagagaaaccctataaatgcaaacttgggaaagcctgtattgatttctgttcctttcaaaatcacaaaacaactcacactggagagaagccatatgagtgtaaggaatgtgggaaagcattcagtcgtttcagatacctttctcgacataaaaggactcacacaggagagaaaccttatgagtgtaaaacatgtaggaaagccttcggtcattatgataacttaaaggtacatgaaagaattcactctggagagaagccgtatgaatgtaaggaatgtgggaaagcattctcttggctcacttgctttctacgacatgaaagaattcacatgagagagaaatcctatgaatgtccacaatgtggtaaagccttcactcattcccgttttcttcaaggacatgaaaaaactcatactggagagaacccgtatgaatgtaaggaatgtgggaaagcatttgcttctctcagttccttgcatagacataaaaagactcactggaaaaaaactcacactggagagaacccatatgaatgtaaggaatgtgggaaagcatttgcttctctcagttccttgcatagacataaaaagactcactagtaatgaactagtccgtaacttgaaagtatttcgatttcttggctttatatatcttgtggaaaggacgacaccactatttagcctgggaccac

SEQ ID NO: 2849 - DNA, 2420 bp, Homo sapiens
  source 1..2420: mol_type = genomic DNA
accgccaccatgaggcgaagagagggccatggcaccgactccgagatgggtcaaggacccgtacgggagtcgcaatcctcagaccctcccgcgctccagttccggataagcgagtataagccgctgaacatggcgggagtggagcagcccccgagccccgagctgcggcaggaaggcgtgaccgaatacgaagatggcggggccccggcgggagatggcgaggcgggcccccaacaggcggaggaccacccccagaatcctccagaagatcccaatcaggaccccccagaggatgatagcacctgtcagtgccaggcgtgcgggcctcaccaagccgcgggtccagatcttggttcctctaatgatggctgccctcagctgttccaggagcggtcagtcatagtggagaactcctcaggctctaccagcgcttctgagctcctcaaacccatgaagaagaggaagcgcagggaataccagagcccatcagaggaggagtcggagccagaggccatggagaagcaagaagaaggaaaggacccagagggacaacccactgctagcaccccagagagtgaggagtggagcagcagccagcctgcaacaggtgagaagaaggaatgctggtcgtgggagtcctacctagaggagcagaaggccattactgctccagtcagcctcttccaggactcccaggcagtcactcacaacaagaatggcttcaaactgggcatgaagttggaaggcattgaccctcaacacccgtccatgtacttcatcctcaccgtggctgaggtatgtggctatcgcctacgcctgcactttgatgggtattctgagtgccatgacttctgggtcaatgccaactcccctgacattcaccctgctggctggttcgagaagacgggccacaagctgcagcctcccaaaggttacaaggaggaggagttcagctggagccagtacctgcgcagcacaagagctcaggctgcccccaagcacctgtttgtgagccagagccacagtcccccacccctgggcttccaggtgggcatgaagctggaggctgttgaccgcatgaacccgtcccttgtctgcgtggccagtgtgaccgatgtggtggacagccgcttcctggtgcactttgacaactgggatgatacttatgactactggtgtgatcccagcagcccctacatccacccagtgggctggtgccagaagcaaggaaagcccctcacccctccacaagactacccagaccctgataacttctgttgggagaaatatctggaagaaactggggcctctgctgtccccacctgggccttcaaggtgcgaccccctcacagcttcctggtcaatatgaagctggaggctgtggaccgcaggaacccagccctgattcgcgtggccagcgtggaggatgtggaggaccatcggataaagatccactttgatggctggagtcatggctatgatttctggatcgacgctgaccacccagacatccaccctgccggctggtgctccaagacaggacatcccctgcagcctcctctcggacccagagagcccagctctgcctcccctgggggctgtccccctctcagctataggagcctgccccacactaggacctccaaatacagctttcaccaccggaagtgccccactcctggttgcgacggctctggccatgtcacaggcaagttcacagctcaccattgcctctcaggctgcccactggctgagaggaaccagagccggctgaaagcggagctgtctgactcggaggcctcagcccgcaagaagaacctctcaggcttctccccaaggaagaagcctcgccatcacggccgaattggacgccctccgaagtatcgaaagattccgcaggaagatttccagaccctcacgcccgatgtcgtgcaccagtccctcttcatgtcagccctgtcggcccaccctgaccgctcactctcagtgtgctgggagcagcactgcaagctcctgccaggagtagcgggcatctcagcctcgacagtcgccaagtggaccatcgatgaggtcttcggctttgttcagaccctgacaggttgtgaggaccaagcacgcctcttcaaagacgaggcaagaatagtcagagtgacccatgtatctgggaagactctagtctggactgtggcccagcttggggaccttgtgtgctcagatcatcttcaggaaggaaaaggcatcctggagacaggagtccattcactcctctgctctctacccactcatttgcttgccaaacttagctttgccagtgatagtcaatattagtaatgaactagtccgtaacttgaaagtatttcgatttcttggctttatatatcttgtggaaaggacgaaatctgtatgcgctctgtacttac

SEQ ID NO: 2850 - DNA, 2624 bp, Homo sapiens
  source 1..2624: mol_type = genomic DNA
accgccaccatgcacttggtggccggagacagccccggttctggtcctcacctgcccgcaactgccttcatcattccagccagttcggccaccctcggcctgcccagcagtgccctggatgtgtcttgctttccccgggagccaatccatgtgggtgccccggagcaagtggccggctgcgaaccagtttctgccaccgtcctgccgcagcttagcgccgggccggccagctccagcaccagcacagtgcggcttctggaatggacagaggccgcggccccgcccccagggggcggcctgcggttccggataagcgagtataagccgctgaacatggcgggagtggagcagcccccgagccccgagctgcggcaggaaggcgtgaccgaatacgaagatggcggggccccggcgggagatggcgaggcgggcccccaacaggcggaggaccacccccagaatcctccagaagatcccaatcaggaccccccagaggatgatagcacctgtcagtgccaggcgtgcgggcctcaccaagccgcgggtccagatcttggttcctctaatgatggctgccctcagctgttccaggagcggtcagtcatagtggagaactcctcaggctctaccagcgcttctgagctcctcaaacccatgaagaagaggaagcgcagggaataccagagcccatcagaggaggagtcggagccagaggccatggagaagcaagaagaaggaaaggacccagagggacaacccactgctagcaccccagagagtgaggagtggagcagcagccagcctgcaacaggtgagaagaaggaatgctggtcgtgggagtcctacctagaggagcagaaggccattactgctccagtcagcctcttccaggactcccaggcagtcactcacaacaagaatggcttcaaactgggcatgaagttggaaggcattgaccctcaacacccgtccatgtacttcatcctcaccgtggctgaggtatgtggctatcgcctacgcctgcactttgatgggtattctgagtgccatgacttctgggtcaatgccaactcccctgacattcaccctgctggctggttcgagaagacgggccacaagctgcagcctcccaaaggttacaaggaggaggagttcagctggagccagtacctgcgcagcacaagagctcaggctgcccccaagcacctgtttgtgagccagagccacagtcccccacccctgggcttccaggtgggcatgaagctggaggctgttgaccgcatgaacccgtcccttgtctgcgtggccagtgtgaccgatgtggtggacagccgcttcctggtgcactttgacaactgggatgatacttatgactactggtgtgatcccagcagcccctacatccacccagtgggctggtgccagaagcaaggaaagcccctcacccctccacaagactacccagaccctgataacttctgttgggagaaatatctggaagaaactggggcctctgctgtccccacctgggccttcaaggtgcgaccccctcacagcttcctggtcaatatgaagctggaggctgtggaccgcaggaacccagccctgattcgcgtggccagcgtggaggatgtggaggaccatcggataaagatccactttgatggctggagtcatggctatgatttctggatcgacgctgaccacccagacatccaccctgccggctggtgctccaagacaggacatcccctgcagcctcctctcggacccagagagcccagctctgcctcccctgggggctgtccccctctcagctataggagcctgccccacactaggacctccaaatacagctttcaccaccggaagtgccccactcctggttgcgacggctctggccatgtcacaggcaagttcacagctcaccattgcctctcaggctgcccactggctgagaggaaccagagccggctgaaagcggagctgtctgactcggaggcctcagcccgcaagaagaacctctcaggcttctccccaaggaagaagcctcgccatcacggccgaattggacgccctccgaagtatcgaaagattccgcaggaagatttccagaccctcacgcccgatgtcgtgcaccagtccctcttcatgtcagccctgtcggcccaccctgaccgctcactctcagtgtgctgggagcagcactgcaagctcctgccaggagtagcgggcatctcagcctcgacagtcgccaagtggaccatcgatgaggtcttcggctttgttcagaccctgacaggttgtgaggaccaagcacgcctcttcaaagacgaggcaagaatagtcagagtgacccatgtatctgggaagactctagtctggactgtggcccagcttggggaccttgtgtgctcagatcatcttcaggaaggaaaaggcatcctggagacaggagtccattcactcctctgctctctacccactcatttgcttgccaaacttagctttgccagtgatagtcaatattagtaatgaactagtccgtaacttgaaagtatttcgatttcttggctttatatatcttgtggaaaggacgatgacctgacctaatagataagcac

SEQ ID NO: 2851 - DNA, 1718 bp, Homo sapiens
  source 1..1718: mol_type = genomic DNA
accgccaccatggctagagaattaagtgaaagcacagccctggatgcccagtctacagaagaccagatggagcttctggtcataaaggtggaggaagaagaagccggttttcccagtagcccagatctgggttctgagggctcccgcgagcgcttccgaggcttccgctacccggaggctgcaggcccccgcgaggcgctgagtcggctccgagagctctgccgacagtggctgcagcctgagatgcacagcaaggagcagatcctggagctgctggtgctggagcagttcctgaccatcctgccggggaatctgcagagctgggtgcgggagcagcatccagagagcggggaggaggtggtggtgctattggagtatttggagaggcagctggatgagccggcgccgcaggtttcaggtgttgaccaggggcaagaactgctctgttgcaagatggcactattgacaccagccccagggtcacaaagtagccaatttcagctaatgaaggctctgctcaagcatgaatctgtgggatcccagcctttacaagatagagttctccaggtccccgtgcttgcccatggaggatgctgcagagaagataaagtggtagcttctaggcttactccagagtcccaggggttgttgaaagtggaagatgtggccctgaccctcacccctgaatggacacagcaggattcatctcaggggaatctctgtagagatgaaaagcaggagaaccatggcagcctggtctccctgggtgatgaaaaacagactaagagcagggacttgcctccagctgaggagcttccagaaaaggagcatgggaagatatcgtgccacctgagagaagacattgcccagattcctacatgtgcagaagctggtgaacaggagggcaggctacaaagaaagcagaaaaatgccacaggagggaggcggcacatctgccatgaatgtggaaagagttttgctcaaagctcaggcctgagtaaacacaggagaatccacactggtgagaaaccctacgaatgtgaagagtgtggcaaagccttcattgggagctctgcccttgtcattcatcagagagtccacactggtgagaagccatatgagtgtgaagaatgtggtaaggccttcagtcatagctcagaccttatcaagcatcagagaacccacactggggagaagccctatgagtgtgatgactgtgggaagaccttcagccagagctgcagcctccttgaacatcacagaatccacactggggagaagccgtatcagtgcagtatgtgtggcaaagcctttaggcgaagttcacatctcctgagacatcagaggatccatactggggataaaaatgttcaggaacctgagcagggagaggcctggaaaagtaggatggaaagccagttggaaaatgttgaaactcccatgtcttataaatgtaatgagtgtgaaagaagtttcactcagaatacaggcctcattgaacatcaaaaaatccacactggtgagaaaccctatcagtgtaatgcgtgtggaaaaggcttcacccgaatttcataccttgttcaacatcagagaagccatgtagggaaaaacatcctatcacagtagtaatgaactagtccgtaacttgaaagtatttcgatttcttggctttatatatcttgtggaaaggacgatcgttctactagggtgacctggtt

SEQ ID NO: 2852 - DNA, 1274 bp, Homo sapiens
  source 1..1274: mol_type = genomic DNA
accgccaccatggcactattgacaccagccccagggtcacaaagtagccaatttcagctaatgaaggctctgctcaagcatgaatctgtgggatcccagcctttacaagatagagttctccaggtccccgtgcttgcccatggaggatgctgcagagaagataaagtggtagcttctaggcttactccagagtcccaggggttgttgaaagtggaagatgtggccctgaccctcacccctgaatggacacagcaggattcatctcaggggaatctctgtagagatgaaaagcaggagaaccatggcagcctggtctccctgggtgatgaaaaacagactaagagcagggacttgcctccagctgaggagcttccagaaaaggagcatgggaagatatcgtgccacctgagagaagacattgcccagattcctacatgtgcagaagctggtgaacaggagggcaggctacaaagaaagcagaaaaatgccacaggagggaggcggcacatctgccatgaatgtggaaagagttttgctcaaagctcaggcctgagtaaacacaggagaatccacactggtgagaaaccctacgaatgtgaagagtgtggcaaagccttcattgggagctctgcccttgtcattcatcagagagtccacactggtgagaagccatatgagtgtgaagaatgtggtaaggccttcagtcatagctcagaccttatcaagcatcagagaacccacactggggagaagccctatgagtgtgatgactgtgggaagaccttcagccagagctgcagcctccttgaacatcacagaatccacactggggagaagccgtatcagtgcagtatgtgtggcaaagcctttaggcgaagttcacatctcctgagacatcagaggatccatactggggataaaaatgttcaggaacctgagcagggagaggcctggaaaagtaggatggaaagccagttggaaaatgttgaaactcccatgtcttataaatgtaatgagtgtgaaagaagtttcactcagaatacaggcctcattgaacatcaaaaaatccacactggtgagaaaccctatcagtgtaatgcgtgtggaaaaggcttcacccgaatttcataccttgttcaacatcagagaagccatgtagggaaaaacatcctatcacagtagtaatgaactagtccgtaacttgaaagtatttcgatttcttggctttatatatcttgtggaaaggacgactaaggacggtacggagtcgttat

SEQ ID NO: 2853 - DNA, 3005 bp, Homo sapiens
  source 1..3005: mol_type = genomic DNA
accgccaccatggctgtcgccctcgactctcagatcgacgcgcccctggaggttgagggatgcctaataatgaaggtggaaaaggaccctgagtgggcatcagagcccattctggaaggatcggatagctctgagaccttccgcaaatgcttcaggcaattctgttatgaggatgtgactggaccccatgaagctttcagtaaactctgggaactttgctgccggtggctgaagccagaaatgcgttccaaggagcaaatacttgagctgctggtgattgagcagtttctcaccattttacccgagaagattcaggcttgggcacagaagcagtgtccgcaaagtggagaggaagcggtggccctggtagtgcatttggagaaagagactggaagactaagacagcaggtcagcagtcccgtgcaccgggagaagcactccccacttggagcagcgtgggaggtggcagacttccagccagagcaggtggagacccaacccagggcggtgtctcgggaggaacctggaagcctccactcaggacaccaggaacagctgaaccgaaagcgagaacgtcggcccttacccaagaatgctcggccttctccctgggttcctgcccttgctgatgaatggaataccctagatcaggaagtgacaaccacacggcttcctgctgggtcccaggaaccagtgaaagatgtccacgtggccagaggcttttcctacagaaagagtgtgcatcagattcctgcccaaagggacctctaccgggatttcaggaaggagaatgttgggaacgtggtctccctgggaagtgcagtgtctacatctaacaagataacccggttggaacagagaaaggagccatggactctaggtctgcattcctctaacaagagaagtatcctacgaagcaactacgtcaaggaaaagtcagttcatgctattcaggtccctgcaaggagtgcaggaaaaacatggagagagcagcagcagtggggtttagaagatgaaaagatagcaggtgtgcattggagctatgaggaaacaaagactttcctggcaattctcaaagagtctcgcttttatgaaacacttcaggcctgtccccgaaatagccaagtgtatggtgctgtggctgaatggttgcgagaatgtggcttccttagaaccccagaacagtgtcgaaccaagttcaaaagtctccagaaaagctatcgaaaggtgagaaatggccacatgctagaaccctgcgccttctttgaggacatggatgctttgttgaaccctgcagcccgtgctccgtccactgataaaccaaaggagatgatacctgtccccagactgaagagaattgccatcagtgctaaggaacacatcagcttggtggaggaggaggaagctgcagaagattctgatgatgatgaaataggcatcgaatttatccgcaagtctgaaatccatggtgcccctgtcttgtttcagaatctcagtggcgtgcactggggctatgaagaaaccaagacttttcttgatatcctccgtgagactcggttttatgaagcgcttcaagcctgtcatcggaagagcaaattgtatggggctgtagctgaacagcttcgagagtgcggcttcctccggacaccagaacagtgccgaaccaagttcaaaagccttcagaagagttaccgcaaggtgaaaaatggccacgtgctagagtcctgcgcgttctacaaggagatggatgccctgattaactctcgggcatctgctccttcccccagcaccccagaggaagtcccatcaccttcaaggcaagaaagagggggtattgaggttgaaccccaggaacctacaggctgggaacctgaagagacctcacaggaggcagtaatagaagactcttgcagtgagagaatgagcgaggaggaaattgtgcaagagccagagttccagggacctccaggtctactgcagagcccaaatgattttgaaatcggaagtagcatcaaggaggatccaacacagatagtatataaggacatggaacagcatagggcattaatagaaaagtctaaaagagttgtttcccagagtaccgaccccagcaaatatcgcaaaagggaatgcatctcaggaagacaatgggaaaatcttcaaggaattagacagggaaagccgatgtctcagcctagagatttagggaaagccgttgtgcatcagaggccttttgtggggaagagaccctacagacttctcaaatatggagaaagctttggaaggagcactcgtctgatgtgccggatgacccaccacaaggagaatccttacaagtgtggtgtctgtgggaagtgctttggtagaagcaggagcctgatcagacaccaaagaatccacacaggcgaaaaaccttttaaatgtcttgactgtggaaaaagctttaatgactcctcaaattttggtgcccaccagagaatccacacaggagagaaaccctacagatgcggagagtgtggaaaatgctttagtcagagctctagtcttattatacatcagagaacgcacaccggtgagaagccctatcagtgtggagagtgtgggaaaagtttcaccaacagttctcatttcagcgcccaccggagagttcacactggggagaatccctacaaatgtgtggactgtgaaaaaagtttcaataactgtacgagatttcgagaacatcggagaatacacactggagagaagccctatggatgtgcccagtgtggcaaacgtttcagtaagagttctgttcttaccaaacatcgggaagttcatgtgagagaaaagcctctgccacaccctccatctctgtattgccctgagaacccacataagggaaagactgatgaatttaggaaaactttttagtaatgaactagtccgtaacttgaaagtatttcgatttcttggctttatatatcttgtggaaaggacgatctgaactgacgtagcagaggttc

SEQ ID NO: 2854 - DNA, 2621 bp, Homo sapiens
  source 1..2621: mol_type = genomic DNA
accgccaccatgataatgaccgaatcccgagaagttatagacttagaccccccagctgagacttcccaggagcaggaagaccttttcatagtgaaggtggaagaagaagactgcacctggatgcaggagtacaacccgccaacgtttgagactttttaccagcgcttcaggcacttccagtaccatgaggcttcaggaccccgggaggctctcagccaactccgggtgctctgctgtgagtggctgaggcccgagctgcacacgaaggagcagatcctggagctgctggtgctggagcagttcctgaccatcctgcctgaagagttccagccctgggtgagggaacatcaccctgaaagtggagaagaggcggtggccgtgatagaaaatatacagcgagaacttgaggaacgcagacagcagattgttgcctgccctgatgtgcttcctcggaagatggcaacacctggagcagtgcaggagtcctgcagcccccatcccctgaccgtggacacccagcctgagcaagcgccacagaagcctcgtctcctggaggaaaatgcccttcctgttctccaagttccttcccttcccctgaaggacagccaggagctgacagcttcacttctctcaactgggtcccagaagttggtgaaaattgaagaggtggctgatgtggctgtatccttcatcctggaggaatgggggcatttggaccagtcccagaagtccctttatagggatgacaggaaggagaactatgggagtattacttccatgggttatgagtccagggacaatatggagctcatagtgaagcagatttctgatgactctgaatcacactgggtggcgccagaacacaccgaaaggagcgttcctcaggatccagactttgcagaagtcagtgaccttaaaggcatggtacaaaggtggcaggtcaaccccactgtggggaaatcaaggcagaatccttcccagaaaagggatctggatgcaatcacagacatcagccctaagcaaagcacacatggcgagagagggcacagatgcagcgattgtggcaaattcttcctccaagcctcaaactttattcagcatcggcgcatccacactggagaaaaaccgtttaagtgcggagaatgtgggaagagctacaatcagcgggtgcacctcacccagcaccagcgcgtccacacaggggagaaaccctacaaatgtcaggtgtgcggaaaggctttccgggtgagttcccacctggttcagcaccacagtgtccacagcggagagaggccctatggctgcaatgagtgtgggaagaacttcggtcgccattcgcatctgatcgaacacctaaaacgccacttcagggagaaatcccagagatgcagtgacaaaagaagtaagaacacaaaattaagtgttaagaagaaaatttcagaatattcagaagcagacatggaactatctggaaaaacccaaagaaatgtttctcaagttcaagattttggagaaggctgtgagtttcaaggcaagctggatagaaagcagggaattcccatgaaagagatactaggacaaccatcttcaaagaggatgaactacagtgaagtcccatatgtccacaaaaaatcctccactggagagagaccacataaatgtaacgagtgtgggaaaagcttcattcagagtgcacatcttattcaacatcaaagaatacacactggggagaaaccattcaggtgtgaggaatgtgggaaaagctacaaccaacgcgtgcacctaactcagcatcagcgcgtccacacaggtgagaagccctacacctgtcccttatgtgggaaagccttcagagtgaggtcccaccttgttcagcatcagagcgtgcacagtggggagagacccttcaagtgtaacgaatgtgggaaaggctttgggaggcgttcccacctggctggacatcttcgactccactcccgagagaaatcccatcagtgtcgtgaatgtggggaaatcttttttcagtacgttagcctaattgaacatcaggtgctccacatgggtcagaaaaatgaaaaaaatggcatctgtgaggaagcatatagttggaacttgacagtgattgaagacaagaagattgagttacaagagcagccttatcagtgtgatatctgtggaaaagcctttggttatagctcagacctcattcagcattacagaactcatacagcagagaagccctatcaatgtgatatatgtagagaaaatgttggccagtgttcccacaccaaacaacatcaaaaaatctactccagcacaaaatcccatcaatgtcatgaatgtggcagaggcttcactctgaagtcacatcttaatcaacatcagagaatccatactggtgagaaaccttttcaatgtaaagaatgtggaatgaatttcagctggagttgtagcctctttaaacacctgagaagccatgagaggacagatcccataaataccttaagtgtagaggggtctctgttgtagtaatgaactagtccgtaacttgaaagtatttcgatttcttggctttatatatcttgtggaaaggacgatgtacgtgcaatacgaaaggaatc

SEQ ID NO: 2855 - DNA, 2366 bp, Homo sapiens
  source 1..2366: mol_type = genomic DNA
accgccaccatgaccactgcaggcaggggaaatttaggcctcatccccaggagcactgctttccagaagcaagaggggcgcctgactgtgaagcaggagccagcaaaccagacctgggggcagggcagcagtctccagaagaactatcctcctgtctgcgaaatcttccggctacacttcaggcaattgtgttaccacgagatgtctgggccgcaggaagcattgagccggcttcgggagctctgccgctggtggctcatgccagaggtgcacaccaaggagcagatcctggagctgctggtgcttgagcagttcctgagcatcctccctggggagctccggacctgggtgcagctgcatcaccctgagagtggtgaggaggctgtggctgtggtggaggatttccagagacacctcagtggatcagaggaggtttcagccccagcacagaaacaggaaatgcattttgaggagacaacagctctgggtacaacaaaggaatctcctcctacctcacccctcagtgggggctcagcccctggagcccacctggagcctccttatgacccagggacacaccacctccccagtggggacttcgctcaatgtacttctccagttcctacccttcctcaagtggggaactcaggagaccaagcaggggcaactgtacttcggatggtcaggccccaggatactgtggcatatgaggacctatctgtagactacactcagaagaaatggaaaagtctcacactcagtcagagagccctgcagtggaacatgatgccagaaaatcaccatagcatggcctccttggcaggtgagaacatgatgaagggttcagagttgactccaaagcaggaattttttaaaggatcagagtcatctaacaggacatcagggggactctttggggtggttcctggggcagcagagactggagatgtttgtgaagatactttcaaggagttagaaggacaaacctcagatgaagaagggagcagactagaaaatgatttcttggaaataacagatgaagataagaaaaaatccacaaaagacagatatgacaaatataaggaagttggggaacatccacctctgtcttccagtcctgttgaacatgaaggagttttaaagggacagaaatcctatcgatgtgatgaatgtggcaaagctttcaatcggagttctcaccttattggccatcagagaatccacactggagagaaaccctatgagtgtaatgagtgtgggaagaccttcaggcaaacctcccagctcattgttcatctcagaacccacacaggggaaaaaccctatgaatgcagtgagtgtggaaaggcctataggcacagctcccatctcattcaacaccagagactccataatggggagaaaccctataaatgtaatgaatgtgcaaaagcctttactcagagttcccgactcactgaccaccagagaacccatactggggagaaaccttatgaatgcaatgagtgtggagaggcattcattcgaagcaaaagtcttgctcgacatcaggtcctgcacactggtaagaaaccttacaaatgcaatgagtgtgggagagcattctgttccaatagaaatctcattgaccatcagagaatccacactggggagaagccttatgagtgtagtgaatgtggcaaagccttcagtcggagtaaatgtcttattcgacatcagagcctccatactggggaaaagccatacaaatgtagtgaatgtgggaaagccttcaatcagaactctcaactcattgagcatgagcgaattcatactggagaaaaaccttttgaatgtagcgagtgtggtaaggcatttggtctgagtaaatgtcttattcggcaccagagacttcacacgggtgaaaagccctataaatgcaatgagtgtggaaaatccttcaatcaaaactcacaccttattatacaccagagaattcacactggtgagaaaccctatgaatgtaatgagtgtgggaaggtattcagttatagctccagccttatggtacatcagagaacccatactggggaaaaaccctataaatgcaatgattgtgggaaagcttttagtgacagctcacagcttattgtacaccagagagtccacaccggagagaaaccttatgaatgtagtgaatgtgggaaagcctttagtcagcgttccacttttaatcaccaccagcgaactcacactggagagaagtcctcaggtctggcttggtcagtttcttagtaatgaactagtccgtaacttgaaagtatttcgatttcttggctttatatatcttgtggaaaggacgacgttcccgtaagaatgacaacaag

SEQ ID NO: 2856 - DNA, 1223 bp, Homo sapiens
  source 1..1223: mol_type = genomic DNA
accgccaccatgcattttgaggagacaacagctctgggtacaacaaaggaatctcctcctacctcacccctcagtgggggctcagcccctggagcccacctggagcctccttatgacccagggacacaccacctccccagtggggacttcgctcaatgtacttctccagttcctacccttcctcaagtggggaactcaggagaccaagcaggggcaactgtacttcggatggtcaggccccaggatactgtggcatatgaggacctatctgtagactacactcagaagaaatggaaaagtctcacactcagtcagagagccctgcagtggaacatgatgccagaaaatcaccatagcatggcctccttgggtgagaacatgatgaagggttcagagttgactccaaagcaggaattttttaaaggatcagagtcatctaacaggacatcagggggactctttggggtggttcctggggcagcagagactggagatgtttgtgaagatactttcaaggagttagaaggacaaacctcagatgaagaagggagcagactagaaaatgatttcttggaaataacagatgaagataagaaaaaatccacaaaagacagatatgacaaatataaggaagttggggaacatccacctctgtcttccagtcctgttgaacatgaaggagttttaaagggacagaaatcctatcgatgtgatgaatgtggcaaagctttcaatcggagttctcaccttattggccatcagagaatccacactggagagaaaccctatgagtgtaatgagtgtgggaagaccttcaggcaaacctcccagctcattgttcatctcagaacccacacaggggaaaaaccctatgaatgcagtgagtgtggaaaggcctataggcacagctcccatctcattcaacaccagagactccataatggggagaaaccctataaatgtaatgaatgtgcaaaagcctttactcagagttcccgactcactgaccaccagagaacccatactggggagaaaccttatgaatgcaatgagtgtggagaggcattcattcgaagcaaaagtcttgctcgacatcaggtcctgcacactggctggagtacaatggcgtagtaatgaactagtccgtaacttgaaagtatttcgatttcttggctttatatatcttgtggaaaggacgactcgtaaccacagcgagcttatat

SEQ ID NO: 2857 - DNA, 932 bp, Homo sapiens
  source 1..932: mol_type = genomic DNA
accgccaccatgaccactgcaggcaggggaaatttaggcctcatccccaggagcactgctttccagaagcaagaggggcgcctgactgtgaagcaggagccagcaaaccagacctgggggcagggcagcagtctccagaagaactatcctcctgtctgcgaaatcttccggctacacttcaggcaattgtgttaccacgagatgtctgggccgcaggaagcattgagccggcttcgggagctctgccgctggtggctcatgccagaggtgcacaccaaggagcagatcctggagctgctggtgcttgagcagttcctgagcatcctccctggggagctccggacctgggtgcagctgcatcaccctgagagtggtgaggaggctgtggctgtggtggaggatttccagagacacctcagtggatcagaggaggtttcagccccagcacagaaacaggaaatgcattttgaggagacaacagctctgggtacaacaaaggaatctcctcctacctcacccctcagtgggggctcagcccctggagcccacctggagcctccttatgacccagggacacaccacctccccagtggggacttcgctcaatgtacttctccagttcctacccttcctcaagtggggaactcaggagaccaagcaggggcaactgtacttcggatggtcaggccccaggatactgtggcatatgaggacctatctgtagactacactcagaagaaatggaaaagtctcacactcagtcagagagccctgcagtggaacatgatgccagaaaatcaccatagcatggcctccttgggctggagtacaatggcgtagtaatgaactagtccgtaacttgaaagtatttcgatttcttggctttatatatcttgtggaaaggacgaccgaaagccaatgaagctttaggt

SEQ ID NO: 2858 - DNA, 4814 bp, Homo sapiens
  source 1..4814: mol_type = genomic DNA
accgccaccatggaaccggggtgtgacgagttcctgccgccaccggagtgcccggtttttgagcctagctgggctgaattccaagacccgcttggctacattgcgaaaataaggcccatagcagagaagtctggcatctgcaaaatccgcccacccgcggattggcagcctccttttgcagtagaagttgacaatttcagatttactcctcgcgtccaaaggctaaatgaactggaggcccaaactagagtgaaattgaactatttggatcagattgcaaaattctgggaaattcaaggctcctctttaaagattcccaatgtggagcggaagatcttggacctctacagccttagtaagattgtgattgaggaaggtggctatgaagccatctgcaaggatcgtcggtgggctcgagttgcccagcgtctccactacccaccaggcaaaaacattggctccctgctacgatcacattacgaacgcattatttacccctatgaaatgtttcagtctggagccaaccatgtgcaatgtaacacacacccgtttgacaatgaggtaaaagataaggaatacaagccccacagcatcccccttagacagtctgtgcagccttcaaagttcagcagctacagtcgacgggcaaaaaggctacagcctgatccagagcctacagaggaggacattgagaagcatccagagctaaagaagttacagatatatgggccaggtcccaaaatgatgggcttgggccttatggctaaggataaggataagactgtgcataagaaagtcacatgccccccaactgttacggtgaaggatgagcaaagtggaggtgggaacgtgtcatcaacattgctcaagcagcacttgagcctagagccctgcactaagacaaccatgcaacttcgaaagaatcacagcagtgcccagtttattgactcatatatttgccaagtatgctcccgtggggatgaagatgataagcttcttttctgtgatggctgtgatgacaattaccacatcttctgcttgttaccaccccttcctgaaatccccagaggcatctggaggtgcccaaaatgtatcttggcggagtgtaaacagcctcctgaagcttttggatttgaacaggctacccaggagtacagtttgcagagttttggtgaaatggctgattccttcaagtccgactacttcaacatgcctgtacatatggtgcctacagaacttgtagagaaggaattctggaggctggtgagcagcattgaggaagacgtgacagttgaatatggagctgatattcattccaaagaatttggcagtggctttcctgtcagcaatagcaaacaaaacttatctcctgaggagaagagacaaagtctcactgtgttgaccaggctgatctcaagcttctgggctcaagcagtcctcccaccttggcctcccaaagtgttgggattacaggagtatgcgaccagtggttggaacctgaatgtgatgccagtgctagatcagtctgttctctgtcacatcaatgcagacatctcaggcatgaaggtgccctggctgtacgtgggcatggttttctcagcattttgttggcatattgaggatcactggagttactctattaactatctgcattggggtgagccgaagacctggtatggtgtaccctccctggcagcagagcatttggaggaggtgatgaagatgctgacacctgagctgtttgatagccagcctgatctcctacaccagcttgtcactctcatgaatcccaacactttgatgtcccatggtgtgccagttgtccgcacaaaccagtgtgcaggggagtttgtcatcacttttcctcgtgcttaccacagtggttttaaccaaggctacaattttgctgaagctgtcaacttttgtactgctgactggctacctgctggacgccagtgcattgaacactaccgccggctccggcgctattgtgtcttctcccacgaggagctcatctgcaagatggctgccttcccagagacgttggatctcaatctagcagtagctgtgcacaaggagatgttcattatggttcaggaggagcgacgtctacgaaaggcccttttggagaagggcgtcacggaggctgagcgagaggcttttgagctgctcccagatgatgaacgccagtgcatcaagtgcaagaccacgtgcttcttgtcagccctggcctgctacgactgcccagatggccttgtatgcctttcccacatcaatgacctctgcaagtgctctagtagccgacagtacctccggtatcggtacaccttggatgagctccccaccatgctgcataaactgaagattcgggctgagtcttttgacacctgggccaacaaagtgcgagtggccttggaggtggaggatggccgtaaacgcagctttgaagagctaagggcactggagtctgaggctcgtgagaggaggtttcctaatagtgagctgcttcagcgactgaagaactgcctgagtgaggtggaggcttgtattgctcaagtcctggggctggtcagtggtcaggtggccaggatggacactccacagctgaccttgactgaactccgggtccttcttgagcagatgggcagcctgccctgtgccatgcatcagattggggatgtcaaggatgtcctggaacaggtggaggcctatcaagctgaggctcgtgaggctctggccacactgccctctagtccagggctattgcggtccctgttggagagggggcagcagctgggtgtagaggtgcctgaagcccatcagcttcagcagcaggtggagcaggcgcaatggctagatgaagtgaagcaggccctggccccttctgctcacaggggctctctggtcatcatgcaggggcttttggttatgggtgccaagatagcctccagcccttctgtggacaaggcccgggctgagctgcaagaactactgaccattgcagagcgctgggaagaaaaggctcatttctgcctggaggccaggcagaagcatccaccagccacattggaagccataattcgtgagacagaaaacatccctgttcacctgcctaacatccaggctctcaaagaagctctgactaaggcacaagcttggattgctgatgtggatgagatccaaaatggtgaccactacccctgtctagatgacttggagggcctggtggctgtgggccgggacctgcctgtggggctggaagagctgagacagctagagctgcaggtattgacagcacattcctggagagagaaggcctccaagacctttctcaagaagaattcttgctacacactgcttgaggtgctttgcccgtgtgcagacgctggctcagacagcaccaagcgtagccggtggatggagaaggcgctggggttgtaccagtgtgacacagagctgctggggctgtctgcacaggacctcagagacccaggctctgtgattgtggccttcaaggaaggggaacagaaggagaaggagggtatcctgcagctgcgtcgcaccaactcagccaagcccagtccactggcaccatccctcatggcctcttctccgacttctatctgtgtgtgtgggcaggtgccagctggggtgggagttctgcagtgtgacctgtgtcaggactggttccatgggcagtgtgtgtcagtgccccatctcctcacctctccaaagcccagtctcacttcatctccactgctagcctggtgggaatgggacacaaaattcctgtgtccactgtgtatgcgctcacgacggccacgcctagagacaatcctagccttgctggttgccctgcagaggctgcccgtgcggctgcctgagggtgaggcccttcagtgtctcacagagagggccattggctggcaagaccgtgccagaaaggctctggcctctgaagatgtgactgctctgttgcgacagctggctgagcttcgccaacagctacaggccaaacccagaccagaggaggcctcagtctacacttcagccactgcctgtgaccctatcagagaaggcagtggcaacaatatttctaaggtccaagggctgctggagaatggagacagtgtgaccagtcctgagaacatggctccaggaaagggctctgacctggagctactgtcctcactgttgccgcagttgactggccctgtgttggagctgcctgaggcaatccgggctcccctggaggagctcatgatggaaggggacctgcttgaggtgaccctggatgagaaccacagcatctggcagctgctgcaggctggacagcctccagacctggacagaattcgcacacttctggagctggaaaaatttgaacatcaagggagtcggacaaggagccgggctctggagaggcgacggcggcggcagaaggtggatcagggtagaaacgttgagaatcttgttcaacaggagcttcagtcaaaaagggctcggagctcagggattatgtctcaggtgggccgagaagaagaacattatcaggagaaagcagaccgtgaaaatatgttcctgacaccttccacagaccacagccctttcttgaaaggaaaccaaaatagcttacaacacaaggattcaggctcttcagctgcttgtccttctttaatgcctttgctacaactctcctactctgatgagcaacagttgtagtaatgaactagtccgtaacttgaaagtatttcgatttcttggctttatatatcttgtggaaaggacgaatatggagtgaagtttagctcaat

SEQ ID NO: 2859 - DNA, 4550 bp, Homo sapiens
  source 1..4550: mol_type = genomic DNA
accgccaccatggaaccggggtgtgacgagttcctgccgccaccggagtgcccggtttttgagcctagctgggctgaattccaagacccgcttggctacattgcgaaaataaggcccatagcagagaagtctggcatctgcaaaatccgcccacccgcggattggcagcctccttttgcagtagaagttgacaatttcagatttactcctcgcgtccaaaggctaaatgaactggaggcccaaactagagtgaaattgaactatttggatcagattgcaaaattctgggaaattcaaggctcctctttaaagattcccaatgtggagcggaagatcttggacctctacagccttagtaagcaatgtaacacacacccgtttgacaatgaggtaaaagataaggaatacaagccccacagcatcccccttagacagtctgtgcagccttcaaagttcagcagctacagtcgacgggcaaaaaggctacagcctgatccagagcctacagaggaggacattgagaagcatccagagctaaagaagttacagatatatgggccaggtcccaaaatgatgggcttgggccttatggctaaggataaggataagactgtgcataagaaagtcacatgccccccaactgttacggtgaaggatgagcaaagtggaggtgggaacgtgtcatcaacattgctcaagcagcacttgagcctagagccctgcactaagacaaccatgcaacttcgaaagaatcacagcagtgcccagtttattgactcatatatttgccaagtatgctcccgtggggatgaagatgataagcttcttttctgtgatggctgtgatgacaattaccacatcttctgcttgttaccaccccttcctgaaatccccagaggcatctggaggtgcccaaaatgtatcttggcggagtgtaaacagcctcctgaagcttttggatttgaacaggctacccaggagtacagtttgcagagttttggtgaaatggctgattccttcaagtccgactacttcaacatgcctgtacatatggtgcctacagaacttgtagagaaggaattctggaggctggtgagcagcattgaggaagacgtgacagttgaatatggagctgatattcattccaaagaatttggcagtggctttcctgtcagcaatagcaaacaaaacttatctcctgaggagaaggagtatgcgaccagtggttggaacctgaatgtgatgccagtgctagatcagtctgttctctgtcacatcaatgcagacatctcaggcatgaaggtgccctggctgtacgtgggcatggttttctcagcattttgttggcatattgaggatcactggagttactctattaactatctgcattggggtgagccgaagacctggtatggtgtaccctccctggcagcagagcatttggaggaggtgatgaagatgctgacacctgagctgtttgatagccagcctgatctcctacaccagcttgtcactctcatgaatcccaacactttgatgtcccatggtgtgccagttgtccgcacaaaccagtgtgcaggggagtttgtcatcacttttcctcgtgcttaccacagtggttttaaccaaggctacaattttgctgaagctgtcaacttttgtactgctgactggctacctgctggacgccagtgcattgaacactaccgccggctccggcgctattgtgtcttctcccacgaggagctcatctgcaagatggctgccttcccagagacgttggatctcaatctagcagtagctgtgcacaaggagatgttcattatggttcaggaggagcgacgtctacgaaaggcccttttggagaagggcgtcacggaggctgagcgagaggcttttgagctgctcccagatgatgaacgccagtgcatcaagtgcaagaccacgtgcttcttgtcagccctggcctgctacgactgcccagatggccttgtatgcctttcccacatcaatgacctctgcaagtgctctagtagccgacagtacctccggtatcggtacaccttggatgagctccccaccatgctgcataaactgaagattcgggctgagtcttttgacacctgggccaacaaagtgcgagtggccttggaggtggaggatggccgtaaacgcagctttgaagagctaagggcactggagtctgaggctcgtgagaggaggtttcctaatagtgagctgcttcagcgactgaagaactgcctgagtgaggtggaggcttgtattgctcaagtcctggggctggtcagtggtcaggtggccaggatggacactccacagctgaccttgactgaactccgggtccttcttgagcagatgggcagcctgccctgtgccatgcatcagattggggatgtcaaggatgtcctggaacaggtggaggcctatcaagctgaggctcgtgaggctctggccacactgccctctagtccagggctattgcggtccctgttggagagggggcagcagctgggtgtagaggtgcctgaagcccatcagcttcagcagcaggtggagcaggcgcaatggctagatgaagtgaagcaggccctggccccttctgctcacaggggctctctggtcatcatgcaggggcttttggttatgggtgccaagatagcctccagcccttctgtggacaaggcccgggctgagctgcaagaactactgaccattgcagagcgctgggaagaaaaggctcatttctgcctggaggccaggcagaagcatccaccagccacattggaagccataattcgtgagacagaaaacatccctgttcacctgcctaacatccaggctctcaaagaagctctgactaaggcacaagcttggattgctgatgtggatgagatccaaaatggtgaccactacccctgtctagatgacttggagggcctggtggctgtgggccgggacctgcctgtggggctggaagagctgagacagctagagctgcaggtattgacagcacattcctggagagagaaggcctccaagacctttctcaagaagaattcttgctacacactgcttgaggtgctttgcccgtgtgcagacgctggctcagacagcaccaagcgtagccggtggatggagaaggcgctggggttgtaccagtgtgacacagagctgctggggctgtctgcacaggacctcagagacccaggctctgtgattgtggccttcaaggaaggggaacagaaggagaaggagggtatcctgcagctgcgtcgcaccaactcagccaagcccagtccactggcaccatccctcatggcctcttctccgacttctatctgtgtgtgtgggcaggtgccagctggggtgggagttctgcagtgtgacctgtgtcaggactggttccatgggcagtgtgtgtcagtgccccatctcctcacctctccaaagcccagtctcacttcatctccactgctagcctggtgggaatgggacacaaaattcctgtgtccactgtgtatgcgctcacgacggccacgcctagagacaatcctagccttgctggttgccctgcagaggctgcccgtgcggctgcctgagggtgaggcccttcagtgtctcacagagagggccattggctggcaagaccgtgccagaaaggctctggcctctgaagatgtgactgctctgttgcgacagctggctgagcttcgccaacagctacaggccaaacccagaccagaggaggcctcagtctacacttcagccactgcctgtgaccctatcagagaaggcagtggcaacaatatttctaaggtccaagggctgctggagaatggagacagtgtgaccagtcctgagaacatggctccaggaaagggctctgacctggagctactgtcctcactgttgccgcagttgactggccctgtgttggagctgcctgaggcaatccgggctcccctggaggagctcatgatggaaggggacctgcttgaggtgaccctggatgagaaccacagcatctggcagctgctgcaggctggacagcctccagacctggacagaattcgcacacttctggagctggaaaaatttgaacatcaagggagtcggacaaggagccgggctctggagaggcgacggcggcggcagaaggtggatcagggtagaaacgttgagaatcttgttcaacaggagcttcagtcaaaaagggctcggagctcagggattatgtctcaggtgggccgagaagaagaacattatcaggagaaagcagaccgtgaaaatatgttcctgacaccttccacagaccacagccctttcttgaaaggaaaccaaaatagcttacaacacaaggattcaggctcttcagctgcttgtccttctttaatgcctttgctacaactctcctactctgatgagcaacagttgtagtaatgaactagtccgtaacttgaaagtatttcgatttcttggctttatatatcttgtggaaaggacgaatgtcgattgttcataacagatcg

SEQ ID NO: 2860 - DNA, 4721 bp, Homo sapiens
  source 1..4721: mol_type = genomic DNA
accgccaccatggaaccggggtgtgacgagttcctgccgccaccggagtgcccggtttttgagcctagctgggctgaattccaagacccgcttggctacattgcgaaaataaggcccatagcagagaagtctggcatctgcaaaatccgcccacccgcggattggcagcctccttttgcagtagaagttgacaatttcagatttactcctcgcgtccaaaggctaaatgaactggaggcccaaactagagtgaaattgaactatttggatcagattgcaaaattctgggaaattcaaggctcctctttaaagattcccaatgtggagcggaagatcttggacctctacagccttagtaagattgtgattgaggaaggtggctatgaagccatctgcaaggatcgtcggtgggctcgagttgcccagcgtctccactacccaccaggcaaaaacattggctccctgctacgatcacattacgaacgcattatttacccctatgaaatgtttcagtctggagccaaccatgtgcaatgtaacacacacccgtttgacaatgaggtaaaagataaggaatacaagccccacagcatcccccttagacagtctgtgcagccttcaaagttcagcagctacagtcgacgggcaaaaaggctacagcctgatccagagcctacagaggaggacattgagaagcatccagagctaaagaagttacagatatatgggccaggtcccaaaatgatgggcttgggccttatggctaaggataaggataagactgtgcataagaaagtcacatgccccccaactgttacggtgaaggatgagcaaagtggaggtgggaacgtgtcatcaacattgctcaagcagcacttgagcctagagccctgcactaagacaaccatgcaacttcgaaagaatcacagcagtgcccagtttattgactcatatatttgccaagtatgctcccgtggggatgaagatgataagcttcttttctgtgatggctgtgatgacaattaccacatcttctgcttgttaccaccccttcctgaaatccccagaggcatctggaggtgcccaaaatgtatcttggcggagtgtaaacagcctcctgaagcttttggatttgaacaggctacccaggagtacagtttgcagagttttggtgaaatggctgattccttcaagtccgactacttcaacatgcctgtacatatggtgcctacagaacttgtagagaaggaattctggaggctggtgagcagcattgaggaagacgtgacagttgaatatggagctgatattcattccaaagaatttggcagtggctttcctgtcagcaatagcaaacaaaacttatctcctgaggagaaggagtatgcgaccagtggttggaacctgaatgtgatgccagtgctagatcagtctgttctctgtcacatcaatgcagacatctcaggcatgaaggtgccctggctgtacgtgggcatggttttctcagcattttgttggcatattgaggatcactggagttactctattaactatctgcattggggtgagccgaagacctggtatggtgtaccctccctggcagcagagcatttggaggaggtgatgaagatgctgacacctgagctgtttgatagccagcctgatctcctacaccagcttgtcactctcatgaatcccaacactttgatgtcccatggtgtgccagttgtccgcacaaaccagtgtgcaggggagtttgtcatcacttttcctcgtgcttaccacagtggttttaaccaaggctacaattttgctgaagctgtcaacttttgtactgctgactggctacctgctggacgccagtgcattgaacactaccgccggctccggcgctattgtgtcttctcccacgaggagctcatctgcaagatggctgccttcccagagacgttggatctcaatctagcagtagctgtgcacaaggagatgttcattatggttcaggaggagcgacgtctacgaaaggcccttttggagaagggcgtcacggaggctgagcgagaggcttttgagctgctcccagatgatgaacgccagtgcatcaagtgcaagaccacgtgcttcttgtcagccctggcctgctacgactgcccagatggccttgtatgcctttcccacatcaatgacctctgcaagtgctctagtagccgacagtacctccggtatcggtacaccttggatgagctccccaccatgctgcataaactgaagattcgggctgagtcttttgacacctgggccaacaaagtgcgagtggccttggaggtggaggatggccgtaaacgcagctttgaagagctaagggcactggagtctgaggctcgtgagaggaggtttcctaatagtgagctgcttcagcgactgaagaactgcctgagtgaggtggaggcttgtattgctcaagtcctggggctggtcagtggtcaggtggccaggatggacactccacagctgaccttgactgaactccgggtccttcttgagcagatgggcagcctgccctgtgccatgcatcagattggggatgtcaaggatgtcctggaacaggtggaggcctatcaagctgaggctcgtgaggctctggccacactgccctctagtccagggctattgcggtccctgttggagagggggcagcagctgggtgtagaggtgcctgaagcccatcagcttcagcagcaggtggagcaggcgcaatggctagatgaagtgaagcaggccctggccccttctgctcacaggggctctctggtcatcatgcaggggcttttggttatgggtgccaagatagcctccagcccttctgtggacaaggcccgggctgagctgcaagaactactgaccattgcagagcgctgggaagaaaaggctcatttctgcctggaggccaggcagaagcatccaccagccacattggaagccataattcgtgagacagaaaacatccctgttcacctgcctaacatccaggctctcaaagaagctctgactaaggcacaagcttggattgctgatgtggatgagatccaaaatggtgaccactacccctgtctagatgacttggagggcctggtggctgtgggccgggacctgcctgtggggctggaagagctgagacagctagagctgcaggtattgacagcacattcctggagagagaaggcctccaagacctttctcaagaagaattcttgctacacactgcttgaggtgctttgcccgtgtgcagacgctggctcagacagcaccaagcgtagccggtggatggagaaggcgctggggttgtaccagtgtgacacagagctgctggggctgtctgcacaggacctcagagacccaggctctgtgattgtggccttcaaggaaggggaacagaaggagaaggagggtatcctgcagctgcgtcgcaccaactcagccaagcccagtccactggcaccatccctcatggcctcttctccgacttctatctgtgtgtgtgggcaggtgccagctggggtgggagttctgcagtgtgacctgtgtcaggactggttccatgggcagtgtgtgtcagtgccccatctcctcacctctccaaagcccagtctcacttcatctccactgctagcctggtgggaatgggacacaaaattcctgtgtccactgtgtatgcgctcacgacggccacgcctagagacaatcctagccttgctggttgccctgcagaggctgcccgtgcggctgcctgagggtgaggcccttcagtgtctcacagagagggccattggctggcaagaccgtgccagaaaggctctggcctctgaagatgtgactgctctgttgcgacagctggctgagcttcgccaacagctacaggccaaacccagaccagaggaggcctcagtctacacttcagccactgcctgtgaccctatcagagaaggcagtggcaacaatatttctaaggtccaagggctgctggagaatggagacagtgtgaccagtcctgagaacatggctccaggaaagggctctgacctggagctactgtcctcactgttgccgcagttgactggccctgtgttggagctgcctgaggcaatccgggctcccctggaggagctcatgatggaaggggacctgcttgaggtgaccctggatgagaaccacagcatctggcagctgctgcaggctggacagcctccagacctggacagaattcgcacacttctggagctggaaaaatttgaacatcaagggagtcggacaaggagccgggctctggagaggcgacggcggcggcagaaggtggatcagggtagaaacgttgagaatcttgttcaacaggagcttcagtcaaaaagggctcggagctcagggattatgtctcaggtgggccgagaagaagaacattatcaggagaaagcagaccgtgaaaatatgttcctgacaccttccacagaccacagccctttcttgaaaggaaaccaaaatagcttacaacacaaggattcaggctcttcagctgcttgtccttctttaatgcctttgctacaactctcctactctgatgagcaacagttgtagtaatgaactagtccgtaacttgaaagtatttcgatttcttggctttatatatcttgtggaaaggacgatttgagactcatattggattaatt

SEQ ID NO: 2861 - DNA, 5174 bp, Homo sapiens
  source 1..5174: mol_type = genomic DNA
accgccaccatggcgggcgtggggccggggggctacgcggcggagttcgtgccaccgccagagtgccccgtctttgagccgagttgggaggagttcacagatccgctcagctttatcggccgcatccggcctttggcggagaaaaccggcatctgcaaaattcggccgcccaaggactggcagcctccatttgcctgtgaagtaaaaagctttcgtttcactccaagagtccagcgcctgaatgaacttgaggcaatgaccagagtgagattggatttcttggatcaactagcaaaattttgggaacttcaaggatctactctgaagatccctgtggtagagagaaaaatcctggatctgtatgctttgagcaagattgttgccagcaaaggaggttttgaaatggtcaccaaagagaagaaatggtctaaagtgggtagtcgcttgggatatctgccaggaaaaggaactgggtctcttttgaagtcacattatgaaagaattctctacccatatgagcttttccagtctggtgtgagccttatgggtgtgcagatgcctaatttagatcttaaagaaaaagtggagcctgaggttctcagcactgatacccaaacttccccagagccaggcacaaggatgaacattctgccgaagagaacaagacgtgtgaagactcagtcagaatctggagatgtgagtagaaacacggaactgaagaaacttcagatttttggggctgggcccaaggttgtgggcttggcaatgggaacaaaagataaagaagatgaggtcacccgaagacgaaaagttaccaacaggtcagacgcatttaacatgcaaatgagacaacggaaaggcactctctctgttaactttgttgatctctatgtttgtatgttttgtggtcggggaaacaatgaagataaattgcttttgtgtgatggatgtgatgacagctatcatacattttgtctaattcctccactacctgatgtgcccaaaggagactggaggtgtcctaaatgtgtcgccgaggaatgtagcaaacctcgagaagcctttggatttgaacaagctgtacgagagtatacacttcagagctttggagagatggcagataattttaagtctgattattttaatatgccagtccatatggttcccacagaactagtagaaaaggaattttggcggctggtaagcagcattgaagaagatgttattgtggaatatggagcagatatctcctcaaaagactttggaagtggatttccggtgaaggatgggcggagaaagattctgccagaagaagaggaatatgcactttctggttggaatttgaataacatgcctgtcctggaacagtctgttcttgcacatattaatgtggacatctctggtatgaaagtgccgtggctctatgtgggaatgtgcttctcttctttttgctggcacattgaggatcactggagttattccatcaactacttgcactggggggagccaaagacatggtatggtgtgccatctcatgctgcagagcaactggaggaggtgatgagagagctggcccccgagttatttgaatcccagcctgatcttctgcatcagttagttaccatcatgaaccccaacgtgctaatggagcatggtgtgcctgtgtacaggaccaatcagtgtgctggcgagtttgttgtgacatttcctcgtgcctatcactctggatttaaccagggctacaactttgctgaagctgtgaacttctgtactgctgactggttgcccattggacgtcaatgtgtaaatcattaccgacgcctaaggcgccactgtgtcttttcacacgaggaactaattttcaagatggcagcagatccagaatgcttagatgtggggctggctgccatggtctgcaaagaattgactctcatgactgaagaagaaacacgattaagagagtctgttgtacagatgggtgtcctgatgtcagaagaagaagtgtttgaacttgttcctgatgatgagcggcagtgttcagcatgcagaaccacatgttttctctctgctctcacatgttcctgtaatcctgagcggcttgtatgtctctaccatccaactgatctgtgcccctgccccatgcagaagaaatgtcttagatatcgctacccattagaagacctcccttctctgctatatggtgtaaaagtcagggcacagtcctatgacacttgggtcagtcgtgttacagaagcattgtctgctaacttcaaccacaaaaaagatttgattgaattgcgagtaatgctggaagatgctgaggataggaaatacccagagaatgatctctttcgaaaactcagggatgctgtaaaagaagctgagacctgtgcttctgtggctcagctgcttctgagcaaaaagcagaaacacagacagagcccagatagtgggaggactcggaccaaactgacagtggaagaattgaaggcctttgtccaacaactttttagtcttccgtgtgtcatcagccaagctcggcaagtaaagaatctgctagatgatgtggaagagtttcatgaacgtgctcaggaggccatgatggatgaaaccccagattcttccaaactccagatgttgatagatatgggctctagtctctatgtggaactccctgaattaccacgactgaagcaagagctacaacaggctcggtggttggacgaagtaagactgaccttatcagatccgcaacaagtcactttggatgtcatgaagaagctgatagactctggggtagggttggcaccccaccatgctgtggagaaagcaatggctgaactacaggagctccttacagtctctgaacgatgggaagaaaaggctaaggtctgcctacaggcaagaccgaggcacagtgtggcaagtttagaaagcattgtgaatgaagccaagaacattccagcctttctacccaatgtgttgtccttgaaagaagccttacaaaaggctcgagaatggaccgctaaagtggaagctattcagagtggcagcaattacgcttatttggagcagcttgagagcttgtctgcgaaaggacgccctattcctgtgcgtcttgaagcactgccgcaagtggaatcacaggtagcagcagcacgggcatggagagaacggactgggcggacgtttcttaagaagaattctagccatacattgttacaggtgctgagcccccggaccgacattggtgtatatgggagtggcaaaaataggaggaaaaaagtaaaagaactaatagaaaaagaaaaagaaaaggatctggacctggagcctctgagtgatctggaggaaggattggaggaaaccagagatacagccatggtggtggcagttttcaaagaacgggagcaaaaagagattgaagccatgcattctctcagagcagccaacctagccaagatgacaatggtggaccgcatagaagaagtaaaattttgcatttgccgcaagacagccagtgggtttatgctacagtgtgagctctgcaaagactggttccataacagctgtgttcctcttcctaaatcaagttcccaaaaaaaaggatccagctggcaagctaaagaagtaaaattcctttgccctctttgtatgcggtctcgaaggcccaggctagagactattctgtcactcctggtatcccttcagaagttgcccgtacggttgcctgaaggagaggccctgcagtgtttgacagaacgtgctatgagttggcaagatagagcgcggcaggctctagccacagatgaactatcctctgccctggccaaactatctgtgttgagccagcgtatggtggaacaggcggctcgagaaaaaactgaaaagatcatcagtgcagaactccaaaaagcagctgccaatccagacttacagggacacttacctagtttccagcagtctgcttttaaccgggtggtgagcagtgtgtcatcttctcctcgacaaacaatggactatgatgatgaagaaacagactctgatgaagacattcgagagacatatggctacgacatgaaggacacagccagtgtgaagtcctctagtagtcttgaacccaatcttttttgtgatgaagagattcccatcaaatccgaggaggtggtgacccacatgtggacagcaccttcattttgtgcagagcatgcttattcttctgcttctaagagttgttctcaaggttctagcaccccaaggaaacaacctcggaagagccctttggtgccccgaagtttggaacctccagtgctggagttgtcacctggagctaaggcacaactggaagaacttatgatggttggagatctcctggaagtatctctggacgagactcaacacatatggcggattttgcaggccacacacccaccctctgaagacagattcttgcatatcatggaggatgacagcatggaagagaaaccactaaaagtgaaaggaaaggactcttcagagaagaaacggaaacggaagctagaaaaggtagagcaactttttggagaaggaaaacagaagtccaaggagttaaagaaaatggacaaacctagaaagaagaaattaaaattaggtgcagacaaatcaaaggagctgaataaactggccaagaaactagcaaaagaagaagagagaaagaaaaagaaggagaaggctgctgcagccaaagttgaacttgtgaaagagagcactgaaaagaaaagagagaaaaaggtgctggacatcccctcaaagtatgactggtcaggagcagaggagtctgatgatgagaatgctgtgtgcgcagcacagaactgccaaaggccctgcaaggacaaggtagactgggtacaatgtgatggtggctgtgatgagtggtttcatcaagtttgtgtgggtgtatctccagaaatggctgaaaatgaagattacatctgtataaactgtgcaaagaagcaggggccagttagcccaggtccagcaccacctccttccttcataatgagctacaaactaccaatggaggatcttaaagagaccagttagtaatgaactagtccgtaacttgaaagtatttcgatttcttggctttatatatcttgtggaaaggacgaagccggcacgacactcctggaggc

SEQ ID NO: 2862 - DNA, 4844 bp, Homo sapiens
  source 1..4844: mol_type = genomic DNA
accgccaccatggaggcggccaccacactgcacccaggcccgcgcccggcgctgcccctcgggggcccgggcccgctgggcgagttcctgcctccacccgagtgcccggtcttcgaacccagctgggaagagttcgcggaccccttcgctttcatccacaagatccggcccatagccgagcagactggcatctgtaaggtgcggccgccgccggattggcagccaccatttgcatgtgatgttgataaacttcattttacgccacgtatccagagactgaatgaattggaggcccaaactcgtgtaaaattgaatttcttggaccagattgcaaagtactgggagttacagggaagtactctgaaaattccacatgtggagaggaagatcttggacttatttcagcttaataagttagttgcagaagaaggtggatttgcagttgtttgcaaggatagaaaatggaccaaaattgctaccaagatggggtttgctcctggcaaagcagtgggctcacatatcagagggcattatgaacgaattctcaacccctacaacttattcctgtccggagacagcctaaggtgtttgcagaagccaaacctgaccacagacactaaggacaaggagtacaaaccccatgatattccccagaggcagtctgtgcagccttcggaaacgtgccccccagcccgacgagcaaaacgcatgagagcagagagacagagtctcgctgtgttgcccaggctggagtgcagtggcgcgatcttggctcactgcaacctccgcctcctagattccagcaattcttctgcctcagcctcccaagccatgaatattaaaatagaacccgaggagacaacggaagccagaactcataatctgagacgtcgaatgggttgtccaactccaaaatgtgaaaatgagaaagaaatgaagagtagcatcaagcaagaacctattgagaggaaagattatattgtagaaaatgagaaggaaaagcccaagagtcgatctaaaaaagccaccaatgctgtggacctgtatgtctgtcttttatgtggcagtggcaatgatgaagaccggctactgttgtgtgatggctgtgatgacagttaccataccttttgcttgatcccacctctccatgatgttcccaagggagactggaggtgtcctaagtgtttggctcaggaatgtagtaagccacaagaagcatttggctttgaacaagcagccagggactataccctccgtacttttggggaaatggcagatgcgttcaaatctgattacttcaacatgccagtccatatggtccccacagagcttgttgagaaagaattttggagactagtaagcactattgaggaggatgtcacagtggaatatggagctgacattgcctcaaaggaatttggcagtggctttcctgtccgagatgggaaaatcaaactctcacctgaggaagaggagtatcttgatagtggctggaatttgaacaacatgccagtgatggagcagtctgtccttgcacatattactgctgatatatgtggcatgaaacttccttggttgtatgtgggaatgtgcttttcttcattctgttggcacattgaagaccactggagctattcaattaactacttgcactggggtgagccaaaaacctggtatggagtcccagggtatgctgctgagcagctagaaaatgtaatgaagaaactagctccagaactctttgtgtcccagccggatctcctccatcagcttgtgaccatcatgaaccccaataccctgatgactcatgaagtgcctgtttaccgaactaatcagtgtgctggggagtttgtgattacatttccaagagcctaccacagtggttttaaccagggttttaattttgctgaggctgttaacttctgcactgttgattggctgccattaggccgacagtgtgtggagcattatcgcttgcttcatcgatattgtgtgttttcccacgatgagatgatctgcaagatggcttccaaggctgatgtattagatgttgtagtggcttcaactgttcagaaagacatggccattatgattgaggatgagaaagctttaagagaaactgtccgtaaattgggagtgattgattcggaaagaatggattttgagctgttgccagatgatgaacgtcagtgtgtaaaatgcaaaactacatgcttcatgtctgccatctcctgttcttgtaaacctggccttcttgtttgcctgcatcatgtaaaagaattgtgttcctgtcctccttacaaatataaattgcggtataggtacacgctggatgatctctaccctatgatgaatgcattgaagcttcgagcagaatcttacaacgaatgggccttgaatgtgaatgaagctttggaggcaaagatcaacaagaagaaaagccttgtcagcttcaaggctttaattgaagaatctgaaatgaagaaattcccagacaatgatcttttgcgacaccttcgcctagtcacacaggatgcagagaagtgtgcctctgttgcgcagcagttgcttaatggcaaaaggcaaactagatatcgatctggtggagggaaatcccaaaatcagttgacagtgaatgagctccggcagtttgtaacacagctgtatgctcttccatgtgtcctcagtcagacaccattactaaaggatctcttgaatcgtgtagaagattttcaacagcatagtcagaaactactctctgaggaaacgcctagtgctgcggagctgcaggacttgctagatgtcagctttgaatttgatgttgaacttccacagcttgctgagatgcgtatccgtttggaacaagcccgttggctagaagaggtgcagcaagcttgcctagaccccagctcccttactttagatgatatgagacgtctcatagacctaggggtagggctggccccgtattcagcagtggagaaagctatggcccggctgcaggaactgctcacagtgtcagagcactgggacgacaaagccaagagtctcctcaaggccaggccacgacattcattgaatagccttgctacggcagtaaaggaaatcgaagagatccctgcatatctgcccaatggtgcggctctgaaagactcagtgcagagagccagagactggcttcaggatgtagagggcctgcaggctggaggacgtgtgccagtgttagacacactcatagaacttgttacacgaggccgatctatccccgtacatctgaattctttgccaagactggaaaccctagtagctgaggttcaggcttggaaagaatgtgctgttaatacattcttgactgagaattctccatattctctcttagaggtgctgtgtcctcgatgtgatattggccttttgggattgaaaaggaagcagagaaagttaaaggagcccttgccaaatggaaagaaaaaaagcaccaaattagagagtctgagtgacctggagagagctttaactgaaagcaaggagactgcttcagctatggcaactcttggggaagctcgcctaagggaaatggaagccttgcagtctctcagactcgccaatgaagggaaattgctgtcgcctctccaagatgtggatataaaaatctgcctatgtcagaaggccccagctgcccctatgattcaatgtgaactctgcagggatgctttccacaccagttgtgtggcggtacccagtatttcacagggcctgcgaatctggctttgtccccattgtcggaggtcagagaaacctccattagagaaaattctgcccctgctcgcctcccttcagcgtatccgagttcgccttcctgagggagatgcacttcgatatatgattgaaagaaccgtgaactggcagcacagagcccagcaactgctttcgtcagggaatcttaaatttgtgcaagatcgagtgggctcaggactgttatatagcagatggcaagcctcagcaggacaggtgtcagacacaaacaaggtatctcaacctcctggcacaacatcattttctttgcctgatgactgggacaacagaacctcatatttgcactcccccttctcaactggacgaagttgtatccccctccatggtgttagtccagaagtgaatgaactattgatggaagcccagctgctccaggtatcccttcctgaaattcaggaactttaccagactttacttgcaaagccaagccctgctcagcagactgaccgaagctcaccagtgagacccagcagtgagaagaatgactgttgccgagggaagcgagatggaattaacagtcttgagagaaaactgaagagacgcctggaaagagagggcctctccagtgagcggtgggaacgagttaagaaaatgcggacccccaaaaagaagaaaatcaaactgagccaccccaaggacatgaacaatttcaagttagagagagagcgtagctatgaattagttcgttctgctgaaactcattccctgccctcagacacatcctattccgaacaggaagactctgaggatgaagatgccatctgcccagctgtgagctgcctgcagccagaaggagatgaggtggactgggtccagtgtgatggcagctgcaatcagtggtttcatcaggtctgtgttggtgtctccccagagatggcagagaaagaagactacatctgtgtgcgctgtactgtgaaggacgcaccaagccgaaagtagtaatgaactagtccgtaacttgaaagtatttcgatttcttggctttatatatcttgtggaaaggacgagcacgtatacgataacactgccga

SEQ ID NO: 2863 - DNA, 4736 bp, Homo sapiens
  source 1..4736: mol_type = genomic DNA
accgccaccatggaggcggccaccacactgcacccaggcccgcgcccggcgctgcccctcgggggcccgggcccgctgggcgagttcctgcctccacccgagtgcccggtcttcgaacccagctgggaagagttcgcggaccccttcgctttcatccacaagatccggcccatagccgagcagactggcatctgtaaggtgcggccgccgccggattggcagccaccatttgcatgtgatgttgataaacttcattttacgccacgtatccagagactgaatgaattggaggcccaaactcgtgtaaaattgaatttcttggaccagattgcaaagtactgggagttacagggaagtactctgaaaattccacatgtggagaggaagatcttggacttatttcagcttaataagttagttgcagaagaaggtggatttgcagttgtttgcaaggatagaaaatggaccaaaattgctaccaagatggggtttgctcctggcaaagcagtgggctcacatatcagagggcattatgaacgaattctcaacccctacaacttattcctgtccggagacagcctaaggtgtttgcagaagccaaacctgaccacagacactaaggacaaggagtacaaaccccatgatattccccagaggcagtctgtgcagccttcggaaacgtgccccccagcccgacgagcaaaacgcatgagagcagaggccatgaatattaaaatagaacccgaggagacaacggaagccagaactcataatctgagacgtcgaatgggttgtccaactccaaaatgtgaaaatgagaaagaaatgaagagtagcatcaagcaagaacctattgagaggaaagattatattgtagaaaatgagaaggaaaagcccaagagtcgatctaaaaaagccaccaatgctgtggacctgtatgtctgtcttttatgtggcagtggcaatgatgaagaccggctactgttgtgtgatggctgtgatgacagttaccataccttttgcttgatcccacctctccatgatgttcccaagggagactggaggtgtcctaagtgtttggctcaggaatgtagtaagccacaagaagcatttggctttgaacaagcagccagggactataccctccgtacttttggggaaatggcagatgcgttcaaatctgattacttcaacatgccagtccatatggtccccacagagcttgttgagaaagaattttggagactagtaagcactattgaggaggatgtcacagtggaatatggagctgacattgcctcaaaggaatttggcagtggctttcctgtccgagatgggaaaatcaaactctcacctgaggaagaggagtatcttgatagtggctggaatttgaacaacatgccagtgatggagcagtctgtccttgcacatattactgctgatatatgtggcatgaaacttccttggttgtatgtgggaatgtgcttttcttcattctgttggcacattgaagaccactggagctattcaattaactacttgcactggggtgagccaaaaacctggtatggagtcccagggtatgctgctgagcagctagaaaatgtaatgaagaaactagctccagaactctttgtgtcccagccggatctcctccatcagcttgtgaccatcatgaaccccaataccctgatgactcatgaagtgcctgtttaccgaactaatcagtgtgctggggagtttgtgattacatttccaagagcctaccacagtggttttaaccagggttttaattttgctgaggctgttaacttctgcactgttgattggctgccattaggccgacagtgtgtggagcattatcgcttgcttcatcgatattgtgtgttttcccacgatgagatgatctgcaagatggcttccaaggctgatgtattagatgttgtagtggcttcaactgttcagaaagacatggccattatgattgaggatgagaaagctttaagagaaactgtccgtaaattgggagtgattgattcggaaagaatggattttgagctgttgccagatgatgaacgtcagtgtgtaaaatgcaaaactacatgcttcatgtctgccatctcctgttcttgtaaacctggccttcttgtttgcctgcatcatgtaaaagaattgtgttcctgtcctccttacaaatataaattgcggtataggtacacgctggatgatctctaccctatgatgaatgcattgaagcttcgagcagaatcttacaacgaatgggccttgaatgtgaatgaagctttggaggcaaagatcaacaagaagaaaagccttgtcagcttcaaggctttaattgaagaatctgaaatgaagaaattcccagacaatgatcttttgcgacaccttcgcctagtcacacaggatgcagagaagtgtgcctctgttgcgcagcagttgcttaatggcaaaaggcaaactagatatcgatctggtggagggaaatcccaaaatcagttgacagtgaatgagctccggcagtttgtaacacagctgtatgctcttccatgtgtcctcagtcagacaccattactaaaggatctcttgaatcgtgtagaagattttcaacagcatagtcagaaactactctctgaggaaacgcctagtgctgcggagctgcaggacttgctagatgtcagctttgaatttgatgttgaacttccacagcttgctgagatgcgtatccgtttggaacaagcccgttggctagaagaggtgcagcaagcttgcctagaccccagctcccttactttagatgatatgagacgtctcatagacctaggggtagggctggccccgtattcagcagtggagaaagctatggcccggctgcaggaactgctcacagtgtcagagcactgggacgacaaagccaagagtctcctcaaggccaggccacgacattcattgaatagccttgctacggcagtaaaggaaatcgaagagatccctgcatatctgcccaatggtgcggctctgaaagactcagtgcagagagccagagactggcttcaggatgtagagggcctgcaggctggaggacgtgtgccagtgttagacacactcatagaacttgttacacgaggccgatctatccccgtacatctgaattctttgccaagactggaaaccctagtagctgaggttcaggcttggaaagaatgtgctgttaatacattcttgactgagaattctccatattctctcttagaggtgctgtgtcctcgatgtgatattggccttttgggattgaaaaggaagcagagaaagttaaaggagcccttgccaaatggaaagaaaaaaagcaccaaattagagagtctgagtgacctggagagagctttaactgaaagcaaggagactgcttcagctatggcaactcttggggaagctcgcctaagggaaatggaagccttgcagtctctcagactcgccaatgaagggaaattgctgtcgcctctccaagatgtggatataaaaatctgcctatgtcagaaggccccagctgcccctatgattcaatgtgaactctgcagggatgctttccacaccagttgtgtggcggtacccagtatttcacagggcctgcgaatctggctttgtccccattgtcggaggtcagagaaacctccattagagaaaattctgcccctgctcgcctcccttcagcgtatccgagttcgccttcctgagggagatgcacttcgatatatgattgaaagaaccgtgaactggcagcacagagcccagcaactgctttcgtcagggaatcttaaatttgtgcaagatcgagtgggctcaggactgttatatagcagatggcaagcctcagcaggacaggtgtcagacacaaacaaggtatctcaacctcctggcacaacatcattttctttgcctgatgactgggacaacagaacctcatatttgcactcccccttctcaactggacgaagttgtatccccctccatggtgttagtccagaagtgaatgaactattgatggaagcccagctgctccaggtatcccttcctgaaattcaggaactttaccagactttacttgcaaagccaagccctgctcagcagactgaccgaagctcaccagtgagacccagcagtgagaagaatgactgttgccgagggaagcgagatggaattaacagtcttgagagaaaactgaagagacgcctggaaagagagggcctctccagtgagcggtgggaacgagttaagaaaatgcggacccccaaaaagaagaaaatcaaactgagccaccccaaggacatgaacaatttcaagttagagagagagcgtagctatgaattagttcgttctgctgaaactcattccctgccctcagacacatcctattccgaacaggaagactctgaggatgaagatgccatctgcccagctgtgagctgcctgcagccagaaggagatgaggtggactgggtccagtgtgatggcagctgcaatcagtggtttcatcaggtctgtgttggtgtctccccagagatggcagagaaagaagactacatctgtgtgcgctgtactgtgaaggacgcaccaagccgaaagtagtaatgaactagtccgtaacttgaaagtatttcgatttcttggctttatatatcttgtggaaaggacgattgggtaccgggttctatgctccg

SEQ ID NO: 2864 - DNA, 4241 bp, Homo sapiens
  source 1..4241: mol_type = genomic DNA
accgccaccatggagccggggtccgacgatttcctaccgccaccggagtgcccggtgttcgagcctagctgggccgagttccgagaccctcttggctacatcgcgaaaatcaggcccatcgcagagaaatcgggcatttgcaagatccgcccacccgcgattgtggtggaggaaggtggttatgaagctatctgcaaggaccgtcggtgggctcgggtagcccagcgcctcaactatccaccaggcaaaaatattggctccttgctacgctcccactacgaacgcattgtttatccctatgaaatgtaccagtctggagccaaccttgtgcagtgtaacacacgtccatttgataatgaggagaaggacaaggaatacaaaccccacagcatccccctacgacagtctgtgcagccttccaagttcaacagctatggccggcgggccaagagactgcagcctgatccggaacccacagaggaagacattgagaagaatccagagctgaaaaagctacagatctatggggcaggccccaagatgatgggcctgggcctcatggccaaagacaagactctgcggaagaaagataaggaggggcctgagtgtccccccacagtagtggtgaaggaggagttaggtggggatgtgaaggtggagtcaacatcgcctaagaccttcctggagagcaaggaggagctgagtcacagcccagaaccctgcaccaagatgaccatgaggctacggaggaaccacagcaatgcccagtttattgagtcatatgtctgccggatgtgttctcgaggggatgaggatgacaagctcctgctgtgtgatggctgtgatgacaactaccacatcttctgcctgctgcctcctctgcctgagatccccaagggtgtctggcggtgcccaaagtgtgtcatggcggagtgtaagcggcccccagaagcctttggctttgagcaggctacccgggaatacactctgcagagctttggcgagatggccgactcctttaaagctgactacttcaacatgcccgtgcatatggtgcccacagaacttgtggagaaggagttctggaggctggtaaatagcattgaggaagatgtgactgttgagtatggagctgacatccattccaaagaatttggcagcggtttccctgtcagtgacagtaaacggcacctaacccccgaagaggaggagtatgctaccagtggttggaacctaaatgtgatgccggtgttggaacagtctgtactgtgccacatcaatgcagatatctctggcatgaaggtgccctggctctacgtgggcatggtcttctcagccttttgctggcatattgaggatcactggagttactccattaactacctccactggggtgagccgaagacctggtatggggtgccctcacttgcagcagaacatttggaagaagtgatgaagaagctgacacctgaactatttgatagccagcctgacctcctgcaccaacttgtcaccctcatgaatcccaacaccctcatgtcccatggtgtgccagttgtccgcacaaaccagtgtgcaggagagtttgtcatcaccttcccccgtgcttaccacagcggcttcaaccaaggctacaactttgccgaggctgtcaacttttgcactgctgactggttgcctgctgggcgccagtgcattgagcactaccgccggctccggagatactgcgtcttctcccatgaggagcttatctgcaagatggctgcctgcccagagaagctagacctgaacctggcggcagctgtgcataaggagatgttcatcatggtgcaagaagagcggcgtctacgaaaggccctgctggagaagggtatcacagaggctgagcgagaggctttcgagctgctcccagatgatgagcgccagtgtatcaagtgcaagactacgtgtttcctgtcagccctggcctgctacgactgcccagacggccttgtctgcctttcccacatcaatgatctctgcaagtgctccagtagccggcagtacctgcggtatcggtataccttggatgagcttcctgccatgctgcataagctgaaggttcgggctgagtcctttgacacctgggccaacaaagtgcgagtggccctggaggtggaggatgggcggaagcgcagccttgaagaactgagggcactagagtctgaagcccgtgagcggaggtttcctaatagtgagctgctgcagcaactaaagaactgcctgagtgaggcagaggcttgcgtgtcccgagctctgggactggtcagcggccaggaagctggcccccacagggtggctggtctacagatgaccctgactgagctccgggcctttctggaccagatgaacaacctgccttgcgccatgcaccagattggggatgtcaagggtgttctggaacaggtggaggcctaccaggctgaggctcgtgaggccctggcctcactgccctccagtccagggctactgcagtccctgttggagagggggcggcagctgggggtggaggtgcctgaggcccagcagctccagcggcaggtggaacaggcgcgatggctggatgaggtgaaacgcacactggccccctcagcccgaaggggcaccttggctgtcatgcgaggactgttggtcgcgggtgccagtgtagcccctagccctgctgtggataaagcccaggccgagctgcaggaactgctgaccattgctgaacgctgggaggagaaagcccacctctgcctggaggccaggcagaagcatccaccagccacacttgaggccataatccgtgaagcggaaaacatccctgttcacctgcccaacatccaggctctcaaggaggctcttgctaaggcccgggcctggattgctgatgttgatgagatccaaaatggtgaccactacccctgcctggatgacttggagggcctagtagctgtgggccgggacctacctgtggggctggaggagctgagacagctagagctacaggtactgacagcgcactcctggagggagaaggcctccaagaccttcctcaagaaaaattcttgctacacgctgctggaggttctctgcccatgtgcagatgccggctcagacagcaccaagcgcagccggtggatggagaaggagctggggttgtacaaatctgacacagagctgctggggctgtctgcgcaggacctcagggacccaggctctgtgatcgtggccttcaaggagggggaacagaaggagaaggagggtatcctgcagctgcgtcgcaccaattcggccaagcccagtccactggcatcatcgagcacggcctcctctacaacctctatctgtgtgtgtgggcaggtgctggctggggcgggagctctgcagtgtgacctgtgtcaggactggttccatgggcggtgtgtgtcagtgcctcgcctcctcagctctccgaggcccaatcccacctcatccccactgctggcctggtgggaatgggacaccaaattcctgtgtccactgtgtatgcgctcaaggcgcccgcgcctggagaccatcctggcactgctggtagccctgcagagactgcctgtgcggctgcccgagggcgaggccctgcagtgcctcacagagagggccatcagctggcaaggccgcgccaggcaggctctggcctctgaagatgtgactgctcttttgggacggctggctgagctccgccaacggctacaggctgaacctagacctgaggagcctcctaactaccctgcagcccctgcttctgaccccctcagagagggcagtggcaaggatatgcctaaggtccagggcttactggagaatggagacagtgtgaccagtcctgagaaggtagccccggaggagggctcagatctggagctgctgtcctcgctgttgccacagttgactggccctgtgttggaactgcctgaggcaacccgggcccccttggaggagctcatgatggagggggacctgctcgaggtgaccctggatgagaaccacagcatccctgagtcccttgacttttgtattctgactccaaggtattgttcagacctcagctcctgggggccggcccctggagtcttccctccctggtagtaatgaactagtccgtaacttgaaagtatttcgatttcttggctttatatatcttgtggaaaggacgaatttgatcattaagttccctcgac

SEQ ID NO: 2865 - DNA, 4784 bp, Homo sapiens
  source 1..4784: mol_type = genomic DNA
accgccaccatggagccggggtccgacgatttcctaccgccaccggagtgcccggtgttcgagcctagctgggccgagttccgagaccctcttggctacatcgcgaaaatcaggcccatcgcagagaaatcgggcatttgcaagatccgcccacccgcggactggcagccaccctttgctgtggaagtggacaacttcaggtttaccccccgaatccagaggctgaatgagctagaggcccagacgagagtgaaactgaactacttggaccagattgccaaattctgggaaatccagggctcctccttaaagattcccaatgtagaacggcggatcttggacctctacagtctcagcaaaattgtggtggaggaaggtggttatgaagctatctgcaaggaccgtcggtgggctcgggtagcccagcgcctcaactatccaccaggcaaaaatattggctccttgctacgctcccactacgaacgcattgtttatccctatgaaatgtaccagtctggagccaaccttgtgcagtgtaacacacgtccatttgataatgaggagaaggacaaggaatacaaaccccacagcatccccctacgacagtctgtgcagccttccaagttcaacagctatggccggcgggccaagagactgcagcctgatccggaacccacagaggaagacattgagaagaatccagagctgaaaaagctacagatctatggggcaggccccaagatgatgggcctgggcctcatggccaaagacaagactctgcggaagaaagataaggaggggcctgagtgtccccccacagtagtggtgaaggaggagttaggtggggatgtgaaggtggagtcaacatcgcctaagaccttcctggagagcaaggaggagctgagtcacagcccagaaccctgcaccaagatgaccatgaggctacggaggaaccacagcaatgcccagtttattgagtcatatgtctgccggatgtgttctcgaggggatgaggatgacaagctcctgctgtgtgatggctgtgatgacaactaccacatcttctgcctgctgcctcctctgcctgagatccccaagggtgtctggcggtgcccaaagtgtgtcatggcggagtgtaagcggcccccagaagcctttggctttgagcaggctacccgggaatacactctgcagagctttggcgagatggccgactcctttaaagctgactacttcaacatgcccgtgcatatggtgcccacagaacttgtggagaaggagttctggaggctggtaaatagcattgaggaagatgtgactgttgagtatggagctgacatccattccaaagaatttggcagcggtttccctgtcagtgacagtaaacggcacctaacccccgaagaggaggagtatgctaccagtggttggaacctaaatgtgatgccggtgttggaacagtctgtactgtgccacatcaatgcagatatctctggcatgaaggtgccctggctctacgtgggcatggtcttctcagccttttgctggcatattgaggatcactggagttactccattaactacctccactggggtgagccgaagacctggtatggggtgccctcacttgcagcagaacatttggaagaagtgatgaagaagctgacacctgaactatttgatagccagcctgacctcctgcaccaacttgtcaccctcatgaatcccaacaccctcatgtcccatggtgtgccagttgtccgcacaaaccagtgtgcaggagagtttgtcatcaccttcccccgtgcttaccacagcggcttcaaccaaggctacaactttgccgaggctgtcaacttttgcactgctgactggttgcctgctgggcgccagtgcattgagcactaccgccggctccggagatactgcgtcttctcccatgaggagcttatctgcaagatggctgcctgcccagagaagctagacctgaacctggcggcagctgtgcataaggagatgttcatcatggtgcaagaagagcggcgtctacgaaaggccctgctggagaagggtatcacagaggctgagcgagaggctttcgagctgctcccagatgatgagcgccagtgtatcaagtgcaagactacgtgtttcctgtcagccctggcctgctacgactgcccagacggccttgtctgcctttcccacatcaatgatctctgcaagtgctccagtagccggcagtacctgcggtatcggtataccttggatgagcttcctgccatgctgcataagctgaaggttcgggctgagtcctttgacacctgggccaacaaagtgcgagtggccctggaggtggaggatgggcggaagcgcagccttgaagaactgagggcactagagtctgaagcccgtgagcggaggtttcctaatagtgagctgctgcagcaactaaagaactgcctgagtgaggcagaggcttgcgtgtcccgagctctgggactggtcagcggccaggaagctggcccccacagggtggctggtctacagatgaccctgactgagctccgggcctttctggaccagatgaacaacctgccttgcgccatgcaccagattggggatgtcaagggtgttctggaacaggtggaggcctaccaggctgaggctcgtgaggccctggcctcactgccctccagtccagggctactgcagtccctgttggagagggggcggcagctgggggtggaggtgcctgaggcccagcagctccagcggcaggtggaacaggcgcgatggctggatgaggtgaaacgcacactggccccctcagcccgaaggggcaccttggctgtcatgcgaggactgttggtcgcgggtgccagtgtagcccctagccctgctgtggataaagcccaggccgagctgcaggaactgctgaccattgctgaacgctgggaggagaaagcccacctctgcctggaggccaggcagaagcatccaccagccacacttgaggccataatccgtgaagcggaaaacatccctgttcacctgcccaacatccaggctctcaaggaggctcttgctaaggcccgggcctggattgctgatgttgatgagatccaaaatggtgaccactacccctgcctggatgacttggagggcctagtagctgtgggccgggacctacctgtggggctggaggagctgagacagctagagctacaggtactgacagcgcactcctggagggagaaggcctccaagaccttcctcaagaaaaattcttgctacacgctgctggaggttctctgcccatgtgcagatgccggctcagacagcaccaagcgcagccggtggatggagaaggagctggggttgtacaaatctgacacagagctgctggggctgtctgcgcaggacctcagggacccaggctctgtgatcgtggccttcaaggagggggaacagaaggagaaggagggtatcctgcagctgcgtcgcaccaattcggccaagcccagtccactggcatcatcgagcacggcctcctctacaacctctatctgtgtgtgtgggcaggtgctggctggggcgggagctctgcagtgtgacctgtgtcaggactggttccatgggcggtgtgtgtcagtgcctcgcctcctcagctctccgaggcccaatcccacctcatccccactgctggcctggtgggaatgggacaccaaattcctgtgtccactgtgtatgcgctcaaggcgcccgcgcctggagaccatcctggcactgctggtagccctgcagagactgcctgtgcggctgcccgagggcgaggccctgcagtgcctcacagagagggccatcagctggcaaggccgcgccaggcaggctctggcctctgaagatgtgactgctcttttgggacggctggctgagctccgccaacggctacaggctgaacctagacctgaggagcctcctaactaccctgcagcccctgcttctgaccccctcagagagggcagtggcaaggatatgcctaaggtccagggcttactggagaatggagacagtgtgaccagtcctgagaaggtagccccggaggagggctcaggtaagagagatctggagctgctgtcctcgctgttgccacagttgactggccctgtgttggaactgcctgaggcaacccgggcccccttggaggagctcatgatggagggggacctgctcgaggtgaccctggatgagaaccacagcatatggcagctgctgcaggctggacagcccccagacctggagaggatccgcacacttctggagctggagaaggcagagcgtcacgggagtcgggctcggggccgggccctggagaggcggcggcggcggaaggtggatcggggtggggagggcgatgacccagcccgagaggagctagagccaaagagggtacggagctcagggccagaggctgaggaggtccaggaggaggaagagctggaggaggagactgggggtgagggcccccctgcacccatccccaccactggcagccccagcacccaggagaaccagaatggcttggaaccggcggaagggaccacttcaggcccctcggcccctttctccactctgactccccggctgcatctgccctgcccacagcagccgcctcagcaacagttgtagtaatgaactagtccgtaacttgaaagtatttcgatttcttggctttatatatcttgtggaaaggacgatccatccctaggccttgaacaaag

SEQ ID NO: 2866 - DNA, 4781 bp, Homo sapiens
  source 1..4781: mol_type = genomic DNA
accgccaccatggagccggggtccgacgatttcctaccgccaccggagtgcccggtgttcgagcctagctgggccgagttccgagaccctcttggctacatcgcgaaaatcaggcccatcgcagagaaatcgggcatttgcaagatccgcccacccgcggactggcagccaccctttgctgtggaagtggacaacttcaggtttaccccccgaatccagaggctgaatgagctagaggcccagacgagagtgaaactgaactacttggaccagattgccaaattctgggaaatccagggctcctccttaaagattcccaatgtagaacggcggatcttggacctctacagtctcagcaaaattgtggtggaggaaggtggttatgaagctatctgcaaggaccgtcggtgggctcgggtagcccagcgcctcaactatccaccaggcaaaaatattggctccttgctacgctcccactacgaacgcattgtttatccctatgaaatgtaccagtctggagccaaccttgtgtgtaacacacgtccatttgataatgaggagaaggacaaggaatacaaaccccacagcatccccctacgacagtctgtgcagccttccaagttcaacagctatggccggcgggccaagagactgcagcctgatccggaacccacagaggaagacattgagaagaatccagagctgaaaaagctacagatctatggggcaggccccaagatgatgggcctgggcctcatggccaaagacaagactctgcggaagaaagataaggaggggcctgagtgtccccccacagtagtggtgaaggaggagttaggtggggatgtgaaggtggagtcaacatcgcctaagaccttcctggagagcaaggaggagctgagtcacagcccagaaccctgcaccaagatgaccatgaggctacggaggaaccacagcaatgcccagtttattgagtcatatgtctgccggatgtgttctcgaggggatgaggatgacaagctcctgctgtgtgatggctgtgatgacaactaccacatcttctgcctgctgcctcctctgcctgagatccccaagggtgtctggcggtgcccaaagtgtgtcatggcggagtgtaagcggcccccagaagcctttggctttgagcaggctacccgggaatacactctgcagagctttggcgagatggccgactcctttaaagctgactacttcaacatgcccgtgcatatggtgcccacagaacttgtggagaaggagttctggaggctggtaaatagcattgaggaagatgtgactgttgagtatggagctgacatccattccaaagaatttggcagcggtttccctgtcagtgacagtaaacggcacctaacccccgaagaggaggagtatgctaccagtggttggaacctaaatgtgatgccggtgttggaacagtctgtactgtgccacatcaatgcagatatctctggcatgaaggtgccctggctctacgtgggcatggtcttctcagccttttgctggcatattgaggatcactggagttactccattaactacctccactggggtgagccgaagacctggtatggggtgccctcacttgcagcagaacatttggaagaagtgatgaagaagctgacacctgaactatttgatagccagcctgacctcctgcaccaacttgtcaccctcatgaatcccaacaccctcatgtcccatggtgtgccagttgtccgcacaaaccagtgtgcaggagagtttgtcatcaccttcccccgtgcttaccacagcggcttcaaccaaggctacaactttgccgaggctgtcaacttttgcactgctgactggttgcctgctgggcgccagtgcattgagcactaccgccggctccggagatactgcgtcttctcccatgaggagcttatctgcaagatggctgcctgcccagagaagctagacctgaacctggcggcagctgtgcataaggagatgttcatcatggtgcaagaagagcggcgtctacgaaaggccctgctggagaagggtatcacagaggctgagcgagaggctttcgagctgctcccagatgatgagcgccagtgtatcaagtgcaagactacgtgtttcctgtcagccctggcctgctacgactgcccagacggccttgtctgcctttcccacatcaatgatctctgcaagtgctccagtagccggcagtacctgcggtatcggtataccttggatgagcttcctgccatgctgcataagctgaaggttcgggctgagtcctttgacacctgggccaacaaagtgcgagtggccctggaggtggaggatgggcggaagcgcagccttgaagaactgagggcactagagtctgaagcccgtgagcggaggtttcctaatagtgagctgctgcagcaactaaagaactgcctgagtgaggcagaggcttgcgtgtcccgagctctgggactggtcagcggccaggaagctggcccccacagggtggctggtctacagatgaccctgactgagctccgggcctttctggaccagatgaacaacctgccttgcgccatgcaccagattggggatgtcaagggtgttctggaacaggtggaggcctaccaggctgaggctcgtgaggccctggcctcactgccctccagtccagggctactgcagtccctgttggagagggggcggcagctgggggtggaggtgcctgaggcccagcagctccagcggcaggtggaacaggcgcgatggctggatgaggtgaaacgcacactggccccctcagcccgaaggggcaccttggctgtcatgcgaggactgttggtcgcgggtgccagtgtagcccctagccctgctgtggataaagcccaggccgagctgcaggaactgctgaccattgctgaacgctgggaggagaaagcccacctctgcctggaggccaggcagaagcatccaccagccacacttgaggccataatccgtgaagcggaaaacatccctgttcacctgcccaacatccaggctctcaaggaggctcttgctaaggcccgggcctggattgctgatgttgatgagatccaaaatggtgaccactacccctgcctggatgacttggagggcctagtagctgtgggccgggacctacctgtggggctggaggagctgagacagctagagctacaggtactgacagcgcactcctggagggagaaggcctccaagaccttcctcaagaaaaattcttgctacacgctgctggaggttctctgcccatgtgcagatgccggctcagacagcaccaagcgcagccggtggatggagaaggagctggggttgtacaaatctgacacagagctgctggggctgtctgcgcaggacctcagggacccaggctctgtgatcgtggccttcaaggagggggaacagaaggagaaggagggtatcctgcagctgcgtcgcaccaattcggccaagcccagtccactggcatcatcgagcacggcctcctctacaacctctatctgtgtgtgtgggcaggtgctggctggggcgggagctctgcagtgtgacctgtgtcaggactggttccatgggcggtgtgtgtcagtgcctcgcctcctcagctctccgaggcccaatcccacctcatccccactgctggcctggtgggaatgggacaccaaattcctgtgtccactgtgtatgcgctcaaggcgcccgcgcctggagaccatcctggcactgctggtagccctgcagagactgcctgtgcggctgcccgagggcgaggccctgcagtgcctcacagagagggccatcagctggcaaggccgcgccaggcaggctctggcctctgaagatgtgactgctcttttgggacggctggctgagctccgccaacggctacaggctgaacctagacctgaggagcctcctaactaccctgcagcccctgcttctgaccccctcagagagggcagtggcaaggatatgcctaaggtccagggcttactggagaatggagacagtgtgaccagtcctgagaaggtagccccggaggagggctcaggtaagagagatctggagctgctgtcctcgctgttgccacagttgactggccctgtgttggaactgcctgaggcaacccgggcccccttggaggagctcatgatggagggggacctgctcgaggtgaccctggatgagaaccacagcatatggcagctgctgcaggctggacagcccccagacctggagaggatccgcacacttctggagctggagaaggcagagcgtcacgggagtcgggctcggggccgggccctggagaggcggcggcggcggaaggtggatcggggtggggagggcgatgacccagcccgagaggagctagagccaaagagggtacggagctcagggccagaggctgaggaggtccaggaggaggaagagctggaggaggagactgggggtgagggcccccctgcacccatccccaccactggcagccccagcacccaggagaaccagaatggcttggaaccggcggaagggaccacttcaggcccctcggcccctttctccactctgactccccggctgcatctgccctgcccacagcagccgcctcagcaacagttgtagtaatgaactagtccgtaacttgaaagtatttcgatttcttggctttatatatcttgtggaaaggacgataaggtgtagtcttaacgtaacgg

SEQ ID NO: 2867 - DNA, 4652 bp, Homo sapiens
  source 1..4652: mol_type = genomic DNA
accgccaccatggagccggggtccgacgatttcctaccgccaccggagtgcccggtgttcgagcctagctgggccgagttccgagaccctcttggctacatcgcgaaaatcaggcccatcgcagagaaatcgggcatttgcaagatccgcccacccgcggactggcagccaccctttgctgtggaagtggacaacttcaggtttaccccccgaatccagaggctgaatgagctagagattgtggtggaggaaggtggttatgaagctatctgcaaggaccgtcggtgggctcgggtagcccagcgcctcaactatccaccaggcaaaaatattggctccttgctacgctcccactacgaacgcattgtttatccctatgaaatgtaccagtctggagccaaccttgtgcagtgtaacacacgtccatttgataatgaggagaaggacaaggaatacaaaccccacagcatccccctacgacagtctgtgcagccttccaagttcaacagctatggccggcgggccaagagactgcagcctgatccggaacccacagaggaagacattgagaagaatccagagctgaaaaagctacagatctatggggcaggccccaagatgatgggcctgggcctcatggccaaagacaagactctgcggaagaaagataaggaggggcctgagtgtccccccacagtagtggtgaaggaggagttaggtggggatgtgaaggtggagtcaacatcgcctaagaccttcctggagagcaaggaggagctgagtcacagcccagaaccctgcaccaagatgaccatgaggctacggaggaaccacagcaatgcccagtttattgagtcatatgtctgccggatgtgttctcgaggggatgaggatgacaagctcctgctgtgtgatggctgtgatgacaactaccacatcttctgcctgctgcctcctctgcctgagatccccaagggtgtctggcggtgcccaaagtgtgtcatggcggagtgtaagcggcccccagaagcctttggctttgagcaggctacccgggaatacactctgcagagctttggcgagatggccgactcctttaaagctgactacttcaacatgcccgtgcatatggtgcccacagaacttgtggagaaggagttctggaggctggtaaatagcattgaggaagatgtgactgttgagtatggagctgacatccattccaaagaatttggcagcggtttccctgtcagtgacagtaaacggcacctaacccccgaagaggaggagtatgctaccagtggttggaacctaaatgtgatgccggtgttggaacagtctgtactgtgccacatcaatgcagatatctctggcatgaaggtgccctggctctacgtgggcatggtcttctcagccttttgctggcatattgaggatcactggagttactccattaactacctccactggggtgagccgaagacctggtatggggtgccctcacttgcagcagaacatttggaagaagtgatgaagaagctgacacctgaactatttgatagccagcctgacctcctgcaccaacttgtcaccctcatgaatcccaacaccctcatgtcccatggtgtgccagttgtccgcacaaaccagtgtgcaggagagtttgtcatcaccttcccccgtgcttaccacagcggcttcaaccaaggctacaactttgccgaggctgtcaacttttgcactgctgactggttgcctgctgggcgccagtgcattgagcactaccgccggctccggagatactgcgtcttctcccatgaggagcttatctgcaagatggctgcctgcccagagaagctagacctgaacctggcggcagctgtgcataaggagatgttcatcatggtgcaagaagagcggcgtctacgaaaggccctgctggagaagggtatcacagaggctgagcgagaggctttcgagctgctcccagatgatgagcgccagtgtatcaagtgcaagactacgtgtttcctgtcagccctggcctgctacgactgcccagacggccttgtctgcctttcccacatcaatgatctctgcaagtgctccagtagccggcagtacctgcggtatcggtataccttggatgagcttcctgccatgctgcataagctgaaggttcgggctgagtcctttgacacctgggccaacaaagtgcgagtggccctggaggtggaggatgggcggaagcgcagccttgaagaactgagggcactagagtctgaagcccgtgagcggaggtttcctaatagtgagctgctgcagcaactaaagaactgcctgagtgaggcagaggcttgcgtgtcccgagctctgggactggtcagcggccaggaagctggcccccacagggtggctggtctacagatgaccctgactgagctccgggcctttctggaccagatgaacaacctgccttgcgccatgcaccagattggggatgtcaagggtgttctggaacaggtggaggcctaccaggctgaggctcgtgaggccctggcctcactgccctccagtccagggctactgcagtccctgttggagagggggcggcagctgggggtggaggtgcctgaggcccagcagctccagcggcaggtggaacaggcgcgatggctggatgaggtgaaacgcacactggccccctcagcccgaaggggcaccttggctgtcatgcgaggactgttggtcgcgggtgccagtgtagcccctagccctgctgtggataaagcccaggccgagctgcaggaactgctgaccattgctgaacgctgggaggagaaagcccacctctgcctggaggccaggcagaagcatccaccagccacacttgaggccataatccgtgaagcggaaaacatccctgttcacctgcccaacatccaggctctcaaggaggctcttgctaaggcccgggcctggattgctgatgttgatgagatccaaaatggtgaccactacccctgcctggatgacttggagggcctagtagctgtgggccgggacctacctgtggggctggaggagctgagacagctagagctacaggtactgacagcgcactcctggagggagaaggcctccaagaccttcctcaagaaaaattcttgctacacgctgctggaggttctctgcccatgtgcagatgccggctcagacagcaccaagcgcagccggtggatggagaaggagctggggttgtacaaatctgacacagagctgctggggctgtctgcgcaggacctcagggacccaggctctgtgatcgtggccttcaaggagggggaacagaaggagaaggagggtatcctgcagctgcgtcgcaccaattcggccaagcccagtccactggcatcatcgagcacggcctcctctacaacctctatctgtgtgtgtgggcaggtgctggctggggcgggagctctgcagtgtgacctgtgtcaggactggttccatgggcggtgtgtgtcagtgcctcgcctcctcagctctccgaggcccaatcccacctcatccccactgctggcctggtgggaatgggacaccaaattcctgtgtccactgtgtatgcgctcaaggcgcccgcgcctggagaccatcctggcactgctggtagccctgcagagactgcctgtgcggctgcccgagggcgaggccctgcagtgcctcacagagagggccatcagctggcaaggccgcgccaggcaggctctggcctctgaagatgtgactgctcttttgggacggctggctgagctccgccaacggctacaggctgaacctagacctgaggagcctcctaactaccctgcagcccctgcttctgaccccctcagagagggcagtggcaaggatatgcctaaggtccagggcttactggagaatggagacagtgtgaccagtcctgagaaggtagccccggaggagggctcagatctggagctgctgtcctcgctgttgccacagttgactggccctgtgttggaactgcctgaggcaacccgggcccccttggaggagctcatgatggagggggacctgctcgaggtgaccctggatgagaaccacagcatatggcagctgctgcaggctggacagcccccagacctggagaggatccgcacacttctggagctggagaaggcagagcgtcacgggagtcgggctcggggccgggccctggagaggcggcggcggcggaaggtggatcggggtggggagggcgatgacccagcccgagaggagctagagccaaagagggtacggagctcagggccagaggctgaggaggtccaggaggaggaagagctggaggaggagactgggggtgagggcccccctgcacccatccccaccactggcagccccagcacccaggagaaccagaatggcttggaaccggcggaagggaccacttcaggcccctcggcccctttctccactctgactccccggctgcatctgccctgcccacagcagccgcctcagcaacagttgtagtaatgaactagtccgtaacttgaaagtatttcgatttcttggctttatatatcttgtggaaaggacgaggccaataacaaccacagaagtcc

SEQ ID NO: 2868 - DNA, 4775 bp, Homo sapiens
  source 1..4775: mol_type = genomic DNA
accgccaccatggagccggggtccgacgatttcctaccgccaccggagtgcccggtgttcgagcctagctgggccgagttccgagaccctcttggctacatcgcgaaaatcaggcccatcgcagagaaatcgggcatttgcaagatccgcccacccgcggactggcagccaccctttgctgtggaagtggacaacttcaggtttaccccccgaatccagaggctgaatgagctagaggcccagacgagagtgaaactgaactacttggaccagattgccaaattctgggaaatccagggctcctccttaaagattcccaatgtagaacggcggatcttggacctctacagtctcagcaaaattgtggtggaggaaggtggttatgaagctatctgcaaggaccgtcggtgggctcgggtagcccagcgcctcaactatccaccaggcaaaaatattggctccttgctacgctcccactacgaacgcattgtttatccctatgaaatgtaccagtctggagccaaccttgtgcagtgtaacacacgtccatttgataatgaggagaaggacaaggaatacaaaccccacagcatccccctacgacagtctgtgcagccttccaagttcaacagctatggccggcgggccaagagactgcagcctgatccggaacccacagaggaagacattgagaagaatccagagctgaaaaagctacagatctatggggcaggccccaagatgatgggcctgggcctcatggccaaagacaagactctgcggaagaaagataaggaggggcctgagtgtccccccacagtagtggtgaaggaggagttaggtggggatgtgaaggtggagtcaacatcgcctaagaccttcctggagagcaaggaggagctgagtcacagcccagaaccctgcaccaagatgaccatgaggctacggaggaaccacagcaatgcccagtttattgagtcatatgtctgccggatgtgttctcgaggggatgaggatgacaagctcctgctgtgtgatggctgtgatgacaactaccacatcttctgcctgctgcctcctctgcctgagatccccaagggtgtctggcggtgcccaaagtgtgtcatggcggagtgtaagcggcccccagaagcctttggctttgagcaggctacccgggaatacactctgcagagctttggcgagatggccgactcctttaaagctgactacttcaacatgcccgtgcatatggtgcccacagaacttgtggagaaggagttctggaggctggtaaatagcattgaggaagatgtgactgttgagtatggagctgacatccattccaaagaatttggcagcggtttccctgtcagtgacagtaaacggcacctaacccccgaagaggaggagtatgctaccagtggttggaacctaaatgtgatgccggtgttggaacagtctgtactgtgccacatcaatgcagatatctctggcatgaaggtgccctggctctacgtgggcatggtcttctcagccttttgctggcatattgaggatcactggagttactccattaactacctccactggggtgagccgaagacctggtatggggtgccctcacttgcagcagaacatttggaagaagtgatgaagaagctgacacctgaactatttgatagccagcctgacctcctgcaccaacttgtcaccctcatgaatcccaacaccctcatgtcccatggtgtgccagttgtccgcacaaaccagtgtgcaggagagtttgtcatcaccttcccccgtgcttaccacagcggcttcaaccaaggctacaactttgccgaggctgtcaacttttgcactgctgactggttgcctgctgggcgccagtgcattgagcactaccgccggctccggagatactgcgtcttctcccatgaggagcttatctgcaagatggctgcctgcccagagaagctagacctgaacctggcggcagctgtgcataaggagatgttcatcatggtgcaagaagagcggcgtctacgaaaggccctgctggagaagggtatcacagaggctgagcgagaggctttcgagctgctcccagatgatgagcgccagtgtatcaagtgcaagactacgtgtttcctgtcagccctggcctgctacgactgcccagacggccttgtctgcctttcccacatcaatgatctctgcaagtgctccagtagccggcagtacctgcggtatcggtataccttggatgagcttcctgccatgctgcataagctgaaggttcgggctgagtcctttgacacctgggccaacaaagtgcgagtggccctggaggtggaggatgggcggaagcgcagccttgaagaactgagggcactagagtctgaagcccgtgagcggaggtttcctaatagtgagctgctgcagcaactaaagaactgcctgagtgaggcagaggcttgcgtgtcccgagctctgggactggtcagcggccaggaagctggcccccacagggtggctggtctacagatgaccctgactgagctccgggcctttctggaccagatgaacaacctgccttgcgccatgcaccagattggggatgtcaagggtgttctggaacaggtggaggcctaccaggctgaggctcgtgaggccctggcctcactgccctccagtccagggctactgcagtccctgttggagagggggcggcagctgggggtggaggtgcctgaggcccagcagctccagcggcaggtggaacaggcgcgatggctggatgaggtgaaacgcacactggccccctcagcccgaaggggcaccttggctgtcatgcgaggactgttggtcgcgggtgccagtgtagcccctagccctgctgtggataaagcccaggccgagctgcaggaactgctgaccattgctgaacgctgggaggagaaagcccacctctgcctggaggccaggcagaagcatccaccagccacacttgaggccataatccgtgaagcggaaaacatccctgttcacctgcccaacatccaggctctcaaggaggctcttgctaaggcccgggcctggattgctgatgttgatgagatccaaaatggtgaccactacccctgcctggatgacttggagggcctagtagctgtgggccgggacctacctgtggggctggaggagctgagacagctagagctacaggtactgacagcgcactcctggagggagaaggcctccaagaccttcctcaagaaaaattcttgctacacgctgctggaggttctctgcccatgtgcagatgccggctcagacagcaccaagcgcagccggtggatggagaaggagctggggttgtacaaatctgacacagagctgctggggctgtctgcgcaggacctcagggacccaggctctgtgatcgtggccttcaaggagggggaacagaaggagaaggagggtatcctgcagctgcgtcgcaccaattcggccaagcccagtccactggcatcatcgagcacggcctcctctacaacctctatctgtgtgtgtgggcaggtgctggctggggcgggagctctgcagtgtgacctgtgtcaggactggttccatgggcggtgtgtgtcagtgcctcgcctcctcagctctccgaggcccaatcccacctcatccccactgctggcctggtgggaatgggacaccaaattcctgtgtccactgtgtatgcgctcaaggcgcccgcgcctggagaccatcctggcactgctggtagccctgcagagactgcctgtgcggctgcccgagggcgaggccctgcagtgcctcacagagagggccatcagctggcaaggccgcgccaggcaggctctggcctctgaagatgtgactgctcttttgggacggctggctgagctccgccaacggctacaggctgaacctagacctgaggagcctcctaactaccctgcagcccctgcttctgaccccctcagagagggcagtggcaaggatatgcctaaggtccagggcttactggagaatggagacagtgtgaccagtcctgagaaggtagccccggaggagggctcagatctggagctgctgtcctcgctgttgccacagttgactggccctgtgttggaactgcctgaggcaacccgggcccccttggaggagctcatgatggagggggacctgctcgaggtgaccctggatgagaaccacagcatatggcagctgctgcaggctggacagcccccagacctggagaggatccgcacacttctggagctggagaaggcagagcgtcacgggagtcgggctcggggccgggccctggagaggcggcggcggcggaaggtggatcggggtggggagggcgatgacccagcccgagaggagctagagccaaagagggtacggagctcagggccagaggctgaggaggtccaggaggaggaagagctggaggaggagactgggggtgagggcccccctgcacccatccccaccactggcagccccagcacccaggagaaccagaatggcttggaaccggcggaagggaccacttcaggcccctcggcccctttctccactctgactccccggctgcatctgccctgcccacagcagccgcctcagcaacagttgtagtaatgaactagtccgtaacttgaaagtatttcgatttcttggctttatatatcttgtggaaaggacgataccggctaattcctcaagtcgtt

SEQ ID NO: 2869 - DNA, 479 bp, Homo sapiens
  source 1..479: mol_type = genomic DNA
accgccaccatgcctcacagctccgacagcagtgactccagcttcagccgctctcctccccctggcaaacaggactcatctgatgatgtgagaagagttcagaggagggagaaaaatcgtattgccgcccagaagagccgacagaggcagacacagaaggccgacaccctgcacctggagagcgaagacctggagaaacagaacgcggctctacgcaaggagatcaagcagctcacagaggaactgaagtacttcacgtcggtgctgaacagccacgagcccctgtgctcggtgctggccgccagcacgccctcgccccccgaggtggtgtacagcgcccacgcattccaccaacctcatgtcagctccccgcgcttccagccctagtaatgaactagtccgtaacttgaaagtatttcgatttcttggctttatatatcttgtggaaaggacgaattggatatgcacccgcctttgct

SEQ ID NO: 2870 - DNA, 1973 bp, Homo sapiens
  source 1..1973: mol_type = genomic DNA
accgccaccatggcccataaatatgtgggtttgcagtatcacggatcagtgacatttgaggatgtggccatagccttctcccagcaggagtgggagagtctggactcttcccagaggggcttgtacagagatgtgatgttggagaactacaggaacttggtgtcaatgggacattcccgttctaaaccacatgtgatcgccttattggaacaatggaaagagcctgaagtgacagtgaggaaagatggaagaagatggtgcacagatttgcagttggaagatgatacaatcggctgtaaagaaatgcccacctctgaaaactgtccatcttttgctctacatcagaaaataagtagacagaaaccacgtgaatgtcaggaatatggaaagaccctttgtcaagactcaaagcctgttcaacatgaaagaatacatagtagtgaaaaacccaacagatgtaaagaatgtgggaagaactttagtaatggacatcaactcaccatacatcagagattgcatgttggtgagaaaccctataaatatgaaaaatgtgggaaggcctttatcagtggctcagcctttgttaagcatgggagaattcacactggtgagaagccactcaaatgtaagcaatgtggaaagactattagtggtagctatcaacttacagtacataagagtattcatactgggaagaaaccatatgagtgcggggaatgtgggaaagcttttctagtatatggaaagcttacccggcatcagagtactcacactggtgaaaaaccctttgggtgtgaggagtgtgggaaggccttcagtaccttttcatacctggttcaacatcagcgaattcataccagtgaaaaaccttacgaatgcaaagaatgtgggaaggcctttagcactagctcaccccttgctaagcatcagagaattcatactggcgagaaaccctatgaatgtaaggagtgtgggaagtccttcactgtgtatggacagcttactcgacatcagagtattcatactggtgagaaaccttttgaatgtaaggaatgtggaaaggcctttagacttagttccttccttcatgcacatcagcgaattcatgcagagataaagccctacggatgcaaggaatgcgggagaaccttcagtcgtgcctcatatcttgttcaacatggaagacttcacactggcgagaagccctatgaatgtaaggagtgtggcaaggcctttagtactggctcataccttgttcagcatcagaggatccatactggggagaaaccctatgaatgtaaggaatgtggcaaagcctttattagtcgccatcagcttaccgtacatcaaagggttcatactggagagaaaccctatgagtgtaaggaatgtggcaaggccttcagagtgcacgtacatctcacacagcatcggaaaattcatactgatgtaaagccctatgaatgtaaggaatgtggaaagacttttagtcgagcctcgtaccttgtacaacatagcagaatccatactggtaagaagccctatgagtgtaaggagtgtggcaaggccttcagttctggctcataccttgttcagcatcaaagaattcatactggggagaaaccctatgaatgtaacaaatgtgggaaagcctttactgtttatggacaacttattggacatcagagtgttcacactggtgagaaaccttttgaatgtaaggaatgcgggaaggcctttagacttaattcattccttactgaacatcagcgggtacacactggtgagaaaccctttaaatgcaaaaaatgtgggaagacctttagatacagttcagcccttaaagtgcatctgagaaaacatatgagtgttataccctagtaatgaactagtccgtaacttgaaagtatttcgatttcttggctttatatatcttgtggaaaggacgagctagtacccgagtctatggatga

SEQ ID NO: 2871 - DNA, 1976 bp, Homo sapiens
  source 1..1976: mol_type = genomic DNA
accgccaccatggcccataaatatgtgggtttgcagtatcacggatcagtgacatttgaggatgtggccatagccttctcccagcaggagtgggagagtctggactcttcccagaggggcttgtacagagatgtgatgttggagaactacaggaacttggtgtcaatggcaggacattcccgttctaaaccacatgtgatcgccttattggaacaatggaaagagcctgaagtgacagtgaggaaagatggaagaagatggtgcacagatttgcagttggaagatgatacaatcggctgtaaagaaatgcccacctctgaaaactgtccatcttttgctctacatcagaaaataagtagacagaaaccacgtgaatgtcaggaatatggaaagaccctttgtcaagactcaaagcctgttcaacatgaaagaatacatagtagtgaaaaacccaacagatgtaaagaatgtgggaagaactttagtaatggacatcaactcaccatacatcagagattgcatgttggtgagaaaccctataaatatgaaaaatgtgggaaggcctttatcagtggctcagcctttgttaagcatgggagaattcacactggtgagaagccactcaaatgtaagcaatgtggaaagactattagtggtagctatcaacttacagtacataagagtattcatactgggaagaaaccatatgagtgcggggaatgtgggaaagcttttctagtatatggaaagcttacccggcatcagagtactcacactggtgaaaaaccctttgggtgtgaggagtgtgggaaggccttcagtaccttttcatacctggttcaacatcagcgaattcataccagtgaaaaaccttacgaatgcaaagaatgtgggaaggcctttagcactagctcaccccttgctaagcatcagagaattcatactggcgagaaaccctatgaatgtaaggagtgtgggaagtccttcactgtgtatggacagcttactcgacatcagagtattcatactggtgagaaaccttttgaatgtaaggaatgtggaaaggcctttagacttagttccttccttcatgcacatcagcgaattcatgcagagataaagccctacggatgcaaggaatgcgggagaaccttcagtcgtgcctcatatcttgttcaacatggaagacttcacactggcgagaagccctatgaatgtaaggagtgtggcaaggcctttagtactggctcataccttgttcagcatcagaggatccatactggggagaaaccctatgaatgtaaggaatgtggcaaagcctttattagtcgccatcagcttaccgtacatcaaagggttcatactggagagaaaccctatgagtgtaaggaatgtggcaaggccttcagagtgcacgtacatctcacacagcatcggaaaattcatactgatgtaaagccctatgaatgtaaggaatgtggaaagacttttagtcgagcctcgtaccttgtacaacatagcagaatccatactggtaagaagccctatgagtgtaaggagtgtggcaaggccttcagttctggctcataccttgttcagcatcaaagaattcatactggggagaaaccctatgaatgtaacaaatgtgggaaagcctttactgtttatggacaacttattggacatcagagtgttcacactggtgagaaaccttttgaatgtaaggaatgcgggaaggcctttagacttaattcattccttactgaacatcagcgggtacacactggtgagaaaccctttaaatgcaaaaaatgtgggaagacctttagatacagttcagcccttaaagtgcatctgagaaaacatatgagtgttataccctagtaatgaactagtccgtaacttgaaagtatttcgatttcttggctttatatatcttgtggaaaggacgaaacctagcttgctacccagcgtcg

SEQ ID NO: 2872 - DNA, 1676 bp, Homo sapiens
  source 1..1676: mol_type = genomic DNA
accgccaccatgcactccctggacgagccgctcgacctgaagctgagtatcaccaagctccgggcggcaagagagaagcgggagaggacgctgggtgtggtccggccccgtgctctgcacagggagctgggcctggtggatgacagccccacacctggctctccaggctccccgccctcaggcttcctgctgaactccaagttccccgagaaggtggagggacgcttttcagcagcccctctcgtggacctcagcctgtcaccaccatctgggctggactcccccaatggcagcagctcgctgtcccccgagcgccagggcaacggggacctgcctccagtgcccagtgcctcggacttccagccactgcgctatttggatggtgtccccagctccttccagttcttcctgcccctcggctccgggggggccctgcacctgcctgcctcctccttccttacccctcccaaggacaagtgcctctcgccagacctgcccctgcccaagcagctggtgtgtcgctgggccaagtgtaaccagctctttgagctcctgcaagacctggtggaccatgtcaacgattaccatgtcaagcccgagaaggatgcggggtactgctgccactgggagggctgcgcccgccatggccgaggtttcaacgccaggtacaagatgctcatccacatccgcacacacaccaacgagaagccacaccgctgtccgacctgcagcaagagcttctcccgcctggagaacctgaagatccacaaccggtcgcacacaggtgagaagccctacgtctgcccctacgagggctgcaacaagcgctattccaactccagtgaccgctttaagcacacgcgcacccactatgtggacaagccctactactgcaagatgcccggctgccacaagcgctacacggaccccagctcactgcgcaagcacatcaaggcccatggccactttgtgtcccacgagcagcaagagctcctgcagctgcgcccaccccccaagccgccactgcccgcccccgacggcggcccctatgtcagtggggcccagatcatcatccccaacccagctgccctctttggaggccctggcctgcccggcttacccctacccctggcccccggcccccttgacctcagtgccctggcctgtggcaacggtgggggcagtgggggtggggggggcatgggccctgggctgccaggccccgtcctgcctctcaatctggccaagaacccgctgctgccctcgccctttggggctggcggactgggcttgcctgtggtctccctccttgctggcgcagctggtggcaaggccgagggggagaaggggcgtgggtcggtgcccaccagggccctgggcatggagggccacaagacgccccttgaaaggacggagagcagctgctcccggccaagccccgatggactccccctgctgccaggcaccgtgctggacctgtccacgggcgtcaactcagctgccagcagcccagaggcgttggcccctggctgggtggtcatcccgccgggctcggtgctgctcaaaccggctgtggtgaactagtaatgaactagtccgtaacttgaaagtatttcgatttcttggctttatatatcttgtggaaaggacgaccggtactgtagcacaacagttgg

SEQ ID NO: 2873 - DNA, 2429 bp, Homo sapiens
  source 1..2429: mol_type = genomic DNA
accgccaccatgatggttcagcgactgggactcatttcacctccagcaagccaggtctctacagcatgcaaccagatcagtcctagcttacagagggcaatgaatgcagccaacctgaatatacctccttcagataccaggtcccttatttcgcgtgagtctttggcgtccacgaccttgagtctgacggaaagtcagtcggcctcaagcatgaagcaggagtggtcccagggctacagggccctcccttcgctctccaaccacggctctcagaatggccttgatctaggggatctccttagccttcctcccgggacatccatgtccagcaatagtgtctctaactcattaccatcctacctttttggcacggaaagtagccactctccttaccctagtcctcggcactcatccaccaggtcccactcggcccgctccaagaagagagcgctgtccttgtccccgctgtccgatggcatcgggatagatttcaataccatcatccgcacgtcgcccacgtccttggtggcctacatcaacgggtcgagggcttcgccggccaacctgtccccgcagccggaggtctacgggcatttcctgggcgtgcgcggcagctgcattccccagccgcgcccggtgcccggcagccagaagggcgtgctggtggcccctggaggcctggcgctgccggcctacggcgaggacggggccctggagcacgagcgcatgcaacagctggagcacggcggcctgcagccaggcctggtcaaccacatggtggtgcagcatggcctgccgggccccgacagccagtcggccggcctgttcaagaccgaacgcctggaggagttcccgggcagcaccgtagacctaccccccgcgcctccgctccctcctctgccgccgcccccaggccccccacccccttaccatgcccatgcgcaccttcaccacccggagctcgggccccacgcccagcagctggccttgccccaggccaccctggacgacgacggggagatggacggcatcgggggcaagcattgctgccgctggatcgactgcagcgccctgtacgaccagcaggaggagctcgtgcggcacatcgagaaggtccacatcgaccagcgcaaaggggaggacttcacttgcttctgggccggttgccctcgaagatacaagcccttcaacgcccgctataaactgctgatccacatgagagtccactctggggagaagcccaacaagtgtacgtttgaaggttgcgagaaggccttttcaaggcttgaaaatctcaagatccacttgcggagccacacaggcgagaagccgtatttgtgccagcatccgggttgtcagaaggccttcagtaactccagtgaccgcgccaaacaccagcggacgcatctggacaccaaaccttatgcttgtcaaattccaggatgtaccaaacgctacacagacccaagttccctaagaaagcatgtgaaggcacattcttccaaagagcaacaagcaaggaaaaagttgcggtccagcacagagctccatccagacctgctcacagattgcctcaccgtgcagtccctgcagccggccacttcccctagagatgctgctgctgaagggaccgtgggacgctcccctggacccgggcctgacctctattcagctcccattttctccagcaattattcaagccgaagtggaacagctgctggggccgtaccacccccacatcctgtcagtcacccttctccaggacataatgtacaggggagccctcacaacccctcctcccagttacctccactcacagctgtggacgcaggagctgagaggtttgcaccttctgctccatctcctcaccacatcagcccccggagagttccagctccttcttcaatactgcaaagaacacagcctccctatacccagcagccatcaggttcacacctgaagtcctatcagccagaaacaaactcttcttttcaaccaaatggtatccatgtccatggattttatgggcagctgcagaagttctgtcccccacactaccccgattcccagagaattgtgccgcctgtcagctcctgcagtgtggtgccttcgtttgaggactgcctagtccctacatccatgggccaggccagttttgatgttttccacagagccttctcgactcactcgggcattacagtgtatgatttaccttcaagttcctcgagcctctttggggagtctctccgcagcggggctgaagatgctaccttcttgcagatcagcaccgtggaccgctgtcctagccagctctcctctgtctacaccgaaggctagtaatgaactagtccgtaacttgaaagtatttcgatttcttggctttatatatcttgtggaaaggacgagagctacaatttgatgttcattac

SEQ ID NO: 2874 - DNA, 2894 bp, Homo sapiens
  source 1..2894: mol_type = genomic DNA
accgccaccatgaatggaagatcatgcagcatgagtctccaccggacatcgggaaccccacaggggcctaggatggtcagtggtcatcacattcctgccatccgagcccactccgggactcctggcccctcgccctgtggcagcacatcgagtcccactatggcaagccttgctaacaacctccatctcaagatgccctcaggaggagggatggctcctcagaacaacgtggctgagagccgcatccatctgcctgccttaagccccaggagacaaatgctcaccaatgggaagccgcgattccaggtcacccaggctggaggcatgtcagggtcacatactttaaagccaaagcagcaggagtttggaagcccttttcctccaaatcctgggaaaggggctcttggctttgggcctcagtgcaagtccattggaaaaggcagctgcaacaatctagtggtcaccagcagtcccatgatggttcagcgactgggactcatttcacctccagcaagccaggtctctacagcatgcaaccagatcagtcctagcttacagagggcaatgaatgcagccaacctgaatatacctccttcagataccaggtcccttatttcgcgtgagtctttggcgtccacgaccttgagtctgacggaaagtcagtcggcctcaagcatgaagcaggagtggtcccagggctacagggccctcccttcgctctccaaccacggctctcagaatggccttgatctaggggatctccttagccttcctcccgggacatccatgtccagcaatagtgtctctaactcattaccatcctacctttttggcacggaaagtagccactctccttaccctagtcctcggcactcatccaccaggtcccactcggcccgctccaagaagagagcgctgtccttgtccccgctgtccgatggcatcgggatagatttcaataccatcatccgcacgtcgcccacgtccttggtggcctacatcaacgggtcgagggcttcgccggccaacctgtccccgcagccggaggtctacgggcatttcctgggcgtgcgcggcagctgcattccccagccgcgcccggtgcccggcagccagaagggcgtgctggtggcccctggaggcctggcgctgccggcctacggcgaggacggggccctggagcacgagcgcatgcaacagctggagcacggcggcctgcagccaggcctggtcaaccacatggtggtgcagcatggcctgccgggccccgacagccagtcggccggcctgttcaagaccgaacgcctggaggagttcccgggcagcaccgtagacctaccccccgcgcctccgctccctcctctgccgccgcccccaggccccccacccccttaccatgcccatgcgcaccttcaccacccggagctcgggccccacgcccagcagctggccttgccccaggccaccctggacgacgacggggagatggacggcatcgggggcaagcattgctgccgctggatcgactgcagcgccctgtacgaccagcaggaggagctcgtgcggcacatcgagaaggtccacatcgaccagcgcaaaggggaggacttcacttgcttctgggccggttgccctcgaagatacaagcccttcaacgcccgctataaactgctgatccacatgagagtccactctggggagaagcccaacaagtgtacgtttgaaggttgcgagaaggccttttcaaggcttgaaaatctcaagatccacttgcggagccacacaggcgagaagccgtatttgtgccagcatccgggttgtcagaaggccttcagtaactccagtgaccgcgccaaacaccagcggacgcatctggacaccaaaccttatgcttgtcaaattccaggatgtaccaaacgctacacagacccaagttccctaagaaagcatgtgaaggcacattcttccaaagagcaacaagcaaggaaaaagttgcggtccagcacagagctccatccagacctgctcacagattgcctcaccgtgcagtccctgcagccggccacttcccctagagatgctgctgctgaagggaccgtgggacgctcccctggacccgggcctgacctctattcagctcccattttctccagcaattattcaagccgaagtggaacagctgctggggccgtaccacccccacatcctgtcagtcacccttctccaggacataatgtacaggggagccctcacaacccctcctcccagttacctccactcacagctgtggacgcaggagctgagaggtttgcaccttctgctccatctcctcaccacatcagcccccggagagttccagctccttcttcaatactgcaaagaacacagcctccctatacccagcagccatcaggttcacacctgaagtcctatcagccagaaacaaactcttcttttcaaccaaatggtatccatgtccatggattttatgggcagctgcagaagttctgtcccccacactaccccgattcccagagaattgtgccgcctgtcagctcctgcagtgtggtgccttcgtttgaggactgcctagtccctacatccatgggccaggccagttttgatgttttccacagagccttctcgactcactcgggcattacagtgtatgatttaccttcaagttcctcgagcctctttggggagtctctccgcagcggggctgaagatgctaccttcttgcagatcagcaccgtggaccgctgtcctagccagctctcctctgtctacaccgaaggctagtaatgaactagtccgtaacttgaaagtatttcgatttcttggctttatatatcttgtggaaaggacgaaaactataattagaacggaagtaa

SEQ ID NO: 2875 - DNA, 1964 bp, Homo sapiens
  source 1..1964: mol_type = genomic DNA
accgccaccatggcagaggcccgcacatccctgtctgcccactgtcggggcccgctggccactggcctgcacccagacctggacctcccgggccgaagcctcgccacccctgcgccttcctgctaccttctgggcagcgaacccagctctggcctgggcctccagcccgagacccacctccccgagggcagcctgaagcggtgctgcgtcttgggcctaccccccacctccccagcctcctcctcaccctgtgcctcctccgacgtcacctccatcatccgctcctcccagacgtctctggtcacctgtgtaaatggactccggagcccccctctgacgggagatctggggggcccttccaagcgggcccggcctggccctgcatcgacggacagccatgagggcagcttgcaacttgaagcctgccggaaggcgagcttcctgaagcaggaacccgcggatgagttttcagagctctttgggcctcaccagcagggcctgccgcccccctatcccctgtctcagttgccgcctggcccaagccttggaggcctggggctgggcctggcaggcagggtggtggccgggcggcaggcgtgccgctgggtggactgctgtgcagcctatgagcagcaggaggagctggtgcggcacatcgagaagagccacatcgaccagcgcaagggcgaggacttcacctgcttctgggctggctgcgtgcgccgctacaagcccttcaacgcccgctacaagctgctcatccacatgcgagtgcactcgggcgagaagcccaacaagtgcatgtttgaaggctgcagcaaggccttctcacggctggagaacctcaagatccacctgaggagccacacgggcgagaagccgtacctgtgccagcacccgggttgccagaaggccttcagcaactccagcgaccgcgccaagcaccagcgcacccacctagacacgaagccgtacgcctgtcagatccctggctgctccaagcgctacacagaccccagctccctccgcaagcacgtcaaggcccattcagccaaagagcagcaggtgcgtaagaagctgcatgcgggccctgacaccgaggccgacgtcctgaccgagtgtctggtcctgcagcagctccacacgtccacacagctggctgccagcgacggcaagggtggctgtggcctgggccaggagctgctcccaggtgtgtatcctggctccatcaccccccataacggacttgcatcgggcctcctgcccccagcgcacgacgtaccttccaggcaccacccgctggatgccaccaccagttcccaccaccatctgtcccctctgcccatggctgagagcacccgggatgggttggggcccggcctcctctcaccaatagtcagccccctgaaggggctggggccaccgccgctgcccccatcctctcagagccattctccggggggccagcccttccccacactccccagcaagccgtcctacccacccttccagagccctccacccccgcctctgcccagcccacaaggttaccagggcagtttccactccatccagagttgcttcccctatggcgactgctaccggatggctgaaccagcagccggtggggacggactggtcggggagacccacggtttcaaccccctgcggcccaatggctaccacagcctcagcacgcccttgcctgccacaggctatgaggccctggctgaggcctcatgccccacagcgctgccacagcagccatctgaagatgtggtgtccagcggccccgaggactgtggcttcttccccaatggagcctttgaccactgcctgggccacatcccctccatctacacagacacctagtaatgaactagtccgtaacttgaaagtatttcgatttcttggctttatatatcttgtggaaaggacgaaagactcctcacggagtcgactta

SEQ ID NO: 2876 - DNA, 2489 bp, Homo sapiens
  source 1..2489: mol_type = genomic DNA
accgccaccatgcattgcgaggtggctgaggcacactcggacaagaggcctaaggaggcccctggtgcgcccggccccgaccgcggccccgccagcctcggcgcgcacatggccttcagggtcaccgtgagtggcggcggctgcggggacaggggcccgcgggacctgctagcccggccgcctgcgccgccaccgcgcgcccacgacctcctccggccccgcagtccccgagactacggtccatccaaggccgccgccgccgggaaggtgaatgggagctacggacaccgtaccccgggctcagagaagagcctgctggacctggaccttgctgagggccctggccccacctgctgccagggcctgtttctccctgcaggaagcccaccgccccgggctcacccccaagcttgtgagaggctgctgcatttcccccaccctgacaggtcacctagaccccaggccacgtatgtgaacggcagcctcccaaccacacaacacatcaaacaggagtccttgcccgactaccaagccatggcagaggcccgcacatccctgtctgcccactgtcggggcccgctggccactggcctgcacccagacctggacctcccgggccgaagcctcgccacccctgcgccttcctgctaccttctgggcagcgaacccagctctggcctgggcctccagcccgagacccacctccccgagggcagcctgaagcggtgctgcgtcttgggcctaccccccacctccccagcctcctcctcaccctgtgcctcctccgacgtcacctccatcatccgctcctcccagacgtctctggtcacctgtgtaaatggactccggagcccccctctgacgggagatctggggggcccttccaagcgggcccggcctggccctgcatcgacggacagccatgagggcagcttgcaacttgaagcctgccggaaggcgagcttcctgaagcaggaacccgcggatgagttttcagagctctttgggcctcaccagcagggcctgccgcccccctatcccctgtctcagttgccgcctggcccaagccttggaggcctggggctgggcctggcaggcagggtggtggccgggcggcaggcgtgccgctgggtggactgctgtgcagcctatgagcagcaggaggagctggtgcggcacatcgagaagagccacatcgaccagcgcaagggcgaggacttcacctgcttctgggctggctgcgtgcgccgctacaagcccttcaacgcccgctacaagctgctcatccacatgcgagtgcactcgggcgagaagcccaacaagtgcatgtttgaaggctgcagcaaggccttctcacggctggagaacctcaagatccacctgaggagccacacgggcgagaagccgtacctgtgccagcacccgggttgccagaaggccttcagcaactccagcgaccgcgccaagcaccagcgcacccacctagacacgaagccgtacgcctgtcagatccctggctgctccaagcgctacacagaccccagctccctccgcaagcacgtcaaggcccattcagccaaagagcagcaggtgcgtaagaagctgcatgcgggccctgacaccgaggccgacgtcctgaccgagtgtctggtcctgcagcagctccacacgtccacacagctggctgccagcgacggcaagggtggctgtggcctgggccaggagctgctcccaggtgtgtatcctggctccatcaccccccataacggacttgcatcgggcctcctgcccccagcgcacgacgtaccttccaggcaccacccgctggatgccaccaccagttcccaccaccatctgtcccctctgcccatggctgagagcacccgggatgggttggggcccggcctcctctcaccaatagtcagccccctgaaggggctggggccaccgccgctgcccccatcctctcagagccattctccggggggccagcccttccccacactccccagcaagccgtcctacccacccttccagagccctccacccccgcctctgcccagcccacaaggttaccagggcagtttccactccatccagagttgcttcccctatggcgactgctaccggatggctgaaccagcagccggtggggacggactggtcggggagacccacggtttcaaccccctgcggcccaatggctaccacagcctcagcacgcccttgcctgccacaggctatgaggccctggctgaggcctcatgccccacagcgctgccacagcagccatctgaagatgtggtgtccagcggccccgaggactgtggcttcttccccaatggagcctttgaccactgcctgggccacatcccctccatctacacagacacctagtaatgaactagtccgtaacttgaaagtatttcgatttcttggctttatatatcttgtggaaaggacgaaaggagctagtgccttcgtgttag

SEQ ID NO: 2877 - DNA, 1736 bp, Homo sapiens
  source 1..1736: mol_type = genomic DNA
accgccaccatggaggcgctgagtcgagctgggcaggagatgagcctagcggccctgaagcaacacgacccctatatcaccagcatcgcagacctcacgggccaggtcgctctgtacaccttctgccccaaggccaaccagtgggagaagactgatatagaagggaccttattcgtatatcgaaggtcagcttccccttaccatggttttaccattgtgaatcgactaaatatgcacaatctagttgaaccagtgaataaagatttggaatttcagctccatgaaccatttcttctgtatagaaatgcaagcttgtcgatatatagtatctggttttatgacaagaatgactgtcaccgcatagcaaaactcatggctgatgtggtagaagaggagacacggcgatcccagcaagctgctcgggacaaacagagtcccagccaggccaatggctgcagcgaccacaggcccatcgacatcctggagatgctgagcagagccaaggatgagtatgagaggtctgctccatctggacacaagcatctgacggtagaagagttatttggaacctctttgccaaaggaacaaccagcagttgtgggtctggattcagaagaaatggagaggttgccaggagatgcctcccagaaagagcccaattcattcctaccatttccctttgagcagttaggaggagcccctcaatcagaaaccctgggtgtcccttctgctgcccaccattcagtccagcctgaaatcaccaccccggtgctaatcactccagcctccatcacacagtccaatgaaaagcatgctccaacctacacaatcccgttgagccctgttctcagtcccactctgccagctgaagctcctactgcacaggttccccccagcttacctcgaaacagcaccatgatgcaggcagtgaagaccacgcctagacagaggtctccactcctgaaccagccagtccctgagctaagccatgccagtctgattgccaaccagagccccttcagggccccattgaacgtgacgaacacagctggcacatccctcccaagcgttgatcttctccagaaactcaggttgaccccacagcatgaccaaatacagacacaaccacttgggaaaggtgcaatggtagccagcttttctccggcagctggtcagctagccacacctgagagcttcatagagcctccctctaagacagcagcagcaagagtggcggcctcagcctccctgagcaacatggtgcttgctccccttcagtctatgcagcagaaccaggatcctgaagtatttgtgcagcctaaggtgttatccagtgccatcccggttgcaggcgccccactggttactgcaacgaccactgcagtgtcttcagtcctgctggccccaagtgttttccagcagacagttacaagatcttcggaccttgagaggaaagccagctccccttctcctctaactattggaacgccagaaagtcagagaaagccttccattattctcagcaagtctcagctccaggatacattaatacatctaataaagaatgattccagcttcctcagtacacttcatgaagtctacttgcaggttctgaccaagaacaaagacaaccacaacctatagtaatgaactagtccgtaacttgaaagtatttcgatttcttggctttatatatcttgtggaaaggacgacgttgactcccaaacgcacgggtg

SEQ ID NO: 2878 - DNA, 971 bp, Homo sapiens
  source 1..971: mol_type = genomic DNA
accgccaccatgatgtcttatcttaagcaaccgccttacgcagtcaatgggctgagtctgaccacttcgggtatggacttgctgcacccctccgtgggctacccggccaccccccggaaacagcgccgggagaggacgacgttcactcgggcgcagctagatgtgctggaagcactgtttgccaagacccggtacccagacatcttcatgcgagaggaggtggcactgaaaatcaacttgcccgagtcgagggtgcaggtatggtttaagaatcgaagagctaagtgccgccaacaacagcaacaacagcagaatggaggtcaaaacaaagtgagacctgccaaaaagaagacatctccagctcgggaagtgagttcagagagtggaacaagtggccaattcactcccccctctagcacctcagtcccgaccattgccagcagcagtgctcctgtgtctatctggagcccagcttccatctccccactgtcagatcccttgtccacctcctcttcctgcatgcagaggtcctatcccatgacctatactcaggcttcaggttatagtcaaggatatgctggctcaacttcctactttgggggcatggactgtggatcatatttgacccctatgcatcaccagcttcccggaccaggggccacactcagtcccatgggtaccaatgcagtcaccagccatctcaatcagtccccagcttctctttccacccagggatatggagcttcaagcttgggttttaactcaaccactgattgcttggattataaggaccaaactgcctcctggaagcttaacttcaatgctgactgcttggattataaagatcagacatcctcgtggaaattccaggttttgtagtaatgaactagtccgtaacttgaaagtatttcgatttcttggctttatatatcttgtggaaaggacgagcgcttaggaaccatacaatacta

SEQ ID NO: 2879 - DNA, 2387 bp, Homo sapiens
  source 1..2387: mol_type = genomic DNA
accgccaccatgttagcctcaagcaagaggatgaacagttcttcacgttctcaaatccttctaaggtggaagtcagacaaggctcagagtggaccctacaatgttgagaaggaaatccttacttcaagattcttgcgtgacactgagacctgtcgacagaattttaggaattttccatacccagacctggctggtcctcgaaaggcattgagtcaactccgagagctctgccttaagtggctgagacctgagattcactcaaaggaacaaattttggagctgctggtgctggagcaattcctgaccatcctgcctggtgaggttaggacttgggtaaagtcccagtatccagagagcagcgaggaagcagtgactctggtggaggatttgactcagattctagaagaggaagctcctcaaaactctaccctttcccaagataccccagaggaagaccccagaggaaaacatgctttccagacaggatggctaaatgacttggtgaccaaagaatcgatgacattcaaagatgtggctgtagacatcacccaggaggactgggagttaatgcgtcctgtgcagaaggaattatacaagactgtgacgttacagaactattggaacatggtttctctgggacttacagtgtacagaccaactgtgattcccatattggaagaaccatggatggtgataaaagaaattttagaaggccctagtccagaatgggaaactaaagcccaagcatgtactccagtggaggatatgtctaaactcacaaaggaagaaacccataccatcaaattagaagactcatatgactacgatgatagactagagaggcgaggaaaaggtggcttctggaaaattcacactgatgaaagaggtttcagtttgaagtcagtcctttcacaagaatatgatcctacagaagaatgtcttagtaaatatgatatatatagaaataattttgaaaagcattcaaacctaattgtacagtttgatacccaattagataataaaacttctgtgtataatgaaggcagggcaaccttcaatcatgtctcatatggtattgtacataggaaaatacttcctggagagaagccttacaagtgtaatgtgtgtgggaaaaaatttaggaaatacccatccctcctgaaacaccaaagtacccatgccaaagagaaatcgtatgaatgtgaagaatgtgggaaagagtttaggcatatctcatcccttattgcacatcagagaatgcacactggagaaaaaccatatgaatgccaccagtgtggtaaagccttcagccagcgtgcacaccttactatacatcagagaattcatactggagagaaaccctataagtgtgatgactgtgggaaagacttcagtcagcgtgcacaccttaccatccatcaaaggacacatactggagagaaaccatataaatgcttggaatgtggtaaaaccttcagtcatagttcatcactgattaatcatcagagagttcatactggagaaaaaccttatatatgcaatgaatgtgggaagactttcagtcagagtacacaccttcttcagcatcaaaaaatacatactgggaagaaaccatataaatgcaatgaatgttggaaagtgtttagtcagagtacttaccttattcgacatcagagaattcattctggagagaagtgttataaatgtaatgaatgtggaaaagcctttgctcattcctcaacccttattcaacatcaaaccactcacactggagagaaatcctatatatgtaatatatgtgggaaagccttcagccagagtgcaaatcttactcaacatcatagaacacatactggagagaaaccatataaatgcagtgtgtgtgggaaagcattcagccagagtgtgcaccttactcaacatcagaggattcataatggagaaaaaccctttaaatgcaatatatgtgggaaagcatatagacaaggcgcaaatcttactcagcatcaaaggattcatactggagaaaaaccctataaatgtaatgaatgtgggaaagctttcatttattcctcatcacttaatcaacatcagagaactcatactggagagagaccctataaatgtaatgaatgtgataaggattttagccagagaacatgccttattcaacaccagagaattcacacaggagagaaaccctatgcatgtcgtatatgtggtaaaaccttcacccagagtacaaaccttattcagcatcaacgtgttcatacaggtgccaaacatcgtaattagtaatgaactagtccgtaacttgaaagtatttcgatttcttggctttatatatcttgtggaaaggacgatggttggaatcaggaacggttaga

SEQ ID NO: 2880 - DNA, 1883 bp, Homo sapiens
  source 1..1883: mol_type = genomic DNA
accgccaccatgaccatgttcaaggaggcagtgaccttcaaggatgtggctgtggtcttcaccgaggaggagctggggctgctggacgtttcccagaggaagctgtatcgagatgtcatgctggagaacttcagaaacctgctatcagtggggcatcaactttcccaccgagatacttttcacttccaaagagaagaaaagttttggatcatggagacagcaacccaaagagaagggaattcaggaggcaagatccaaactgagttggagtctgttccagaaacaggaccacatgaagagtggtcttgccagcaaatctgggaacaaactgcaagtgagttaactagacctcaagactccataagtagctctcagttctccacacaaggtgatgtcccctcccaggttgacgcaggactatctataattcacataggagagacaccttctgagcatgggaagtgtaaaaaattcttcagtgatgtctccatccttgatcttcatcaacaattacactcaggaaagatatcccatacatgtaatgagtacaggaagagattctgttatagctcagctctttgtcttcatcagaaagttcacatgggagagaaacgctataagtgtgatgtgtgtagtaaggcatttagtcagaactcacaactgcaaactcatcagagaatccacactggagagaaaccattcaaatgtgagcagtgtgggaaaagtttcagccgtagatcaggaatgtatgttcattgcaaattacacacaggagaaaaacctcatatttgtgaggaatgtgggaaggccttcattcacaattcccagcttcgggaacatcaaagaatccatactggggagaagccattcaaatgttatatatgtggtaagagcttccatagtagatcaaatcttaataggcattccatggtccacatgcaagagaaatcatttagatgtgatacctgtagtaatagctttggtcagagatcagcacttaatagtcattgcatggaccacacaaaagagaaactatacaaatgtgaagaatgtggaaggagcttcacttgtaggcaagatctttgtaagcatcagatggaccatacaggagacaaaccatataattgtaatgtatgtgggaagggcttcaggtggtcctcatgtctttcaagacatcagcgggtccacaatggagaaacaacattcaagtgcgacggatgtgggaagagattttatatgaattcacagggccattcacatcagagagcctatagagaagaagaactgtataaatgtcagaagtgtgggaagggctacattagtaagtttaatcttgacttgcaccagagggtccacacgggagagagaccttataattgtaaggaatgtggaaagagcttcaggtgggcctcaggtattttgagacataagagactccatactggagaaaaaccattcaaatgtgaagagtgtgggaagaggtttactgagaattcaaaacttcgtttccatcaaagaattcacactggagaaaagccttacaaatgtgaggagtgtggaaagggattcagatgggcctcaactcatctaacccatcaaagactccacagcagagaaaaactattccaatgtgaggattgtgggaagagcagtgagcacagttcatgccttcaagaccaacaaagcgaccacagtggagaaaaaacatccaaatgtgaggactgtgggaagcgctacgagaggcgcttgaatctagatatgattttatcattatttttaaatgatatatagtaatgaactagtccgtaacttgaaagtatttcgatttcttggctttatatatcttgtggaaaggacgatggtcggcgtgagtccaacgtata

SEQ ID NO: 2881 - DNA, 1895 bp, Homo sapiens
  source 1..1895: mol_type = genomic DNA
accgccaccatgattaagttccagattcaagggatacatgtgcaggaaagggtgacattcaaggatgtggctgttgtcttcaccaaggaagagctggcactattggataaagcccagataaacctgtaccaagatgtgatgctggaaaacttcaggaacctcatgttagtgagagacgggattaaaaacaacattttgaatcttcaggcaaaggggttaagttacctttcgcaagaagtgcttcattgctggcagatttggaaacaaaggatccgggatttaactgtgagtcaggattatatcgtgaaccttcaagaagagtgttccccacatttagaagatgtttccctcagtgaagagtgggcaggcatttctcttcagatttctgaaaatgaaaactatgtagtaaatgccattatcaaaaatcaagatatcacagcatggcaaagcctgacacaggttcttaccccagaatcgtggaggaaagccaacataatgaccgagccccagaactctcagggaagatataagggaatttacatggaagagaaattgtacagacgtgctcagcatgatgacagcctcagttggacctcatgtgatcatcatgagtcccaagaatgtaaaggagaggaccctggtagacatcccagctgtgggaaaaacttgggtatgaaatcaacggttgaaaaacgtaatgcggcccatgtattaccacagcctttcccatgtaataactgtggggtggcctttgcagatgatacagatcctcatgtccatcacagcactcacctaggagaaaaatcttataaatgtgaccagtatggaaagaactttagtcagagccaagatcttatcgttcattgtaaaactcactctggcaagactccctatgaattccacgaatggcctatgggctgcaaacagagctcagaccttcccagatatcagaaagtctcctcaggagacaaaccctacaaatgtaaagaatgtggcaagggcttcaggcgcagctcttcccttcacaaccatcatcgagtccacacaggggagatgccctacaaatgcgatgaatgtgggaaagggtttggatttaggtcacttctttgtattcatcagggagtacacacagggaaaaagccctataaatgtgaagagtgtgggaagggctttgatcagagctccaaccttcttgtccatcagagagtccacactggagagaagccctacaaatgcagtgagtgtggcaagtgctttagttcaagctccgttcttcaagtccactggaggtttcacacaggggagaaaccatataggtgtggtgagtgtggaaagggcttcagccaatgtacacaccttcacattcaccagagagtccacacaggggagaaaccatacaaatgcaatgtgtgtggaaaggattttgcgtatagctctgttcttcacactcatcagagagttcacactggagaaaaaccatataaatgtgaagtgtgtggaaagtgcttcagttacagttcatattttcacttacatcaaagagatcacatcagagagaaaccatataaatgtgatgagtgtggtaaaggcttcagccggaattcagatcttaatgttcacctcagagtccacacaggagagaggccctataagtgtaaggcatgtggtaagggcttcagtcgtaattcatacctccttgcccatcagagagtgcatatagatgagacacagtacacacactgtgagcgtggaaaggaccttctgactcatcaaagactacatgagcagagagaaacattatagtaatgaactagtccgtaacttgaaagtatttcgatttcttggctttatatatcttgtggaaaggacgagtccgcatcggacggtgttctact

SEQ ID NO: 2882 - DNA, 1493 bp, Homo sapiens
  source 1..1493: mol_type = genomic DNA
accgccaccatgcagtttgtgtcaacacggccgcagcctcagcagctgggcatccagggcctggggctggacagcgggagctggagctgggcccaggctctgcccccggaggaggtctgccaccaggagccggcgctgcgcggggaaatggccgagggaatgccgcccatgcaggctcaagaatgggacatggacgcccggcggccaatgccttttcagttcccaccctttccagatagggcacctgtcttccccgaccgcatgatgcgagagccccagttgcccacagcagagatctcactctggactgtggtggctgccattcaggctgtggagaggaaggtggatgcccaggccagccagctgctgaacctggaggggcgcacggggacagccgagaagaagctggccgactgtgaaaagacggccgtggaatttgggaaccacatggagagcaagtgggccgtgctggggaccctgctgcaggagtacgggctgctgcagaggcggctggagaacttggagaacttgctgcgcaacaggaacttctgggtcctgcggctgcccccgggcagcaagggggaggcccccaaggttccagtgacttttgtcgacattgctgtgtacttctccgaagacgagtggaagaacttggacgaatggcagaaggagctttataacaaccttgttaaggagaactacaaaaccctcatgtccctggacgcggagggctcagtccccaagccagatgctccagtccaggctgagcccagggaagaaccttgtgtgtgggagcagcgccaccccgaagagagagaaatcccaatggatcccgaagcaggagcagagcccctggtgcctgcgcaggatgcgtcctcccaggtgaagcgtgaggacaccctgtgtgtccggggtcagcggggcctggaggaaagagccatccctacggaatccattaccgactccccaatttctgcccaggacctcttgtcccggattaaacaggaggagcatcagtgcgtgtgggatcagcaggatttggcagacagagatattcccacggatcccaattcagagtctctcatctcagcacatgacattttgtcatggatcaagcaggaggagcagccatacccatggggaccacgcgactcaatggacggagagcttggattagactctggccctagtgacagcctgctgatggtgaagaacccacccccggccccgccacagccccagccccagccccagccaccgcagccgcagctgcagtcgcagccccagccccagagcctgccccccatcgcggtggccgagaacccgggcggccccccgagccgagggctgctggacgacggtttccagccacaccaaggagcggccctacgagtgcgctagtaatgaactagtccgtaacttgaaagtatttcgatttcttggctttatatatcttgtggaaaggacgaatgctgcgtttgccgtatatcggc

SEQ ID NO: 2883 - DNA, 2117 bp, Homo sapiens
  source 1..2117: mol_type = genomic DNA
accgccaccatgcagtttgtgtcaacacggccgcagcctcagcagctgggcatccagggcctggggctggacagcgggagctggagctgggcccaggctctgcccccggaggaggtctgccaccaggagccggcgctgcgcggggaaatggccgagggaatgccgcccatgcaggctcaagaatgggacatggacgcccggcggccaatgccttttcagttcccaccctttccagatagggcacctgtcttccccgaccgcatgatgcgagagccccagttgcccacagcagagatctcactctggactgtggtggctgccattcaggctgtggagaggaaggtggatgcccaggccagccagctgctgaacctggaggggcgcacggggacagccgagaagaagctggccgactgtgaaaagacggccgtggaatttgggaaccacatggagagcaagtgggccgtgctggggaccctgctgcaggagtacgggctgctgcagaggcggctggagaacttggagaacttgctgcgcaacaggaacttctgggtcctgcggctgcccccgggcagcaagggggaggcccccaaggttccagtgacttttgtcgacattgctgtgtacttctccgaagacgagtggaagaacttggacgaatggcagaaggagctttataacaaccttgttaaggagaactacaaaaccctcatgtccctggacgcggagggctcagtccccaagccagatgctccagtccaggctgagcccagggaagaaccttgtgtgtgggagcagcgccaccccgaagagagagaaatcccaatggatcccgaagcaggagcagagcccctggtgcctgcgcaggatgcgtcctcccaggtgaagcgtgaggacaccctgtgtgtccggggtcagcggggcctggaggaaagagccatccctacggaatccattaccgactccccaatttctgcccaggacctcttgtcccggattaaacaggaggagcatcagtgcgtgtgggatcagcaggatttggcagacagagatattcccacggatcccaattcagagtctctcatctcagcacatgacattttgtcatggatcaagcaggaggagcagccatacccatggggaccacgcgactcaatggacggagagcttggattagactctggccctagtgacagcctgctgatggtgaagaacccacccccggccccgccacagccccagccccagccccagccaccgcagccgcagctgcagtcgcagccccagccccagagcctgccccccatcgcggtggccgagaacccgggcggccccccgagccgagggctgctggacgacggtttccaggtgctgcccggggagcgtggctccggcgaggcgccgccgggtggggaccgcagcaccgggggcggcgggggcgatgggggcggtgggggcggcggcgcggaggcggggacgggggcaggcggcggctgtggcagctgctgccctggcgggctgcggcggagcctcctcctgcacggcgcccgcagcaagccctactcgtgccccgagtgcggcaagagcttcggcgtgcgcaagagcctcatcatccaccaccgcagccacaccaaggagcggccctacgagtgcgctgagtgcgagaagagcttcaactgccactcgggcctcatccgccaccagatgacgcaccgcggcgagcggccctacaagtgctcggagtgcgagaagacctacagccgtaaggagcacctgcagaaccaccagcggctgcacacgggcgagcggcctttccaatgtgcactgtgcggcaagagcttcatccgcaagcagaacctgctcaagcaccagcgcatccacacgggcgagcgcccctacacgtgcggcgagtgcggcaagagcttccgctacaaggagtcgctcaaggaccacctgcgcgtgcacagcggcggcccgggccccggcgccccacggcagctcccgccgcctcctgagcgagactagtaatgaactagtccgtaacttgaaagtatttcgatttcttggctttatatatcttgtggaaaggacgagatataaagagacggacttacgga

SEQ ID NO: 2884 - DNA, 2141 bp, Homo sapiens
  source 1..2141: mol_type = genomic DNA
accgccaccatggagtctcgctctgtcgcccaggctggagtgcagtggtgcgatcttggctcactgcaagctccgcctcctgggttcacgctattctcctgcctcagcctcctgagtagctgggactacagttctggcttttctggattctgtgcttcaccaatagaggaatcccatggagcattaattagttcttgcaattccagaaccatgactgatgggttggtgacattcagggatgtggccatcgacttctctcaggaggagtgggaatgcctggaccctgctcagagggacttgtacgtggatgtaatgttggagaactatagtaacttggtgtcactggatttggagtcaaaaacgtatgagaccaaaaaaatattttcagaaaatgatatttttgaaataaatttttcccagtgggagatgaaggacaaaagtaaaacccttggccttgaggcatccatcttcagaaataattggaagtgcaaaagcatattcgagggactaaaaggacatcaagagggatacttcagtcaaatgataatcagctatgaaaaaataccttcttacagaaaaagtaaatctcttactccacatcaaagaattcataatacagagaaatcctatgtttgtaaggaatgtgggaaggcttgcagtcatggctcaaaacttgttcaacatgagagaactcatacagctgaaaaacactttgaatgtaaagaatgtgggaagaattatttaagtgcctatcaactcaatgtgcatcagagatttcatactggtgagaaaccctatgagtgtaaggaatgtgggaagacctttagctggggatcaagccttgttaaacatgagagaattcacactggtgagaaaccctatgaatgtaaagaatgtgggaaggcctttagtcgtggctatcaccttacccaacatcagaaaattcatactggtgtgaaatcttataaatgtaaggaatgtgggaaggcctttttttggggctcaagccttgctaaacatgagataattcatacaggtgagaaaccttataaatgtaaagaatgtgggaaggccttcagtcgtggctatcagcttactcagcatcagaaaatccatactggtaagaaaccttatgaatgtaaaatatgtggaaaggctttttgttggggctatcaacttactcgacatcagatatttcatactggtgagaaaccctatgaatgcaaggaatgtgggaaggcttttaattgcggatcaagtcttattcaacatgaaagaattcatactggtgagaaaccttatgaatgtaaagaatgtggaaaggcctttagtcgtggctatcacctttctcaacatcagaaaatccatactggtgagaaaccttttgaatgtaaggaatgtgggaaggcctttagttggggttcaagccttgttaaacatgagagagttcatactggtgagaaatcccatgaatgtaaagaatgcggaaagaccttttgtagtgggtatcaacttactcgacatcaggtatttcacactggtgagaaaccctatgaatgtaaggaatgtgggaaggcttttaattgtggatcaagccttgttcaacatgaaagaatccatacaggggagaaaccctatgaatgtaaagaatgtgggaaggcttttagtcgtggctatcaccttactcaacatcagaaaattcataccggtgagaaacctttcaaatgtaaggaatgtgggaaggccttcagttggggttcaagcctagttaagcatgagagagtccatactaatgagaagtcttatgaatgtaaagactgtgggaaggcctttggtagtggctatcaacttagtgttcatcagagatttcatactggtgagaagctttatcaacgtaaggaattcgggaagacctttacttgtggctcaaaacttgttcatgagagaactcatagtaatgataaaccctacaaatataacgaatgtggggaagcctttctgtggacaacttactcaaatgagaaaattgatactgatgaaaccttatagtaatgaactagtccgtaacttgaaagtatttcgatttcttggctttatatatcttgtggaaaggacgaactgttaccgggtccgggagctgt

SEQ ID NO: 2885 - DNA, 1724 bp, Homo sapiens
  source 1..1724: mol_type = genomic DNA
accgccaccatgaaggacaaaagtaaaacccttggccttgaggcatccatcttcagaaataattggaagtgcaaaagcatattcgagggactaaaaggacatcaagagggatacttcagtcaaatgataatcagctatgaaaaaataccttcttacagaaaaagtaaatctcttactccacatcaaagaattcataatacagagaaatcctatgtttgtaaggaatgtgggaaggcttgcagtcatggctcaaaacttgttcaacatgagagaactcatacagctgaaaaacactttgaatgtaaagaatgtgggaagaattatttaagtgcctatcaactcaatgtgcatcagagatttcatactggtgagaaaccctatgagtgtaaggaatgtgggaagacctttagctggggatcaagccttgttaaacatgagagaattcacactggtgagaaaccctatgaatgtaaagaatgtgggaaggcctttagtcgtggctatcaccttacccaacatcagaaaattcatactggtgtgaaatcttataaatgtaaggaatgtgggaaggcctttttttggggctcaagccttgctaaacatgagataattcatacaggtgagaaaccttataaatgtaaagaatgtgggaaggccttcagtcgtggctatcagcttactcagcatcagaaaatccatactggtaagaaaccttatgaatgtaaaatatgtggaaaggctttttgttggggctatcaacttactcgacatcagatatttcatactggtgagaaaccctatgaatgcaaggaatgtgggaaggcttttaattgcggatcaagtcttattcaacatgaaagaattcatactggtgagaaaccttatgaatgtaaagaatgtggaaaggcctttagtcgtggctatcacctttctcaacatcagaaaatccatactggtgagaaaccttttgaatgtaaggaatgtgggaaggcctttagttggggttcaagccttgttaaacatgagagagttcatactggtgagaaatcccatgaatgtaaagaatgcggaaagaccttttgtagtgggtatcaacttactcgacatcaggtatttcacactggtgagaaaccctatgaatgtaaggaatgtgggaaggcttttaattgtggatcaagccttgttcaacatgaaagaatccatacaggggagaaaccctatgaatgtaaagaatgtgggaaggcttttagtcgtggctatcaccttactcaacatcagaaaattcataccggtgagaaacctttcaaatgtaaggaatgtgggaaggccttcagttggggttcaagcctagttaagcatgagagagtccatactaatgagaagtcttatgaatgtaaagactgtgggaaggcctttggtagtggctatcaacttagtgttcatcagagatttcatactggtgagaagctttatcaacgtaaggaattcgggaagacctttacttgtggctcaaaacttgttcatgagagaactcatagtaatgataaaccctacaaatataacgaatgtggggaagcctttctgtggacaacttactcaaatgagaaaattgatactgatgaaaccttatagtaatgaactagtccgtaacttgaaagtatttcgatttcttggctttatatatcttgtggaaaggacgacgtagaccacatccgcaataccgc

SEQ ID NO: 2886 - DNA, 2681 bp, Homo sapiens
  source 1..2681: mol_type = genomic DNA
accgccaccatgaaaatcggcagtgggttcctgagtggcggcggaggtaccggcagtagcggtggtagcggctccggcggcggtggtagtggcggcggcggcggcggcggcagcagcggcaggagggcagagatggaacccacctttccccaggccccggccgctgagcccccccctccgccagccccggacatgactttcaagaaggagccggcggcgtcagccgcggccttcccctcgcagaggacctcctgggggttcttgcagtctttggttagcatcaaacaggagaaacccgcggatcctgaggagcagcagtcccaccaccaccatcaccaccaccactatggggggctgttcgctggagctgaagagaggtctccaggcctaggaggcggtgaaggggggagtcacggcgtcatccaggacctcagtattctccaccagcatgtccagcagcaaccagcccagcaccaccgtgacgtattactcagcagcagtagcaggactgatgaccaccatggcactgaggagccaaagcaggacactaatgtcaaaaaggcaaaaaggccaaagccagaatctcagggaatcaaagccaagaggaagccaagtgcatcttccaaaccttctttggttggagatggagaaggtgccatcctctccccaagtcagaaacctcatatctgtgatcactgtagtgctgctttccgaagctcctatcacctgcggagacatgtcctcattcatacaggagaaagacctttccagtgcagccagtgtagtatgggtttcattcagaaatacctactacagagacatgagaaaattcatagtagagagaagccatttggatgtgatcagtgcagcatgaagtttattcagaagtaccatatggagagacacaagaggacacatagtggagaaaagccatataagtgtgacacttgccaacagtatttttcaaggactgatagattgttgaagcacaggcgcacatgtggtgaagtcatagttaaaggagccactagtgcagaacctgggtcatcaaaccataccaatatgggtaatctggctgtgttgtctcagggaaatacaagttcttcaaggagaaaaacaaagtcaaaaagcatagctattgaaaataaggaacagaagaccggtaaaacaaatgaatcgcaaatttcaaataatataaacatgcagagttactcagtagaaatgcctaccgtgtcttccagtggaggcataattggcactggaatagatgaactgcagaagagggtgccaaaattgatctttaagaaaggaagcagaaagaatacagataaaaactaccttaactttgtgtcaccattaccagacatagtaggacagaaatccttgtctggaaaaccaagtggctcacttggcatagtatcaaataatagtgtggagaccattggtcttctccaaagtacaagtggcaaacaaggtcagataagtagtaattatgatgatgccatgcagttttcaaagaaaagaagatatttaccaactgccagcagcaacagtgccttttctataaacgtaggacacatggtctcccaacagtctgtcattcagtctgcaggtgtcagtgttttggacaatgaggcaccattgtcacttattgactcctcagctctaaatgctgaaattaaatcttgtcatgacaagtctggaattcctgatgaggttttacaaagtattttggatcaatactccaacaaatcagaaagccagaaagaggatcctttcaatattgcagaaccacgagtggatttacacacctcaggagaacactcagaattggttcaagaagaaaatttgagcccaggcacccaaacaccttcaaatgataaagcaagtatgttgcaagaatactccaaatacctccaacaggcttttgaaaaatccactaatgcaagttttactcttggacacggtttccaatttgtcagtttgtcttcacctctccacaaccacactttgtttccagaaaaacaaatatacactacgtctcctttggagtgtggtttcggccaatctgttacctcagtgttgccatcttcattgccaaagcctccttttgggatgttgtttggatctcagccaggtctttatttgtctgctttggatgctacacatcagcagttgacaccttcccaggagctggatgatctgatagattctcagaagaacttagagacttcatcagccttccagtcctcatctcagaaattgactagccagaaggaacagaaaaacttagagtcttcaacaggctttcagattccatctcaggagttagctagccagatagatcctcagaaagacatagagcctagaacaacgtatcagattgagaactttgcacaagcgtttggttctcagtttaagtcgggcagcagggtgccaatgacctttatcactaactctaatggagaagtggaccatagagtaaggacttcagtgtcagatttctcagggtatacaaatatgatgtctgatgtaagtgagccatgtagtacaagagtaaagacacccaccagccagagttacaggtagtaatgaactagtccgtaacttgaaagtatttcgatttcttggctttatatatcttgtggaaaggacgaatgtacatcttaccagatctccct

SEQ ID NO: 2887 - DNA, 1151 bp, Homo sapiens
  source 1..1151: mol_type = genomic DNA
accgccaccatgagtaaaagcaaagatgatgctcctcacgaactggagagccagtttatcttacgtctgcctccagaatatgcctctactgtgagaagggcagtacagtctggtcatgtcaacctcaaggacagactgacaattgagttacatcctgatgggcgtcatggaatcgtcagagtggaccgtgttccattggcctcaaaattagtagacctgccctgtgttatggaaagcttgaaaaccattgataaaaaaactttttacaagacagctgatatctgtcagatgcttgtatccacagttgatggtgatctctatcctcctgtggaggagccagttgctagcactgatcctaaagcaagcaagaaaaaggataaggacaaagagaaaaagtttatctggaaccacggaattactctgcctctaaagaatgtcaggaagagaaggttccggaagacagcaaagaagaaatatattgaatctccagatgttgaaaaagaagtgaaacgattgctgagtacagatgctgaagctgttagtactcggtgggaaataattgccgaagatgaaacaaaggaggcagaaaatcaaggcctggatatctcttctccaggaatgtctggtcacaggcagggccatgactcattagaacatgatgagcttcgggagatattcaatgacctcagcagcagcagtgaggatgaagatgagacccagcatcaagatgaagaagatataaacatcattgacacggaggaagatctggagagacagctacaggacaagctaaatgaatcagatgaacagcaccaggaaaatgaaggaaccaatcagctggttatgggaattcagaagcagattgacaacatgaaaggcaagctccaagagacccaggacagggcaaaacgacaagaggatctcatcatgaaagtggaaaatctggctctcaagaacagatttcaggctgtactggatgagctcaaacaaaaggaagaccgagaaaaggagcaactcagctctttgcaagaggagctagaatcactcctagagaagtagtaatgaactagtccgtaacttgaaagtatttcgatttcttggctttatatatcttgtggaaaggacgaggtagccagaacgttcatttacga

SEQ ID NO: 2888 - DNA, 2246 bp, Homo sapiens
  source 1..2246: mol_type = genomic DNA
accgccaccatgacaaagcgccgtctacaaacaatcaccgcttgccttcaacttcgggaagggtctccgtctctccaccgggggcttcatccttccagggaggagaagagggactccagaatggctgaggagaagaagctgaagcttagcaacactgtgctgccctcggagtccatgaaggtggtggctgaatccatgggcatcgcccagattcaggaggagacctgccagctgctaacggatgaggtcagctaccgcatcaaagagatcgcacaggatgccttgaagttcatgcacatggggaagcggcagaagctcaccaccagtgacattgactacgccttgaagctaaagaatgtcgagccactctatggcttccacgcccaggagttcattcctttccgcttcgcctctggtgggggccgggagctttacttctatgaggagaaggaggttgatctgagcgacatcatcaatacccctctgccccgggtgcccctggacgtctgcctcaaagctcattggctgagcatcgagggctgccagccagctatccccgagaacccgcccccagctcccaaagagcaacagaaggctgaagccacagaacccctgaagtcagccaagccaggccaggaggaagacggacccctgaagggcaaaggtcaaggggccaccacagccgacggcaaagggaaagagaagaaggcgccgcccttgctggagggggcccccttgcgactgaagccccggagcatccacgagttgtctgtggagcagcagctctactacaaggagatcaccgaggcctgcgtgggctcctgcgaggccaagagggcggaagccctgcaaagcattgccacggaccctggactgtatcagatgctgccacggttcagtacctttatctcggagggggtccgtgtgaacgtggttcagaacaacctggccctactcatctacctgatgcgtatggtgaaagcgctgatggacaaccccacgctctatctagaaaaatacgtccatgagctgattccagctgtgatgacctgcatcgtgagcagacagttgtgcctgcgaccagatgtggacaatcactgggcactccgagactttgctgcccgcctggtggcccagatctgcaagcattttagcacaaccactaacaacatccagtcccggatcaccaagaccttcaccaagagctgggtggacgagaagacgccctggacgactcgttatggctccatcgcaggcttggctgagctgggacacgatgttatcaagactctgattctgccccggctgcagcaggaaggggagcggatccgcagtgtgctggacggccctgtgctgagcaacattgaccggattggagcagaccatgtgcagagcctcctgctgaaacactgtgctcctgttctggcaaagctgcgcccaccgcctgacaatcaggacgcctatcgggcagaattcgggtcccttgggcccctcctctgctcccaggtggtcaaggctcgggcccaggctgctctgcaggctcagcaggtcaacaggaccactctgaccatcacgcagccccggcccacgctgaccctctcgcaggccccacagcctggccctcgcacccctggcttgctgaaggttcctggctccatcgcacttcctgtccagacactggtgtctgcacgagcggctgccccaccacagccttcccctcctccaaccaagtttattgtaatgtcatcgtcctccagcgccccatccacccagcaggtcctgtccctcagcacctcggcccccggctcaggttccaccaccacttcgcccgtcaccaccaccgtccccagcgtgcagcccatcgtcaagttggtctccaccgccaccaccgcaccccccagcactgctccctctggtcctgggagtgtccagaagtacatcgtggtctcacttcccccaacaggggagggcaaaggaggccccacctcccatccttctccagttcctcccccggcatcgtccccgtccccactcagcggcagtgccctttgtggggggaagcaggaggctggggacagtccccctccagctccagggactccaaaagccaatggctcccagcccaactccggctcccctcagcctgctccgtagtaatgaactagtccgtaacttgaaagtatttcgatttcttggctttatatatcttgtggaaaggacgaggtccgtagaaatcctggtgcaaa

SEQ ID NO: 2889 - DNA, 2135 bp, Homo sapiens
  source 1..2135: mol_type = genomic DNA
accgccaccatggctgaggagaagaagctgaagcttagcaacactgtgctgccctcggagtccatgaaggtggtggctgaatccatgggcatcgcccagattcaggaggagacctgccagctgctaacggatgaggtcagctaccgcatcaaagagatcgcacaggatgccttgaagttcatgcacatggggaagcggcagaagctcaccaccagtgacattgactacgccttgaagctaaagaatgtcgagccactctatggcttccacgcccaggagttcattcctttccgcttcgcctctggtgggggccgggagctttacttctatgaggagaaggaggttgatctgagcgacatcatcaatacccctctgccccgggtgcccctggacgtctgcctcaaagctcattggctgagcatcgagggctgccagccagctatccccgagaacccgcccccagctcccaaagagcaacagaaggctgaagccacagaacccctgaagtcagccaagccaggccaggaggaagacggacccctgaagggcaaaggtcaaggggccaccacagccgacggcaaagggaaagagaagaaggcgccgcccttgctggagggggcccccttgcgactgaagccccggagcatccacgagttgtctgtggagcagcagctctactacaaggagatcaccgaggcctgcgtgggctcctgcgaggccaagagggcggaagccctgcaaagcattgccacggaccctggactgtatcagatgctgccacggttcagtacctttatctcggagggggtccgtgtgaacgtggttcagaacaacctggccctactcatctacctgatgcgtatggtgaaagcgctgatggacaaccccacgctctatctagaaaaatacgtccatgagctgattccagctgtgatgacctgcatcgtgagcagacagttgtgcctgcgaccagatgtggacaatcactgggcactccgagactttgctgcccgcctggtggcccagatctgcaagcattttagcacaaccactaacaacatccagtcccggatcaccaagaccttcaccaagagctgggtggacgagaagacgccctggacgactcgttatggctccatcgcaggcttggctgagctgggacacgatgttatcaagactctgattctgccccggctgcagcaggaaggggagcggatccgcagtgtgctggacggccctgtgctgagcaacattgaccggattggagcagaccatgtgcagagcctcctgctgaaacactgtgctcctgttctggcaaagctgcgcccaccgcctgacaatcaggacgcctatcgggcagaattcgggtcccttgggcccctcctctgctcccaggtggtcaaggctcgggcccaggctgctctgcaggctcagcaggtcaacaggaccactctgaccatcacgcagccccggcccacgctgaccctctcgcaggccccacagcctggccctcgcacccctggcttgctgaaggttcctggctccatcgcacttcctgtccagacactggtgtctgcacgagcggctgccccaccacagccttcccctcctccaaccaagtttattgtaatgtcatcgtcctccagcgccccatccacccagcaggtcctgtccctcagcacctcggcccccggctcaggttccaccaccacttcgcccgtcaccaccaccgtccccagcgtgcagcccatcgtcaagttggtctccaccgccaccaccgcaccccccagcactgctccctctggtcctgggagtgtccagaagtacatcgtggtctcacttcccccaacaggggagggcaaaggaggccccacctcccatccttctccagttcctcccccggcatcgtccccgtccccactcagcggcagtgccctttgtggggggaagcaggaggctggggacagtccccctccagctccagggactccaaaagccaatggctcccagcccaactccggctcccctcagcctgctccgtagtaatgaactagtccgtaacttgaaagtatttcgatttcttggctttatatatcttgtggaaaggacgagactgcgcagcggatctgcactaa

SEQ ID NO: 2890 - DNA, 2504 bp, Homo sapiens
  source 1..2504: mol_type = genomic DNA
accgccaccatggcggcgctggcggaggagcagacggaggtggcggtcaagctagagcctgagggaccgccaacgctgctacctccgcaggcgggggacggcgcaggcgagggtagcggcggcactaccaacaacggccccaacggcggcggcgggaacgttgcggcgtcgtcgtccactggcggggatggcgggacccccaagcccacggtggctgtctccgccgctgccccggcgggggcggccccggtgcccgccgctgctccggacgccggcgctccgcatgaccgacagactctactggccgtgctgcagttcctacggcagagcaaactccgcgaggccgaagaggcgctgcgccgtgaggccgggctgctggaggaggcagtggcgggctccggagccccgggagaggtggacagcgccggcgctgaggtgaccagcgcgcttctcagccgggtgaccgcctcggcccctggccctgcggcccccgaccctccgggcactggcgcttcgggggccacggtcgtctcaggttcagcctcaggtcctgcggctccgggtaaagttggaagtgttgctgtggaagaccagccagatgtcagtgccgtgttgtcagcctacaaccaacaaggagatcccacaatgtatgaagaatactatagtggactgaaacacttcattgaatgttccctggactgccatcgggcagagttgtcccaacttttttatcctctgtttgtgcacatgtacttggagctagtctacaatcaacatgagaatgaagcaaagtcattctttgagaagttccatggagatcaggaatgttattaccaggatgacctacgagtattatctagtcttaccaaaaaggaacacatgaaagggaatgagaccatgttggattttcgaacaagtaaatttgttctgcgtatttcccgtgactcgtaccaactcttgaagaggcatcttcaggagaaacagaacaatcagatatggaacatagttcaggagcacctctacattgacatctttgatgggatgccgcgtagtaagcaacagatagatgcgatggtgggaagtttggcaggagaggctaaacgagaggcaaacaaatcaaaggtattttttggtttattaaaagaaccagaaattgaggtacctttggatgacgaggatgaagagggagaaaatgaagaaggaaaacctaaaaagaagaagcctaaaaaagatagtattggatccaaaagcaaaaaacaagatcccaatgctccacctcagaacagaatccctcttcctgagttgaaagattcagataagttggataagataatgaatatgaaagaaaccaccaaacgagtgcgccttgggccggactgcttaccctccatttgtttctatacatttctcaatgcttaccagggtctcactgcagtggatgtcactgatgattctagtctgattgctggaggttttgcagattcaactgtcagagtgtggtcggtaacacccaaaaagcttcgtagtgtcaaacaagcatcagatcttagtcttatagacaaagaatcagatgatgtcttagaaagaatcatggatgagaaaacagcaagtgagttgaagattttgtatggtcacagtgggcctgtctacggagccagcttcagtccggataggaactatctgctttcctcttcagaggacggaactgttagattgtggagccttcaaacatttacttgtttggtgggatataaaggacacaactatccagtatgggacacacaattttctccatatggatattattttgtgtcagggggccatgaccgagtagctcggctctgggctacagaccactatcagcctttaagaatatttgccggccatcttgctgatgtgaattgtaccagattccatccaaattctaattatgttgctacgggctctgcagacagaactgtgcggctctgggacgtcctgaatggtaactgtgtaaggatcttcactggacacaagggaccaattcattccttgacattttctcccaatgggagattcctggctacaggagcaacagatggcagagtgcttctttgggatattggacatggtttgatggttggagaattaaaaggccacactgatacagtctgttcacttaggtttagtagagatggtgaaattttggcatcaggttcaatggataatacagttcgattatgggatgctatcaaagcctttgaagatttagagaccgatgactttactacagccactgggcatataaatttacctgagaattcacaggagttattgttgggaacatatatgaccaaatcaacaccagttgtacaccttcattttactcgaagaaacctggttctagctgcaggagcttatagtccacaatagtaatgaactagtccgtaacttgaaagtatttcgatttcttggctttatatatcttgtggaaaggacgaagatgatcaccctggattagcgtt

SEQ ID NO: 2891 - DNA, 1214 bp, Homo sapiens
  source 1..1214: mol_type = genomic DNA
accgccaccatggacctgtggaactgggatgaggcatccccacaggaagtgcctccagggaacaagctggcagggcttggtaggctgccgaggctgccacaacgtgtgtggggagggtgtccaggtggggcctctgctgaccctaaccccttatcgcctgcagaaggagccaaattaggcttctgtttccctgatctggcactccaaggggacacgccgacagcgacagcagagacatgctggaaaggtacaagctcatccctggcaagcttcccacagctggactggggctccgcgttactgcacccagaagttccatggggggcggagcccgactctcaggctcttccgtggtccggggactggacagacatggcgtgcacagcctgggactcttggagcggcgcctcgcagaccctgggccccgcccctctcggcccgggccccatccccgccgccggctccgaaggcgccgcgggccagaactgcgtccccgtggcgggagaggccacctcgtggtcgcgcgcccaggccgccgggagcaacaccagctgggactgttctgtggggcccgacggcgatacctactggggcagtggcctgggcggggagccgcgcacggactgtaccatttcgtggggcgggcccgcgggcccggactgtaccacctcctggaacccggggctgcatgcgggtggcaccacctctttgaagcggtaccagagctcagctctcaccgtttgctccgaaccgagcccgcagtcggaccgtgccagtttggctcgatgccccaaaactaaccaccgaggtcccattcagctgtggcagttcctcctggagctgctccacgacggggcgcgtagcagctgcatccgttggactggcaacagccgcgagttccagctgtgcgaccccaaagaggtggctcggctgtggggcgagcgcaagagaaagccgggcatgaattacgagaagctgagccggggccttcgctactactatcgccgcgacatcgtgcgcaagagcggggggcgaaagtacacgtaccgcttcgggggccgcgtgcccagcctagcctatccggactgtgcgggaggcggacggggagcagagacacaatagtaatgaactagtccgtaacttgaaagtatttcgatttcttggctttatatatcttgtggaaaggacgatgcttccgttgctttctgtgcact

SEQ ID NO: 2892 - DNA, 569 bp, Homo sapiens
  source 1..569: mol_type = genomic DNA
accgccaccatggacctgtggaactgggatgaggcatccccacaggaagtgcctccagggaacaagctggcagggcttgaaggagccaaattaggcttctgtttccctgatctggcactccaaggggacacgccgacagcgacagcagagacatgctggaaaggtcccattcagctgtggcagttcctcctggagctgctccacgacggggcgcgtagcagctgcatccgttggactggcaacagccgcgagttccagctgtgcgaccccaaagaggtggctcggctgtggggcgagcgcaagagaaagccgggcatgaattacgagaagctgagccggggccttcgctactactatcgccgcgacatcgtgcgcaagagcggggggcgaaagtacacgtaccgcttcgggggccgcgtgcccagcctagcctatccggactgtgcgggaggcggacggggagcagagacacaatagtaatgaactagtccgtaacttgaaagtatttcgatttcttggctttatatatcttgtggaaaggacgacattagtcgcgattcttgtggcca

SEQ ID NO: 2893 - DNA, 851 bp, Homo sapiens
  source 1..851: mol_type = genomic DNA
accgccaccatggcgtgcacagcctgggactcttggagcggcgcctcgcagaccctgggccccgcccctctcggcccgggccccatccccgccgccggctccgaaggcgccgcgggccagaactgcgtccccgtggcgggagaggccacctcgtggtcgcgcgcccaggccgccgggagcaacaccagctgggactgttctgtggggcccgacggcgatacctactggggcagtggcctgggcggggagccgcgcacggactgtaccatttcgtggggcgggcccgcgggcccggactgtaccacctcctggaacccggggctgcatgcgggtggcaccacctctttgaagcggtaccagagctcagctctcaccgtttgctccgaaccgagcccgcagtcggaccgtgccagtttggctcgatgccccaaaactaaccaccgaggtcccattcagctgtggcagttcctcctggagctgctccacgacggggcgcgtagcagctgcatccgttggactggcaacagccgcgagttccagctgtgcgaccccaaagaggtggctcggctgtggggcgagcgcaagagaaagccgggcatgaattacgagaagctgagccggggccttcgctactactatcgccgcgacatcgtgcgcaagagcggggggcgaaagtacacgtaccgcttcgggggccgcgtgcccagcctagcctatccggactgtgcgggaggcggacggggagcagagacacaatagtaatgaactagtccgtaacttgaaagtatttcgatttcttggctttatatatcttgtggaaaggacgaagcctcaagccattcggttagctc

SEQ ID NO: 2894 - DNA, 1130 bp, Homo sapiens
  source 1..1130: mol_type = genomic DNA
accgccaccatggacctgtggaactgggatgaggcatccccacaggaagtgcctccagggaacaagctggcagggcttgaaggagccaaattaggcttctgtttccctgatctggcactccaaggggacacgccgacagcgacagcagagacatgctggaaaggtacaagctcatccctggcaagcttcccacagctggactggggctccgcgttactgcacccagaagttccatggggggcggagcccgactctcaggctcttccgtggtccggggactggacagacatggcgtgcacagcctgggactcttggagcggcgcctcgcagaccctgggccccgcccctctcggcccgggccccatccccgccgccggctccgaaggcgccgcgggccagaactgcgtccccgtggcgggagaggccacctcgtggtcgcgcgcccaggccgccgggagcaacaccagctgggactgttctgtggggcccgacggcgatacctactggggcagtggcctgggcggggagccgcgcacggactgtaccatttcgtggggcgggcccgcgggcccggactgtaccacctcctggaacccggggctgcatgcgggtggcaccacctctttgaagcggtaccagagctcagctctcaccgtttgctccgaaccgagcccgcagtcggaccgtgccagtttggctcgatgccccaaaactaaccaccgaggtcccattcagctgtggcagttcctcctggagctgctccacgacggggcgcgtagcagctgcatccgttggactggcaacagccgcgagttccagctgtgcgaccccaaagaggtggctcggctgtggggcgagcgcaagagaaagccgggcatgaattacgagaagctgagccggggccttcgctactactatcgccgcgacatcgtgcgcaagagcggggggcgaaagtacacgtaccgcttcgggggccgcgtgcccagcctagcctatccggactgtgcgggaggcggacggggagcagagacacaatagtaatgaactagtccgtaacttgaaagtatttcgatttcttggctttatatatcttgtggaaaggacgatcgagtcatccgctaaatctactc

SEQ ID NO: 2895 - DNA, 3701 bp, Homo sapiens
  source 1..3701: mol_type = genomic DNA
accgccaccatgccgctgactggtgtagagcccgccagaatgaacaggaagaaaggagacaagggctttgaaagcccaaggccatataaattaacccatcaggtcgtctgcatcaacaacataaatttccagagaaaatctgttgtgggatttgtggaactgactatatttcccacagttgcaaacttgaatagaatcaagttgaacagcaaacagtgtagaatataccgagtaaggatcaatgatttagaggctgcttttatttataatgacccaaccttggaagtttgtcacagtgaatcaaaacagagaaacctcaattatttttccaatgcttatgcagctgcagttagtgctgtggaccctgatgcaggaaatggagaactttgcattaaggttccatcagagctatggaaacacgttgatgagttaaaggtcctgaagatacacatcaatttttctttggatcagcccaaaggaggtcttcattttgtggtacccagtgtagagggaagtatggcagagagaggtgctcatgttttctcttgtgggtatcaaaattctacaagattttggttcccttgtgttgattcatactctgaattgtgtacatggaaattagaatttacagtagatgctgcaatggttgctgtttctaatggcgatttggtggagacagtgtatactcatgatatgaggaagaaaactttccattatatgcttaccattcctacagcagcgtcaaatatctccttggccattggaccatttgaaatactggtagatccatacatgcatgaggttactcatttttgtttgccccaacttcttccattgctgaaacataccacatcataccttcatgaagtctttgaattttatgaagaaattcttacatgtcgttacccatactcctgttttaagactgtcttcattgatgaggcttatgttgaagtggctgcttatgcttccatgagcatttttagcacaaatcttttacacagtgccatgattatagatgagacacctttgactagaaggtgtttagcccaatccttggcccagcagttttttggttgtttcatatctagaatgtcttggtctgatgaatgggtgctgaagggaatttcaggctatatctatggactttggatgaaaaaaacttttggtgttaatgagtaccgccattggattaaagaggagctagacaaaatagtggcatatgaactaaaaactggtggggttttactacatcccatatttggtggaggaaaagagaaggataatccggcttcccatctacacttttcaataaagcatccacatacactgtcctgggaatactacagtatgtttcagtgtaaagcccaccttgtgatgagattgattgaaaataggatcagtatggaatttatgctacaagttttcaataaactgctaagtctggctagtactgcttcatctcagaagttccagtcacatatgtggagtcagatgttggtttccacatctgggtttttgaaatccatttcaaatgtctctggcaaagatattcagccgttaataaagcagtgggtagatcagagtggagtggtaaaattttatggaagttttgcatttaatagaaaacgaaatgtcttggaactggaaataaaacaggactatacatctcctggaactcagaaatacgtgggaccacttaaagtgacagtgcaggagttagatggatccttcaatcatacactgcaaattgaagaaaacagccttaaacatgatataccctgccattccaaaagtagaaggaataaaaagaaaaaaatcccactgatgaatggagaagaagttgatatggatctttctgcaatggatgctgattcccctttgctgtggataaggatagacccagatatgtcagtattgaggaaggtagaatttgagcaagctgattttatgtggcagtatcagctccgctatgagagagatgttgttgcacagcaggaatccattttggctttggaaaaattccctactccagcatctcggcttgcactcactgatatattagaacaagagcagtgtttctacagagtaagaatgtcagcttgcttctgtcttgcaaagattgcaaattcaatggtgagcacatggacaggaccaccagccatgaagtcactcttcactaggatgttttgttgtaaaagttgtccaaacattgtgaaaacaaacaactttatgagctttcaaagctattttctacagaagactatgccagttgcaatggctttattaagagatgttcataatctttgtcctaaagaagtcttaacatttattttagacttaatcaagtacaatgacaacaggaaaaataagttttcagataactattatcgtgcagaaatgattgatgccctggccaactctgttacacctgcagtcagtgtgaataatgaagttagaactttggataacttaaatcctgatgtgcgactcattcttgaagaaatcaccagatttttgaatatggaaaaacttcttccgagttacaggcataccatcactgtcagttgtttgagagccatacgggtacttcagaagaacggacatgtgccaagtgatccagctctttttaaatcttatgctgaatatggccactttgtggacattaggatagcagctttggaagcagttgttgattatactaaagtggacagaagttatgaagaactgcaatggctacttaatatgattcagaatgaccctgtaccctatgtaaggcataagattctcaacatgttgactaagaacccaccatttactaagaacatggagtctcccttatgcaatgaagccctggtagatcaactttggaaacttatgaattctggtacttcacatgactggaggttacggtgtggtgctgtggacttgtacttcacactttttggcctcagtagaccttcctgtttacccttgccagagcttgggttggttcttaatctaaaggagaaaaaagctgtcttgaatcctaccataattccagagtcagtagcaggcaaccaagaagctgcaaataatccaagcagtcacccacagctagttggatttcagaaccctttttccagttctcaagatgaggaggagattgatatggatactgttcatgatagccaggccttcatttcccatcatttaaacatgcttgaaaggccgtcaactccagggctctcgaaatatcggccagctagctcccgatctgctttaataccccagcactcagcaggctgtgacagcacacccaccacaaaaccccagtggagtttggaacttgcacggaagggaacaggtaaagaacaagcacctttggagatgagtatgcatccagcggcaagcgctccactctcagtctttactaaggaatctacagcctccaaacacagtgaccaccatcaccaccatcaccatgagcacaagaaaaagaagaagaagcataaacataagcacaaacacaagcataagcatgacagtaaagaaaaggacaaggagcctttcactttctccagccctgccagtggcaggtctattcgttctccttccctttcagactagtaatgaactagtccgtaacttgaaagtatttcgatttcttggctttatatatcttgtggaaaggacgatattggagtcagtgagccattcac

SEQ ID NO: 2896 - DNA, 950 bp, Homo sapiens
  source 1..950: mol_type = genomic DNA
accgccaccatgcaccgcggagcacgggttcgagatgaacggacgcgccctctgcatcctcaccaaggacgacttccggcaccgtgcgcccagctcaggtcagggaaacgcacaggctttcctctaagcgggaaccctggtgacgtcctgtatgagctgctccagtacatcaagacccagcggcgagccctggtgtgtgggcccttttttggagggatcttcaggctgaagacgcccacccagcactctccagtccccccggaagaggtgactggcccctctcagatggacacccgaaggggccacctgctgcagccaccagacccagggcttaccagcaacttcggccacctggatgaccctggcctggcaaggtggacccctggcaaggaggagtccctcaacttatgtcactgtgcagagctcggctgcaggacccagggggtctgttccttccccgcgatgccgcaggcccccattgacggcaggatcgctgactgccgcctgctgtgggattacgtgtatcagctgctccttgatacccgatatgagccctacatcaagtgggaagacaaggacgccaagatcttccgagttgtggatccaaatgggctcgccagactctggggaaatcacaagaaccgggtgaacatgacctacgagaagatgtctcgtgccctgcgccactattataagcttaatatcattaagaaggaaccggggcagaaactcctgttcagatttctaaagactccgggaaagatggtccaggacaagcacagccacctggagccgctggagagccaggagcaggacagaatagagttcaaggacaagaggccagaaatctctccgtagtaatgaactagtccgtaacttgaaagtatttcgatttcttggctttatatatcttgtggaaaggacgaatataaccaggtgcggcgtcgacc

SEQ ID NO: 2897 - DNA, 896 bp, Homo sapiens
  source 1..896: mol_type = genomic DNA
accgccaccatgcaggagggagaattggctatttctcctataagccctgtggcagccatgcctcccctaggcacccacgtgcaagccagatgtgaagctcaaattaacctgctgggtgaaggggggatctgcaagctgccaggaagactccgcatccagcccgcactgtggagcagggaggacgtgctgcactggctgcgctgggcagagcaggagtactctctgccatgcaccgcggagcacgggttcgagatgaacggacgcgccctctgcatcctcaccaaggacgacttccggcaccgtgcgcccagctcaggtgacgtcctgtatgagctgctccagtacatcaagacccagcggcgagccctggtgtgtgggcccttttttggagggatcttcaggctgaagacgcccacccagcactctccagtccccccggaagactgccgcctgctgtgggattacgtgtatcagctgctccttgatacccgatatgagccctacatcaagtgggaagacaaggacgccaagatcttccgagttgtggatccaaatgggctcgccagactctggggaaatcacaagaaccgggtgaacatgacctacgagaagatgtctcgtgccctgcgccactattataagcttaatatcattaagaaggaaccggggcagaaactcctgttcagatttctaaagactccgggaaagatggtccaggacaagcacagccacctggagccgctggagagccaggagcaggacagaatagagttcaaggacaagaggccagaaatctctccgtagtaatgaactagtccgtaacttgaaagtatttcgatttcttggctttatatatcttgtggaaaggacgattaggacttgctacatgggcacat

SEQ ID NO: 2898 - DNA, 674 bp, Homo sapiens
  source 1..674: mol_type = genomic DNA
accgccaccatggacacccgaaggggccacctgctgcagccaccagacccagggcttaccagcaacttcggccacctggatgaccctggcctggcaaggtggacccctggcaaggaggagtccctcaacttatgtcactgtgcagagctcggctgcaggacccagggggtctgttccttccccgcgatgccgcaggcccccattgacggcaggatcgctgactgccgcctgctgtgggattacgtgtatcagctgctccttgatacccgatatgagccctacatcaagtgggaagacaaggacgccaagatcttccgagttgtggatccaaatgggctcgccagactctggggaaatcacaagaaccgggtgaacatgacctacgagaagatgtctcgtgccctgcgccactattataagcttaatatcattaagaaggaaccggggcagaaactcctgttcagatttctaaagactccgggaaagatggtccaggacaagcacagccacctggagccgctggagagccaggagcaggacagaatagagttcaaggacaagaggccagaaatctctccgtagtaatgaactagtccgtaacttgaaagtatttcgatttcttggctttatatatcttgtggaaaggacgagatagtaactaacgtgaacttcct

SEQ ID NO: 2899 - DNA, 1055 bp, Homo sapiens
  source 1..1055: mol_type = genomic DNA
accgccaccatgcaggagggagaattggctatttctcctataagccctgtggcagccatgcctcccctaggcacccacgtgcaagccagatgtgaagctcaaattaacctgctgggtgaaggggggatctgcaagctgccaggaagactccgcatccagcccgcactgtggagcagggaggacgtgctgcactggctgcgctgggcagagcaggagtactctctgccatgcaccgcggagcacgggttcgagatgaacggacgcgccctctgcatcctcaccaaggacgacttccggcaccgtgcgcccagctcaggtgacgtcctgtatgagctgctccagtacatcaagacccagcggcgagccctggtgtgtgggcccttttttggagggatcttcaggctgaagacgcccacccagcactctccagtccccccggaagaggtgactggcccctctcagatggacacccgaaggggccacctgctgcagccaccagacccagggcttaccagcaacttcggccacctggatgaccctggcctggcaaggtggacccctggcaaggaggagtccctcaacttatgtcactgtgcagagctcggctgcaggacccagggggtctgttccttccccgcgatgccgcaggcccccattgacggcaggatcgctgactgccgcctgctgtgggattacgtgtatcagctgctccttgatacccgatatgagccctacatcaagtgggaagacaaggacgccaagatcttccgagttgtggatccaaatgggctcgccagactctggggaaatcacaagaaccgggtgaacatgacctacgagaagatgtctcgtgccctgcgccactattataagcttaatatcattaagaaggaaccggggcagaaactcctgttcagaaatggacttcagctgatcttcatattcatatggagtttccagtagtaatgaactagtccgtaacttgaaagtatttcgatttcttggctttatatatcttgtggaaaggacgaatttcgtccctcctatggcggaac

SEQ ID NO: 2900 - DNA, 962 bp, Homo sapiens
  source 1..962: mol_type = genomic DNA
accgccaccatgcaggagggagaattggctatttctcctataagccctgtggcagccatgcctcccctaggcacccacgtgcaagccagatgtgaagctcaaattaacctgctgggtgaaggggggatctgcaagctgccaggaagactccgtgacgtcctgtatgagctgctccagtacatcaagacccagcggcgagccctggtgtgtgggcccttttttggagggatcttcaggctgaagacgcccacccagcactctccagtccccccggaagaggtgactggcccctctcagatggacacccgaaggggccacctgctgcagccaccagacccagggcttaccagcaacttcggccacctggatgaccctggcctggcaaggtggacccctggcaaggaggagtccctcaacttatgtcactgtgcagagctcggctgcaggacccagggggtctgttccttccccgcgatgccgcaggcccccattgacggcaggatcgctgactgccgcctgctgtgggattacgtgtatcagctgctccttgatacccgatatgagccctacatcaagtgggaagacaaggacgccaagatcttccgagttgtggatccaaatgggctcgccagactctggggaaatcacaagaaccgggtgaacatgacctacgagaagatgtctcgtgccctgcgccactattataagcttaatatcattaagaaggaaccggggcagaaactcctgttcagatttctaaagactccgggaaagatggtccaggacaagcacagccacctggagccgctggagagccaggagcaggacagaatagagttcaaggacaagaggccagaaatctctccgtagtaatgaactagtccgtaacttgaaagtatttcgatttcttggctttatatatcttgtggaaaggacgacgaaatgctcactcactgagtact

SEQ ID NO: 2901 - DNA, 884 bp, Homo sapiens
  source 1..884: mol_type = genomic DNA
accgccaccatgaacggacgcgccctctgcatcctcaccaaggacgacttccggcaccgtgcgcccagctcaggtgacgtcctgtatgagctgctccagtacatcaagacccagcggcgagccctggtgtgtgggcccttttttggagggatcttcaggctgaagacgcccacccagcactctccagtccccccggaagaggtgactggcccctctcagatggacacccgaaggggccacctgctgcagccaccagacccagggcttaccagcaacttcggccacctggatgaccctggcctggcaaggtggacccctggcaaggaggagtccctcaacttatgtcactgtgcagagctcggctgcaggacccagggggtctgttccttccccgcgatgccgcaggcccccattgacggcaggatcgctgactgccgcctgctgtgggattacgtgtatcagctgctccttgatacccgatatgagccctacatcaagtgggaagacaaggacgccaagatcttccgagttgtggatccaaatgggctcgccagactctggggaaatcacaagaaccgggtgaacatgacctacgagaagatgtctcgtgccctgcgccactattataagcttaatatcattaagaaggaaccggggcagaaactcctgttcagatttctaaagactccgggaaagatggtccaggacaagcacagccacctggagccgctggagagccaggagcaggacagaatagagttcaaggacaagaggccagaaatctctccgtagtaatgaactagtccgtaacttgaaagtatttcgatttcttggctttatatatcttgtggaaaggacgatctcgataacaatattctatggga

SEQ ID NO: 2902 - DNA, 890 bp, Homo sapiens
  source 1..890: mol_type = genomic DNA
accgccaccatgcaggagggagaattggctatttctcctataagccctgtggcagccatgcctcccctaggcacccacgtgcaagccagatgtgaagctcaaattaacctgctgggtgaaggggggatctgcaagctgccaggaagactccgtgacgtcctgtatgagctgctccagtacatcaagacccagcggcgagccctggtgtgtgggcccttttttggagggatcttcaggctgaagacgcccacccagcactctccagtccccccggaagaggtgactggcccctctcagatggacacccgaaggggccacctgctgcagccaccagacccagggcttaccagcaacttcggccacctggatgaccctggcctggcaaggtggacccctggcaaggaggagtccctcaacttatgtcactgtgcagagctcggctgcaggacccagggggtctgttccttccccgcgatgccgcaggcccccattgacggcaggatcgctgactgccgcctgctgtgggattacgtgtatcagctgctccttgatacccgatatgagccctacatcaagtgggaagacaaggacgccaagatcttccgagttgtggatccaaatgggctcgccagactctggggaaatcacaagaaccgggtgaacatgacctacgagaagatgtctcgtgccctgcgccactattataagcttaatatcattaagaaggaaccggggcagaaactcctgttcagaaatggacttcagctgatcttcatattcatatggagtttccagtagtaatgaactagtccgtaacttgaaagtatttcgatttcttggctttatatatcttgtggaaaggacgagtctcgcatagttatgtattcttc

SEQ ID NO: 2903 - DNA, 1328 bp, Homo sapiens
  source 1..1328: mol_type = genomic DNA
accgccaccatgaacctgccaagagctgagcgccctcgctccacaccgcagcgcagcctccgggactccgatggggaagacggtaaaatcgatgtcctgggagaggaggaagatgaagacgaggtggaagacgaggaggaggaggcgagccagaagttcctagagcagtcgctccagccggggctgcaggtggcccggtggggcggggttgcgcttccccgagagcacatcgagggcggcggcccgagcgacccctcagagtttggcaccgagttcagggcaccgccaaggtctgcggcggcctctgaagatgcccggcagccggcaaagcccccctactcgtacatcgcgctcatcaccatggccatcctgcaaagcccgcacaagcgcctcacgctcagcggcatctgcgccttcattagtggccgcttcccctactaccgccgcaagttccccgcctggcagaacagcatccgccacaacctctcgctgaacgactgcttcgtcaagatcccccgcgagccgggccacccaggcaagggcacctactggagcctggaccccgcctcccaggacatgttcgacaatggcagctttctccggcgtaggaagcgtttcaagcgccaccaactgaccccgggagcccacctgccccaccccttccctctacctgctgcacacgccgccctgcacaacccccgcccaggccctctgcttggggcccctgccctgccgcagccagtcccgggggcctaccccaacaccgcccccgggagacgcccttacgctctgctgcacccgcatcctcctcgctacctactgctctcggcccccgcctatgccggggcaccgaagaaagcagaaggcgcggacctggcgacccccggcacccttcccgtgctgcagccctcacttggtcctcagccttgggaggagggcaagggtctggcgtcgccaccgggaggcggatgcatctctttcagcattgagagtatcatgcaaggggtcaggggagcgggtacaggggctgcgcagagtttgtccccgaccgcgtggagctactgccccctgctccagcgaccgtcaagcctgtcggacaattttgcagcaacagcagcagcatcaggaggaggactgcgccaacggctgcgctcccaccaagggcgcggtgctgggcgggcacctgtcggccgcgtcggcgctgctgcggtatcaggcggtggcagagggctctagtaatgaactagtccgtaacttgaaagtatttcgatttcttggctttatatatcttgtggaaaggacgatagcagatcgtaatcatggtgacc

SEQ ID NO: 2904 - DNA, 815 bp, Homo sapiens
  source 1..815: mol_type = genomic DNA
accgccaccatgtttcaggctttccccggagactacgactccggctcccggtgcagctcctcaccctctgccgagtctcaatatctgtcttcggtggactccttcggcagtccacccaccgccgccgcctcccaggagtgcgccggtctcggggaaatgcccggttccttcgtgcccacggtcaccgcgatcacaaccagccaggacctccagtggcttgtgcaacccaccctcatctcttccatggcccagtcccaggggcagccactggcctcccagcccccggtcgtcgacccctacgacatgccgggaaccagctactccacaccaggcatgagtggctacagcagtggcggagcgagtggcagtggtgggccttccaccagcggaactaccagtgggcctgggcctgcccgcccagcccgagcccggcctaggagaccccgagaggagacgctcaccccagaggaagaggagaagcgaagggtgcgccgggaacgaaataaactagcagcagctaaatgcaggaaccggcggagggagctgaccgaccgactccaggcggagacagatcagttggaggaagaaaaagcagagctggagtcggagatcgccgagctccaaaaggagaaggaacgtctggagtttgtgctggtggcccacaaaccgggctgcaagatcccctacgaagaggggcccgggccgggcccgctggcggagtagtaatgaactagtccgtaacttgaaagtatttcgatttcttggctttatatatcttgtggaaaggacgataatgtatactttaagtccacaac

SEQ ID NO: 2905 - DNA, 1118 bp, Homo sapiens
  source 1..1118: mol_type = genomic DNA
accgccaccatgtttcaggctttccccggagactacgactccggctcccggtgcagctcctcaccctctgccgagtctcaatatctgtcttcggtggactccttcggcagtccacccaccgccgccgcctcccaggagtgcgccggtctcggggaaatgcccggttccttcgtgcccacggtcaccgcgatcacaaccagccaggacctccagtggcttgtgcaacccaccctcatctcttccatggcccagtcccaggggcagccactggcctcccagcccccggtcgtcgacccctacgacatgccgggaaccagctactccacaccaggcatgagtggctacagcagtggcggagcgagtggcagtggtgggccttccaccagcggaactaccagtgggcctgggcctgcccgcccagcccgagcccggcctaggagaccccgagaggagacgctcaccccagaggaagaggagaagcgaagggtgcgccgggaacgaaataaactagcagcagctaaatgcaggaaccggcggagggagctgaccgaccgactccaggcggagacagatcagttggaggaagaaaaagcagagctggagtcggagatcgccgagctccaaaaggagaaggaacgtctggagtttgtgctggtggcccacaaaccgggctgcaagatcccctacgaagaggggcccgggccgggcccgctggcggaggtgagagatttgccgggctcagcaccggctaaggaagatggcttcagctggctgctgccgcccccgccaccaccgcccctgcccttccagaccagccaagacgcaccccccaacctgacggcttctctctttacacacagtgaagttcaagtcctcggcgaccccttccccgttgttaacccttcgtacacttcttcgtttgtcctcacctgcccggaggtctccgcgttcgccggcgcccaacgcaccagcggcagtgaccagccttccgatcccctgaactcgccctccctcctcgctctgtagtaatgaactagtccgtaacttgaaagtatttcgatttcttggctttatatatcttgtggaaaggacgatatcaagcgtagacataccatttc

SEQ ID NO: 2906 - DNA, 1010 bp, Homo sapiens
  source 1..1010: mol_type = genomic DNA
accgccaccatgtttcaggctttccccggagactacgactccggctcccggtgcagctcctcaccctctgccgagtctcaatatctgtcttcggtggactccttcggcagtccacccaccgccgccgcctcccaggagtgcgccggtctcggggaaatgcccggttccttcgtgcccacggtcaccgcgatcacaaccagccaggacctccagtggcttgtgcaacccaccctcatctcttccatggcccagtcccaggggcagccactggcctcccagcccccggtcgtcgacccctacgacatgccgggaaccagctactccacaccaggcatgagtggctacagcagtggcggagcgagtggcagtggtgggccttccaccagcggaactaccagtgggcctgggcctgcccgcccagcccgagcccggcctaggagaccccgagaggagacggagacagatcagttggaggaagaaaaagcagagctggagtcggagatcgccgagctccaaaaggagaaggaacgtctggagtttgtgctggtggcccacaaaccgggctgcaagatcccctacgaagaggggcccgggccgggcccgctggcggaggtgagagatttgccgggctcagcaccggctaaggaagatggcttcagctggctgctgccgcccccgccaccaccgcccctgcccttccagaccagccaagacgcaccccccaacctgacggcttctctctttacacacagtgaagttcaagtcctcggcgaccccttccccgttgttaacccttcgtacacttcttcgtttgtcctcacctgcccggaggtctccgcgttcgccggcgcccaacgcaccagcggcagtgaccagccttccgatcccctgaactcgccctccctcctcgctctgtagtaatgaactagtccgtaacttgaaagtatttcgatttcttggctttatatatcttgtggaaaggacgaaataggctgccgtctttcagtagt

SEQ ID NO: 2907 - DNA, 1355 bp, Homo sapiens
  source 1..1355: mol_type = genomic DNA
accgccaccatgaacctgccaagagctgagcgccttcgctccacaccgcagcgcagcctccgggactccgatggggaagacggtaaaatcgatgtcctgggagaggaggaagatgaagacgaggtggaagacgaggaggaggcggcgagccagcagttcctagagcagtcgctccagccggggctgcaggtggcccggtggggcggggttgcgcttccccgagagcacatcgagggcggcggcggcccgagcgacccctcagagtttggcaccaagttcagggcaccgccaaggtctgcggcggcctctgaagatgcccggcagccggcaaagcccccctactcgtacatcgcgctcatcaccatggccatcctgcaaaacccgcacaagcgcctcacgctcagcggcatctgcgccttcattagtggccgcttcccctactaccgccgcaagttccccgcctggcagaacagcatccgccacaacctctcgctgaacgactgcttcgttaagatcccccgcgagccgggccacccaggcaagggcaactactggagcctggaccccgcctcccaagacatgttcgacaatggcagctttctccggcgtaggaagcgtttcaagcgccaccaactgaccccgggagcccacctgccccaccccttccctctacctgctgcacacgccgccctgcacaacccccgcccaggccctctgcttggggcccctgccccgccgcagccagtcccgggggcctaccccaacaccgcccccgggagacgcccttacgctctgctgcacccgcatcctcttcgctacctactgctctcggcccccgtctatgccggggcaccgaagaaagcagaaggcgcggccctggcgaccccggcacccttcccgtgctgcagccctcacttggtcctcagccttgggaggagggcaagggtctggcgtcgccaccgggaggcggatgcatctctttcagcattgagagtattatgcaaggggtcaggggagcgggtacaggggctgcgcagaatttgtccccgaccgcgtggagctactgccacctgctccagcgaccatcaagcctgttgcatccccagaccgctgcccctttgctgcaagtgtccgccgccgccgctgctcggacaattttgcagcaatagcagcagcatcaggaggaggactgcgccaacggctgcgctcccaccaagggcgcggtgctgggcgggcacctgtcggcctcgtcggccctgctagtaatgaactagtccgtaacttgaaagtatttcgatttcttggctttatatatcttgtggaaaggacgaagtgatgggcagtcattacaatac

SEQ ID NO: 2908 - DNA, 4691 bp, Homo sapiens
  source 1..4691: mol_type = genomic DNA
accgccaccatgttgccctgtaagaagagaagaactacagtgacagagtccctacagcataaaggcaatcaagaggaaaacaacgtagacctagaatcagccgttaaaccagaatctgaccaggttaaggacttgagttcggtgtcactatcctgggatccaagtcatggcagagtagctggcttcgaagtacagtctttgcaggatgcaggaaatcagcttggtatggaggatacatctctgagctctggaatgctcacccagaacacaaatgtaccaattctagaaggtgttgatgtggccatctctcagggaatcaccctaccttccttggagtcttttcacccccttaatatacacattggtaaaggaaaactccacgctactggctcaaagagagggaaaaaaatgacactcaggcctgggccagttacccaagaagacagatgtgatcatcttaccctaaaggagcctttttcaggagagcctagtgaagaagtcaaggaagaaggagggaaacctcaaatgaattctgaaggggagataccttccctgccatcaggcagccaatctgcaaaaccagtaagccagcccaggaaatcaacccagccagatgtttgtgcctctcctcaagaaaagccactcaggactctgtttcaccaacctgaggaagagatagaagatggtggactcttcattccaatggaagaacaagacaatgaagaaagtgagaaaaggagaaaaaagaaaaagggtaccaagaggaaacgagatggaaggggtcaagaagggaccttggcatatgacctgaaactggatgacatgcttgaccgtaccttggaggatggtgccaagcagcacaatctaacagcagtcaatgtccgaaacatccttcatgaagtaatcacaaatgaacacgtggtagctatgatgaaagcagccatcagtgagacggaagatatgccaatgtttgagcctaaaatgacacgctctaaactgaaggaagtagtggaaaaaggagtggtaattccaacatggaatatttcaccaattaagaaggccaatgaaattaagcctcctcagtttgtggatatccaccttgaagaagatgattcctcagatgaagaataccagccggatgatgaagaagaagatgaaactgctgaagagagcttattggaaagtgatgttgaaagcactgcttcatctccacgtggggcaaagaaatccagattgaggcagtcttctgagatgactgaaacagatgaggagagtggcatattatcagaggctgagaaagtcaccacaccagccatcaggcacatcagtgctgaggtagtgcccatggggcccccgccccctccaaagccgaaacagaccagagatagtactttcatggagaagttacatgcggtagatgaggagctggcttccagtccagtctgcatggattctttccagcccatggatgacagtctcattgcatttcgaacgcgttctaagatgcccctgaaagatgttcccctgggccaattagaggcagagctccaagctccagacatcactccagatatgtatgaccccaatacggcagatgatgaggactggaagatgtggctggggggacttatgaatgatgatgtggggaatgaagatgaagcagatgatgatgatgatccagaatataatttcctggaagacctcgatgaaccagacacagaggatttccggactgaccgggcagtgagaatcaccaaaaaggaagtaaatgagctgatggaagagctgtttgaaactttccaagatgagatgggattctccaacatggaagatgatggcccagaagaggaggagtgtgtagctgagcctcgtcctaactttaacacccctcaagctctacggtttgaggaaccactggccaacctgttaaatgaacaacatcggacagtgaaggagctatttgaacagctgaagatgaagaaatcttcagccaaacagctgcaggaagtagagaaggttaaaccccagagtgagaaagttcatcagactctgattctggacccagcacagaggaagagactccagcagcagatgcagcagcacgttcagctcttgacccaaatccaccttcttgccacctgcaaccccaacctcaatccggaggccactaccaccaggatatttcttaaagagctgggaacctttgctcaaagctccatcgcccttcaccatcagtacaaccccaagtttcagaccctgttccaaccctgtaacttgatgggagctatgcagctgattgaagacttcagcacacatgtcagcattgactgcagccctcataaaactgtcaagaagactgcgaatgaatttccctgtttgccaaagcaagtggcttggattctggccacaagcaaggttttcatgtatccagagttacttccagtgtgttccctgaaggcaaagaatccccaggataagatcgtcttcaccaaggctgaggacaatttgttagctttaggactgaagcattttgaaggaactgagtttcctaatcctctaatcagcaagtaccttctaacctgcaaaactgcccaccaactgacagtgagaatcaagaacctcaacatgaacagagctcctgacaacatcattaaattttataagaagaccaaacagctgccagtcctaggaaaatgctgtgaagagatccagccacatcagtggaagccacctatagagagagaagaacaccggctcccattctggttaaaggccagtctgccatccatccaggaagaactgcggcacatggctgatggtgctagagaggtaggaaatatgactggaaccactgagatcaactcagatcgaagcctagaaaaagacaatttggagttggggagtgaatctcggtacccactgctattgcctaagggtgtagtcctgaaactgaagccagttgccacccgtttccccaggaaggcttggagacagaagcgttcatcagtcctgaagcccctccttatccaacccagcccctctctccagcccagcttcaaccctgggaaaacaccagcccgatcaactcattcagaagcccctccgagcaaaatggtgctccggattcctcacccaatacagccagccactgttttacagacagttccaggtgtccctccactgggggtcagtggaggtgagagttttgagtctcctgcagcactgcctgctgtgccccctgaggccaggacaagcttccctctgtctgagtcccagactttgctctcttctgcccctgtgcccaaggtaatgctgccctcccttgccccttctaagtttcgaaagccatatgtgagacggagaccctcaaagagaagaggagtcaaggcctctccctgtatgaaacctgcccctgttatccaccaccctgcatctgttatcttcactgttcctgctaccactgtgaagattgtgagccttggcggtggctgtaacatgatccagcctgtcaatgcggctgtggcccagagtccccagactattcccatcactaccctcttggttaaccctacttccttcccctgtccattgaaccagtcccttgtggcctcctctgtctcacccttaattgtttctggcaattctgtgaatcttcctataccatccacccctgaagataaggcccacgtgaatgtggacattgcttgtgctgtggctgatggggaaaatgcctttcagggcctagaacccaaattagagccccaggaactatctcctctctctgctactgttttcccgaaagtggaacatagcccagggcctccactagcagatgcagagtgccaagaaggattgtcagagaatagtgcctgtcgctggaccgttgtgaaaacagaggaggggaggcaagctctggagccgctccctcagggcatccaggagtctctaaacaaccctacccctggggatttagaggaaattgtcaagatggaacctgaagaagctagagaggaaatcagtggatcccctgagcgtgatatttgtgatgacatcaaagtggaacatgctgtggaattggacactggtgccccaagcgaggagttgagcagtgctggagaagtaacgaaacagacagtcttacagaaggaagaggagaggagtcagccaactaaaaccccttcatcttctcaagagccccctgatgaaggaacctcagggacagatgtgaacaaaggatcatcaaagaatgctttgtcctcaatggatcctgaagtgaggcttagtagccccccagggaagccagaagattcatccagtgttgatggtcagtcagtggggactccagttgggccagaaactggaggagagaagaatgggccagaagaagaggaagaagaggactttgatgacctcacccaagatgaggaagatgaaatgtcatcagcttctgaggaatctgtgctttctgtcccagaactccaggtgagagctggagaatattctcaagtatttcgtggactcagtaatatgtatcacttattgatatgccacctgcttgcttgctgcactatggatagtcctaaaatcatttgtatttagtaatgaactagtccgtaacttgaaagtatttcgatttcttggctttatatatcttgtggaaaggacgaccttgcaacctagggaataacaaa

SEQ ID NO: 2909 - DNA, 6824 bp, Homo sapiens
  source 1..6824: mol_type = genomic DNA
accgccaccatgttgccctgtaagaagagaagaactacagtgacagagtccctacagcataaaggcaatcaagaggaaaacaacgtagacctagaatcagccgttaaaccagaatctgaccaggttaaggacttgagttcggtgtcactatcctgggatccaagtcatggcagagtagctggcttcgaagtacagtctttgcaggatgcaggaaatcagcttggtatggaggatacatctctgagctctggaatgctcacccagaacacaaatgtaccaattctagaaggtgttgatgtggccatctctcagggaatcaccctaccttccttggagtcttttcacccccttaatatacacattggtaaaggaaaactccacgctactggctcaaagagagggaaaaaaatgacactcaggcctgggccagttacccaagaagacagatgtgatcatcttaccctaaaggagcctttttcaggagagcctagtgaagaagtcaaggaagaaggagggaaacctcaaatgaattctgaaggggagataccttccctgccatcaggcagccaatctgcaaaaccagtaagccagcccaggaaatcaacccagccagatgtttgtgcctctcctcaagaaaagccactcaggactctgtttcaccaacctgaggaagagatagaagatggtggactcttcattccaatggaagaacaagacaatgaagaaagtgagaaaaggagaaaaaagaaaaagggtaccaagaggaaacgagatggaaggggtcaagaagggaccttggcatatgacctgaaactggatgacatgcttgaccgtaccttggaggatggtgccaagcagcacaatctaacagcagtcaatgtccgaaacatccttcatgaagtaatcacaaatgaacacgtggtagctatgatgaaagcagccatcagtgagacggaagatatgccaatgtttgagcctaaaatgacacgctctaaactgaaggaagtagtggaaaaaggagtggtaattccaacatggaatatttcaccaattaagaaggccaatgaaattaagcctcctcagtttgtggatatccaccttgaagaagatgattcctcagatgaagaataccagccggatgatgaagaagaagatgaaactgctgaagagagcttattggaaagtgatgttgaaagcactgcttcatctccacgtggggcaaagaaatccagattgaggcagtcttctgagatgactgaaacagatgaggagagtggcatattatcagaggctgagaaagtcaccacaccagccatcaggcacatcagtgctgaggtagtgcccatggggcccccgccccctccaaagccgaaacagaccagagatagtactttcatggagaagttacatgcggtagatgaggagctggcttccagtccagtctgcatggattctttccagcccatggatgacagtctcattgcatttcgaacgcgttctaagatgcccctgaaagatgttcccctgggccaattagaggcagagctccaagctccagacatcactccagatatgtatgaccccaatacggcagatgatgaggactggaagatgtggctggggggacttatgaatgatgatgtggggaatgaagatgaagcagatgatgatgatgatccagaatataatttcctggaagacctcgatgaaccagacacagaggatttccggactgaccgggcagtgagaatcaccaaaaaggaagtaaatgagctgatggaagagctgtttgaaactttccaagatgagatgggattctccaacatggaagatgatggcccagaagaggaggagtgtgtagctgagcctcgtcctaactttaacacccctcaagctctacggtttgaggaaccactggccaacctgttaaatgaacaacatcggacagtgaaggagctatttgaacagctgaagatgaagaaatcttcagccaaacagctgcaggaagtagagaaggttaaaccccagagtgagaaagttcatcagactctgattctggacccagcacagaggaagagactccagcagcagatgcagcagcacgttcagctcttgacccaaatccaccttcttgccacctgcaaccccaacctcaatccggaggccactaccaccaggatatttcttaaagagctgggaacctttgctcaaagctccatcgcccttcaccatcagtacaaccccaagtttcagaccctgttccaaccctgtaacttgatgggagctatgcagctgattgaagacttcagcacacatgtcagcattgactgcagccctcataaaactgtcaagaagactgcgaatgaatttccctgtttgccaaagcaagtggcttggattctggccacaagcaaggttttcatgtatccagagttacttccagtgtgttccctgaaggcaaagaatccccaggataagatcgtcttcaccaaggctgaggacaatttgttagctttaggactgaagcattttgaaggaactgagtttcctaatcctctaatcagcaagtaccttctaacctgcaaaactgcccaccaactgacagtgagaatcaagaacctcaacatgaacagagctcctgacaacatcattaaattttataagaagaccaaacagctgccagtcctaggaaaatgctgtgaagagatccagccacatcagtggaagccacctatagagagagaagaacaccggctcccattctggttaaaggccagtctgccatccatccaggaagaactgcggcacatggctgatggtgctagagaggtaggaaatatgactggaaccactgagatcaactcagatcgaagcctagaaaaagacaatttggagttggggagtgaatctcggtacccactgctattgcctaagggtgtagtcctgaaactgaagccagttgccacccgtttccccaggaaggcttggagacagaagcgttcatcagtcctgaagcccctccttatccaacccagcccctctctccagcccagcttcaaccctgggaaaacaccagcccgatcaactcattcagaagcccctccgagcaaaatggtgctccggattcctcacccaatacagccagccactgttttacagacagttccaggtgtccctccactgggggtcagtggaggtgagagttttgagtctcctgcagcactgcctgctgtgccccctgaggccaggacaagcttccctctgtctgagtcccagactttgctctcttctgcccctgtgcccaaggtaatgctgccctcccttgccccttctaagtttcgaaagccatatgtgagacggagaccctcaaagagaagaggagtcaaggcctctccctgtatgaaacctgcccctgttatccaccaccctgcatctgttatcttcactgttcctgctaccactgtgaagattgtgagccttggcggtggctgtaacatgatccagcctgtcaatgcggctgtggcccagagtccccagactattcccatcactaccctcttggttaaccctacttccttcccctgtccattgaaccagtcccttgtggcctcctctgtctcacccttaattgtttctggcaattctgtgaatcttcctataccatccacccctgaagataaggcccacgtgaatgtggacattgcttgtgctgtggctgatggggaaaatgcctttcagggcctagaacccaaattagagccccaggaactatctcctctctctgctactgttttcccgaaagtggaacatagcccagggcctccactagcagatgcagagtgccaagaaggattgtcagagaatagtgcctgtcgctggaccgttgtgaaaacagaggaggggaggcaagctctggagccgctccctcagggcatccaggagtctctaaacaaccctacccctggggatttagaggaaattgtcaagatggaacctgaagaagctagagaggaaatcagtggatcccctgagcgtgatatttgtgatgacatcaaagtggaacatgctgtggaattggacactggtgccccaagcgaggagttgagcagtgctggagaagtaacgaaacagacagtcttacagaaggaagaggagaggagtcagccaactaaaaccccttcatcttctcaagagccccctgatgaaggaacctcagggacagatgtgaacaaaggatcatcaaagaatgctttgtcctcaatggatcctgaagtgaggcttagtagccccccagggaagccagaagattcatccagtgttgatggtcagtcagtggggactccagttgggccagaaactggaggagagaagaatgggccagaagaagaggaagaagaggactttgatgacctcacccaagatgaggaagatgaaatgtcatcagcttctgaggaatctgtgctttctgtcccagaactccaggaaacaatggagaaactgacttggctggcatctgaaaggcgcatgagtcaggagggtgagtctgaagaagagaattctcaggaggagaactctgagccagaagaagaggaggaagaagaagcagaaggaatggaaagcctgcagaaagaggatgaaatgacggatgaagcagttggagactctgctgagaagcctcctacttttgcttcacctgagactgctccagaagtggagaccagcagaactccaccaggagagagcatcaaagctgctggaaaaggccggaacaatcatcgagctcgcaacaagcggggaagtcgggctcgggccagcaaggacacctccaagctgctgttgctgtatgatgaggacattctcgagcgagatccactcagggagcagaaggacttggcctttgcccaagcttatctgaccagggtgcgagaagccctacaacatatccctggcaagtatgaagacttccttcaagtcatctatgaatttgagtcaagtacccagagacggacggctgtagatctctacaaaagcctgcaaattctgctccaagactggcctcagctgttgaaagactttgctgctttcctgttacctgagcaagctctggcctgtggattatttgaggagcagcaggcttttgagaagagccgcaagttccttcggcagctggagatttgctttgcagagaacccctcacaccaccagaagattatcaaggtcctccaaggctgtgcagactgccttccccaggagatcaccgagctcaagacacagatgtggcagctcctcaagggccacgaccacctgcaggatgagttttctatcttctttgaccacttgcgcccagcagctagccggatgggtgactttgaagagatcaattggactgaggaaaaggagtatgagtttgatggctttgaagaagtggccctgcctgatgtggaagaagaggaggagcctcccaagatacccacagcctcaaagaacaagaggaaaaaagagatcggggtccaaaatcatgataaggagactgaatggccagatggggccaaggactgtgcctgctcctgccatgaaggaggtccagattccaagctgaagaagagcaaaaggcggagctgtagccactgtagcagcaaggtctgtgacagcaaatcctacaagagcaaggagccccatgagttggtgggcagcagcccccaccgagaggctagtcctatgcctggtgctaaggaagctgggcagggcaaggatatgatggaagaggaagccccagaggagcgggagagcactgaggccacccagagcaggactgtcaggaccaccagaaagggagagatgcctgtttcaggattggcagtggggagcactttgccatcccctcgagaagtgactgttacagaacggctcctcctggatggcccaccacctcattcaccagagactcctcaatttccccccacaactggagctgtactgtacactgttaagagaaaccaggttgggcctgaggttcgctcctgccccaaggcatcccccagacttcagaaagagagggagggccaaaaggcagtgagtgagtcagaggctttgatgctggtctgggatgcatcagaaactgagaaattgcctggtaccgtggaaccccctgcttccttcctgagtcctgtttcctcaaagaccagagatgcagggagaagacatgtgtccgggaaaccagacactcaagagagatggctgccctcaagcagagctcgggtgaagacaagagacaggacgtgccctgtccatgaatctccatcaggaattgacacctcagagacttctcccaaagcccctagagggggtttggctaaagacagtggaacacaggccaagggtccagagggggagcagcagccaaaggccgcagaagctacggtgtgtgccaacaacagcaaggtcagctccactggggaaaaggttgtcctgtggacaagggaagctgaccgtgtgatcctcaccatgtgccaggagcaaggggcacagccacagaccttcaacatcatctcccagcagctgggaaataagacccctgctgaggtttcccaccgttttcgagaactcatgcagctcttccacactgcctgtgaagccagctctgaggatgaggatgatgcaaccagtaccagcaatgcagaccagctgtctgaccatggggaccttctgtctgaagaggagctggatgaatagtaatgaactagtccgtaacttgaaagtatttcgatttcttggctttatatatcttgtggaaaggacgacatccttctgaatgtcagatttaa

SEQ ID NO: 2910 - DNA, 6827 bp, Homo sapiens
  source 1..6827: mol_type = genomic DNA
accgccaccatgttgccctgtaagaagagaagaactacagtgacagagtccctacagcataaaggcaatcaagaggaaaacaacgtagacctagaatcagccgttaaaccagaatctgaccaggttaaggacttgagttcggtgtcactatcctgggatccaagtcatggcagagtagctggcttcgaagtacagtctttgcaggatgcaggaaatcagcttggtatggaggatacatctctgagctctggaatgctcacccagaacacaaatgtaccaattctagaaggtgttgatgtggccatctctcagggaatcaccctaccttccttggagtcttttcacccccttaatatacacattggtaaaggaaaactccacgctactggctcaaagagagggaaaaaaatgacactcaggcctgggccagttacccaagaagacagatgtgatcatcttaccctaaaggagcctttttcaggagagcctagtgaagaagtcaaggaagaaggagggaaacctcaaatgaattctgaaggggagataccttccctgccatcaggcagccaatctgcaaaaccagtaagccagcccaggaaatcaacccagccagatgtttgtgcctctcctcaagaaaagccactcaggactctgtttcaccaacctgaggaagagatagaagatggtggactcttcattccaatggaagaacaagacaatgaagaaagtgagaaaaggagaaaaaagaaaaagggtaccaagaggaaacgagatggaaggggtcaagaagggaccttggcatatgacctgaaactggatgacatgcttgaccgtaccttggaggatggtgccaagcagcacaatctaacagcagtcaatgtccgaaacatccttcatgaagtaatcacaaatgaacacgtggtagctatgatgaaagcagccatcagtgagacggaagatatgccaatgtttgagcctaaaatgacacgctctaaactgaaggaagtagtggaaaaaggagtggtaattccaacatggaatatttcaccaattaagaaggccaatgaaattaagcctcctcagtttgtggatatccaccttgaagaagatgattcctcagatgaagaataccagccggatgatgaagaagaagatgaaactgctgaagagagcttattggaaagtgatgttgaaagcactgcttcatctccacgtggggcaaagaaatccagattgaggcagtcttctgagatgactgaaacagatgaggagagtggcatattatcagaggctgagaaagtcaccacaccagccatcaggcacatcagtgctgaggtagtgcccatggggcccccgccccctccaaagccgaaacagaccagagatagtactttcatggagaagttacatgcggtagatgaggagctggcttccagtccagtctgcatggattctttccagcccatggatgacagtctcattgcatttcgaacgcgttctaagatgcccctgaaagatgttcccctgggccaattagaggcagagctccaagctccagacatcactccagatatgtatgaccccaatacggcagatgatgaggactggaagatgtggctggggggacttatgaatgatgatgtggggaatgaagatgaagcagatgatgatgatgatccagaatataatttcctggaagacctcgatgaaccagacacagaggatttccggactgaccgggcagtgagaatcaccaaaaaggaagtaaatgagctgatggaagagctgtttgaaactttccaagatgagatgggattctccaacatggaagatgatggcccagaagaggaggagtgtgtagctgagcctcgtcctaactttaacacccctcaagctctacggtttgaggaaccactggccaacctgttaaatgaacaacatcggacagtgaaggagctatttgaacagctgaagatgaagaaatcttcagccaaacagctgcaggaagtagagaaggttaaaccccagagtgagaaagttcatcagactctgattctggacccagcacagaggaagagactccagcagcagatgcagcagcacgttcagctcttgacccaaatccaccttcttgccacctgcaaccccaacctcaatccggaggccactaccaccaggatatttcttaaagagctgggaacctttgctcaaagctccatcgcccttcaccatcagtacaaccccaagtttcagaccctgttccaaccctgtaacttgatgggagctatgcagctgattgaagacttcagcacacatgtcagcattgactgcagccctcataaaactgtcaagaagactgcgaatgaatttccctgtttgccaaagcaagtggcttggattctggccacaagcaaggttttcatgtatccagagttacttccagtgtgttccctgaaggcaaagaatccccaggataagatcgtcttcaccaaggctgaggacaatttgttagctttaggactgaagcattttgaaggaactgagtttcctaatcctctaatcagcaagtaccttctaacctgcaaaactgcccaccaactgacagtgagaatcaagaacctcaacatgaacagagctcctgacaacatcattaaattttataagaagaccaaacagctgccagtcctaggaaaatgctgtgaagagatccagccacatcagtggaagccacctatagagagagaagaacaccggctcccattctggttaaaggccagtctgccatccatccaggaagaactgcggcacatggctgatggtgctagagaggtaggaaatatgactggaaccactgagatcaactcagatcgaagcctagaaaaagacaatttggagttggggagtgaatctcggtacccactgctattgcctaagggtgtagtcctgaaactgaagccagttgccacccgtttccccaggaaggcttggagacagaagcgttcatcagtcctgaagcccctccttatccaacccagcccctctctccagcccagcttcaaccctgggaaaacaccagcccgatcaactcattcagaagcccctccgagcaaaatggtgctccggattcctcacccaatacagccagccactgttttacagacagttccaggtgtccctccactgggggtcagtggaggtgagagttttgagtctcctgcagcactgcctgctgtgccccctgaggccaggacaagcttccctctgtctgagtcccagactttgctctcttctgcccctgtgcccaaggtaatgctgccctcccttgccccttctaagtttcgaaagccatatgtgagacggagaccctcaaagagaagaggagtcaaggcctctccctgtatgaaacctgcccctgttatccaccaccctgcatctgttatcttcactgttcctgctaccactgtgaagattgtgagccttggcggtggctgtaacatgatccagcctgtcaatgcggctgtggcccagagtccccagactattcccatcactaccctcttggttaaccctacttccttcccctgtccattgaaccagtcccttgtggcctcctctgtctcacccttaattgtttctggcaattctgtgaatcttcctataccatccacccctgaagataaggcccacgtgaatgtggacattgcttgtgctgtggctgatggggaaaatgcctttcagggcctagaacccaaattagagccccaggaactatctcctctctctgctactgttttcccgaaagtggaacatagcccagggcctccactagcagatgcagagtgccaagaaggattgtcagagaatagtgcctgtcgctggaccgttgtgaaaacagaggaggggaggcaagctctggagccgctccctcagggcatccaggagtctctaaacaaccctacccctggggatttagaggaaattgtcaagatggaacctgaagaagctagagaggaaatcagtggatcccctgagcgtgatatttgtgatgacatcaaagtggaacatgctgtggaattggacactggtgccccaagcgaggagttgagcagtgctggagaagtaacgaaacagacagtcttacagaaggaagaggagaggagtcagccaactaaaaccccttcatcttctcaagagccccctgatgaaggaacctcagggacagatgtgaacaaaggatcatcaaagaatgctttgtcctcaatggatcctgaagtgaggcttagtagccccccagggaagccagaagattcatccagtgttgatggtcagtcagtggggactccagttgggccagaaactggaggagagaagaatgggccagaagaagaggaagaagaggactttgatgacctcacccaagatgaggaagatgaaatgtcatcagcttctgaggaatctgtgctttctgtcccagaactccaggaaacaatggagaaactgacttggctggcatctgaaaggcgcatgagtcaggagggtgagtctgaagaagagaattctcaggaggagaactctgagccagaagaagaggaggaagaagaagcagaaggaatggaaagcctgcagaaagaggatgaaatgacggatgaagcagttggagactctgctgagaagcctcctacttttgcttcacctgagactgctccagaagtggagaccagcagaactccaccaggagagagcatcaaagctgctggaaaaggccggaacaatcatcgagctcgcaacaagcggggaagtcgggctcgggccagcaaggacacctccaagctgctgttgctgtatgatgaggacattctcgagcgagatccactcagggagcagaaggacttggcctttgcccaagcttatctgaccagggtgcgagaagccctacaacatatccctggcaagtatgaagacttccttcaagtcatctatgaatttgagtcaagtacccagagacggacggctgtagatctctacaaaagcctgcaaattctgctccaagactggcctcagctgttgaaagactttgctgctttcctgttacctgagcaagctctggcctgtggattatttgaggagcagcaggcttttgagaagagccgcaagttccttcggcagctggagatttgctttgcagagaacccctcacaccaccagaagattatcaaggtcctccaaggctgtgcagactgccttccccaggagatcaccgagctcaagacacagatgtggcagctcctcaagggccacgaccacctgcaggatgagttttctatcttctttgaccacttgcgcccagcagctagccggatgggtgactttgaagagatcaattggactgaggaaaaggagtatgagtttgatggctttgaagaagtggccctgcctgatgtggaagaagaggaggagcctcccaagatacccacagcctcaaagaacaagaggaaaaaagagatcggggtccaaaatcatgataaggagactgaatggccagatggggccaaggactgtgcctgctcctgccatgaaggaggtccagattccaagctgaagaagagcaaaaggcggagctgtagccactgtagcagcaaggtctgtgacagcaaatcctacaagagcaaggagccccatgagttggtgggcagcagcccccaccgagaggctagtcctatgcctggtgctaaggaagctgggcagggcaaggatatgatggaagaggaagccccagaggagcgggagagcactgaggccacccagagcaggactgtcaggaccaccagaaagggagagatgcctgtttcagcaggattggcagtggggagcactttgccatcccctcgagaagtgactgttacagaacggctcctcctggatggcccaccacctcattcaccagagactcctcaatttccccccacaactggagctgtactgtacactgttaagagaaaccaggttgggcctgaggttcgctcctgccccaaggcatcccccagacttcagaaagagagggagggccaaaaggcagtgagtgagtcagaggctttgatgctggtctgggatgcatcagaaactgagaaattgcctggtaccgtggaaccccctgcttccttcctgagtcctgtttcctcaaagaccagagatgcagggagaagacatgtgtccgggaaaccagacactcaagagagatggctgccctcaagcagagctcgggtgaagacaagagacaggacgtgccctgtccatgaatctccatcaggaattgacacctcagagacttctcccaaagcccctagagggggtttggctaaagacagtggaacacaggccaagggtccagagggggagcagcagccaaaggccgcagaagctacggtgtgtgccaacaacagcaaggtcagctccactggggaaaaggttgtcctgtggacaagggaagctgaccgtgtgatcctcaccatgtgccaggagcaaggggcacagccacagaccttcaacatcatctcccagcagctgggaaataagacccctgctgaggtttcccaccgttttcgagaactcatgcagctcttccacactgcctgtgaagccagctctgaggatgaggatgatgcaaccagtaccagcaatgcagaccagctgtctgaccatggggaccttctgtctgaagaggagctggatgaatagtaatgaactagtccgtaacttgaaagtatttcgatttcttggctttatatatcttgtggaaaggacgaaatcagagtcgccctaacagcagc

SEQ ID NO: 2911 - DNA, 1361 bp, Homo sapiens
  source 1..1361: mol_type = genomic DNA
accgccaccatgggtgaaaaaaaaccagagcctttggacttcgtgaaagattttcaggaatacctgactcagcagacccatcacgtgaacatgatttctggatcagttagtggggacaaagaagcagaggctcttcagggagctggaacagatggtgatcaaaatggacttgatcacccatctgttgaagtttccttggatgaaaactcaggaatgttagtagacgggtttgaaaggacctttgatgggaagcttaagtgtcggtactgcaactatgccagcaaaggaacagcccggcttattgaacacatcagaatccacacaggtgaaaaacctcatcgatgtcatctttgtccatttgcatctgcttatgagcgtcatctggaagcccatatgcgttctcatactggagaaaaaccatacaaatgtgaattatgttccttccgctgcagtgatcgaagtaacttgtcccatcatcgaaggcgcaagcataaaatggtaccaattaaaggtactaggtcttccttaagcagcaagaaaatgtggggggttttacagaagaaaacaagcaatctgggctatagcagaagagcactaatcaacttaagtccaccttccatggtggttcagaaaccagactaccttaacgattttacccacgaaatcccaaatatccagactgactcctatgaaagtatggcaaaaaccacaccaactggtggccttccaagggacccccaagaactcatggttgataaccctttgaatcagctctcgactctagcagggcagttgtccagtctgccacccgaaaaccaaaaccctgcatcccctgatgtagttccctgccctgatgaaaagcctttcatgattcagcagccctctacccaagcagtagtttctgccgtatcagcaagtattcctcagagctcctctcccacaagcccagaacctcggccatcccatagtcaaaggaactatagtccagtggcaggtccaagcagtgagccaagtgcccacacgagcactcccagcataggaaacagccagccaagcaccccagccccagccctgccggtccaggaccctcagcttctgcaccactgccagcactgtgatatgtactttgcagacaacatcctttacactattcatatgggatgtcatgggtatgaaaatccttttcagtgtaatatatgtggatgcaaatgtaaaaacaagtatgattttgcctgtcattttgcaagagggcaacataaccaacattagtaatgaactagtccgtaacttgaaagtatttcgatttcttggctttatatatcttgtggaaaggacgaagaagttcctaatttctgtgagta

SEQ ID NO: 2912 - DNA, 1859 bp, Homo sapiens
  source 1..1859: mol_type = genomic DNA
accgccaccatgcatacaccacccgcactccctcgccgtttccaaggcggcggccgcgttcgcaccccagggtctcaccggcaagggaaggataatctggagagggatccctcaggagggtgtgttccggatttcttgcctcaggcccaagactccaaccattttataatggaatctttattttgtgaaagtagcggggactcatctctggagaaggagttcctcggggccccagtggggccctcggtgagcacccccaacagccagcactcttctcctagccgctcactcagtgccaactccatcaaggtggagatgtacagcgatgaggagtcaagcagactgctggggccagatgagcggctcctggaaaaggacgacagcgtgattgtggaagattcattgtctgagcccctgggctactgtgatgggagtgggccagagcctcactcccctgggggcatccggctgcccaatggcaagctcaagtgtgacgtctgcggcatggtctgtattggacccaacgtgctcatggtgcacaagcgcagtcacactggtgaaaggcccttccattgcaaccagtgtggtgcctccttcacccagaaggggaacctgctgcgccacatcaagctgcactctggggagaagccctttaaatgtcccttctgcaactatgcctgccgccggcgtgatgcactcactggtcacctccgcacacactcagtctcctctcccacagtgggcaagccctacaagtgtaactactgtggccggagctacaaacagcagagtaccctggaggagcacaaggagcggtgccataactacctacagagtctcagcactgaagcccaagctttggctggccaaccaggtgacgaaatacgtgacctggagatggtgccagactccatgctgcactcatcctctgagcggccaactttcatcgatcgtctggccaatagcctcaccaaacgcaagcgttccacaccccagaagtttgtaggcgaaaagcagatgcgcttcagcctctcagacctcccctatgatgtgaactcgggtggctatgaaaaggatgtggagttggtggcacaccacagcctagagcctggctttggaagttccctggcctttgtgggtgcagagcatctgcgtcccctccgccttccacccaccaattgcatctcagaactcacgcctgtcatcagctctgtctacacccagatgcagcccctccctggtcgactggagcttccaggatcccgagaagcaggtgagggacctgaggacctggctgatggaggtcccctcctctaccggccccgaggccccctgactgaccctggggcatcccccagcaatggctgccaggactccacagacacagaaagcaaccacgaagatcgggttgcgggggtggtatccctccctcagggtcccccaccccagccacctcccaccattgtggtgggccggcacagtcctgcctacgccaaagaggaccccaagccacaggaggggttattgcggggcaccccaggcccctccaaggaagtgcttcgggtggtgggcgagagtggtgagcctgtgaaggccttcaagtgtgagcactgccgtatcctcttcctggaccacgtcatgttcactatccacatgggctgccatggcttcagagacccttttgagtgcaacatctgtggttatcacagccaggaccggtacgaattctcttcccacattgtccggggggagcataaggtgggctagtaatgaactagtccgtaacttgaaagtatttcgatttcttggctttatatatcttgtggaaaggacgaagtatgccgcgtcttaccaccgcg

SEQ ID NO: 2913 - DNA, 1661 bp, Homo sapiens
  source 1..1661: mol_type = genomic DNA
accgccaccatggatgctgatgagggtcaagacatgtcccaagtttcagggaaggaaagcccccctgtaagcgatactccagatgagggcgatgagcccatgccgatccccgaggacctctccaccacctcgggaggacagcaaagctccaagagtgacagagtcgtggccagtaatgttaaagtagagactcagagtgatgaagagaatgggcgtgcctgtgaaatgaatggggaagaatgtgcggaggatttacgaatgcttgatgcctcgggagagaaaatgaatggctcccacagggaccaaggcagctcggctttgtcgggagttggaggcattcgacttcctaacggaaaactaaagtgtgatatctgtgggatcatttgcatcgggcccaatgtgctcatggttcacaaaagaagccacactggagaacggcccttccagtgcaatcagtgcggggcctcattcacccagaagggcaacctgctccggcacatcaagctgcattccggggagaagcccttcaaatgccacctctgcaactacgcctgccgccggagggacgccctcactggccacctgaggacgcactccgttggtaaacctcacaaatgtggatattgtggccgaagctataaacagcgaagctctttagaggaacataaagagcgctgccacaactacttggaaagcatgggccttccgggcacactgtacccagtcattaaagaagaaactaatcacagtgaaatggcagaagacctgtgcaagataggatcagagagatctctcgtgctggacagactagcaagtaacgtcgccaaacgtaagagctctatgcctcagaaatttcttggggacaagggcctgtccgacacgccctacgacagcagcgccagctacgagaaggagaacgaaatgatgaagtcccacgtgatggaccaagccatcaacaacgccatcaactacctgggggccgagtccctgcgcccgctggtgcagacgcccccgggcggttccgaggtggtcccggtcatcagcccgatgtaccagctgcacaagccgctcgcggagggcaccccgcgctccaaccactcggcccaggacagcgccgtggagaacctgctgctgctctccaaggccaagttggtgccctcggagcgcgaggcgtccccgagcaacagctgccaagactccacggacaccgagagcaacaacgaggagcagcgcagcggtctcatctacctgaccaaccacatcgccccgcacgcgcgcaacgggctgtcgctcaaggaggagcaccgcgcctacgacctgctgcgcgccgcctccgagaactcgcaggacgcgctccgcgtggtcagcaccagcggggagcagatgaaggtgtacaagtgcgaacactgccgggtgctcttcctggatcacgtcatgtacaccatccacatgggctgccacggcttccgtgatccttttgagtgcaacatgtgcggctaccacagccaggaccggtacgagttctcgtcgcacataacgcgaggggagcaccgcttccacatgagctagtaatgaactagtccgtaacttgaaagtatttcgatttcttggctttatatatcttgtggaaaggacgaactgcactcggagttagtgatcat

SEQ ID NO: 2914 - DNA, 1400 bp, Homo sapiens
  source 1..1400: mol_type = genomic DNA
accgccaccatggatgctgatgagggtcaagacatgtcccaagtttcagggaaggaaagcccccctgtaagcgatactccagatgagggcgatgagcccatgccgatccccgaggacctctccaccacctcgggaggacagcaaagctccaagagtgacagagtcgtgggagaacggcccttccagtgcaatcagtgcggggcctcattcacccagaagggcaacctgctccggcacatcaagctgcattccggggagaagcccttcaaatgccacctctgcaactacgcctgccgccggagggacgccctcactggccacctgaggacgcactccgttggtaaacctcacaaatgtggatattgtggccgaagctataaacagcgaagctctttagaggaacataaagagcgctgccacaactacttggaaagcatgggccttccgggcacactgtacccagtcattaaagaagaaactaatcacagtgaaatggcagaagacctgtgcaagataggatcagagagatctctcgtgctggacagactagcaagtaacgtcgccaaacgtaagagctctatgcctcagaaatttcttggggacaagggcctgtccgacacgccctacgacagcagcgccagctacgagaaggagaacgaaatgatgaagtcccacgtgatggaccaagccatcaacaacgccatcaactacctgggggccgagtccctgcgcccgctggtgcagacgcccccgggcggttccgaggtggtcccggtcatcagcccgatgtaccagctgcacaagccgctcgcggagggcaccccgcgctccaaccactcggcccaggacagcgccgtggagaacctgctgctgctctccaaggccaagttggtgccctcggagcgcgaggcgtccccgagcaacagctgccaagactccacggacaccgagagcaacaacgaggagcagcgcagcggtctcatctacctgaccaaccacatcgccccgcacgcgcgcaacgggctgtcgctcaaggaggagcaccgcgcctacgacctgctgcgcgccgcctccgagaactcgcaggacgcgctccgcgtggtcagcaccagcggggagcagatgaaggtgtacaagtgcgaacactgccgggtgctcttcctggatcacgtcatgtacaccatccacatgggctgccacggcttccgtgatccttttgagtgcaacatgtgcggctaccacagccaggaccggtacgagttctcgtcgcacataacgcgaggggagcaccgcttccacatgagctagtaatgaactagtccgtaacttgaaagtatttcgatttcttggctttatatatcttgtggaaaggacgaaccatactcacgaaactccagatg

SEQ ID NO: 2915 - DNA, 626 bp, Homo sapiens
  source 1..626: mol_type = genomic DNA
accgccaccatggatgctgatgagggtcaagacatgtcccaagtttcagggaaggaaagcccccctgtaagcgatactccagatgagggcgatgagcccatgccgatccccgaggacctctccaccacctcgggaggacagcaaagctccaagagtgacagagtcgtggttacatatggggctgatgactttagggatttccatgcaataattcccaaatctttctctcgtaagtatatgccttgcttctggaaaacaaaagcatgccttcatctcctatcatgtaaatatcgtacgtgcatgttccttcatcaacccccgagatacattaaatattcactgttctattcgttagacacctaccatatcatttttgggtatttataccataaagtgcaaaacgaaggtctaggcagttgtgcggtgtcctgggagcatggcagtggagtaacagtaagggttggagtcacagtagcactgatgggattgttacttcgcagatgctgctggacagctttgagattactcctgtagtaatgaactagtccgtaacttgaaagtatttcgatttcttggctttatatatcttgtggaaaggacgataagaccgggcgatcgacgacttc

SEQ ID NO: 2916 - DNA, 1232 bp, Homo sapiens
  source 1..1232: mol_type = genomic DNA
accgccaccatggatgctgatgagggtcaagacatgtcccaagtttcagggaaggaaagcccccctgtaagcgatactccagatgagggcgatgagcccatgccgatccccgaggacctctccaccacctcgggaggacagcaaagctccaagagtgacagagtcgtggccagtaatgttaaagtagagactcagagtgatgaagagaatgggcgtgcctgtgaaatgaatggggaagaatgtgcggaggatttacgaatgcttgatgcctcgggagagaaaatgaatggctcccacagggaccaaggcagctcggctttgtcgggagttggaggcattcgacttcctaacggaaaactaaagtgtgatatctgtgggatcatttgcatcgggcccaatgtgctcatggttcacaaaagaagccacactggggacaagggcctgtccgacacgccctacgacagcagcgccagctacgagaaggagaacgaaatgatgaagtcccacgtgatggaccaagccatcaacaacgccatcaactacctgggggccgagtccctgcgcccgctggtgcagacgcccccgggcggttccgaggtggtcccggtcatcagcccgatgtaccagctgcacaagccgctcgcggagggcaccccgcgctccaaccactcggcccaggacagcgccgtggagaacctgctgctgctctccaaggccaagttggtgccctcggagcgcgaggcgtccccgagcaacagctgccaagactccacggacaccgagagcaacaacgaggagcagcgcagcggtctcatctacctgaccaaccacatcgccccgcacgcgcgcaacgggctgtcgctcaaggaggagcaccgcgcctacgacctgctgcgcgccgcctccgagaactcgcaggacgcgctccgcgtggtcagcaccagcggggagcagatgaaggtgtacaagtgcgaacactgccgggtgctcttcctggatcacgtcatgtacaccatccacatgggctgccacggcttccgtgatccttttgagtgcaacatgtgcggctaccacagccaggaccggtacgagttctcgtcgcacataacgcgaggggagcaccgcttccacatgagctagtaatgaactagtccgtaacttgaaagtatttcgatttcttggctttatatatcttgtggaaaggacgacggagtatccttccatgacactct

SEQ ID NO: 2917 - DNA, 1400 bp, Homo sapiens
  source 1..1400: mol_type = genomic DNA
accgccaccatggatgctgatgagggtcaagacatgtcccaagtttcagggaaggaaagcccccctgtaagcgatactccagatgagggcgatgagcccatgccgatccccgaggacctctccaccacctcgggaggacagcaaagctccaagagtgacagagtcgtggccagtaatgttaaagtagagactcagagtgatgaagagaatgggcgtgcctgtgaaatgaatggggaagaatgtgcggaggatttacgaatgcttgatgcctcgggagagaaaatgaatggctcccacagggaccaaggcagctcggctttgtcgggagttggaggcattcgacttcctaacggaaaactaaagtgtgatatctgtgggatcatttgcatcgggcccaatgtgctcatggttcacaaaagaagccacactggagaacggcccttccagtgcaatcagtgcggggcctcattcacccagaagggcaacctgctccggcacatcaagctgcattccggggagaagcccttcaaatgccacctctgcaactacgcctgccgccggagggacgccctcactggccacctgaggacgcactccggggacaagggcctgtccgacacgccctacgacagcagcgccagctacgagaaggagaacgaaatgatgaagtcccacgtgatggaccaagccatcaacaacgccatcaactacctgggggccgagtccctgcgcccgctggtgcagacgcccccgggcggttccgaggtggtcccggtcatcagcccgatgtaccagctgcacaagccgctcgcggagggcaccccgcgctccaaccactcggcccaggacagcgccgtggagaacctgctgctgctctccaaggccaagttggtgccctcggagcgcgaggcgtccccgagcaacagctgccaagactccacggacaccgagagcaacaacgaggagcagcgcagcggtctcatctacctgaccaaccacatcgccccgcacgcgcgcaacgggctgtcgctcaaggaggagcaccgcgcctacgacctgctgcgcgccgcctccgagaactcgcaggacgcgctccgcgtggtcagcaccagcggggagcagatgaaggtgtacaagtgcgaacactgccgggtgctcttcctggatcacgtcatgtacaccatccacatgggctgccacggcttccgtgatccttttgagtgcaacatgtgcggctaccacagccaggaccggtacgagttctcgtcgcacataacgcgaggggagcaccgcttccacatgagctagtaatgaactagtccgtaacttgaaagtatttcgatttcttggctttatatatcttgtggaaaggacgataaagaactgttaagcctcgcgac

SEQ ID NO: 2918 - DNA, 968 bp, Homo sapiens
  source 1..968: mol_type = genomic DNA
accgccaccatggaagatatacaaacaaatgcggaactgaaaagcactcaggagcagtctgtgcccgcagaaagtgcagcggttttgaatgactacagtttaaccaaatctcatgaaatggaaaatgtggacagtggagaaggcccagccaatgaagatgaagacataggaggtgagaagcgccactgctttgatgtcaactataattcaagttacatgtatgagaaagagagtgagctcatacagacccgcatgatggaccaagccatcaataacgccatcagctatcttggcgccgaagccctgcgccccttggtccagacaccgcctgctcccacctcggagatggttccagttatcagcagcatgtatcccatagccctcacccgggctgagatgtcaaacggtgcccctcaagagctggaaaagaaaagcatccaccttccagagaagagcgtgccttctgagagaggcctctctcccaacaatagtggccacgactccacggacactgacagcaaccatgaagaacgccagaatcacatctatcagcaaaatcacatggtcctgtctcgggcccgcaatgggatgccacttctgaaggaggttccccgctcttacgaactcctcaagcccccgcccatctgcccaagagactccgtcaaagtgatcaacaaggaaggggaggtgatggatgtgtatcggtgtgaccactgccgcgtcctcttcctggactatgtgatgttcacgattcacatgggctgccacggcttccgtgaccctttcgagtgtaacatgtgtggatatcgaagccatgatcggtatgagttctcgtctcacatagccagaggagaacacagagccctgctgaagtagtaatgaactagtccgtaacttgaaagtatttcgatttcttggctttatatatcttgtggaaaggacgaggttacaacgagtcattggcggca

SEQ ID NO: 2919 - DNA, 1514 bp, Homo sapiens
  source 1..1514: mol_type = genomic DNA
accgccaccatggaagatatacaaacaaatgcggaactgaaaagcactcaggagcagtctgtgcccgcagaaagtgcagcggttttgaatgactacagtttaaccaaatctcatgaaatggaaaatgtggacagtggagaaggcccagccaatgaagatgaagacataggagatgattcaatgaaagtgaaagatgaatacagtgaaagagatgagaatgttttaaagtcagaacccatgggaaatgcagaagagcctgaaatcccttacagctattcaagagaatataatgaatatgaaaacattaagttggagagacatgttgtctcattcgatagtagcaggccaaccagtggaaagatgaactgcgatgtgtgtggattatcctgcatcagcttcaatgtcttaatggttcataagcgaagccatactggtgaacgcccattccagtgtaatcagtgtggggcatcttttactcagaaaggtaacctcctccgccacattaaactgcacacaggggaaaaaccttttaagtgtcacctctgcaactatgcatgccaaagaagagatgcgctcacggggcatcttaggacacattctgtggagaaaccctacaaatgtgagttttgtggaaggagttacaagcagagaagttcccttgaggagcacaaggagcgctgccgtacatttcttcagagcactgacccaggggacactggtgagaagcgccactgctttgatgtcaactataattcaagttacatgtatgagaaagagagtgagctcatacagacccgcatgatggaccaagccatcaataacgccatcagctatcttggcgccgaagccctgcgccccttggtccagacaccgcctgctcccacctcggagatggttccagttatcagcagcatgtatcccatagccctcacccgggctgagatgtcaaacggtgcccctcaagagctggaaaagaaaagcatccaccttccagagaagagcgtgccttctgagagaggcctctctcccaacaatagtggccacgactccacggacactgacagcaaccatgaagaacgccagaatcacatctatcagcaaaatcacatggtcctgtctcgggcccgcaatgggatgccacttctgaaggaggttccccgctcttacgaactcctcaagcccccgcccatctgcccaagagactccgtcaaagtgatcaacaaggaaggggaggtgatggatgtgtatcggtgtgaccactgccgcgtcctcttcctggactatgtgatgttcacgattcacatgggctgccacggcttccgtgaccctttcgagtgtaacatgtgtggatatcgaagccatgatcggtatgagttctcgtctcacatagccagaggagaacacagagccctgctgaagtagtaatgaactagtccgtaacttgaaagtatttcgatttcttggctttatatatcttgtggaaaggacgactttagtgaatgtaaggtgagtgc

SEQ ID NO: 2920 - DNA, 1346 bp, Homo sapiens
  source 1..1346: mol_type = genomic DNA
accgccaccatggaagatatacaaacaaatgcggaactgaaaagcactcaggagcagtctgtgcccgcagaaagtgcagcggttttgaatgactacagtttaaccaaatctcatgaaatggaaaatgtggacagtggagaaggcccagccaatgaagatgaagacataggagatgattcaatgaaagtgaaagatgaatacagtgaaagagatgagaatgttttaaagtcagaacccatgggaaatgcagaagagcctgaaatcccttacagctattcaagagaatataatgaatatgaaaacattaagttggagagacatgttgtctcattcgatagtagcaggccaaccagtggaaagatgaactgcgatgtgtgtggattatcctgcatcagcttcaatgtcttaatggttcataagcgaagccatactgcaagtgcggaggcaagacacatcaaagcagagatgggaagtgaaagagctctcgtactggacagattagcaagcaatgtggcaaaacgaaaaagctcaatgcctcagaaattcattggtgagaagcgccactgctttgatgtcaactataattcaagttacatgtatgagaaagagagtgagctcatacagacccgcatgatggaccaagccatcaataacgccatcagctatcttggcgccgaagccctgcgccccttggtccagacaccgcctgctcccacctcggagatggttccagttatcagcagcatgtatcccatagccctcacccgggctgagatgtcaaacggtgcccctcaagagctggaaaagaaaagcatccaccttccagagaagagcgtgccttctgagagaggcctctctcccaacaatagtggccacgactccacggacactgacagcaaccatgaagaacgccagaatcacatctatcagcaaaatcacatggtcctgtctcgggcccgcaatgggatgccacttctgaaggaggttccccgctcttacgaactcctcaagcccccgcccatctgcccaagagactccgtcaaagtgatcaacaaggaaggggaggtgatggatgtgtatcggtgtgaccactgccgcgtcctcttcctggactatgtgatgttcacgattcacatgggctgccacggcttccgtgaccctttcgagtgtaacatgtgtggatatcgaagccatgatcggtatgagttctcgtctcacatagccagaggagaacacagagccctgctgaagtagtaatgaactagtccgtaacttgaaagtatttcgatttcttggctttatatatcttgtggaaaggacgaatatacgcctaccggtaggaacca

SEQ ID NO: 2921 - DNA, 1514 bp, Homo sapiens
  source 1..1514: mol_type = genomic DNA
accgccaccatggaagatatacaaacaaatgcggaactgaaaagcactcaggagcagtctgtgcccgcagaaagtgcagcggttttgaatgactacagtttaaccaaatctcatgaaatggaaaatgtggacagtggagaaggcccagccaatgaagatgaagacataggagatgattcaatgaaagtgaaagatgaatacagtgaaagagatgagaatgttttaaagtcagaacccatgggaaatgcagaagagcctgaaatcccttacagctattcaagagaatataatgaatatgaaaacattaagttggagagacatgttgtctcattcgatagtagcaggccaaccagtggaaagatgaactgcgatgtgtgtggattatcctgcatcagcttcaatgtcttaatggttcataagcgaagccatactggtgaacgcccattccagtgtaatcagtgtggggcatcttttactcagaaaggtaacctcctccgccacattaaactgcacacaggggaaaaaccttttaagtgtcacctctgcaactatgcatgccaaagaagagatgcgctcacggggcatcttaggacacattctgcaagtgcggaggcaagacacatcaaagcagagatgggaagtgaaagagctctcgtactggacagattagcaagcaatgtggcaaaacgaaaaagctcaatgcctcagaaattcattggtgagaagcgccactgctttgatgtcaactataattcaagttacatgtatgagaaagagagtgagctcatacagacccgcatgatggaccaagccatcaataacgccatcagctatcttggcgccgaagccctgcgccccttggtccagacaccgcctgctcccacctcggagatggttccagttatcagcagcatgtatcccatagccctcacccgggctgagatgtcaaacggtgcccctcaagagctggaaaagaaaagcatccaccttccagagaagagcgtgccttctgagagaggcctctctcccaacaatagtggccacgactccacggacactgacagcaaccatgaagaacgccagaatcacatctatcagcaaaatcacatggtcctgtctcgggcccgcaatgggatgccacttctgaaggaggttccccgctcttacgaactcctcaagcccccgcccatctgcccaagagactccgtcaaagtgatcaacaaggaaggggaggtgatggatgtgtatcggtgtgaccactgccgcgtcctcttcctggactatgtgatgttcacgattcacatgggctgccacggcttccgtgaccctttcgagtgtaacatgtgtggatatcgaagccatgatcggtatgagttctcgtctcacatagccagaggagaacacagagccctgctgaagtagtaatgaactagtccgtaacttgaaagtatttcgatttcttggctttatatatcttgtggaaaggacgaagatcactgtgtcatgtcgttaac

SEQ ID NO: 2922 - DNA, 1529 bp, Homo sapiens
  source 1..1529: mol_type = genomic DNA
accgccaccatggaagatatacaaacaaatgcggaactgaaaagcactcaggagcagtctgtgcccgcagatgattcaatgaaagtgaaagatgaatacagtgaaagagatgagaatgttttaaagtcagaacccatgggaaatgcagaagagcctgaaatcccttacagctattcaagagaatataatgaatatgaaaacattaagttggagagacatgttgtctcattcgatagtagcaggccaaccagtggaaagatgaactgcgatgtgtgtggattatcctgcatcagcttcaatgtcttaatggttcataagcgaagccatactggtgaacgcccattccagtgtaatcagtgtggggcatcttttactcagaaaggtaacctcctccgccacattaaactgcacacaggggaaaaaccttttaagtgtcacctctgcaactatgcatgccaaagaagagatgcgctcacggggcatcttaggacacattctgtggagaaaccctacaaatgtgagttttgtggaaggagttacaagcagagaagttcccttgaggagcacaaggagcgctgccgtacatttcttcagagcactgacccaggggacactgcaagtgcggaggcaagacacatcaaagcagagatgggaagtgaaagagctctcgtactggacagattagcaagcaatgtggcaaaacgaaaaagctcaatgcctcagaaattcattggtgagaagcgccactgctttgatgtcaactataattcaagttacatgtatgagaaagagagtgagctcatacagacccgcatgatggaccaagccatcaataacgccatcagctatcttggcgccgaagccctgcgccccttggtccagacaccgcctgctcccacctcggagatggttccagttatcagcagcatgtatcccatagccctcacccgggctgagatgtcaaacggtgcccctcaagagctggaaaagaaaagcatccaccttccagagaagagcgtgccttctgagagaggcctctctcccaacaatagtggccacgactccacggacactgacagcaaccatgaagaacgccagaatcacatctatcagcaaaatcacatggtcctgtctcgggcccgcaatgggatgccacttctgaaggaggttccccgctcttacgaactcctcaagcccccgcccatctgcccaagagactccgtcaaagtgatcaacaaggaaggggaggtgatggatgtgtatcggtgtgaccactgccgcgtcctcttcctggactatgtgatgttcacgattcacatgggctgccacggcttccgtgaccctttcgagtgtaacatgtgtggatatcgaagccatgatcggtatgagttctcgtctcacatagccagaggagaacacagagccctgctgaagtagtaatgaactagtccgtaacttgaaagtatttcgatttcttggctttatatatcttgtggaaaggacgaggttatcagaaccgtactatcgtc

SEQ ID NO: 2923 - DNA, 1370 bp, Homo sapiens
  source 1..1370: mol_type = genomic DNA
accgccaccatggaagatatacaaacaaatgcggaactgaaaagcactcaggagcagtctgtgcccgcagaaagtgcagcggttttgaatgactacagtttaaccaaatctcatgaaatggaaaatgtggacagtggagaaggcccagccaatgaagatgaagacataggaggtgaacgcccattccagtgtaatcagtgtggggcatcttttactcagaaaggtaacctcctccgccacattaaactgcacacaggggaaaaaccttttaagtgtcacctctgcaactatgcatgccaaagaagagatgcgctcacggggcatcttaggacacattctgtggagaaaccctacaaatgtgagttttgtggaaggagttacaagcagagaagttcccttgaggagcacaaggagcgctgccgtacatttcttcagagcactgacccaggggacactgcaagtgcggaggcaagacacatcaaagcagagatgggaagtgaaagagctctcgtactggacagattagcaagcaatgtggcaaaacgaaaaagctcaatgcctcagaaattcattggtgagaagcgccactgctttgatgtcaactataattcaagttacatgtatgagaaagagagtgagctcatacagacccgcatgatggaccaagccatcaataacgccatcagctatcttggcgccgaagccctgcgccccttggtccagacaccgcctgctcccacctcggagatggttccagttatcagcagcatgtatcccatagccctcacccgggctgagatgtcaaacggtgcccctcaagagctggaaaagaaaagcatccaccttccagagaagagcgtgccttctgagagaggcctctctcccaacaatagtggccacgactccacggacactgacagcaaccatgaagaacgccagaatcacatctatcagcaaaatcacatggtcctgtctcgggcccgcaatgggatgccacttctgaaggaggttccccgctcttacgaactcctcaagcccccgcccatctgcccaagagactccgtcaaagtgatcaacaaggaaggggaggtgatggatgtgtatcggtgtgaccactgccgcgtcctcttcctggactatgtgatgttcacgattcacatgggctgccacggcttccgtgaccctttcgagtgtaacatgtgtggatatcgaagccatgatcggtatgagttctcgtctcacatagccagaggagaacacagagccctgctgaagtagtaatgaactagtccgtaacttgaaagtatttcgatttcttggctttatatatcttgtggaaaggacgacagcttccgccttccaataatcat

SEQ ID NO: 2924 - DNA, 1085 bp, Homo sapiens
  source 1..1085: mol_type = genomic DNA
accgccaccatggaagatatacaaacaaatgcggaactgaaaagcactcaggagcagtctgtgcccgcagaaagtgcagcggttttgaatgactacagtttaaccaaatctcatgaaatggaaaatgtggacagtggagaaggcccagccaatgaagatgaagacataggagcaagtgcggaggcaagacacatcaaagcagagatgggaagtgaaagagctctcgtactggacagattagcaagcaatgtggcaaaacgaaaaagctcaatgcctcagaaattcattggtgagaagcgccactgctttgatgtcaactataattcaagttacatgtatgagaaagagagtgagctcatacagacccgcatgatggaccaagccatcaataacgccatcagctatcttggcgccgaagccctgcgccccttggtccagacaccgcctgctcccacctcggagatggttccagttatcagcagcatgtatcccatagccctcacccgggctgagatgtcaaacggtgcccctcaagagctggaaaagaaaagcatccaccttccagagaagagcgtgccttctgagagaggcctctctcccaacaatagtggccacgactccacggacactgacagcaaccatgaagaacgccagaatcacatctatcagcaaaatcacatggtcctgtctcgggcccgcaatgggatgccacttctgaaggaggttccccgctcttacgaactcctcaagcccccgcccatctgcccaagagactccgtcaaagtgatcaacaaggaaggggaggtgatggatgtgtatcggtgtgaccactgccgcgtcctcttcctggactatgtgatgttcacgattcacatgggctgccacggcttccgtgaccctttcgagtgtaacatgtgtggatatcgaagccatgatcggtatgagttctcgtctcacatagccagaggagaacacagagccctgctgaagtagtaatgaactagtccgtaacttgaaagtatttcgatttcttggctttatatatcttgtggaaaggacgaggacgcatgcctgatgtcggcggt

SEQ ID NO: 2925 - DNA, 1229 bp, Homo sapiens
  source 1..1229: mol_type = genomic DNA
accgccaccatggaagatatacaaacaaatgcggaactgaaaagcactcaggagcagtctgtgcccgcagaaagtgcagcggttttgaatgactacagtttaaccaaatctcatgaaatggaaaatgtggacagtggagaaggcccagccaatgaagatgaagacataggagatgattcaatgaaagtgaaagatgaatacagtgaaagagatgagaatgttttaaagtcagaacccatgggaaatgcagaagagcctgaaatcccttacagctattcaagagaatataatgaatatgaaaacattaagttggagagacatgttgtctcattcgatagtagcaggccaaccagtggaaagatgaactgcgatgtgtgtggattatcctgcatcagcttcaatgtcttaatggttcataagcgaagccatactggtgagaagcgccactgctttgatgtcaactataattcaagttacatgtatgagaaagagagtgagctcatacagacccgcatgatggaccaagccatcaataacgccatcagctatcttggcgccgaagccctgcgccccttggtccagacaccgcctgctcccacctcggagatggttccagttatcagcagcatgtatcccatagccctcacccgggctgagatgtcaaacggtgcccctcaagagctggaaaagaaaagcatccaccttccagagaagagcgtgccttctgagagaggcctctctcccaacaatagtggccacgactccacggacactgacagcaaccatgaagaacgccagaatcacatctatcagcaaaatcacatggtcctgtctcgggcccgcaatgggatgccacttctgaaggaggttccccgctcttacgaactcctcaagcccccgcccatctgcccaagagactccgtcaaagtgatcaacaaggaaggggaggtgatggatgtgtatcggtgtgaccactgccgcgtcctcttcctggactatgtgatgttcacgattcacatgggctgccacggcttccgtgaccctttcgagtgtaacatgtgtggatatcgaagccatgatcggtatgagttctcgtctcacatagccagaggagaacacagagccctgctgaagtagtaatgaactagtccgtaacttgaaagtatttcgatttcttggctttatatatcttgtggaaaggacgatctctttcacctctagtgtgtttg

SEQ ID NO: 2926 - DNA, 1202 bp, Homo sapiens
  source 1..1202: mol_type = genomic DNA
accgccaccatggaagatatacaaacaaatgcggaactgaaaagcactcaggagcagtctgtgcccgcagaaagtgcagcggttttgaatgactacagtttaaccaaatctcatgaaatggaaaatgtggacagtggagaaggcccagccaatgaagatgaagacataggagtggagaaaccctacaaatgtgagttttgtggaaggagttacaagcagagaagttcccttgaggagcacaaggagcgctgccgtacatttcttcagagcactgacccaggggacactgcaagtgcggaggcaagacacatcaaagcagagatgggaagtgaaagagctctcgtactggacagattagcaagcaatgtggcaaaacgaaaaagctcaatgcctcagaaattcattggtgagaagcgccactgctttgatgtcaactataattcaagttacatgtatgagaaagagagtgagctcatacagacccgcatgatggaccaagccatcaataacgccatcagctatcttggcgccgaagccctgcgccccttggtccagacaccgcctgctcccacctcggagatggttccagttatcagcagcatgtatcccatagccctcacccgggctgagatgtcaaacggtgcccctcaagagctggaaaagaaaagcatccaccttccagagaagagcgtgccttctgagagaggcctctctcccaacaatagtggccacgactccacggacactgacagcaaccatgaagaacgccagaatcacatctatcagcaaaatcacatggtcctgtctcgggcccgcaatgggatgccacttctgaaggaggttccccgctcttacgaactcctcaagcccccgcccatctgcccaagagactccgtcaaagtgatcaacaaggaaggggaggtgatggatgtgtatcggtgtgaccactgccgcgtcctcttcctggactatgtgatgttcacgattcacatgggctgccacggcttccgtgaccctttcgagtgtaacatgtgtggatatcgaagccatgatcggtatgagttctcgtctcacatagccagaggagaacacagagccctgctgaagtagtaatgaactagtccgtaacttgaaagtatttcgatttcttggctttatatatcttgtggaaaggacgatcgccctctttgtactgttgatgc

SEQ ID NO: 2927 - DNA, 1397 bp, Homo sapiens
  source 1..1397: mol_type = genomic DNA
accgccaccatggaagatatacaaacaaatgcggaactgaaaagcactcaggagcagtctgtgcccgcagaaagtgcagcggttttgaatgactacagtttaaccaaatctcatgaaatggaaaatgtggacagtggagaaggcccagccaatgaagatgaagacataggagatgattcaatgaaagtgaaagatgaatacagtgaaagagatgagaatgttttaaagtcagaacccatgggaaatgcagaagagcctgaaatcccttacagctattcaagagaatataatgaatatgaaaacattaagttggagagacatgttgtctcattcgatagtagcaggccaaccagtggaaagatgaactgcgatgtgtgtggattatcctgcatcagcttcaatgtcttaatggttcataagcgaagccatactggtgaacgcccattccagtgtaatcagtgtggggcatcttttactcagaaaggtaacctcctccgccacattaaactgcacacaggggaaaaaccttttaagtgtcacctctgcaactatgcatgccaaagaagagatgcgctcacggggcatcttaggacacattctggtgagaagcgccactgctttgatgtcaactataattcaagttacatgtatgagaaagagagtgagctcatacagacccgcatgatggaccaagccatcaataacgccatcagctatcttggcgccgaagccctgcgccccttggtccagacaccgcctgctcccacctcggagatggttccagttatcagcagcatgtatcccatagccctcacccgggctgagatgtcaaacggtgcccctcaagagctggaaaagaaaagcatccaccttccagagaagagcgtgccttctgagagaggcctctctcccaacaatagtggccacgactccacggacactgacagcaaccatgaagaacgccagaatcacatctatcagcaaaatcacatggtcctgtctcgggcccgcaatgggatgccacttctgaaggaggttccccgctcttacgaactcctcaagcccccgcccatctgcccaagagactccgtcaaagtgatcaacaaggaaggggaggtgatggatgtgtatcggtgtgaccactgccgcgtcctcttcctggactatgtgatgttcacgattcacatgggctgccacggcttccgtgaccctttcgagtgtaacatgtgtggatatcgaagccatgatcggtatgagttctcgtctcacatagccagaggagaacacagagccctgctgaagtagtaatgaactagtccgtaacttgaaagtatttcgatttcttggctttatatatcttgtggaaaggacgaagaagcggactaggagcgtcggat

SEQ ID NO: 2928 - DNA, 890 bp, Homo sapiens
  source 1..890: mol_type = genomic DNA
accgccaccatgggaagtgaaagagctctcgtactggacagattagcaagcaatgtggcaaaacgaaaaagctcaatgcctcagaaattcattggtgagaagcgccactgctttgatgtcaactataattcaagttacatgtatgagaaagagagtgagctcatacagacccgcatgatggaccaagccatcaataacgccatcagctatcttggcgccgaagccctgcgccccttggtccagacaccgcctgctcccacctcggagatggttccagttatcagcagcatgtatcccatagccctcacccgggctgagatgtcaaacggtgcccctcaagagctggaaaagaaaagcatccaccttccagagaagagcgtgccttctgagagaggcctctctcccaacaatagtggccacgactccacggacactgacagcaaccatgaagaacgccagaatcacatctatcagcaaaatcacatggtcctgtctcgggcccgcaatgggatgccacttctgaaggaggttccccgctcttacgaactcctcaagcccccgcccatctgcccaagagactccgtcaaagtgatcaacaaggaaggggaggtgatggatgtgtatcggtgtgaccactgccgcgtcctcttcctggactatgtgatgttcacgattcacatgggctgccacggcttccgtgaccctttcgagtgtaacatgtgtggatatcgaagccatgatcggtatgagttctcgtctcacatagccagaggagaacacagagccctgctgaagtagtaatgaactagtccgtaacttgaaagtatttcgatttcttggctttatatatcttgtggaaaggacgaagacgttgtggaaatgaagctcgc

SEQ ID NO: 2929 - DNA, 1463 bp, Homo sapiens
  source 1..1463: mol_type = genomic DNA
accgccaccatggaagatatacaaacaaatgcggaactgaaaagcactcaggagcagtctgtgcccgcagaaagtgcagcggttttgaatgactacagtttaaccaaatctcatgaaatggaaaatgtggacagtggagaaggcccagccaatgaagatgaagacataggagatgattcaatgaaagtgaaagatgaatacagtgaaagagatgagaatgttttaaagtcagaacccatgggaaatgcagaagagcctgaaatcccttacagctattcaagagaatataatgaatatgaaaacattaagttggagagacatgttgtctcattcgatagtagcaggccaaccagtggaaagatgaactgcgatgtgtgtggattatcctgcatcagcttcaatgtcttaatggttcataagcgaagccatactgtggagaaaccctacaaatgtgagttttgtggaaggagttacaagcagagaagttcccttgaggagcacaaggagcgctgccgtacatttcttcagagcactgacccaggggacactgcaagtgcggaggcaagacacatcaaagcagagatgggaagtgaaagagctctcgtactggacagattagcaagcaatgtggcaaaacgaaaaagctcaatgcctcagaaattcattggtgagaagcgccactgctttgatgtcaactataattcaagttacatgtatgagaaagagagtgagctcatacagacccgcatgatggaccaagccatcaataacgccatcagctatcttggcgccgaagccctgcgccccttggtccagacaccgcctgctcccacctcggagatggttccagttatcagcagcatgtatcccatagccctcacccgggctgagatgtcaaacggtgcccctcaagagctggaaaagaaaagcatccaccttccagagaagagcgtgccttctgagagaggcctctctcccaacaatagtggccacgactccacggacactgacagcaaccatgaagaacgccagaatcacatctatcagcaaaatcacatggtcctgtctcgggcccgcaatgggatgccacttctgaaggaggttccccgctcttacgaactcctcaagcccccgcccatctgcccaagagactccgtcaaagtgatcaacaaggaaggggaggtgatggatgtgtatcggtgtgaccactgccgcgtcctcttcctggactatgtgatgttcacgattcacatgggctgccacggcttccgtgaccctttcgagtgtaacatgtgtggatatcgaagccatgatcggtatgagttctcgtctcacatagccagaggagaacacagagccctgctgaagtagtaatgaactagtccgtaacttgaaagtatttcgatttcttggctttatatatcttgtggaaaggacgataattcgctcttaagtctcggaca

SEQ ID NO: 2930 - DNA, 1412 bp, Homo sapiens
  source 1..1412: mol_type = genomic DNA
accgccaccatggaagatatacaaacaaatgcggaactgaaaagcactcaggagcagtctgtgcccgcagatgattcaatgaaagtgaaagatgaatacagtgaaagagatgagaatgttttaaagtcagaacccatgggaaatgcagaagagcctgaaatcccttacagctattcaagagaatataatgaatatgaaaacattaagttggagagacatgttgtctcattcgatagtagcaggccaaccagtggaaagatgaactgcgatgtgtgtggattatcctgcatcagcttcaatgtcttaatggttcataagcgaagccatactggtgaacgcccattccagtgtaatcagtgtggggcatcttttactcagaaaggtaacctcctccgccacattaaactgcacacaggggaaaaaccttttaagtgtcacctctgcaactatgcatgccaaagaagagatgcgctcacggggcatcttaggacacattctgcaagtgcggaggcaagacacatcaaagcagagatgggaagtgaaagagctctcgtactggacagattagcaagcaatgtggcaaaacgaaaaagctcaatgcctcagaaattcattggtgagaagcgccactgctttgatgtcaactataattcaagttacatgtatgagaaagagagtgagctcatacagacccgcatgatggaccaagccatcaataacgccatcagctatcttggcgccgaagccctgcgccccttggtccagacaccgcctgctcccacctcggagatggttccagttatcagcagcatgtatcccatagccctcacccgggctgagatgtcaaacggtgcccctcaagagctggaaaagaaaagcatccaccttccagagaagagcgtgccttctgagagaggcctctctcccaacaatagtggccacgactccacggacactgacagcaaccatgaagaacgccagaatcacatctatcagcaaaatcacatggtcctgtctcgggcccgcaatgggatgccacttctgaaggaggttccccgctcttacgaactcctcaagcccccgcccatctgcccaagagactccgtcaaagtgatcaacaaggaaggggaggtgatggatgtgtatcggtgtgaccactgccgcgtcctcttcctggactatgtgatgttcacgattcacatgggctgccacggcttccgtgaccctttcgagtgtaacatgtgtggatatcgaagccatgatcggtatgagttctcgtctcacatagccagaggagaacacagagccctgctgaagtagtaatgaactagtccgtaacttgaaagtatttcgatttcttggctttatatatcttgtggaaaggacgaatctcaatcgagctgtccgttctc

SEQ ID NO: 2931 - DNA, 1682 bp, Homo sapiens
  source 1..1682: mol_type = genomic DNA
accgccaccatggaaacagaggctattgatggctatataacgtgtgacaatgagctttcacccgaaagggagcactccaatatggcaattgacctcacctcaagcacacccaatggacagcatgcctcaccaagtcacatgacaagcacaaattcagtaaagctagaaatgcagagtgatgaagagtgtgacaggaaacccctgagccgtgaagatgagatcaggggccatgatgagggtagcagcctagaagaacccctaattgagagcagcgaggtggctgacaacaggaaagtccaggagcttcaaggcgagggaggaatccggcttccgaatggtaaactgaaatgtgacgtctgtggcatggtttgcattgggcccaatgtgcttatggtacataaaaggagtcacactggtgaacgccccttccactgtaaccagtgtggagcttcttttactcagaagggcaaccttctgagacacataaagttacactctggagagaagccgttcaaatgtcctttctgtagctacgcctgtagaagaagggacgccctcacaggacacctcaggacccattctgtgggtaaacctcacaagtgcaactactgtggacgaagctacaagcagcgcagttcactggaggagcacaaggaacgctgccacaactatctccagaatgtcagcatggaggctgctgggcaggtcatgagtcaccatgtacctcctatggaagattgtaaggaacaagagcctattatggacaacaatatttctctggtgccttttgagagacctgctgtcatagagaagctcacggggaatatgggaaaacgtaaaagctccactccacaaaagtttgtgggggaaaagctcatgcgattcagctacccagatattcactttgatatgaacttaacatatgagaaggaggctgagctgatgcagtctcatatgatggaccaagccatcaacaatgcaatcacctaccttggagctgaggcccttcaccctctgatgcagcacccgccaagcacaatcgctgaagtggccccagttataagctcagcttattctcaggtctatcatccaaataggatagaaagacccattagcagggaaactgctgatagtcatgaaaacaacatggatggccccatctctctcatcagaccaaagagtcgaccccaggaaagagaggcctctcccagcaatagctgcctggattccactgactcagaaagcagccatgatgaccaccagtcctaccaaggacaccctgccttaaatcccaagaggaaacaaagcccagcttacatgaaggaggatgtcaaagctttggatactaccaaggctcctaagggctctctgaaggacatctacaaggtcttcaatggagaaggagaacagattagggccttcaagtgtgagcactgccgagtccttttcctagaccatgtcatgtacaccattcacatgggttgccatggctaccgggacccactggaatgcaacatctgtggctacagaagccaggaccgttatgagttttcatcacacattgttcgaggggagcacacattccactagtaatgaactagtccgtaacttgaaagtatttcgatttcttggctttatatatcttgtggaaaggacgagctgcaatgtacggcggataagcc

SEQ ID NO: 2932 - DNA, 1604 bp, Homo sapiens
  source 1..1604: mol_type = genomic DNA
accgccaccatggaaacagaggctattgatggctatataacgtgtgacaatgagctttcacccgaaagggagcactccaatatggcaattgacctcacctcaagcacacccaatggacagcatgcctcaccaagtcacatgacaagcacaaattcagtaaagctagaaatgcagagtgatgaagagtgtgacaggaaacccctgagccgtgaagatgagatcaggggccatgatgagggtagcagcctagaagaacccctaattgagagcagcgaggtggctgacaacaggaaagtccaggagcttcaaggcgagggaggaatccggcttccgaatggtgaacgccccttccactgtaaccagtgtggagcttcttttactcagaagggcaaccttctgagacacataaagttacactctggagagaagccgttcaaatgtcctttctgtagctacgcctgtagaagaagggacgccctcacaggacacctcaggacccattctgtgggtaaacctcacaagtgcaactactgtggacgaagctacaagcagcgcagttcactggaggagcacaaggaacgctgccacaactatctccagaatgtcagcatggaggctgctgggcaggtcatgagtcaccatgtacctcctatggaagattgtaaggaacaagagcctattatggacaacaatatttctctggtgccttttgagagacctgctgtcatagagaagctcacggggaatatgggaaaacgtaaaagctccactccacaaaagtttgtgggggaaaagctcatgcgattcagctacccagatattcactttgatatgaacttaacatatgagaaggaggctgagctgatgcagtctcatatgatggaccaagccatcaacaatgcaatcacctaccttggagctgaggcccttcaccctctgatgcagcacccgccaagcacaatcgctgaagtggccccagttataagctcagcttattctcaggtctatcatccaaataggatagaaagacccattagcagggaaactgctgatagtcatgaaaacaacatggatggccccatctctctcatcagaccaaagagtcgaccccaggaaagagaggcctctcccagcaatagctgcctggattccactgactcagaaagcagccatgatgaccaccagtcctaccaaggacaccctgccttaaatcccaagaggaaacaaagcccagcttacatgaaggaggatgtcaaagctttggatactaccaaggctcctaagggctctctgaaggacatctacaaggtcttcaatggagaaggagaacagattagggccttcaagtgtgagcactgccgagtccttttcctagaccatgtcatgtacaccattcacatgggttgccatggctaccgggacccactggaatgcaacatctgtggctacagaagccaggaccgttatgagttttcatcacacattgttcgaggggagcacacattccactagtaatgaactagtccgtaacttgaaagtatttcgatttcttggctttatatatcttgtggaaaggacgacgttgacgatcatcgaacgtctga

SEQ ID NO: 2933 - DNA, 968 bp, Homo sapiens
  source 1..968: mol_type = genomic DNA
accgccaccatggagcctccggaccagtgtagccagtatatgaccagcttgctcagccctgcagtcgacgacgagaaagaactacaggatatgaatgctatggtgctgtcgcttactgaagaggtcaaagaggaggaagaggatgcacagcctgagcctgagcaaggcacagcagcaggagaaaagttaaagtcggcaggagcccaaggcggagaagaaaaagatggcggcggagaagaaaaagatggcggcggcgccggagttcctggccacctatgggaaggaaacctcgagggcaccagcggcagcgatggcaacgttgaggacagcgaccagagcgagaaggaacctgggcagcagtattcgcgcccacagggcgccgtcggggggctggagcctggcaacgcgcagcagcccaacgtccacgccttcaccccattgcagctgcaggagctggagtgcattttccaacgcgagcagttccccagtgagttcctgcgaaggaggctggcaagaagcatgaatgtgactgaactcgcagtgcagatttggtttgagaatagaagagccaaatggaggagacatcagagggcattaatggcaagaaacatgctgcccttcatggcagtgggccagcctgtcatggtaaccgcagctgaggccataacggcacccttgttcatcagcgggatgagagatgattacttctgggaccacagccattccagcagcctgtgtttccccatgccaccctttcctcctccgtccttgccccttccactcatgcttcttccacctatgccacccgctggccaggctgaatttggcccattcccttttgttatcgtgccttctttcacattccccaatgtctagtaatgaactagtccgtaacttgaaagtatttcgatttcttggctttatatatcttgtggaaaggacgagcctgacatgggcgcaccgagaat

SEQ ID NO: 2934 - DNA, 1493 bp, Homo sapiens
  source 1..1493: mol_type = genomic DNA
accgccaccatggaaactgaacagccagaagaaaccttccctaacactgaaaccaatggtgaatttggtaaacgccctgcagaagatatggaagaggaacaagcatttaaaagatctagaaacactgatgagatggttgaattacgcattctgcttcagagcaagaatgctggggcagtgattggaaaaggaggcaagaatattaaggctctccgtacagactacaatgccagtgtttcagtcccagacagcagtggccccgagcgcatattgagtatcagtgctgatattgaaacaattggagaaattctgaagaaaatcatccctaccttggaagagggcctgcagttgccatcacccactgcaaccagccagctcccgctcgaatctgatgctgtggaatgcttaaattaccaacactataaaggaagtgactttgactgcgagttgaggctgttgattcatcagagtctagcaggaggaattattggggtcaaaggtgctaaaatcaaagaacttcgagagaacactcaaaccaccatcaagcttttccaggaatgctgtcctcattccactgacagagttgttcttattggaggaaaacccgatagggttgtagagtgcataaagatcatccttgatcttatatctgagtctcccatcaaaggacgtgcacagccttatgatcccaatttttacgatgaaacctatgattatggtggttttacaatgatgtttgatgaccgtcgcggacgcccagtgggatttcccatgcggggaagaggtggttttgacagaatgcctcctggtcggggtgggcgtcccatgcctccatctagaagagattatgatgatatgagccctcgtcgaggaccacctccccctcctcccggacgaggcggccggggtggtagcagagctcggaatcttcctcttcctccaccaccaccacctagagggggagacctcatggcctatgacagaagagggagacctggagaccgttacgacggcatggttggtttcagtgctgatgaaacttgggactctgcaatagatacatggagcccatcagaatggcagatggcttatgaaccacagggtggctccggatatgattattcctatgcagggggtcgtggctcatatggtgatcttggtggacctattattactacacaagtaactattcccaaagatttggctggatctattattggcaaaggtggtcagcggattaaacaaatccgtcatgagtcgggagcttcgatcaaaattgatgagcctttagaaggatccgaagatcggatcattaccattacaggaacacaggaccagatacagaatgcacagtatttgctgcagaacagtgtgaagcagtattctggaaagtttttctagtaatgaactagtccgtaacttgaaagtatttcgatttcttggctttatatatcttgtggaaaggacgaaacagactagaggccgacattggg

SEQ ID NO: 2935 - DNA, 605 bp, Homo sapiens
  source 1..605: mol_type = genomic DNA
accgccaccatggaccgcggccgcccagcgggcagccccctcagcgccagcgccgagcccgcgcccctggccgccgccatccgcgactcgcgtcccgggcggaccgggccggggccggcgggccctgggggcggctcgcgttccgggagcgggcggccggcggcggcgaatgcggcgcgggagcgcagccgggtgcagaccctgcggcacgctttcctggagctgcagcgcacgctgccgtccgtgccgcccgacaccaagctgtccaagctggacgtgctgctgctggccaccacctacatcgcgcatctcacccgcagcctgcaggacgacgccgaggcgccggcggacgccgggttgggcgccctgcgcggcgatggctacctgcacccggtcaagaaatggcccatgcgatcaagattgtacatcggtgctactggtcagtttctgaagcattctgtttctggagaaaaaacaaatcatgacaacactccaacagactcacagccttagtaatgaactagtccgtaacttgaaagtatttcgatttcttggctttatatatcttgtggaaaggacgactagcgtgaagtgctggcagctgc

SEQ ID NO: 2936 - DNA, 5918 bp, Homo sapiens
  source 1..5918: mol_type = genomic DNA
accgccaccatgcagtcctttcgggagcaaagcagttaccacggaaaccagcaaagctacccacaggaggtacacggctcatcccggctagaagagttcagccctcgtcaggcccagatgttccagaattttggaggtacaggtggcagtagtggcagcagtggcagtggcagtggtggtggacgacgaggagcagcagctgctgcggcagcgatggctagcgagacctctggccatcaaggttaccagggtttcaggaaagaggctggagatttttactacatggcaggcaacaaagaccccgtgactacaggaaccccacagcctcctcagcgaaggccttctgggcctgtgcagagctatggacccccccaggggagcagctttggcaatcagtatgggagtgagggtcatgtgggccagtttcaagcacagcactctggccttggcggtgtgtcacattatcagcaggattacactgggcctttctctccagggagtgctcagtaccaacagcaggcttccagccagcagcagcagcagcaagtccagcagttgagacaacagctttaccagtcccatcagcccctgccacaggccactggccaaccagcatccagctcatcccatctacagccaatgcagcggccctcaactctgccatcctctgctgctggttaccagttaagagtgggtcagtttggccaacactatcagtcttctgcttcctcctcctcctcctcctccttcccttcaccacagcgttttagccagtctggacagagctatgatggcagttacaatgtgaatgctggatctcagtatgaaggacacaatgtgggttctaatgcacaggcttatggaacacaatccaattacagctatcagcctcaatctatgaagaattttgaacaggcaaagattccacaagggacccaacaggggcagcagcagcagcaaccgcagcaacaacaacacccttctcagcatgtgatgcagtatactaacgctgccaccaagctgcccctgcaaagccaagtggggcagtacaaccagcctgaggttcctgtgaggtcccccatgcagtttcaccagaacttcagccccatttctaacccttctccagctgcctctgtggttcagtctccaagctgtagttctaccccatctcctctcatgcagactggggagaatctccagtgtgggcaaggcagtgtgcctatgggttccagaaacagaattttacagttaatgcctcaactcagtccaaccccatcaatgatgcccagtcctaattctcatgctgcaggcttcaaagggtttggactagaaggggtaccagaaaagcgactgacagatcctgggttgagtagtttgagtgctctgagtactcaagtggccaatcttcctaacactgtccagcacatgttactttctgatgccctgactcctcagaagaagacctccaagaggccctcatcttccaagaaagcagatagctgcacaaattctgaaggctcctcacaacctgaagaacagctgaagtcccctatggcagagtcattagatggaggctgctccagcagttcagaggatcaaggcgagagagtgcggcaactaagtggccagagcaccagctctgacaccacctacaagggtggagcctctgagaaagctggctcctcaccggcacaaggtgctcagaatgaaccccccagactcaatgctagtcctgccgcaagagaagaggccacctcaccaggcgctaaggacatgccattgtcatccgacgggaacccaaaggttaatgagaagactgttggggtgattgtctcccgggaagccatgacaggtcgggtagaaaagcctggtggacaagataaaggctcccaagaggatgatcctgcagccactcaaaggccacctagcaatggtggggcaaaggaaaccagtcatgcatcacttccccagccagagcctccaggaggaggagggagcaaaggaaacaagaatggcgataacaactccaaccataatggagaaggaaatggccagagtggccactctgcagcgggccctggttttacgagcagaactgagcctagcaaatctcctggaagtctgcgctatagttacaaagatagtttcgggtcagccgtgccacgaaatgtcagtggctttcctcagtatcctacagggcaagaaaagggagatttcactggccatggggaacgaaagggtagaaatgaaaaattcccaagcctcctgcaggaagtgcttcagggttaccaccaccaccctgacaggagatattctaggagtactcaagagcatcaggggatggctggtagcctagaaggaaccacaaggcccaatgtcttggttagtcaaaccaatgaattagctagcaggggccttctgaacaaaagcattgggtctctattagaaaatccccactggggcccctgggaaaggaaatcaagcagcacagctcctgaaatgaaacagatcaatttgactgactatccaattcccagaaagtttgaaatagagcctcagtcatcagcacatgagcctgggggttccctctctgaaagaagatcagtgatctgtgatatttctccactaagacagattgtcagggacccaggggctcactcactgggacacatgagtgccgacaccagaattgggaggaatgaccgtctcaatccaactttaagtcagtcggtcattcttcctggtggtttggtgtccatggaaaccaagctgaaatcccagagcgggcagataaaagaggaagactttgaacagtctaaatctcaagctagtttcaacaacaagaaatctggagaccactgccatcctcctagcatcaagcatgagtcttaccgcggcaatgccagccctggagcagcaacccatgattccctttcagactatggcccgcaagacagcagacccacgccaatgcggcgggtccctggcagagttggtggtcgggagggcatgaggggtcggtccccttctcaatatcatgactttgcagaaaaattgaaaatgtctcctgggcggagcagaggcccagggggagaccctcatcacatgaatccacacatgaccttttcagagagggctaaccggagttctttacacactcccttttctcccaactcagaaaccctggcctctgcttatcatgcaaatactcgggctcatgcttatggggaccctaacgcaggtttgaattctcagctgcattataagagacagatgtaccaacagcaaccagaggagtataaagactggagcagcggttctgctcagggagtaattgctgcagcacagcacaggcaggaggggccacggaagagtccaaggcagcagcagtttcttgacagagtacggagccctctgaaaaatgacaaagatggtatgatgtatggcccaccagtggggacttaccatgaccccagtgcccaggaggctgggcgctgcctaatgtctagtgatggtctgcctaacaagggcatggaattaaagcatggctcccagaagttacaagaatcctgttgggatctttctcggcaaacttctccagccaaaagcagcggtcctccaggaatgtccagtcaaaaaaggtatgggccgccccatgagactgatggacatggactagctgaggctacacagtcatccaaacctggtagtgttatgctgagacttccaggccaggaggatcattcttctcaaaaccccttaatcatgaggaggcgtgttcgttcttttatctctcccattcccagtaagagacagtcacaagatgtaaagaacagtagcactgaagataaaggtcgcctccttcactcatcaaaagaaggcgctgataaagcattcaattcctatgcccatctttctcacagtcaggatatcaagtctatccctaagagagattcctccaaggaccttccaagtccagatagtagaaactgccctgctgttaccctcacaagccctgctaagaccaaaatactgcccccacggaaaggacggggattgaaattggaagctatagttcagaagattacatccccaaatattaggaggagcgcatcttcgaacagtgcggaggctgggggagacacggttacgcttgatgatatactgtctttgaagagtggtcctcctgaaggtgggagtgttgctgttcaggatgctgacatagagaagagaaaaggtgaggtggcttcggacctagtcagtccagcaaaccaggagttgcacgtagagaaacctcttccaaggtcttcagaagagtggcgtggcagcgtggatgacaaagtgaagacagagacacatgcagaaacagttactgccggaaaggaaccccctggtgccatgacatccacaacctcacagaagcctggtagtaaccaagggagaccagatggttccctgggtggaacagcacctttaatctttccagactcaaagaatgtacctccagtgggcatattggcccctgaggcaaaccccaaggctgaagagaaggagaacgatacagtgacgatttcaccgaagcaagagggtttccctccaaagggatatttcccatcaggaaagaagaaggggagacccattggtagtgtgaataagcaaaagaaacagcagcagccaccgcctccaccccctcagcccccacagataccagaaggttctgcagatggagagccaaagccaaaaaaacagaggcaaaggagggagagaaggaagcctggggcccagccgaggaagcgaaaaaccaaacaagcagttcccattgtggaaccccaagaacctgagatcaaactaaaatatgccacccagccactggataaaactgatgccaagaacaagtctttttacccttacatccatgtagtaaataagtgtgaacttggagccgtttgtacaatcatcaatgctgaggaagaagaacagaccaaattagtgaggggcaggaagggtcagaggtcactgacccctccacctagcagcactgaaagcaaggcgctcccggcctcgtcctttatgctgcagggacctgttgtgacagagtcttcggttatggggcacctggtttgctgtctgtgtggcaagtgggccagttaccggaacatgggtgacctctttggacctttttatccccaagattatgcagccactctcccgaagaatccacctcctaagagggccacagaaatgcagagcaaagttaaggtacggcacaaaagtgcttctaatggctccaagacggacactgaggaggaggaagagcagcagcagcagcagaaggagcagagaagcctggccgcacaccccaggtttaagcggcgccaccgctcggaagactgtggtggaggccctcggtccctgtccagggggctcccttgtaaaaaagcagccactgagggcagcagtgaaaagactgttttggactcgaagccctccgtgcccaccacttcagaaggtggccctgagctggagttacaaatccctgaactacctcttgacagcaatgaattttgggtccatgagggttgtattctctgggccaatggaatctacctggtttgtggcaggctctatggcctgcaggaagcgctggaaatagccagagagatgaaatgttcccactgccaggaggcaggcgccaccttgggctgctacaacaaaggctgctccttccgataccattacccgtgtgccattgatgcagattgtttgctacatgaggagaacttctcggtgaggtgccctaagcacaaggtgagactgtggagatagtaatgaactagtccgtaacttgaaagtatttcgatttcttggctttatatatcttgtggaaaggacgaggcctcccgtaaacgataaagacc

SEQ ID NO: 2937 - DNA, 5984 bp, Homo sapiens
  source 1..5984: mol_type = genomic DNA
accgccaccatgcagtcctttcgggagcaaagcagttaccacggaaaccagcaaagctacccacaggaggtacacggctcatcccggctagaagagttcagccctcgtcaggcccagatgttccagaattttggaggtacaggtggcagtagtggcagcagtggcagtggcagtggtggtggacgacgaggagcagcagctgctgcggcagcgatggctagcgagacctctggccatcaaggttaccagggtttcaggaaagaggctggagatttttactacatggcaggcaacaaagaccccgtgactacaggaaccccacagcctcctcagcgaaggccttctgggcctgtgcagagctatggacccccccaggggagcagctttggcaatcagtatgggagtgagggtcatgtgggccagtttcaagcacagcactctggccttggcggtgtgtcacattatcagcaggattacactgggcctttctctccagggagtgctcagtaccaacagcaggcttccagccagcagcagcagcagcaagtccagcagttgagacaacagctttaccagtcccatcagcccctgccacaggccactggccaaccagcatccagctcatcccatctacagccaatgcagcggccctcaactctgccatcctctgctgctggttaccagttaagagtgggtcagtttggccaacactatcagtcttctgcttcctcctcctcctcctcctccttcccttcaccacagcgttttagccagtctggacagagctatgatggcagttacaatgtgaatgctggatctcagtatgaaggacacaatgtgggttctaatgcacaggcttatggaacacaatccaattacagctatcagcctcaatctatgaagaattttgaacaggcaaagattccacaagggacccaacaggggcagcagcagcagcaaccgcagcaacaacaacacccttctcagcatgtgatgcagtatactaacgctgccaccaagctgcccctgcaaagccaagtggggcagtacaaccagcctgaggttcctgtgaggtcccccatgcagtttcaccagaacttcagccccatttctaacccttctccagctgcctctgtggttcagtctccaagctgtagttctaccccatctcctctcatgcagactggggagaatctccagtgtgggcaaggcagtgtgcctatgggttccagaaacagaattttacagttaatgcctcaactcagtccaaccccatcaatgatgcccagtcctaattctcatgctgcaggcttcaaagggtttggactagaaggggtaccagaaaagcgactgacagatcctgggttgagtagtttgagtgctctgagtactcaagtggccaatcttcctaacactgtccagcacatgttactttctgatgccctgactcctcagaagaagacctccaagaggccctcatcttccaagaaagcagatagctgcacaaattctgaaggctcctcacaacctgaagaacagctgaagtcccctatggcagagtcattagatggaggctgctccagcagttcagaggatcaaggcgagagagtgcggcaactaagtggccagagcaccagctctgacaccacctacaagggtggagcctctgagaaagctggctcctcaccggcacaaggtgctcagaatgaaccccccagactcaatgctagtcctgccgcaagagaagaggccacctcaccaggcgctaaggacatgccattgtcatccgacgggaacccaaaggttaatgagaagactgttggggtgattgtctcccgggaagccatgacaggtcgggtagaaaagcctggtggacaagataaaggctcccaagaggatgatcctgcagccactcaaaggccacctagcaatggtggggcaaaggaaaccagtcatgcatcacttccccagccagagcctccaggaggaggagggagcaaaggaaacaagaatggcgataacaactccaaccataatggagaaggaaatggccagagtggccactctgcagcgggccctggttttacgagcagaactgagcctagcaaatctcctggaagtctgcgctatagttacaaagatagtttcgggtcagccgtgccacgaaatgtcagtggctttcctcagtatcctacagggcaagaaaagggagatttcactggccatggggaacgaaagggtagaaatgaaaaattcccaagcctcctgcaggaagtgcttcagggttaccaccaccaccctgacaggagatattctaggagtactcaagagcatcaggggatggctggtagcctagaaggaaccacaaggcccaatgtcttggttagtcaaaccaatgaattagctagcaggggccttctgaacaaaagcattgggtctctattagaaaatccccactggggcccctgggaaaggaaatcaagcagcacagctcctgaaatgaaacagatcaatttgactgactatccaattcccagaaagtttgaaatagagcctcagtcatcagcacatgagcctgggggttccctctctgaaagaagatcagtgatctgtgatatttctccactaagacagattgtcagggacccaggggctcactcactgggacacatgagtgccgacaccagaattgggaggaatgaccgtctcaatccaactttaagtcagtcggtcattcttcctggtggtttggtgtccatggaaaccaagctgaaatcccagagcgggcagataaaagaggaagactttgaacagtctaaatctcaagctagtttcaacaacaagaaatctggagaccactgccatcctcctagcatcaagcatgagtcttaccgcggcaatgccagccctggagcagcaacccatgattccctttcagactatggcccgcaagacagcagacccacgccaatgcggcgggtccctggcagagttggtggtcgggagggcatgaggggtcggtccccttctcaatatcatgactttgcagaaaaattgaaaatgtctcctgggcggagcagaggcccagggggagaccctcatcacatgaatccacacatgaccttttcagagagggctaaccggagttctttacacactcccttttctcccaactcagaaaccctggcctctgcttatcatgcaaatactcgggctcatgcttatggggaccctaacgcaggtttgaattctcagctgcattataagagacagatgtaccaacagcaaccagaggagtataaagactggagcagcggttctgctcagggagtaattgctgcagcacagcacaggcaggaggggccacggaagagtccaaggcagcagcagtttcttgacagagtacggagccctctgaaaaatgacaaagatggtatgatgtatggcccaccagtggggacttaccatgaccccagtgcccaggaggctgggcgctgcctaatgtctagtgatggtctgcctaacaagggcatggaattaaagcatggctcccagaagttacaagaatcctgttgggatctttctcggcaaacttctccagccaaaagcagcggtcctccaggaatgtccagtcaaaaaaggtatgggccgccccatgagactgatggacatggactagctgaggctacacagtcatccaaacctggtagtgttatgctgagacttccaggccaggaggatcattcttctcaaaaccccttaatcatgaggaggcgtgttcgttcttttatctctcccattcccagtaagagacagtcacaagatgtaaagaacagtagcactgaagataaaggtcgcctccttcactcatcaaaagaaggcgctgataaagcattcaattcctatgcccatctttctcacagtcaggatatcaagtctatccctaagagagattcctccaaggaccttccaagtccagatagtagaaactgccctgctgttaccctcacaagccctgctaagaccaaaatactgcccccacggaaaggacggggattgaaattggaagctatagttcagaagattacatccccaaatattaggaggagcgcatcttcgaacagtgcggaggctgggggagacacggttacgcttgatgatatactgtctttgaagagtggtcctcctgaaggtgggagtgttgctgttcaggatgctgacatagagaagagaaaaggtgaggtggcttcggacctagtcagtccagcaaaccaggagttgcacgtagagaaacctcttccaaggtcttcagaagagtggcgtggcagcgtggatgacaaagtgaagacagagacacatgcagaaacagttactgccggaaaggaaccccctggtgccatgacatccacaacctcacagaagcctggtagtaaccaagggagaccagatggttccctgggtggaacagcacctttaatctttccagactcaaagaatgtacctccagtgggcatattggcccctgaggcaaaccccaaggctgaagagaaggagaacgatacagtgacgatttcaccgaagcaagagggtttccctccaaagggatatttcccatcaggaaagaagaaggggagacccattggtagtgtgaataagcaaaagaaacagcagcagccaccgcctccaccccctcagcccccacagataccagaaggttctgcagatggagagccaaagccaaaaaaacagaggcaaaggagggagagaaggaagcctggggcccagccgaggaagcgaaaaaccaaacaagcagttcccattgtggaaccccaagaacctgagatcaaactaaaatatgccacccagccactggataaaactgatgccaagaacaagtctttttacccttacatccatgtagtaaataagtgtgaacttggagccgtttgtacaatcatcaatgctgaggaagaagaacagaccaaattagtgaggggcaggaagggtcagaggtcactgacccctccacctagcagcactgaaagcaaggcgctcccggcctcgtcctttatgctgcagggacctgttgtgacagagtcttcggttatggggcacctggtttgctgtctgtgtggcaagtgggccagttaccggaacatgggtgacctctttggacctttttatccccaagattatgcagccactctcccgaagaatccacctcctaagagggccacagaaatgcagagcaaagttaaggtacggcacaaaagtgcttctaatggctccaagacggacactgaggaggaggaagagcagcagcagcagcagaaggagcagagaagcctggccgcacaccccaggtttaagcggcgccaccgctcggaagactgtggtggaggccctcggtccctgtccagggggctcccttgtaaaaaagcagccactgagggcagcagtgaaaagactgttttggactcgaagccctccgtgcccaccacttcagaaggtggccctgagctggagttacaaatccctgaactacctcttgacagcaatgaattttgggtccatgagggttgtattctctgggccaatggaatctacctggtttgtggcaggctctatggcctgcaggaagcgctggaaatagccagagagatgaaatgttcccactgccaggaggcaggcgccaccttgggctgctacaacaaaggctgctccttccgataccattacccgtgtgccattgatgcagattgtttgctacatgaggagaacttctcggtgaggtgccctaagcacaagcctccccttccgtgccctctcccccccttgcagaacaagaccgcgaaaggcagcctcagcacagagcagtcggagcgggggtagtaatgaactagtccgtaacttgaaagtatttcgatttcttggctttatatatcttgtggaaaggacgaacttagacgaaagacatatccatc

SEQ ID NO: 2938 - DNA, 641 bp, Homo sapiens
  source 1..641: mol_type = genomic DNA
accgccaccatgtccaccggctccctcagcgatgtggaggaccttcaagaggtggagatgttggaatgtgacgggttgaaaatggattcgaacaaggaatttgtgacttccaacgagagcaccgaggagagctccaactgcgagaatgggtctccccagaagggccgcggcggcctgggcaagaggaggaaggcgcccaccaagaagagccccctgagcggggtcagccaggaggggaagcaggtccagcgcaacgccgccaacgcgcgagagcgggcccgcatgcgagtgctgagcaaggccttctccagactcaagaccaccctgccctgggtgccccccgacaccaagctctccaagctggacacgctcaggctggcgtccagctacatcgcccacttgaggcagatcctggctaacgacaaatacgagaacgggtacattcacccggtcaacctgacgtggccctttatggtggccgggaaacccgagagtgacctgaaagaagtggtgaccgcgagccgcttatgtggaaccaccgcgtcctagtaatgaactagtccgtaacttgaaagtatttcgatttcttggctttatatatcttgtggaaaggacgacctgaacggccagcgacatgatgc

SEQ ID NO: 2939 - DNA, 422 bp, Homo sapiens
  source 1..422: mol_type = genomic DNA
accgccaccatgagcgcacgcggtgagggcgcggggcagccgtccacttcagcccagggacaacctgccgccccagcgcctcagaagagaggacgcggccgccccaggaagcagcagcaagaaccaaccggtgagccctctcctaagagacccaggggaagacccaaaggcagcaaaaacaagagtccctctaaagcagctcaaaagaaagcagaagccactggagaaaaacggccaagaggcagacctaggaaatgggacaatctactaccaagaaccagctccaagaagaaaacatctctgggaaacagtaccaaaaggagtcactagtaatgaactagtccgtaacttgaaagtatttcgatttcttggctttatatatcttgtggaaaggacgaacttacctgccacttaatatgaga

SEQ ID NO: 2940 - DNA, 458 bp, Homo sapiens
  source 1..458: mol_type = genomic DNA
accgccaccatgagcgcacgcggtgagggcgcggggcagccgtccacttcagcccagggacaacctgccgccccagcgcctcagaagagaggacgcggccgccccaggaagcagcagcaagaaccaaccggtgagccctctcctaagagacccaggggaagacccaaaggcagcaaaaacaagagtccctctaaagcagctcaaaagaaagcagaagccactggagaaaaacggccaagaggcagacctaggaaatggccacaacaagttgttcagaagaagcctgctcaggtcaatgttgccttgcctgggaaggaccacccgggcaatcttatatatctactgttctctaaaaatgccacttagtaatgaactagtccgtaacttgaaagtatttcgatttcttggctttatatatcttgtggaaaggacgatgacactacgagatttcaacggtc

SEQ ID NO: 2941 - DNA, 431 bp, Homo sapiens
  source 1..431: mol_type = genomic DNA
accgccaccatgagcgcacgcggtgagggcgcggggcagccgtccacttcagcccagggacaacctgccgccccagcgcctcagaagagaggacgcggccgccccaggaagcagcagcaagaaccaaccggtgagccctctcctaagagacccaggggaagacccaaaggcagcaaaaacaagagtccctctaaagcagctcaaaagaaagcagaagccactggagaaaaacggccaagaggcagacctaggaaatggccacaacaagttgttcagaagaagcctgctcaggaggaaactgaagagacatcctcacaagagtctgccgaagaggactagtaatgaactagtccgtaacttgaaagtatttcgatttcttggctttatatatcttgtggaaaggacgaggaaccctcaacaaggagtcgccg

SEQ ID NO: 2942 - DNA, 545 bp, Homo sapiens
  source 1..545: mol_type = genomic DNA
accgccaccatgagcgcacgcggtgagggcgcggggcagccgtccacttcagcccagggacaacctgccgccccagcgcctcagaagagaggacgcggccgccccaggaagcagcagcaagaaccaaccggtgagccctctcctaagagacccaggggaagacccaaaggcagcaaaaacaagagtccctctaaagcagctcaaaagaaagcagaagccactggagaaaaacggccaagaggcagacctaggaaatgggctggagtgcagtggtacaatctcggctcattgcaacctccacctcccaggttcaagcaattctcctgcctcaggctcctgagtagttgggattacaggcacccaccaccacacccagctaatttttgtatttttagtagagacagggtttcaccatgttggccaggctggtctcgaactcctgacctcaggtagtaatgaactagtccgtaacttgaaagtatttcgatttcttggctttatatatcttgtggaaaggacgaatacgttgcccacagaaactcaac

SEQ ID NO: 2943 - DNA, 374 bp, Homo sapiens
  source 1..374: mol_type = genomic DNA
accgccaccatgagcgcacgcggtgagggcgcggggcagccgtccacttcagcccagggacaacctgccgccccagcgcctcagaagagaggacgcggccgccccaggaagcagcagcaagaaccaaccggtgagccctctcctaagagacccaggggaagacccaaaggcagcaaaaacaagagtccctctaaagcagctcaaaagaaagcagaagccactggagaaaaacggccaagaggcagacctaggaaatgggaggagttttacattgcagcttagtaatgaactagtccgtaacttgaaagtatttcgatttcttggctttatatatcttgtggaaaggacgacaagtgatatccaccttggatgcc

SEQ ID NO: 2944 - DNA, 818 bp, Homo sapiens
  source 1..818: mol_type = genomic DNA
accgccaccatgagacagagcggcgcctcccagcccctgctgatcaacatgtacctgccagatcccgtcggagacggtctcttcaaggacgggaagaacccgagctgggggccgctgagccccgcggttcagaaaggcagcggacagatccagctgtggcagtttctgctggagctgctggctgaccgcgcgaacgccggctgcatcgcgtgggagggcggtcacggcgagttcaagctcacggacccggacgaggtggcgcggcggtggggcgagcgcaagagcaagcccaacatgaactacgacaagctgagccgcgccctgcgctactactacgacaagaacatcatgagcaaggtgcatggcaagcgctacgcctaccgcttcgacttccagggcctggcgcaggcctgccagccgccgcccgcgcacgctcatgccgccgccgcagctgctgccgccgccgcggccgcccaggacggcgcgctctacaagctgcccgccggcctcgccccgctgcccttccccggcctctccaaactcaacctcatggccgcctcggccggggtcgcgcccgccggcttctcctactggccgggcccgggccccgccgccaccgctgccgccgccaccgccgcgctctaccccagtcccagcttgcagcccccgcccgggcccttcggggccgtggccgcagcctcgcacttggggggccattaccactagtaatgaactagtccgtaacttgaaagtatttcgatttcttggctttatatatcttgtggaaaggacgatcctgaataaatacaattcctgct

SEQ ID NO: 2945 - DNA, 2207 bp, Homo sapiens
  source 1..2207: mol_type = genomic DNA
accgccaccatgcagctggtgctgaagatggattcgagcccagacaatgacagctggttggaggatcaatgggagcgctggctcacccatgacatcagcctggaggagtttgaggatgaagacctctcggagatcactgatgagtgtggcatcagcttacagtgcaaagacaccctgtccttacggcccccgcgcgccgggctgctctctgcgggcggcggcggcgcggggagccggttgcaggccgagatgctgcagatggacctgatcgacgcgacgggggacactcccggggccgaggacgacgaggaggacgacgacgaggagcgcgcggcccggcggccgggagcggggccgcccaaggccgagtccggccaggagccggcgtcccgcggccagggccagagccaaggccagagccagggcccgggcagcggggacacgtaccggcccaagcggcccaccacgctcaacctctttccgcaggtgccgcggtctcaggacacactgaataataattctctgggcaaaaagcacagttggcaggatcgggtgtctcgatcatcctcacccctgaagacaggggagcagacaccaccgcatgaacacatctgcctgagcgatgagctgcccccccagagcggccccgcccccaccacagatcgaggcacctccaccgacagcccttgccgccgcagcacagccacccagatggcacctccgggtggtccccctgctgccccgcctgggggtcggggccactcgcatcgagaccgaatccactaccaggccgatgtgcgactagaggccactgaggagatctacctgaccccagtgcagaggcccccagacgctgcagagcccacctccgccttcctgccgcccactgagagccggatgtcagtcagctccgatccagaccctgccgcctacccctccacggcagggcggccgcacccctccatcagtgaagaggaagagggcttcgactgcctgtcgtccccagagcgggctgagcccccaggcggagggtggcgggggagcctgggggagccgccgccacctccacgggcctctctgagctcggacaccagcgccctgtcctatgactctgtcaagtacacgctggtggtagatgagcatgcacagctggagctggtgagcctgcggccgtgcttcggagactacagtgacgagagtgactctgccaccgtctatgacaactgtgcctccgtctcctcgccctatgagtcggccatcggagaggaatatgaggaggccccgcggccccagccccctgcctgcctctccgaggactccacgcctgatgaacccgacgtccatttctccaagaaattcctgaacgtcttcatgagtggccgctcccgctcctccagtgctgagtccttcgggctgttctcctgcatcatcaacggggaggagcaggagcagacccaccgggccatattcaggtttgtgcctcgacacgaagacgaacttgagctggaagtggatgaccctctgctagtggagctccaggctgaagactactggtacgaggcctacaacatgcgcactggtgcccggggtgtctttcctgcctattacgccatcgaggtcaccaaggagcccgagcacatggcagccctggccaaaaacagtgactgggtggaccagttccgggtgaagttcctgggctcagtccaggttccctatcacaagggcaatgacgtcctctgtgctgctatgcaaaagattgccaccacccgccggctcaccgtgcactttaacccgccctccagctgtgtcctggagatcagcgtgcggggtgtgaagataggcgtcaaggccgatgactcccaggaggccaaggggaataaatgtagccactttttccagttaaaaaacatctctttctgcggatatcatccaaagaacaacaagtactttgggttcatcaccaagcaccccgccgaccaccggtttgcctgccacgtctttgtgtctgaagactccaccaaagccctggcagagtccgtggggagagcattccagcagttctacaagcagtttgtggagtacacctgccccacagaagatatctacctggagtagtaatgaactagtccgtaacttgaaagtatttcgatttcttggctttatatatcttgtggaaaggacgaaaccatataacgcccggtacttat

SEQ ID NO: 2946 - DNA, 2237 bp, Homo sapiens
  source 1..2237: mol_type = genomic DNA
accgccaccatggcggagcgagaaagcggcggcctgggagggggggccgcgtccccgcccgccgcctccccgttcctggggctgcacatcgcttcgcctcccaatttcaggctcacccatgacatcagcctggaggagtttgaggatgaagacctctcggagatcactgatgagtgtggcatcagcttacagtgcaaagacaccctgtccttacggcccccgcgcgccgggctgctctctgcgggcggcggcggcgcggggagccggttgcaggccgagatgctgcagatggacctgatcgacgcgacgggggacactcccggggccgaggacgacgaggaggacgacgacgaggagcgcgcggcccggcggccgggagcggggccgcccaaggccgagtccggccaggagccggcgtcccgcggccagggccagagccaaggccagagccagggcccgggcagcggggacacgtaccggcccaagcggcccaccacgctcaacctctttccgcaggtgccgcggtctcaggacacactgaataataattctctgggcaaaaagcacagttggcaggatcgggtgtctcgatcatcctcacccctgaagacaggggagcagacaccaccgcatgaacacatctgcctgagcgatgagctgcccccccagagcggccccgcccccaccacagatcgaggcacctccaccgacagcccttgccgccgcagcacagccacccagatggcacctccgggtggtccccctgctgccccgcctgggggtcggggccactcgcatcgagaccgaatccactaccaggccgatgtgcgactagaggccactgaggagatctacctgaccccagtgcagaggcccccagacgctgcagagcccacctccgccttcctgccgcccactgagagccggatgtcagtcagctccgatccagaccctgccgcctacccctccacggcagggcggccgcacccctccatcagtgaagaggaagagggcttcgactgcctgtcgtccccagagcgggctgagcccccaggcggagggtggcgggggagcctgggggagccgccgccacctccacgggcctctctgagctcggacaccagcgccctgtcctatgactctgtcaagtacacgctggtggtagatgagcatgcacagctggagctggtgagcctgcggccgtgcttcggagactacagtgacgagagtgactctgccaccgtctatgacaactgtgcctccgtctcctcgccctatgagtcggccatcggagaggaatatgaggaggccccgcggccccagccccctgcctgcctctccgaggactccacgcctgatgaacccgacgtccatttctccaagaaattcctgaacgtcttcatgagtggccgctcccgctcctccagtgctgagtccttcgggctgttctcctgcatcatcaacggggaggagcaggagcagacccaccgggccatattcaggtttgtgcctcgacacgaagacgaacttgagctggaagtggatgaccctctgctagtggagctccaggctgaagactactggtacgaggcctacaacatgcgcactggtgcccggggtgtctttcctgcctattacgccatcgaggtcaccaaggagcccgagcacatggcagccctggccaaaaacagtgactgggtggaccagttccgggtgaagttcctgggctcagtccaggttccctatcacaagggcaatgacgtcctctgtgctgctatgcaaaagattgccaccacccgccggctcaccgtgcactttaacccgccctccagctgtgtcctggagatcagcgtgcggggtgtgaagataggcgtcaaggccgatgactcccaggaggccaaggggaataaatgtagccactttttccagttaaaaaacatctctttctgcggatatcatccaaagaacaacaagtactttgggttcatcaccaagcaccccgccgaccaccggtttgcctgccacgtctttgtgtctgaagactccaccaaagccctggcagagtccgtggggagagcattccagcagttctacaagcagtttgtggagtacacctgccccacagaagatatctacctggagtagtaatgaactagtccgtaacttgaaagtatttcgatttcttggctttatatatcttgtggaaaggacgagatttcctaaagagttcaagccgt

SEQ ID NO: 2947 - DNA, 587 bp, Homo sapiens
  source 1..587: mol_type = genomic DNA
accgccaccatgaaggcggtgagcccggtgcgcccctcgggccgcaaggcgccgtcgggctgcggcggcggggagctggcgctgcgctgcctggccgagcacggccacagcctgggtggctccgcagccgcggcggcggcggcggcggcagcgcgctgtaaggcggccgaggcggcggccgacgagccggcgctgtgcctgcagtgcgatatgaacgactgctatagccgcctgcggaggctggtgcccaccatcccgcccaacaagaaagtcagcaaagtggagatcctgcagcacgttatcgactacatcctggacctgcagctggcgctggagacgcacccggccctgctgaggcagccaccaccgcccgcgccgccacaccacccggccgggacctgtccagccgcgccgccgcggaccccgctcactgcgctcaacaccgacccggccggcgcggtgaacaagcagggcgacagcattctgtgccgctagtaatgaactagtccgtaacttgaaagtatttcgatttcttggctttatatatcttgtggaaaggacgacgagccctgtctgcaagaaattta

SEQ ID NO: 2948 - DNA, 461 bp, Homo sapiens
  source 1..461: mol_type = genomic DNA
accgccaccatgaaggcgctgagcccggtgcgcggctgctacgaggcggtgtgctgcctgtcggaacgcagtctggccatcgcccggggccgagggaagggcccggcagctgaggagccgctgagcttgctggacgacatgaaccactgctactcccgcctgcgggaactggtacccggagtcccgagaggcactcagcttagccaggtggaaatcctacagcgcgtcatcgactacattctcgacctgcaggtagtcctggccgagccagcccctggaccccctgatggcccccaccttcccatccagacagccgagctcactccggaacttgtcatctccaacgacaaaaggagcttttgccactagtaatgaactagtccgtaacttgaaagtatttcgatttcttggctttatatatcttgtggaaaggacgagaagaggtcagcgcgtatgacatc

SEQ ID NO: 2949 - DNA, 551 bp, Homo sapiens
  source 1..551: mol_type = genomic DNA
accgccaccatgaaagtcgccagtggcagcaccgccaccgccgccgcgggccccagctgcgcgctgaaggccggcaagacagcgagcggtgcgggcgaggtggtgcgctgtctgtctgagcagagcgtggccatctcgcgctgcgccgggggcgccggggcgcgcctgcctgccctgctggacgagcagcaggtaaacgtgctgctctacgacatgaacggctgttactcacgcctcaaggagctggtgcccaccctgccccagaaccgcaaggtgagcaaggtggagattctccagcacgtcatcgactacatcagggaccttcagttggagctgaactcggaatccgaagttggaacccccgggggccgagggctgccggtccgggctccgctcagcaccctcaacggcgagatcagcgccctgacggccgaggtgagatccagatccgaccactagtaatgaactagtccgtaacttgaaagtatttcgatttcttggctttatatatcttgtggaaaggacgacggccttgaggctcccggtccgat

SEQ ID NO: 2950 - DNA, 569 bp, Homo sapiens
  source 1..569: mol_type = genomic DNA
accgccaccatgaaagtcgccagtggcagcaccgccaccgccgccgcgggccccagctgcgcgctgaaggccggcaagacagcgagcggtgcgggcgaggtggtgcgctgtctgtctgagcagagcgtggccatctcgcgctgcgccgggggcgccggggcgcgcctgcctgccctgctggacgagcagcaggtaaacgtgctgctctacgacatgaacggctgttactcacgcctcaaggagctggtgcccaccctgccccagaaccgcaaggtgagcaaggtggagattctccagcacgtcatcgactacatcagggaccttcagttggagctgaactcggaatccgaagttggaacccccgggggccgagggctgccggtccgggctccgctcagcaccctcaacggcgagatcagcgccctgacggccgaggcggcatgcgttcctgcggacgatcgcatcttgtgtcgctagtaatgaactagtccgtaacttgaaagtatttcgatttcttggctttatatatcttgtggaaaggacgagtacacgactaccggagacacgac

SEQ ID NO: 2951 - DNA, 3527 bp, Homo sapiens
  source 1..3527: mol_type = genomic DNA
accgccaccatggacgacagcggcgagctgggtggtctggagaccatggagaccctcacggagctgggcgacgagctgaccctgggagacatcgacgagatgctgcaatttgtcagtaatcaagtgggagagttccctgacttgttttcagaacagctgtgtagctcctttcctggcagtggtggtagtggtagcagcagcggcagcagtggcagcagcagcagcagcagcaatggcaggggcagcagcagcggagctgtggacccttcagtgcaacggtcattcacccaggtcacattaccttccttctctccctcggcggcctccccacaggctccaactctgcaagtcaaggtttctcccacctcagttcccaccacacccagggcaactcctattcttcagccccgcccccagccccagcctcaacctcaaactcagctgcaacaacagacggtaatgatcacgccaacattcagcaccactccgcagacgaggatcatccagcagcctttgatataccagaatgcagctactagctttcaagtccttcagcctcaagtccaaagcctggtgacatcctcccaggtacagccggtcaccattcagcagcaggtgcagacagtacaggcccagcgggtgctgacacaaacggccaatggcacgctgcagacccttgccccggctacggtgcagacagttgctgcgccacaggtgcagcaggtcccggtcctggtccagcctcagatcatcaagacagattcccttgttttgaccacactgaagacagatggcagccctgttatggctgcggtccagaacccggccctcaccgccctcaccacccctatccagacggctgcccttcaagtaccaaccctggtgggcagcagtgggaccattctgaccacaatgcctgtaatgatggggcaagagaaagtgcccattaagcaggtacctgggggagtcaagcagcttgagccccccaaagaaggagaaaggcggacaacccataatatcattgagaaacgatatcgctcctccatcaatgacaaaatcatcgaattgaaagacctggtcatggggacagacgccaagatgcacaagtctggcgttctgaggaaggccattgattacatcaaatacttgcagcaggtcaatcataaactgcgccaggagaacatggtgctgaagctggcaaatcaaaagaacaagcttctaaagggcatcgacctaggcagtctggtggacaatgaggtggacctgaagatcgaggactttaatcagaatgtccttctgatgtcccccccagcctctgactcagggtcccaggctggcttctctccctactccattgactctgagccaggaagccctctattggatgatgcaaaggtcaaagatgagccagactctcctcctgtggcgctgggcatggtagaccgctcacggattcttctgtgtgtcctcaccttcctgtgcctctcctttaaccccctgacttccctgctgcagtggggaggggcccacgactctgaccagcacccacactcaggctctggccgcagtgtcctgtcattcgagtcaggttctgggggctggtttgactggatgatgcctactcttctcttatggctggtaaatggtgtgattgtcctgagcgtctttgtgaagctgctggttcatggggagccagtgatccggccacactcgcgctcctcggtcaccttctggaggcaccggaaacaggcagatctggatctcgccagaggagattttgcagctgctgccggcaacctacaaacctgcctggcagttttgggccgggcactgcccacctcccgcctggacctggcctgcagcctctcctggaacgtgatccgctacagcctgcagaagctacgcctggtgcgctggctgctcaagaaagtcttccagtgccggcgggccacgccagccactgaggcaggctttgaagacgaagctaagaccagcgcccgggatgcggctctggcctatcaccggctgcaccagctgcacatcacagggaagcttcctgcaggatccgcctgttccgatgtacacatggcgttgtgtgccgtgaacctggctgaatgtgcagaggagaagatcccaccgagcacactggttgagatccatctgactgctgccatggggctcaagacccggtgtggaggcaagctgggcttcctggccagctacttcctcagccgagcccagagcctgtgtggccccgagcacagtgctgttcctgactccctgcgctggctctgccaccccctgggccagaagtttttcatggagcggagctggtctgtgaagtcagctgccaaggagagtctatactgtgcccagaggaacccagctgaccccattgcgcaggtccaccaggccttctgcaagaacctgctggagcgagctatagagtccttggtgaaacctcaggccaagaagaaggctggagaccaggaagaagagagctgtgaattctccagtgctctggagtacttgaaattacttcattcttttgtggactctgtgggggttatgagccccccactctccaggagctccgtgctcaagtccgccctgggtccagacatcatctgtcggtggtggacgtctgcaatcactgtggccatcagctggctccagggagacgatgcagctgtgcgctctcattttaccaaagtggaacgcatccccaaggccctggaagtgacagagagccccctggtgaaggccatcttccatgcctgcagagccatgcatgcctcactccctgggaaagcagatgggcagcagagttccttctgccattgcgagagggccagtggccacctatggagcagcctcaacgtcagtggggccacctctgaccctgccctcaaccacgtggtccagctgctcacctgtgacctgctactgtcgctacggacagcgctctggcaaaaacaggccagtgccagccaggctgtgggggagacctaccacgcgtcaggcgctgaactggcgggcttccaacgggacctgggcagcctgcgcaggctggcacacagcttccgcccagcataccgcaaggtgttcctgcatgaagccaccgtgcgcctgatggcaggagccagccccacccgcacccaccagctgctggaacacagcctgcggcggcgcaccacgcagagcaccaagcacggagaggtggatgcctggcccggccagcgagagcgggccaccgccatcctgctggcctgccgccacctgcccctctccttcctctcctccccgggccagcgggcagtgctgctggccgaagctgcccgcaccctggagaaggtgggcgaccggcgctcctgcaacgactgccagcagatgattgttaagctgggtggtggcactgccattgccgcctcctagtaatgaactagtccgtaacttgaaagtatttcgatttcttggctttatatatcttgtggaaaggacgatcggaacttggctatcctgcttct

SEQ ID NO: 2952 - DNA, 3635 bp, Homo sapiens
  source 1..3635: mol_type = genomic DNA
accgccaccatggacgagccacccttcagcgaggcggctttggagcaggcgctgggcgagccgtgcgatctggacgcggcgctgctgaccgacatcgaaggtgaagtcggcgcggggaggggtagggccaacggcctggacgccccaagggcgggcgcagatcgcggagccatggattgcactttcgaagacatgcttcagcttatcaacaaccaagacagtgacttccctggcctatttgacccaccctatgctgggagtggggcagggggcacagaccctgccagccccgataccagctccccaggcagcttgtctccacctcctgccacattgagctcctctcttgaagccttcctgagcgggccgcaggcagcgccctcacccctgtcccctccccagcctgcacccactccattgaagatgtacccgtccatgcccgctttctcccctgggcctggtatcaaggaagagtcagtgccactgagcatcctgcagacccccaccccacagcccctgccaggggccctcctgccacagagcttcccagccccagccccaccgcagttcagctccacccctgtgttaggctaccccagccctccgggaggcttctctacaggaagccctcccgggaacacccagcagccgctgcctggcctgccactggcttccccgccaggggtcccgcccgtctccttgcacacccaggtccagagtgtggtcccccagcagctactgacagtcacagctgcccccacggcagcccctgtaacgaccactgtgacctcgcagatccagcaggtcccggtcctgctgcagccccacttcatcaaggcagactcgctgcttctgacagccatgaagacagacggagccactgtgaaggcggcaggtctcagtcccctggtctctggcaccactgtgcagacagggcctttgccgaccctggtgagtggcggaaccatcttggcaacagtcccactggtcgtagatgcggagaagctgcctatcaaccggctcgcagctggcagcaaggccccggcctctgcccagagccgtggagagaagcgcacagcccacaacgccattgagaagcgctaccgctcctccatcaatgacaaaatcattgagctcaaggatctggtggtgggcactgaggcaaagctgaataaatctgctgtcttgcgcaaggccatcgactacattcgctttctgcaacacagcaaccagaaactcaagcaggagaacctaagtctgcgcactgctgtccacaaaagcaaatctctgaaggatctggtgtcggcctgtggcagtggagggaacacagacgtgctcatggagggcgtgaagactgaggtggaggacacactgaccccacccccctcggatgctggctcacctttccagagcagccccttgtcccttggcagcaggggcagtggcagcggtggcagtggcagtgactcggagcctgacagcccagtctttgaggacagcaaggcaaagccagagcagcggccgtctctgcacagccggggcatgctggaccgctcccgcctggccctgtgcacgctcgtcttcctctgcctgtcctgcaaccccttggcctccttgctgggggcccgggggcttcccagcccctcagataccaccagcgtctaccatagccctgggcgcaacgtgctgggcaccgagagcagagatggccctggctgggcccagtggctgctgcccccagtggtctggctgctcaatgggctgttggtgctcgtctccttggtgcttctctttgtctacggtgagccagtcacacggccccactcaggccccgccgtgtacttctggaggcatcgcaagcaggctgacctggacctggcccggggagactttgcccaggctgcccagcagctgtggctggccctgcgggcactgggccggcccctgcccacctcccacctggacctggcttgtagcctcctctggaacctcatccgtcacctgctgcagcgtctctgggtgggccgctggctggcaggccgggcagggggcctgcagcaggactgtgctctgcgagtggatgctagcgccagcgcccgagacgcagccctggtctaccataagctgcaccagctgcacaccatggggaagcacacaggcgggcacctcactgccaccaacctggcgctgagtgccctgaacctggcagagtgtgcaggggatgccgtgtctgtggcgacgctggccgagatctatgtggcggctgcattgagagtgaagaccagtctcccacgggccttgcattttctgacacgcttcttcctgagcagtgcccgccaggcctgcctggcacagagtggctcagtgcctcctgccatgcagtggctctgccaccccgtgggccaccgtttcttcgtggatggggactggtccgtgctcagtaccccatgggagagcctgtacagcttggccgggaacccagtggaccccctggcccaggtgactcagctattccgggaacatctcttagagcgagcactgaactgtgtgacccagcccaaccccagccctgggtcagctgatggggacaaggaattctcggatgccctcgggtacctgcagctgctgaacagctgttctgatgctgcgggggctcctgcctacagcttctccatcagttccagcatggccaccaccaccggcgtagacccggtggccaagtggtgggcctctctgacagctgtggtgatccactggctgcggcgggatgaggaggcggctgagcggctgtgcccgctggtggagcacctgccccgggtgctgcaggagtctgagagacccctgcccagggcagctctgcactccttcaaggctgcccgggccctgctgggctgtgccaaggcagagtctggtccagccagcctgaccatctgtgagaaggccagtgggtacctgcaggacagcctggctaccacaccagccagcagctccattgacaaggccgtgcagctgttcctgtgtgacctgcttcttgtggtgcgcaccagcctgtggcggcagcagcagcccccggccccggccccagcagcccagggcaccagcagcaggccccaggcttccgcccttgagctgcgtggcttccaacgggacctgagcagcctgaggcggctggcacagagcttccggcccgccatgcggagggtgttcctacatgaggccacggcccggctgatggcgggggccagccccacacggacacaccagctcctcgaccgcagtctgaggcggcgggcaggccccggtggcaaaggaggcgcggtggcggagctggagccgcggcccacgcggcgggagcacgcggaggccttgctgctggcctcctgctacctgccccccggcttcctgtcggcgcccgggcagcgcgtgggcatgctggctgaggcggcgcgcacactcgagaagcttggcgatcgccggctgctgcacgactgtcagcagatgctcatgcgcctgggcggtgggaccactgtcacttccagctagtaatgaactagtccgtaacttgaaagtatttcgatttcttggctttatatatcttgtggaaaggacgaatattactattgatcgacatacac

SEQ ID NO: 2953 - DNA, 3545 bp, Homo sapiens
  source 1..3545: mol_type = genomic DNA
accgccaccatggacgagccacccttcagcgaggcggctttggagcaggcgctgggcgagccgtgcgatctggacgcggcgctgctgaccgacatcgaagacatgcttcagcttatcaacaaccaagacagtgacttccctggcctatttgacccaccctatgctgggagtggggcagggggcacagaccctgccagccccgataccagctccccaggcagcttgtctccacctcctgccacattgagctcctctcttgaagccttcctgagcgggccgcaggcagcgccctcacccctgtcccctccccagcctgcacccactccattgaagatgtacccgtccatgcccgctttctcccctgggcctggtatcaaggaagagtcagtgccactgagcatcctgcagacccccaccccacagcccctgccaggggccctcctgccacagagcttcccagccccagccccaccgcagttcagctccacccctgtgttaggctaccccagccctccgggaggcttctctacaggaagccctcccgggaacacccagcagccgctgcctggcctgccactggcttccccgccaggggtcccgcccgtctccttgcacacccaggtccagagtgtggtcccccagcagctactgacagtcacagctgcccccacggcagcccctgtaacgaccactgtgacctcgcagatccagcaggtcccggtcctgctgcagccccacttcatcaaggcagactcgctgcttctgacagccatgaagacagacggagccactgtgaaggcggcaggtctcagtcccctggtctctggcaccactgtgcagacagggcctttgccgaccctggtgagtggcggaaccatcttggcaacagtcccactggtcgtagatgcggagaagctgcctatcaaccggctcgcagctggcagcaaggccccggcctctgcccagagccgtggagagaagcgcacagcccacaacgccattgagaagcgctaccgctcctccatcaatgacaaaatcattgagctcaaggatctggtggtgggcactgaggcaaagctgaataaatctgctgtcttgcgcaaggccatcgactacattcgctttctgcaacacagcaaccagaaactcaagcaggagaacctaagtctgcgcactgctgtccacaaaagcaaatctctgaaggatctggtgtcggcctgtggcagtggagggaacacagacgtgctcatggagggcgtgaagactgaggtggaggacacactgaccccacccccctcggatgctggctcacctttccagagcagccccttgtcccttggcagcaggggcagtggcagcggtggcagtggcagtgactcggagcctgacagcccagtctttgaggacagcaaggcaaagccagagcagcggccgtctctgcacagccggggcatgctggaccgctcccgcctggccctgtgcacgctcgtcttcctctgcctgtcctgcaaccccttggcctccttgctgggggcccgggggcttcccagcccctcagataccaccagcgtctaccatagccctgggcgcaacgtgctgggcaccgagagcagagatggccctggctgggcccagtggctgctgcccccagtggtctggctgctcaatgggctgttggtgctcgtctccttggtgcttctctttgtctacggtgagccagtcacacggccccactcaggccccgccgtgtacttctggaggcatcgcaagcaggctgacctggacctggcccggggagactttgcccaggctgcccagcagctgtggctggccctgcgggcactgggccggcccctgcccacctcccacctggacctggcttgtagcctcctctggaacctcatccgtcacctgctgcagcgtctctgggtgggccgctggctggcaggccgggcagggggcctgcagcaggactgtgctctgcgagtggatgctagcgccagcgcccgagacgcagccctggtctaccataagctgcaccagctgcacaccatggggaagcacacaggcgggcacctcactgccaccaacctggcgctgagtgccctgaacctggcagagtgtgcaggggatgccgtgtctgtggcgacgctggccgagatctatgtggcggctgcattgagagtgaagaccagtctcccacgggccttgcattttctgacacgcttcttcctgagcagtgcccgccaggcctgcctggcacagagtggctcagtgcctcctgccatgcagtggctctgccaccccgtgggccaccgtttcttcgtggatggggactggtccgtgctcagtaccccatgggagagcctgtacagcttggccgggaacccagtggaccccctggcccaggtgactcagctattccgggaacatctcttagagcgagcactgaactgtgtgacccagcccaaccccagccctgggtcagctgatggggacaaggaattctcggatgccctcgggtacctgcagctgctgaacagctgttctgatgctgcgggggctcctgcctacagcttctccatcagttccagcatggccaccaccaccggcgtagacccggtggccaagtggtgggcctctctgacagctgtggtgatccactggctgcggcgggatgaggaggcggctgagcggctgtgcccgctggtggagcacctgccccgggtgctgcaggagtctgagagacccctgcccagggcagctctgcactccttcaaggctgcccgggccctgctgggctgtgccaaggcagagtctggtccagccagcctgaccatctgtgagaaggccagtgggtacctgcaggacagcctggctaccacaccagccagcagctccattgacaaggccgtgcagctgttcctgtgtgacctgcttcttgtggtgcgcaccagcctgtggcggcagcagcagcccccggccccggccccagcagcccagggcaccagcagcaggccccaggcttccgcccttgagctgcgtggcttccaacgggacctgagcagcctgaggcggctggcacagagcttccggcccgccatgcggagggtgttcctacatgaggccacggcccggctgatggcgggggccagccccacacggacacaccagctcctcgaccgcagtctgaggcggcgggcaggccccggtggcaaaggaggcgcggtggcggagctggagccgcggcccacgcggcgggagcacgcggaggccttgctgctggcctcctgctacctgccccccggcttcctgtcggcgcccgggcagcgcgtgggcatgctggctgaggcggcgcgcacactcgagaagcttggcgatcgccggctgctgcacgactgtcagcagatgctcatgcgcctgggcggtgggaccactgtcacttccagctagtaatgaactagtccgtaacttgaaagtatttcgatttcttggctttatatatcttgtggaaaggacgagttctgccagccagtctcactccc

SEQ ID NO: 2954 - DNA, 2486 bp, Homo sapiens
  source 1..2486: mol_type = genomic DNA
accgccaccatggaggggtctctggcaggcagcctggctgcaccagatcgtccccaaggcccagagagactgcctggcccggcgccaagggagaacatcgagggtggggccgaagctgctgagggggaaggtggcatcttccggtccacccgttacctgcctgtcaccaaggagggcccccgagacattctggatggcagaggtggcatctctgtggccaactttgacccaggcaccttcagcctgatgcgctgtgacttctgcggggctggcttcgacacacgggccggcctctccagccacgcccgggcccacctacgtgacttcggtatcaccaactgggagctcactgtctcacccatcaacatcctgcaggagctgctggccacctctgctgctgagcagccccccagccccctgggccgagagcctgggggtccgcctggcagcttcctgacctcccgtcggccccgcttacctctcacggtgccctttccacccacctgggctgaggaccctgggccagcctatggagatgcctcaggcccagagccagcacgagacatccgctgcgagttctgtggtgagttcttcgagaaccgcaagggcctctcgagccacgcgcgctcccatctgcggcaaatgggcgtgaccgagtggtacgtcaatggctcgcccatcgacacgctgcgggagatcctgaagagacggacccagtctcggcctggtggacctcccaacccaccagggccaagcccaaaagccctggccaagatgatgggcggcgcaggtcctggcagctcactggaagcccgcagcccctcggaccttcacatctcacccttggccaagaagttgccaccaccaccgggcagccccctgggccactcaccaactgcctctcctcctcctacggcccgaaagatgttcccaggcctggctgcaccctccttgcccaagaagctgaagcctgaacaaatacgggtggagatcaagcgggagatgctgccgggggcccttcatggggaactgcacccatctgagggtccctggggggcaccacgggaagacatgacacccctgaacctgtcgtcccgggcagagccggtgcgcgacatccgctgtgagttctgcggcgagttcttcgagaaccgcaagggcctgtcgagtcacgcgcgctcacacctgcggcagatgggtgtgaccgagtggtccgtcaatggttcgcccatcgacacactgcgagagatcctcaagaagaagtccaagccgtgcctcatcaagaaggagccaccggctggagacctggcccctgccctggctgaggacgggcctcccaccgtggcccctgggcccgtgcagtccccactgccgctgtcgcccctggctggccggccaggcaaaccaggtgcagggccggcccaggttcctcgtgagctcagcctgacgcccatcactggggccaagccctcagccactggctacctgggctcagtggcagccaagcggcccctgcaggaggaccgcctcctcccagcagaggtcaaggccaagacctacatccagactgaactgcccttcaaggcaaagacccttcatgagaagacctcccactcctccaccgaggcctgctgcgagctgtgtggcctttactttgaaaaccgcaaggccctggccagccacgcacgggcacacctgcggcagttcggcgtgaccgagtggtgcgtcaatggctcgcccatcgagacactgagcgagtggatcaaacaccggccccagaaggtgggcgcctaccgcagctacatccagggcggccgccccttcaccaagaagttccgcagtgccggccatggccgtgacagtgacaagcggccgtccctggggctggcacccgggggcctggccgtggtcggccgcagtgccggaggggagccagggcccgaggctggccgggcagccgacggtggtgagcggcctctggcagccagcccgccaggcaccgtgaaggctgaggagcaccagcggcagaacatcaacaaatttgaacgccgacaagcccgccctccagatgcctccgcagcccggggaggcgaggacaccaatgacctacagcagaagctggaggaggtgcggcaacccccaccccgagtccggccagtcccctccctggtgccccggcccccccagacatcacttgtcaagttcgtgggcaacatctacaccctcaaatgcaggttctgtgaggtggaattccagggccccctctccatccaggaagagtgggtgcggcacttacagcggcacatcctggagatgaacttctccaaagcggaccccccacctgaggagtcccaggccccgcaggcacagacagcggcggcagaggctccctagtaatgaactagtccgtaacttgaaagtatttcgatttcttggctttatatatcttgtggaaaggacgattatagctgggagacaaaccaata

SEQ ID NO: 2955 - DNA, 3008 bp, Homo sapiens
  source 1..3008: mol_type = genomic DNA
accgccaccatggtggccatggacttgggctctccctcgctccctaagaagagcctgcctgtccctggggccctggagcaggtggccagtcggctgagcagcaaagtggctgcagaggttcctcatggcagcaaacaggagctgcaggacctcaaggcccagagcctgaccacctgcgaggtctgcggtgcctgctttgagacccgaaagggcctgtccagccacgcgcgctcccacctgcggcagctgggagtggcagagtcggaaagcagcggcgcacccatcgacctcctctacgagcttgtgaagcagaagggtctgcctgacgcccaccttgggctgcccccaggcctggctaagaagtccagctcactgaaggaggtggtcgccggggccccccggcccggcttgctcagcctggccaagcccttggatgcccctgctgtcaacaaagccatcaagtcgcctcccggcttctcggccaagggcctgggccacccgcccagctctccactcctcaaaaagacaccactggccctggcgggctcccctacccctaagaatcctgaggacaagagcccccagctgtccctgagcccccggccggcctccccaaaggcacagtggcctcagtctgaggatgaggggcccttgaacctcactttagatagtgacgggggcagagagctggactgccagctgtgcggtgcctggtttgagacccgcaagggcctgtctagccacgcccgtgcccacctgcgccacctgggcgtcagcgatccggacgccaagggatcccccatagacgtgctccacgggctcatcaggagggacggcgtccagatccgcctcccacccaggcgcggcgccctggcccacccggggcggccgcctcccacctccgcggccctctccttgcttccccccccaccgccggccaagaaggccaagctgaaggccgcgggtatggccagcccctgggggaagcaggacctctcggccgccgcagccgccggcattttctgggcctctgatgtggagccgtctcctctcaacctctcctcaggcccagagccagcacgagacatccgctgcgagttctgtggtgagttcttcgagaaccgcaagggcctctcgagccacgcgcgctcccatctgcggcaaatgggcgtgaccgagtggtacgtcaatggctcgcccatcgacacgctgcgggagatcctgaagagacggacccagtctcggcctggtggacctcccaacccaccagggccaagcccaaaagccctggccaagatgatgggcggcgcaggtcctggcagctcactggaagcccgcagcccctcggaccttcacatctcacccttggccaagaagttgccaccaccaccgggcagccccctgggccactcaccaactgcctctcctcctcctacggcccgaaagatgttcccaggcctggctgcaccctccttgcccaagaagctgaagcctgaacaaatacgggtggagatcaagcgggagatgctgccgggggcccttcatggggaactgcacccatctgagggtccctggggggcaccacgggaagacatgacacccctgaacctgtcgtcccgggcagagccggtgcgcgacatccgctgtgagttctgcggcgagttcttcgagaaccgcaagggcctgtcgagtcacgcgcgctcacacctgcggcagatgggtgtgaccgagtggtccgtcaatggttcgcccatcgacacactgcgagagatcctcaagaagaagtccaagccgtgcctcatcaagaaggagccaccggctggagacctggcccctgccctggctgaggacgggcctcccaccgtggcccctgggcccgtgcagtccccactgccgctgtcgcccctggctggccggccaggcaaaccaggtgcagggccggcccaggttcctcgtgagctcagcctgacgcccatcactggggccaagccctcagccactggctacctgggctcagtggcagccaagcggcccctgcaggaggaccgcctcctcccagcagaggtcaaggccaagacctacatccagactgaactgcccttcaaggcaaagacccttcatgagaagacctcccactcctccaccgaggcctgctgcgagctgtgtggcctttactttgaaaaccgcaaggccctggccagccacgcacgggcacacctgcggcagttcggcgtgaccgagtggtgcgtcaatggctcgcccatcgagacactgagcgagtggatcaaacaccggccccagaaggtgggcgcctaccgcagctacatccagggcggccgccccttcaccaagaagttccgcagtgccggccatggccgtgacagtgacaagcggccgtccctggggctggcacccgggggcctggccgtggtcggccgcagtgccggaggggagccagggcccgaggctggccgggcagccgacggtggtgagcggcctctggcagccagcccgccaggcaccgtgaaggctgaggagcaccagcggcagaacatcaacaaatttgaacgccgacaagcccgccctccagatgcctccgcagcccggggaggcgaggacaccaatgacctacagcagaagctggaggaggtgcggcaacccccaccccgagtccggccagtcccctccctggtgccccggcccccccagacatcacttgtcaagttcgtgggcaacatctacaccctcaaatgcaggttctgtgaggtggaattccagggccccctctccatccaggaagagtgggtgcggcacttacagcggcacatcctggagatgaacttctccaaagcggaccccccacctgaggagtcccaggccccgcaggcacagacagcggcggcagaggctccctagtaatgaactagtccgtaacttgaaagtatttcgatttcttggctttatatatcttgtggaaaggacgataaagatcatgtcgtgatatgctt

SEQ ID NO: 2956 - DNA, 2609 bp, Homo sapiens
  source 1..2609: mol_type = genomic DNA
accgccaccatggtggccatggacttgggctctccctcgctccctaagaagagcctgcctgtccctggggccctggagcaggtggccagtcggctgagcagcaaagtggctgcagaggttcctcatggcagcaaacaggagctgcaggacctcaaggcccagagcctgaccacctgcgaggtctgcggtgcctgctttgagacccgaaagggcctgtccagccacgcgcgctcccacctgcggcagctgggagtggcagagtcggaaagcagcggcgcacccatcgacctcctctacgagcttgtgaagcagaagggtctgcctgacgcccaccttgggctgcccccaggcctggctaagaagtccagctcactgaaggaggtggtcgccggggccccccggcccggcttgctcagcctggccaagcccttggatgcccctgctgtcaacaaagccatcaagtcgcctcccggcttctcggccaagggcctgggccacccgcccagctctccactcctcaaaaagacaccactggccctggcgggctcccctacccctaagaatcctgaggacaagagcccccagctgtccctgagcccccggccggcctccccaaaggcacagtggcctcagtctgaggatgaggggcccttgaacctcacctcaggcccagagccagcacgagacatccgctgcgagttctgtggtgagttcttcgagaaccgcaagggcctctcgagccacgcgcgctcccatctgcggcaaatgggcgtgaccgagtggtacgtcaatggctcgcccatcgacacgctgcgggagatcctgaagagacggacccagtctcggcctggtggacctcccaacccaccagggccaagcccaaaagccctggccaagatgatgggcggcgcaggtcctggcagctcactggaagcccgcagcccctcggaccttcacatctcacccttggccaagaagttgccaccaccaccgggcagccccctgggccactcaccaactgcctctcctcctcctacggcccgaaagatgttcccaggcctggctgcaccctccttgcccaagaagctgaagcctgaacaaatacgggtggagatcaagcgggagatgctgccgggggcccttcatggggaactgcacccatctgagggtccctggggggcaccacgggaagacatgacacccctgaacctgtcgtcccgggcagagccggtgcgcgacatccgctgtgagttctgcggcgagttcttcgagaaccgcaagggcctgtcgagtcacgcgcgctcacacctgcggcagatgggtgtgaccgagtggtccgtcaatggttcgcccatcgacacactgcgagagatcctcaagaagaagtccaagccgtgcctcatcaagaaggagccaccggctggagacctggcccctgccctggctgaggacgggcctcccaccgtggcccctgggcccgtgcagtccccactgccgctgtcgcccctggctggccggccaggcaaaccaggtgcagggccggcccaggttcctcgtgagctcagcctgacgcccatcactggggccaagccctcagccactggctacctgggctcagtggcagccaagcggcccctgcaggaggaccgcctcctcccagcagaggtcaaggccaagacctacatccagactgaactgcccttcaaggcaaagacccttcatgagaagacctcccactcctccaccgaggcctgctgcgagctgtgtggcctttactttgaaaaccgcaaggccctggccagccacgcacgggcacacctgcggcagttcggcgtgaccgagtggtgcgtcaatggctcgcccatcgagacactgagcgagtggatcaaacaccggccccagaaggtgggcgcctaccgcagctacatccagggcggccgccccttcaccaagaagttccgcagtgccggccatggccgtgacagtgacaagcggccgtccctggggctggcacccgggggcctggccgtggtcggccgcagtgccggaggggagccagggcccgaggctggccgggcagccgacggtggtgagcggcctctggcagccagcccgccaggcaccgtgaaggctgaggagcaccagcggcagaacatcaacaaatttgaacgccgacaagcccgccctccagatgcctccgcagcccggggaggcgaggacaccaatgacctacagcagaagctggaggaggtgcggcaacccccaccccgagtccggccagtcccctccctggtgccccggcccccccagacatcacttgtcaagttcgtgggcaacatctacaccctcaaatgcaggttctgtgaggtggaattccagggccccctctccatccaggaagagtgggtgcggcacttacagcggcacatcctggagatgaacttctccaaagcggaccccccacctgaggagtcccaggccccgcaggcacagacagcggcggcagaggctccctagtaatgaactagtccgtaacttgaaagtatttcgatttcttggctttatatatcttgtggaaaggacgagcgaaatgaggcatacgcgtgcat

SEQ ID NO: 2957 - DNA, 1400 bp, Homo sapiens
  source 1..1400: mol_type = genomic DNA
accgccaccatgagtgagttgaaagactgccccttgcagttccacgacttcaagtctgtggatcacctgaaggtctgtccccgctacacggcagtgctggcacgctctgaggatgatggcatcggcatcgaggagctggacaccctgcagctggagctggagaccctgctgtcttctgccagccggcgcctgcgtgtgcttgaggccgaaacccagatcctcaccgactggcaggataagaaaggtgacagacgattcctgaagctgggtcgagaccatgaacttggagctccccccaaacatgggaagcccaagaagcagaaactggaagggaaggcaggacatgggccgggccctggcccaggacggcccaaatccaaaaaccttcagcccaagatccaggaatatgaattcactgatgaccctatcgacgtgccacggatccccaaaaatgatgcccccaacaggttctgggcttcagtggagccctactgtgctgacatcaccagcgaggaggtccgcacacttgaggagttactgaagcccccagaagatgaggctgagcattacaagatcccacccctggggaagcactactcccagcgctgggcccaggaggacctgctggaggagcagaaggatggggcccgggcagcggctgtggctgacaagaagaaaggcctcatggggccactgaccgaactggacactaaagatgtggatgccctgctgaagaagtctgaggcccagcatgaacagccggaagatggatgcccctttggtgccctgacgcagcgcctcctgcaggccctggtggaggaaaatattatttcccctatggaggattctcctattcctgacatgtctgggaaagaatcaggggctgacggggcaagcacctcccctcgcaatcagaacaagcccttcagtgtgccgcatactaagtccctggagagccgcatcaaggaggagctaattgcccagggccttttggagtctgaggaccgccccgcagaggactccgaggatgaggtccttgctgagcttcgcaaacggcaggctgagctgaaggcacttagtgcccacaaccgcaccaagaagcacgacctgctgaggctggcaaaggaggaggtgagccggcaggagctgaggcagcgggtgcgcatggctgacaacgaggtcatggacgcctttcgcaagatcatggctgcccggcagaagaagcggactcccaccaagaaagaaaaggaccaggcctggaagactctgaaggagcgtgagagcatcctgaagctgctggatgggtagtaatgaactagtccgtaacttgaaagtatttcgatttcttggctttatatatcttgtggaaaggacgatttgtgcgtgttacaggcgggctc

SEQ ID NO: 2958 - DNA, 1211 bp, Homo sapiens
  source 1..1211: mol_type = genomic DNA
accgccaccatgagtgagttgaaagactgccccttgcagttccacgacttcaagtctgtggatcacctgaaggtctgtccccgctacacggcagtgctggcacgctctgaggatgatggcatcggcatcgaggagctggacaccctgcagctggagctggagaccctgctgtcttctgccagccggcgcctgcgtgtgcttgaggccgaaacccagatcctcaccgactggcaggataagaaaggtgacagacgattcctgaagctgggtcgagaccatgaacttggagctccccccaaacatgggaagcccaagaagcagaaactggaagggaaggcaggacatgggccgggccctggcccaggacggcccaaatccaaaaaccttcagcccaagatccaggaatatgaattcactgatgaccctatcgacgtgccacggatccccaaaaatgatgcccccaacaggttctgggcttcagtggagccctactgtgctgacatcaccagcgaggaggtccgcacacttgaggagttactgaagcccccagaagatgaggctgagcattacaagatcccacccctggggaagcactactcccagcgctgggcccaggaggacctgctggaggagcagaaggatggggcccgggcagcggctgtggctgacaagaagaaaggcctcatggggccactgaccgaactggacactaaagatgtggatgccctgctgaagaagtctgaggcccagcatgaacagccggaagatggatgcccctttggtgccctgacgcagcgcctcctgcaggccctggtggaggaaaatattatttcccctatggaggattctcctattcctgacatgtctgggaaagaatcaggggctgacggggcaagcacctcccctcgcaatcagaacaagcccttcagtgtgccgcatactaagtccctggagagccgcatcaaggaggagctaattgcccagggccttttggagtctgaggaccgccccgcagaggactccgaggatgaggtccttgctgagcttcgcaaacggcaggctgagctgaaggcacttagtgcccacaaccgcaccaagaagcacgacctgctgaggtagtaatgaactagtccgtaacttgaaagtatttcgatttcttggctttatatatcttgtggaaaggacgaccaccgtgttgcctagatatagtt

SEQ ID NO: 2959 - DNA, 3281 bp, Homo sapiens
  source 1..3281: mol_type = genomic DNA
accgccaccatggaggcgaacccagcgggcagcggcgccgggggtggcgggagcagcggcatcgggggcgaggacggggtgcacttccagagctaccccttcgacttcctggaattcctcaaccaccagcgcttcgagcccatggaactgtatggggaacacgccaaggcggtggcggccctgccctgcgcccccggccccccgccgcagcccccgccgcagccccctcccccgcagtatgactacccgccccagtccaccttcaagcccaaggcggaggtgccctcctcgtcctcgtcctcgtcctcctcctcctcctcttcgtcctcctcgtcgtcatcttcgtcctcttcctcttcccaagccaagaagcccgatccgcccctgccgcccgccttcggggcgccccctcctcccctctttgacgctgctttccccactccgcagtggggcatcgtggacctctcggggcaccagcacttgtttgggaacctgaagcgaggagggcccgcgtccgggccgggggtgacgcctgggctgggcgctcccgcgggggccccagggccgcttcctgccccctcgcagaccccgccaggaccccccgcggcggcggcctgcgaccccaccaaggacgacaagggctacttccggagactgaagtacctgatggagcggcgcttcccctgcggcgtgtgccagaagtccttcaagcagtcctcgcacctggtccagcacatgctggtgcactcgggggagaggccctacgaatgcggcgtctgcggccgcacctacaaccacgtgtccagcctcatccgccaccgccgctgccacaaggacgtgccaccggccgcggggggcccgccccagcccggcccccacctcccgccgctgggcctcccagcacccgctgccagcgccgccaccgccgccgccccctccacggtgtcctcgggccctccagccacgcccgtggcgcctgccccctccgcagacgggagcgccgcccctgctggtgttggggtgccccctcctgccaccgggggtggcgatggcccgttcgcctgcccactctgctggaaggttttcaagaagcccagtcacctccaccagcaccagatcatccacacgggcgagaagcccttctcctgctccgtgtgcagcaaaagcttcaaccgcagggagagtctgaagcgccacgtgaagacgcactcggccgacctcctgcgcctgccctgcggcatctgcgggaaggccttccgcgacgcctcctacctcctcaagcaccaggcggcccacgcgggggcgggcgccggggggcctcggcccgtgtacccctgcgacctgtgcggcaagtcctactcggctccgcagagcctgctccgccacaaggccgcccacgccccgcccgctgccgctgcggaggcgcccaaggacggggcggcctcggccccgcagcccccgcccaccttccccccgggcccgtacctcctgccccccgaccctcccaccacagacagcgagaaggcggcggcggccgcggcggcggtggtgtacggcgctgtgcccgtcccgctcctgggcgcccacccgctgctgctcggcggcgcggggaccagcggggcgggaggctcgggcgccagcgtcccaggaaagacgttctgctgcggcatctgcgggcgcggcttcgggcgccgcgagaccctgaagcgccatgagcgcatccacacgggcgagaagccccaccagtgccccgtgtgtgggaagcgcttccgcgaatccttccacttgagcaagcatcacgtggtgcacacgcgcgagcggccctacaagtgcgagctctgcggcaaggtcttcggctacccgcagagcctcacccgccaccgccaggtgcaccggctccagctgccctgcgccctggccggggcagccggcctcccctccacccaaggcacaccgggggcctgtgggcccggggcctcgggcacgtctgcagggcccaccgatgggctgagctacgcctgctcggactgcggcgagcacttcccggatctctttcacgtcatgagtcacaaggaggtccacatggcagagaagccatacggctgcgacgcctgcggcaagaccttcggcttcatcgagaacctcatgtggcacaagctggtccaccaggccgcccccgagcgcctgctcccgcccgcacccggcggcctgcagcccccggacggctccagcggcacggatgcggccagcgtgctggacaacgggctggcgggggaggtgggggcggccgtggcggcactggcaggggtgtctgggggtgaggacgcaggcggggcggcggtggcaggtgctggcgggggtgccagttccggccccgagcgcttcagctgtgccacgtgcggccagagtttcaagcacttcctgggcctcgtgactcacaagtacgtgcacctggtgcgacggaccctgggctgcggcctctgcggccagagcttcgcgggcgcctacgacttgctcctacaccgccgcagccatcggcagaagcggggtttccgctgcccggtgtgcgggaagcgcttctgggaggcggccctgctgatgcgccaccagcgctgccacacggaacagcggccgtaccgatgtggcgtgtgcggccgaggcttcctgcgctcctggtacctgcggcagcaccgcgtggtgcacactggcgagcgggccttcaagtgcggcgtgtgcgccaagcgcttcgcgcagtcgtccagcctggcagagcaccggcggctgcacgctgtggcccggccccagcgctgcagcgcctgtggcaagaccttccgctaccgctccaacctgctggagcaccagcggctgcacctgggcgagcgcgcctaccgctgtgagcactgcggcaagggcttcttctacctgagctccgtgctgcgccaccagcgcgcccatgagccgccgcggcccgagctccgctgccccgcctgcctcaaggccttcaaggatcccggctacttccgtaagcacctggctgcccaccagggcggccggcccttccgctgctcctcctgcggcgagggcttcgccaacacctacggcctcaagaaacaccgcctggcgcacaaggccgagaacctcggggggcctggagcaggggcgggcaccttggccgggaaggatgcctagtaatgaactagtccgtaacttgaaagtatttcgatttcttggctttatatatcttgtggaaaggacgaatcctttccgagatccgctcgggt

SEQ ID NO: 2960 - DNA, 674 bp, Homo sapiens
  source 1..674: mol_type = genomic DNA
accgccaccatgcctgacgagctgacggagcccgggcgcgccacgccggcccgcgcctcctccttcctcatcgagaacctgctggcggccgaggccaagggcgcagggcgcgcgacccagggcgacggcagccgggaggacgaggaggaggacgacgacgaccccgaagacgaggacgccgagcaggcgcggcggcgacggctacagcggcggcgacagttgctcgcgggcaccgggcccggcggggaggcgcgggcccgtgcgctgctcgggccgggcgcgctgggcctcggtcctcggccgccccccggtcccgggccgcccttcgctctgggctgcggaggcgcagcgcgctggtacccacgggcgcacggtggctatggaggcggcctcagtcctgacagcacacagaagattacacctcagcctgtgcagtgtggagaggggcaggtgaccagagctgataaatacaaagtgaacagaagtgacagtgggagcctctggatggcggaggaggccgcagggactggatggtgcagccacaacacggtggagcctttgtcagcctggacccccgagtagtaatgaactagtccgtaacttgaaagtatttcgatttcttggctttatatatcttgtggaaaggacgagtagaaggcttcgcttaaggaagg

SEQ ID NO: 2961 - DNA, 1148 bp, Homo sapiens
  source 1..1148: mol_type = genomic DNA
accgccaccatgcctgacgagctgacggagcccgggcgcgccacgccggcccgcgcctcctccttcctcatcgagaacctgctggcggccgaggccaagggcgcagggcgcgcgacccagggcgacggcagccgggaggacgaggaggaggacgacgacgaccccgaagacgaggacgccgagcaggcgcggcggcgacggctacagcggcggcgacagttgctcgcgggcaccgggcccggcggggaggcgcgggcccgtgcgctgctcgggccgggcgcgctgggcctcggtcctcggccgccccccggtcccgggccgcccttcgctctgggctgcggaggcgcagcgcgctggtacccacgggcgcacggtggctatggaggcggcctcagtcctgacaccagcgaccgggactcaccggagacgggcgaggagatgggccgtgcggagggcgcctggccgcgaggccccgggccgggagcggtgcagcgggaggcagcggagctggcggcgcgtggcccggcggccggcacggaggaggcgtcggagctggccgaggtccctgcggcggctggggagacacgcggcggcgttggcgtgggcggcggccgaaagaagaagacgcgcacagtcttctcccgcagccaggtcttccagctggaatccaccttcgacctgaagcgctacctgagcagcgccgagcgcgccggcctggccgcctccctgcagctcaccgagacgcaggttaagatctggttccagaaccgccgcaacaagtggaagcggcagctggcagccgagctggaggcggccagcctgtccccgccgggagcgcagcgcctggtccgcgtgccggtgctctaccacgaaagccccccggccgcagccgccgctgggcccccggccaccctgcccttcccgctggcgcccgccgcgcccgcgccgcccccaccgctgctcggcttctccggggccctcgcctacccgctggccgccttcccggccgccgcctccgtgccctttctgcgggcgcagatgcctggcctggtgtagtaatgaactagtccgtaacttgaaagtatttcgatttcttggctttatatatcttgtggaaaggacgagagaccgcgcattcttacctgaat

SEQ ID NO: 2962 - DNA, 1175 bp, Homo sapiens
  source 1..1175: mol_type = genomic DNA
accgccaccatgccggaacccgggccggacgctgccggcaccgccagcgcacagccccaaccgccgccgccccccccacccgctcccaaggagtccccgttctccatcaagaacctgctcaacggagaccaccaccggccgccccctaagcctcagccgcccccacggacgctcttcgcgccagcctcggctgccgccgccgccgccgctgccgctgccgcggcggccaagggggccctggagggcgccgcgggcttcgcgctctcgcaggtgggcgacctggctttccctcgctttgagatcccggcgcagaggtttgccctgcccgcgcactacctggagcgctccccagcctggtggtacccctacaccctgacccccgccggcggccacctcccgcgacctgaagcctcggagaaggccttgctgagagactcctcccccgcctccggcacagaccgcgactctccggagccactgctcaaggccgaccccgatcacaaggagctggactccaagagcccggacgagatcattctggaggagagcgactccgaggaaagcaaaaaggaaggcgaagcggcgccaggcgcggccggggcgagcgtaggggcggcggcggccactccgggcgcagaagactggaagaagggcgctgaaagtccagagaagaagccggcgtgccgcaagaagaagacgcgcacagtcttctcgcgcagccaggtcttccagctcgagtccaccttcgacatgaagcgctatctgagcagctcggagcgagccggcctggccgcgtccctgcacctcaccgagacgcaggtcaagatctggttccagaaccgccgcaacaagtggaagcggcagctggcggcggagctggaggcggccaacctgagccatgccgcggcgcagcgcatcgtgcgggtgcccatcctctaccacgagaactcggcggccgagggcgcggcggctgcagccgcgggggccccggtgccagtcagccagccgctgctcaccttcccgcaccccgtctactactcgcacccggtggtctcttccgtgccgctgctacggccggtctagtaatgaactagtccgtaacttgaaagtatttcgatttcttggctttatatatcttgtggaaaggacgagcttctgtaattcatgttcagaag

SEQ ID NO: 2963 - DNA, 1961 bp, Homo sapiens
  source 1..1961: mol_type = genomic DNA
accgccaccatggctgctgttgtccaacagaacgacctagtatttgaatttgctagtaacgtcatggaggatgaacgacagcttggtgatccagctatttttcctgccgtaattgtggaacatgttcctggtgctgatattctcaatagttatgccggtctagcctgtgtggaagagcccaatgacatgattactgagagttcactggatgttgctgaagaagaaatcatagacgatgatgatgatgacatcacccttacagttgaagcttcttgtcatgacggggatgaaacaattgaaactattgaggctgctgaggcactcctcaatatggattcccctggccctatgctggatgaaaaacgaataaataataatatatttagttcacctgaagatgacatggttgttgccccagtcacccatgtgtccgtcacattagatgggattcctgaagtgatggaaacacagcaggtgcaagaaaaatatgcagactcaccgggagcctcatcaccagaacagcctaagaggaaaaaaggaagaaaaactaaaccaccacgaccagattccccagccactacgccaaatatatctgtgaagaagaaaaacaaagatggaaagggaaacacaatttatctttgggagtttttactggcactgctccaggacaaggctacttgtcctaaatacatcaagtggacccagcgagagaaaggcatttttaaattggtggattctaaagcagtgtccaggttgtgggggaagcacaaaaacaaacctgatatgaattatgagaccatgggaagagcactcaggtactattaccaaaggggtattctggcaaaagtggaaggtcagcgcttggtgtatcagtttaaagaaatgccaaaagatcttatatatataaatgatgaggatccaagttccagcatagagtcttcagatccatcgctatcttcatcagccacttcaaataggaatcaaaccagccggtcgagagtatcttcaagtccaggggtaaaaggaggagccactacagttctaaaaccagggaattctaaagctgcaaaacccaaagatcctgtggaagttgcacaaccatcagaagttttgaggacagtgcagcccacgcagtctccatatcctacccagctcttccggactgttcatgtagtacagccagtacaggctgtcccagagggagaagcagctagaaccagtaccatgcaggatgaaacattaaattcttccgttcagagtattaggactatacaggctccaacccaagttccagtggttgtgtctcctaggaatcagcagttgcatacagtaacactccaaacagtgccactcacaacagttatagccagcacagatccatcagcaggtactggatctcagaagtttattttacaagccattccatcatcacagcccatgacagtactgaaagaaaatgtcatgctgcagtcacaaaaggcgggctctcctccttcaattgtcttgggccctgcccaggttcagcaggtccttactagcaatgttcagaccatttgcaatggaaccgtcagtgtggcttcctctccatccttcagtgctactgcacctgtggtgaccttttctcctcgcagttcacagctggttgctcacccacctggcactgtaatcacttcagttatcaaaactcaagaaacaaaaactcttacacaggaagtagagaaaaaggaatctgaagatcatttgaaagagaacactgagaaaacggagcagcagccacagccttatgtgatggtagtgtccagttccaatggatttacttctcaggtagctatgaaacaaaacgaactgctggaacccaactctttttagtaatgaactagtccgtaacttgaaagtatttcgatttcttggctttatatatcttgtggaaaggacgacatatgtatatgacatcacattct

SEQ ID NO: 2964 - DNA, 1889 bp, Homo sapiens
  source 1..1889: mol_type = genomic DNA
accgccaccatggctgctgttgtccaacagaacgacctagtatttgaatttgctagtaacgtcatggaggatgaacgacagcttggtgatccagctatttttcctgccgtaattgtggaacatgttcctggtgctgatattctcaatagttatgccggtctagcctgtgtggaagagcccaatgacatgattactgagagttcactggatgttgctgaagaagaaatcatagacgatgatgatgatgacatcacccttacagttgaagcttcttgtcatgacggggatgaaacaattgaaactattgaggctgctgaggcactcctcaatatggattcccctggccctatgctggatgaaaaacgaataaatgggattcctgaagtgatggaaacacagcaggtgcaagaaaaatatgcagactcaccgggagcctcatcaccagaacagcctaagaggaaaaaaggaagaaaaactaaaccaccacgaccagattccccagccactacgccaaatatatctgtgaagaagaaaaacaaagatggaaagggaaacacaatttatctttgggagtttttactggcactgctccaggacaaggctacttgtcctaaatacatcaagtggacccagcgagagaaaggcatttttaaattggtggattctaaagcagtgtccaggttgtgggggaagcacaaaaacaaacctgatatgaattatgagaccatgggaagagcactcaggtactattaccaaaggggtattctggcaaaagtggaaggtcagcgcttggtgtatcagtttaaagaaatgccaaaagatcttatatatataaatgatgaggatccaagttccagcatagagtcttcagatccatcgctatcttcatcagccacttcaaataggaatcaaaccagccggtcgagagtatcttcaagtccaggggtaaaaggaggagccactacagttctaaaaccagggaattctaaagctgcaaaacccaaagatcctgtggaagttgcacaaccatcagaagttttgaggacagtgcagcccacgcagtctccatatcctacccagctcttccggactgttcatgtagtacagccagtacaggctgtcccagagggagaagcagctagaaccagtaccatgcaggatgaaacattaaattcttccgttcagagtattaggactatacaggctccaacccaagttccagtggttgtgtctcctaggaatcagcagttgcatacagtaacactccaaacagtgccactcacaacagttatagccagcacagatccatcagcaggtactggatctcagaagtttattttacaagccattccatcatcacagcccatgacagtactgaaagaaaatgtcatgctgcagtcacaaaaggcgggctctcctccttcaattgtcttgggccctgcccaggttcagcaggtccttactagcaatgttcagaccatttgcaatggaaccgtcagtgtggcttcctctccatccttcagtgctactgcacctgtggtgaccttttctcctcgcagttcacagctggttgctcacccacctggcactgtaatcacttcagttatcaaaactcaagaaacaaaaactcttacacaggaagtagagaaaaaggaatctgaagatcatttgaaagagaacactgagaaaacggagcagcagccacagccttatgtgatggtagtgtccagttccaatggatttacttctcaggtagctatgaaacaaaacgaactgctggaacccaactctttttagtaatgaactagtccgtaacttgaaagtatttcgatttcttggctttatatatcttgtggaaaggacgagaaggttggtgctccagcgggtgc

SEQ ID NO: 2965 - DNA, 1217 bp, Homo sapiens
  source 1..1217: mol_type = genomic DNA
accgccaccatggctgcaacctgtgagattagcaacatttttagcaactacttcagtgcgatgtacagctcggaggactccaccctggcctctgttccccctgctgccacctttggggccgatgacttggtactgaccctgagcaacccccagatgtcattggagggtacagagaaggccagctggttgggggaacagccccagttctggtcgaagacgcaggttctggactggatcagctaccaagtggagaagaacaagtacgacgcaagcgccattgacttctcacgatgtgacatggatggcgccaccctctgcaattgtgcccttgaggagctgcgtctggtctttgggcctctgggggaccaactccatgcccagctgcgagacctcacttccagctcttctgatgagctcagttggatcattgagctgctggagaaggatggcatggccttccaggaggccctagacccagggccctttgaccagggcagcccctttgcccaggagctgctggacgacggtcagcaagccagcccctaccaccccggcagctgtggcgcaggagccccctcccctggcagctctgacgtctccaccgcagggactggtgcttctcggagctcccactcctcagactccggtggaagtgacgtggacctggatcccactgatggcaagctcttccccagcgatggttttcgtgactgcaagaagggggatcccaagcacgggaagcggaaacgaggccggccccgaaagctgagcaaagagtactgggactgtctcgagggcaagaagagcaagcacgcgcccagaggcacccacctgtgggagttcatccgggacatcctcatccacccggagctcaacgagggcctcatgaagtgggagaatcggcatgaaggcgtcttcaagttcctgcgctccgaggctgtggcccaactatggggccaaaagaaaaagaacagcaacatgacctacgagaagctgagccgggccatgaggtactactacaaacgggagatcctggaacgggtggatggccggcgactcgtctacaagtttggcaaaaactcaagcggctggaaggaggaagaggttctccagagtcggaactagtaatgaactagtccgtaacttgaaagtatttcgatttcttggctttatatatcttgtggaaaggacgactaacagaatggctggccaactta

SEQ ID NO: 2966 - DNA, 1703 bp, Homo sapiens
  source 1..1703: mol_type = genomic DNA
accgccaccatggcgacgtctctgcatgagggacccacgaaccagctggatctgctcatccgggccgtggaagcatcagttcacagcagtaatgcacactgtacagataagacaattgaagctgctgaagccctgcttcatatggaatctcctacctgcttgagggattcaagaagtcctgtggaagtgtttgttcctccttgtgtatcaactccagaattcatccatgctgctatgaggccagatgtcattacagaaactgtagtggaggtgtcaactgaagagtctgaacccatggatacctctcctattccaacatcaccagatagccatgaaccaatgaaaaagaaaaaagttggccgtaaaccaaagacccagcaatcaccaatttccaatgggtctcctgagttaggtataaagaagaaaccaagagaaggaaaaggaaacacaacctatttgtgggagtttcttttagatctacttcaagataaaaatacttgtcccaggtatattaaatggactcagagagaaaaaggcatattcaagctggtggattcaaaggctgtctctaagctttggggaaagcataagaacaaaccagacatgaactatgaaaccatgggacgagctttgagatactactaccaaaggggaattcttgcaaaggttgaaggacagaggcttgtatatcagttcaaggatatgccgaaaaacatagtggtcatagatgatgacaaaagtgaaacctgtaatgaagatttagcaggaactactgatgaaaaatcattagaacgagtgtcactgtctgcagaaagtctcctgaaagcagcatcctctgttcgcagtggaaaaaattcatcccctataaactgctccagagcagagaagggtgtagctagagttgtgaatatcacttcccctgggcacgatgcttcatccaggtctcctactaccactgcatctgtgtcagcaacagcagctccaaggacagttcgtgtggcaatgcaggtacctgttgtaatgacatcattgggtcagaaaatttcaactgtggcagttcagtcagttaatgcaggtgcaccattaataaccagcactagtccaacaacagcgacctctccaaaggtagtcattcagacaatccctactgtgatgccagcttctactgaaaatggagacaaaatcaccatgcagcctgccaaaattattaccatcccagctacacagcttgcacagtgtcaactgcagacaaagtcaaatctgactggatcaggaagcattaacattgttggaaccccattggctgtgagagcacttacccctgtttcaatagcccatggtacacctgtaatgagactatcaatgcctactcagcaggcatctggccagactcctcctcgagttatcagtgcagtcataaaggggccagaggttaaatcggaagcagtggcaaaaaagcaagaacatgatgtgaaaactttgcagctagtagaagaaaaaccagcagatggaaataagacagtgacccacgtagtggttgtcagtgcgccttcagctattgcccttcctgtaactatgaaaacagaaggactagtgacatgtgagaaatagtaatgaactagtccgtaacttgaaagtatttcgatttcttggctttatatatcttgtggaaaggacgatcataccataccaatctccgaaag

SEQ ID NO: 2967 - DNA, 1667 bp, Homo sapiens
  source 1..1667: mol_type = genomic DNA
accgccaccatggcgacgtctctgcatgagggacccacgaaccagctggatctgctcatccgggccgtggaagcatcagttcacagcagtaatgcacactgtacagataagacaattgaagctgctgaagccctgcttcatatggaatctcctacctgcttgagggattcaagaagtcctgaattcatccatgctgctatgaggccagatgtcattacagaaactgtagtggaggtgtcaactgaagagtctgaacccatggatacctctcctattccaacatcaccagatagccatgaaccaatgaaaaagaaaaaagttggccgtaaaccaaagacccagcaatcaccaatttccaatgggtctcctgagttaggtataaagaagaaaccaagagaaggaaaaggaaacacaacctatttgtgggagtttcttttagatctacttcaagataaaaatacttgtcccaggtatattaaatggactcagagagaaaaaggcatattcaagctggtggattcaaaggctgtctctaagctttggggaaagcataagaacaaaccagacatgaactatgaaaccatgggacgagctttgagatactactaccaaaggggaattcttgcaaaggttgaaggacagaggcttgtatatcagttcaaggatatgccgaaaaacatagtggtcatagatgatgacaaaagtgaaacctgtaatgaagatttagcaggaactactgatgaaaaatcattagaacgagtgtcactgtctgcagaaagtctcctgaaagcagcatcctctgttcgcagtggaaaaaattcatcccctataaactgctccagagcagagaagggtgtagctagagttgtgaatatcacttcccctgggcacgatgcttcatccaggtctcctactaccactgcatctgtgtcagcaacagcagctccaaggacagttcgtgtggcaatgcaggtacctgttgtaatgacatcattgggtcagaaaatttcaactgtggcagttcagtcagttaatgcaggtgcaccattaataaccagcactagtccaacaacagcgacctctccaaaggtagtcattcagacaatccctactgtgatgccagcttctactgaaaatggagacaaaatcaccatgcagcctgccaaaattattaccatcccagctacacagcttgcacagtgtcaactgcagacaaagtcaaatctgactggatcaggaagcattaacattgttggaaccccattggctgtgagagcacttacccctgtttcaatagcccatggtacacctgtaatgagactatcaatgcctactcagcaggcatctggccagactcctcctcgagttatcagtgcagtcataaaggggccagaggttaaatcggaagcagtggcaaaaaagcaagaacatgatgtgaaaactttgcagctagtagaagaaaaaccagcagatggaaataagacagtgacccacgtagtggttgtcagtgcgccttcagctattgcccttcctgtaactatgaaaacagaaggactagtgacatgtgagaaatagtaatgaactagtccgtaacttgaaagtatttcgatttcttggctttatatatcttgtggaaaggacgagactctggcgccagagcttcacgt

SEQ ID NO: 2968 - DNA, 1616 bp, Homo sapiens
  source 1..1616: mol_type = genomic DNA
accgccaccatggcgacgtctctgcatgagggacccacgaaccagctggatctgctcatccgggccgtggaagcatcagttcacagcagtaatgcacactgtacagataagacaattgaagctgctgaagccctgcttcatatggaatctcctacctgcttgagggattcaagaagtcctgtggaagtgtttgttcctccttgtgtatcaactccagaattcatccatgctgctatgaggccagatgtcattacagaaactgtagtggaggtgtcaactgaagagtctgaacccatggatacctctcctattccaacatcaccagatagccatgaaccaatgaaaaagaaaaaaggaaacacaacctatttgtgggagtttcttttagatctacttcaagataaaaatacttgtcccaggtatattaaatggactcagagagaaaaaggcatattcaagctggtggattcaaaggctgtctctaagctttggggaaagcataagaacaaaccagacatgaactatgaaaccatgggacgagctttgagatactactaccaaaggggaattcttgcaaaggttgaaggacagaggcttgtatatcagttcaaggatatgccgaaaaacatagtggtcatagatgatgacaaaagtgaaacctgtaatgaagatttagcaggaactactgatgaaaaatcattagaacgagtgtcactgtctgcagaaagtctcctgaaagcagcatcctctgttcgcagtggaaaaaattcatcccctataaactgctccagagcagagaagggtgtagctagagttgtgaatatcacttcccctgggcacgatgcttcatccaggtctcctactaccactgcatctgtgtcagcaacagcagctccaaggacagttcgtgtggcaatgcaggtacctgttgtaatgacatcattgggtcagaaaatttcaactgtggcagttcagtcagttaatgcaggtgcaccattaataaccagcactagtccaacaacagcgacctctccaaaggtagtcattcagacaatccctactgtgatgccagcttctactgaaaatggagacaaaatcaccatgcagcctgccaaaattattaccatcccagctacacagcttgcacagtgtcaactgcagacaaagtcaaatctgactggatcaggaagcattaacattgttggaaccccattggctgtgagagcacttacccctgtttcaatagcccatggtacacctgtaatgagactatcaatgcctactcagcaggcatctggccagactcctcctcgagttatcagtgcagtcataaaggggccagaggttaaatcggaagcagtggcaaaaaagcaagaacatgatgtgaaaactttgcagctagtagaagaaaaaccagcagatggaaataagacagtgacccacgtagtggttgtcagtgcgccttcagctattgcccttcctgtaactatgaaaacagaaggactagtgacatgtgagaaatagtaatgaactagtccgtaacttgaaagtatttcgatttcttggctttatatatcttgtggaaaggacgaaggataggatttcagtggatccaa

SEQ ID NO: 2969 - DNA, 1847 bp, Homo sapiens
  source 1..1847: mol_type = genomic DNA
accgccaccatgacatcagcagtggttgacagtggaggtactattttggagctttccagcaatggagtagaaaatcaagaggaaagtgaaaaggtttctgaatatccagcagtgattgtggagccagttccaagtgccagattagagcagggctatgcagcccaggttctggtttatgatgatgagacttatatgatgcaagatgtggcagaagaacaagaagttgagaccgagaatgtggaaacagtggaagcatcagttcacagcagtaatgcacactgtacagataagacaattgaagctgctgaagccctgcttcatatggaatctcctacctgcttgagggattcaagaagtcctgaattcatccatgctgctatgaggccagatgtcattacagaaactgtagtggaggtgtcaactgaagagtctgaacccatggatacctctcctattccaacatcaccagatagccatgaaccaatgaaaaagaaaaaagttggccgtaaaccaaagacccagcaatcaccaatttccaatgggtctcctgagttaggtataaagaagaaaccaagagaaggaaaaggaaacacaacctatttgtgggagtttcttttagatctacttcaagataaaaatacttgtcccaggtatattaaatggactcagagagaaaaaggcatattcaagctggtggattcaaaggctgtctctaagctttggggaaagcataagaacaaaccagacatgaactatgaaaccatgggacgagctttgagatactactaccaaaggggaattcttgcaaaggttgaaggacagaggcttgtatatcagttcaaggatatgccgaaaaacatagtggtcatagatgatgacaaaagtgaaacctgtaatgaagatttagcaggaactactgatgaaaaatcattagaacgagtgtcactgtctgcagaaagtctcctgaaagcagcatcctctgttcgcagtggaaaaaattcatcccctataaactgctccagagcagagaagggtgtagctagagttgtgaatatcacttcccctgggcacgatgcttcatccaggtctcctactaccactgcatctgtgtcagcaacagcagctccaaggacagttcgtgtggcaatgcaggtacctgttgtaatgacatcattgggtcagaaaatttcaactgtggcagttcagtcagttaatgcaggtgcaccattaataaccagcactagtccaacaacagcgacctctccaaaggtagtcattcagacaatccctactgtgatgccagcttctactgaaaatggagacaaaatcaccatgcagcctgccaaaattattaccatcccagctacacagcttgcacagtgtcaactgcagacaaagtcaaatctgactggatcaggaagcattaacattgttggaaccccattggctgtgagagcacttacccctgtttcaatagcccatggtacacctgtaatgagactatcaatgcctactcagcaggcatctggccagactcctcctcgagttatcagtgcagtcataaaggggccagaggttaaatcggaagcagtggcaaaaaagcaagaacatgatgtgaaaactttgcagctagtagaagaaaaaccagcagatggaaataagacagtgacccacgtagtggttgtcagtgcgccttcagctattgcccttcctgtaactatgaaaacagaaggactagtgacatgtgagaaatagtaatgaactagtccgtaacttgaaagtatttcgatttcttggctttatatatcttgtggaaaggacgaattgagcacgcctatgtggcgaga

SEQ ID NO: 2970 - DNA, 1883 bp, Homo sapiens
  source 1..1883: mol_type = genomic DNA
accgccaccatgacatcagcagtggttgacagtggaggtactattttggagctttccagcaatggagtagaaaatcaagaggaaagtgaaaaggtttctgaatatccagcagtgattgtggagccagttccaagtgccagattagagcagggctatgcagcccaggttctggtttatgatgatgagacttatatgatgcaagatgtggcagaagaacaagaagttgagaccgagaatgtggaaacagtggaagcatcagttcacagcagtaatgcacactgtacagataagacaattgaagctgctgaagccctgcttcatatggaatctcctacctgcttgagggattcaagaagtcctgtggaagtgtttgttcctccttgtgtatcaactccagaattcatccatgctgctatgaggccagatgtcattacagaaactgtagtggaggtgtcaactgaagagtctgaacccatggatacctctcctattccaacatcaccagatagccatgaaccaatgaaaaagaaaaaagttggccgtaaaccaaagacccagcaatcaccaatttccaatgggtctcctgagttaggtataaagaagaaaccaagagaaggaaaaggaaacacaacctatttgtgggagtttcttttagatctacttcaagataaaaatacttgtcccaggtatattaaatggactcagagagaaaaaggcatattcaagctggtggattcaaaggctgtctctaagctttggggaaagcataagaacaaaccagacatgaactatgaaaccatgggacgagctttgagatactactaccaaaggggaattcttgcaaaggttgaaggacagaggcttgtatatcagttcaaggatatgccgaaaaacatagtggtcatagatgatgacaaaagtgaaacctgtaatgaagatttagcaggaactactgatgaaaaatcattagaacgagtgtcactgtctgcagaaagtctcctgaaagcagcatcctctgttcgcagtggaaaaaattcatcccctataaactgctccagagcagagaagggtgtagctagagttgtgaatatcacttcccctgggcacgatgcttcatccaggtctcctactaccactgcatctgtgtcagcaacagcagctccaaggacagttcgtgtggcaatgcaggtacctgttgtaatgacatcattgggtcagaaaatttcaactgtggcagttcagtcagttaatgcaggtgcaccattaataaccagcactagtccaacaacagcgacctctccaaaggtagtcattcagacaatccctactgtgatgccagcttctactgaaaatggagacaaaatcaccatgcagcctgccaaaattattaccatcccagctacacagcttgcacagtgtcaactgcagacaaagtcaaatctgactggatcaggaagcattaacattgttggaaccccattggctgtgagagcacttacccctgtttcaatagcccatggtacacctgtaatgagactatcaatgcctactcagcaggcatctggccagactcctcctcgagttatcagtgcagtcataaaggggccagaggttaaatcggaagcagtggcaaaaaagcaagaacatgatgtgaaaactttgcagctagtagaagaaaaaccagcagatggaaataagacagtgacccacgtagtggttgtcagtgcgccttcagctattgcccttcctgtaactatgaaaacagaaggactagtgacatgtgagaaatagtaatgaactagtccgtaacttgaaagtatttcgatttcttggctttatatatcttgtggaaaggacgagcaagccctcaaccgcaactttct

SEQ ID NO: 2971 - DNA, 887 bp, Homo sapiens
  source 1..887: mol_type = genomic DNA
accgccaccatggtggtggtggcagccgcgccgaacccggccgacgggacccctaaagttctgcttctgtcggggcagcccgcctccgccgccggagccccggccggccaggccctgccgctcatggtgccagcccagagaggggccagcccggaggcagcgagcggggggctgccccaggcgcgcaagcgacagcgcctcacgcacctgagccccgaggagaaggcgctgaggaggaaactgaaaaacagagtagcagctcagactgccagagatcgaaagaaggctcgaatgagtgagctggaacagcaagtggtagatttagaagaagagaaccaaaaacttttgctagaaaatcagcttttacgagagaaaactcatggccttgtagttgagaaccaggagttaagacagcgcttggggatggatgccctggttgctgaagaggaggcggaagccaaggggaatgaagtgaggccagtggccgggtctgctgagtccgcagcactcagactacgtgcacctctgcagcaggtgcaggcccagttgtcacccctccagaacatctccccatggattctggcggtattgactcttcagattcagagtctgatatcctgttgggcattctggacaacttggacccagtcatgttcttcaaatgcccttccccagagcctgccagcctggaggagctcccagaggtctacccagaaggacccagttccttaccagcctccctttctctgtcagtggggacgtcatcagccaagctggaagccattaatgaactagtaatgaactagtccgtaacttgaaagtatttcgatttcttggctttatatatcttgtggaaaggacgaagcttaggaaagccaagttaacaa

SEQ ID NO: 2972 - DNA, 1232 bp, Homo sapiens
  source 1..1232: mol_type = genomic DNA
accgccaccatggtggtggtggcagccgcgccgaacccggccgacgggacccctaaagttctgcttctgtcggggcagcccgcctccgccgccggagccccggccggccaggccctgccgctcatggtgccagcccagagaggggccagcccggaggcagcgagcggggggctgccccaggcgcgcaagcgacagcgcctcacgcacctgagccccgaggagaaggcgctgaggaggaaactgaaaaacagagtagcagctcagactgccagagatcgaaagaaggctcgaatgagtgagctggaacagcaagtggtagatttagaagaagagaaccaaaaacttttgctagaaaatcagcttttacgagagaaaactcatggccttgtagttgagaaccaggagttaagacagcgcttggggatggatgccctggttgctgaagaggaggcggaagccaaggggaatgaagtgaggccagtggccgggtctgctgagtccgcagcaggtgcaggcccagttgtcacccctccagaacatctccccatggattctggcggtattgactcttcagattcagagtctgatatcctgttgggcattctggacaacttggacccagtcatgttcttcaaatgcccttccccagagcctgccagcctggaggagctcccagaggtctacccagaaggacccagttccttaccagcctccctttctctgtcagtggggacgtcatcagccaagctggaagccattaatgaactaattcgttttgaccacatatataccaagcccctagtcttagagataccctctgagacagagagccaagctaatgtggtagtgaaaatcgaggaagcacctctcagcccctcagagaatgatcaccctgaattcattgtctcagtgaaggaagaacctgtagaagatgacctcgttccggagctgggtatctcaaatctgctttcatccagccactgcccaaagccatcttcctgcctactggatgcttacagtgactgtggatacgggggttccctttccccattcagtgacatgtcctctctgcttggtgtaaaccattcttgggaggacacttttgccaatgaactctttccccagctgattagtgtctagtaatgaactagtccgtaacttgaaagtatttcgatttcttggctttatatatcttgtggaaaggacgaatatcgacgagcgttgattctttc

SEQ ID NO: 2973 - DNA, 809 bp, Homo sapiens
  source 1..809: mol_type = genomic DNA
accgccaccatgctgcggggcgcgccaggactaggcctcacggcgcggaagggggccgaggactctgcggaggacttggggggcccctgccccgagcccgggggcgattcgggggtgctgggggcgaacggcgcttcctgcagccggggcgaggcggaggagccggcgggcaggaggcgcgcgcggccggtgcggtccaaggcgcggcgcatggccgccaacgtgcgggagcgcaagcgcatcctagactacaacgaggccttcaacgcgctgcgccgggcgctgcggcacgacctgggcggcaagaggctctccaagatcgccacgctgcgcagggccatccaccgcatcgccgcgctctccctggtcctgcgcgccagccccgcgccccgcgggccctgcggacacctggagtgccacggcccggccgcgcgcggggacaccggggacacaggcgccagccccccgccgcctgcagggcccagcctcgcgcgcccagacgccgcccgcccctcggtgccgtccgcgccccgctgcgcctcgtgccccccgcacgcgcccctggcacggcccagtgcggtggccgaggggccgggcctagcacaggcctccgggggaagctggcgccgctgtccgggggcttcctctgccgggccgcctccctggccgcggggctacctgcgatccgcccccgggatgggccatccgcgctcctagtaatgaactagtccgtaacttgaaagtatttcgatttcttggctttatatatcttgtggaaaggacgatatcatctggctcgggtcatttaa

SEQ ID NO: 2974 - DNA, 761 bp, Homo sapiens
  source 1..761: mol_type = genomic DNA
accgccaccatggaccccgcgcccggcgtcctagatccccgcgccgcgccgcccgcgctcctgggcaccccgcaagccgaggtgctggaggacgtgttgcgggagcagttcgggccgctgccccagctggccgctgtctgccggctcaagcggctgccctcgggcggctactcgtccactgaaaacctccagttggtgctggagcggcggcgtgtggccaacgccaaggagcgtgagcggataaaaaatctcaaccgtggttttgccagattgaaggcacttgtgccatttcttccccaaagcaggaagcccagcaaagttgatatccttaaaggtgcgactgaatatatacaggttctcagtgatcttttggaaggagccaaagactcaaagaaacaagacccagatgagcagagctatagtaacaacagttctgaatcacatacatcctcggcaagacagctgtcaagaaacatcacccaacatatcagctgtgctttcggcttgaagaatgaagaggaagggccttgggcagatggtggcagtggtgagccagcacacgcttgtcgccacagtgtgatgtctacgactgaaattatctccccaaccagaagtctggatagattcccagaagtagaactgctgagtcacagacttccacaagtatagtaatgaactagtccgtaacttgaaagtatttcgatttcttggctttatatatcttgtggaaaggacgaacgcgcgtaccacacaaacatcta

SEQ ID NO: 2975 - DNA, 4862 bp, Homo sapiens
  source 1..4862: mol_type = genomic DNA
accgccaccatggagacgtctgcctcagccactgcctccgagaagcaagaagccaaaagtgggatcctggaggccgctggcttccccgacccgggtaaaaaggcctctcctttggtggtggctgcagcggcagcagcagcggtagctgcccaaggagtgccgcagcatctcttgccaccattccatgcgcccctaccgattgacatgcgacaccaggaaggaaggtaccattacgagcctcattctgtccacggtgtgcacgggccccctgccctcagcggcagccctgtcatctctgacatctccttgatccggctttccccgcacccggctggccctggggagtcccccttcaacgccccccacccgtacgtgaacccccacatggagcactacctccgttctgtgcacagcagccccacgctctccatgatctctgcagccaggggcctcagccccgctgatgtggcccaggagcaccttaaggagaggggactgtttggccttcctgctccaggcaccaccccctcagactattaccaccagatgaccctcgtggcaggccaccccgcgccctacggggacctgctgatgcagagcgggggcgctgccagcgcaccccatctccacgactacctcaaccccgtggacgtgtcccgtttctccagcccgcgggtgacgccccgcctgagccgcaagcgggcgctgtccatctccccactctcagacgccagcctggacctgcagcggatgatccgcacctcacccaactcgctagtggcctacatcaacaactcccgaagcagctcagcggccagcggttcctacgggcatctgtcagcgggtgccctcagcccagccttcaccttcccccaccccatcaaccccgtggcctaccagcagattctgagccagcagaggggtctggggtcagcctttggacacacaccacccctgatccagccctcacccaccttcctggcccagcagcccatggccctcacctccatcaatgccacgcccacccagctcagcagcagcagcaactgtctgagtgacaccaaccagaacaagcagagcagtgagtcggccgtcagcagcaccgtcaaccctgtcgccattcacaagcgcagcaaggtcaagaccgagcctgagggcctgcggccggcctcccctctggcgctgacgcagggccaggtgtctggacacggctcatgtgggtgtgcccttcccctctcccaggagcagctggctgacctcaaggaagatctggacagggatgactgtaagcaggaggctgaggtggtcatctatgagaccaactgccactgggaagactgcaccaaggagtacgacacccaggagcagctggtgcatcacatcaacaacgagcacatccacggggagaagaaggagtttgtgtgccgctggcaggcctgcacgcgggagcagaagcccttcaaggcgcagtacatgctggtggtgcacatgcggcgacacacgggcgagaagccccacaagtgcacgttcgagggctgctcgaaggcctactcccgcctggagaacctgaagacacacctgcggtcccacaccggggagaagccatatgtgtgtgagcacgagggctgcaacaaagccttctccaacgcctcggaccgcgccaagcaccagaatcgcacccactccaacgagaaaccctacatctgcaagatcccaggctgcaccaagagatacacagaccccagctctctccggaagcatgtgaaaacggtccacggcccagatgcccacgtcaccaagaagcagcgcaatgacgtgcacctccgcacaccgctgctcaaagagaatggggacagtgaggccggcacggagcctggcggcccagagagcaccgaggccagcagcaccagccaggccgtggaggactgcctgcacgtcagagccatcaagaccgagagctccgggctgtgtcagtccagccccggggcccagtcgtcctgcagcagcgagccctctcctctgggcagtgcccccaacaatgacagtggcgtggagatgccggggacggggcccgggagcctgggagacctgacggcactggatgacacacccccaggggccgacacctcagccctggctgccccctccgctggtggcctccagctgcgcaaacacatgaccaccatgcaccggttcgagcagctcaagaaggagaagctcaagtcactcaaggattcctgctcatgggccgggccgactccacacacgcggaacaccaagctgcctcccctcccgggaagtggctccatcctggaaaacttcagtggcagtgggggcggcgggcccgcggggctgctgccgaacccgcggctgtcggagctgtccgcgagcgaggtgaccatgctgagccagctgcaggagcgccgcgacagctccaccagcacggtcagctcggcctacaccgtgagccgccgctcctccggcatctccccctacttctccagccgccgctccagcgaggcctcgcccctgggcgccggccgcccgcacaacgcgagctccgctgactcctacgaccccatctccacggacgcgtcgcggcgctcgagcgaggccagccagtgcagcggcggctccgggctgctcaacctcacgccggcgcagcagtacagcctgcgggccaagtacgcggcagccactggcggccccccgcccactccgctgccgggcctggagcgcatgagcctgcggaccaggctggcgctgctggacgcgcccgagcgcacgctgcccgccggctgcccacgcccactggggccgcggcgtggcagcgacgggccgacctatggccacggccacgcgggggctgcgcccgccttcccccacgaggctccaggcggcggagccaggcgggccagcgaccctgtgcggcggcccgatgccctgtccctgccgcgggtgcagcgcttccacagcacccacaacgtgaaccccggcccgctgccgccctgtgccgacaggcgaggcctccgcctgcagagccacccgagcaccgacggcggcctggcccgcggcgcctactcgccccggccgcctagcatcagcgagaacgtggcgatggaggccgtggcggcaggagtggacggcgcggggcccgaggccgacctggggctgccggaggacgacctggtgcttccagacgacgtggtgcagtacatcaaggcgcacgccagtggcgctctggacgagggcaccgggcaggtgtatcccacggaaagcactggcttctctgacaaccccagactacccagcccggggctgcacggccagcgcaggatggtggctgcggactccaacgtgggcccctccgcccctatgctgggaggatgccagttaggctttggggcgccctccagcctgaacaaaaataacatgcctgtgcagtggaatgaggtgagctccggcaccgtagacgccctggccagccaggtgaagcctccaccctttcctcagggcaacctggcggtggtgcagcagaagcctgcctttggccagtacccgggctacagtccgcaaggcctacaggctagccctgggggcctggacagcacgcagccacacctgcagccccgcagcggagccccctcccagggcatccccagggtaaactacatgcagcagctgcgacagccagtggcaggcagccagtgtcctggcatgactaccactatgagcccccatgcctgctatggccaagtccacccccagctgagccccagcaccatcagtggggccctcaaccagttcccccaatcctgcagcaacatgccagccaagccagggcatctggggcaccctcagcagacagaagtggcacctgaccccaccacgatgggcaatcgccacagggaacttggggtccccgattcagccctggctggagtgccaccacctcacccagtccagagctacccacagcagagccatcacctggcagcctccatgagccaggagggctaccaccaggtccccagccttctgcctgcccgccagcctggcttcatggagccccaaacaggcccgatgggggtggctacagcaggctttggcctagtgcagccccggcctcccctcgagcccagccccactggccgccaccgtggggtacgtgctgtgcagcagcagctggcctacgccagggccacaggccatgccatggctgccatgccgtccagtcaggaaacagcagaggctgtgcccaagggagcgatgggcaacatggggtcggtgcctccccagccgcctccgcaggacgcaggtggggccccggaccacagcatgctctactactacggccagatccacatgtacgaacaggatggaggcctggagaacctcgggagctgccaggtcatgcggtcccagccaccacagccacaggcctgtcaggacagcatccagccccagcccttgccctcaccaggggtcaaccaggtgtccagcactgtggactcccagctcctggaggccccccagattgacttcgatgccatcatggatgatggcgatcactcgagtttgttctcgggtgctctgagccccagcctcctccacagcctctcccagaactcctcccgcctcaccaccccccgaaactccttgaccctgccctccatccccgcaggcatcagcaacatggctgtcggggacatgagctccatgctcaccagcctcgccgaggagagcaagttcctgaacatgatgacctagtaatgaactagtccgtaacttgaaagtatttcgatttcttggctttatatatcttgtggaaaggacgattagtctttgtactcaccttggcg

SEQ ID NO: 2976 - DNA, 4844 bp, Homo sapiens
  source 1..4844: mol_type = genomic DNA
accgccaccatggaggcccagtcccacagctccacgaccactgaaaagaaaaaagttgagaattccatagtgaagtgctccactcgaacagatgtgagcgagaaagccgttgcctccagcaccacttctaatgaggatgaaagtcctggacagacttatcacagagagagaagaaacgcaatcactatgcagccacagaatgtccaggggctcagcaaagtcagtgaggaaccttcaacatcgagtgacgagagggcctcattgatcaagaaagagatccatgggtccctgccacacgtggcggagccctctgtgccgtaccgcgggacggtgtttgccatggaccccaggaatggttacatggagccccactaccaccctcctcatcttttccctgccttccatcctcctgtaccaattgatgccagacatcatgagggccgttaccattacgatccatctccgattcctccattgcatatgacttccgccttatctagtagccctacgtatccggacctgcccttcattaggatctccccacaccggaaccccactgctgcttccgagtctcccttcagccctccacatccctacattaatccctacatggactatatccgctccttgcacagcagcccatcgctctccatgatctcagcaacccgtgggctgagccctacagatgcgccccatgcaggagtcagcccagcagaatactatcatcagatggccctgctaactggccagcgcagcccctatgcagacattattccctcagctgccaccgccggcacgggggccatccacatggaatatcttcatgctatggatagcaccagattctccagccccaggctgtcagccaggccgagccgaaaacgtacactgtccatatcaccactctccgatcatagctttgaccttcagaccatgataaggacgtctcccaactccttggtcacgattctcaataattcccgtagcagctcttcagcaagtggctcctatggtcacttatctgcaagtgcaatcagccctgccttgagcttcacctactcttccgcgcccgtctctctccacatgcatcagcagatcctaagccgacaacagagcttaggttcagcctttggacacagccctccactcatccaccctgccccaacttttccaacacagaggcctattccagggatccctacggttctgaaccccgtccaggtcagctccggcccttctgagtcctcacagaacaagcccacgagtgagtctgcagtgagcagcactggtgacccgatgcacaacaagaggtccaagatcaaacccgatgaagacctccccagcccaggggctcgggggcagcaggaacagcccgaaggaacaacccttgtcaaggaggaaggggacaaagatgaaagcaaacaggagcctgaagtcatctatgagacaaactgccactgggaaggctgcgcgagggagttcgacacccaagagcagcttgtgcaccatataaataacgaccatattcatggagagaagaaggagttcgtgtgcaggtggctggactgctcaagagagcagaaacccttcaaagcccagtatatgttggtagtgcatatgagaagacacacgggcgagaagcctcacaaatgcacttttgaaggttgcacaaaggcctactcgagactagaaaacttgaaaacacacttgagatctcacactggagagaaaccatacgtctgtgagcacgaaggttgcaacaaggctttctcaaatgcctctgatcgcgccaaacaccaaaacagaacgcattccaatgagaaaccatatgtgtgcaaaatcccaggctgcactaagcgttacacagacccaagctccctccggaaacatgtgaagacagtgcatggcccagaggctcatgtcaccaagaagcagcgaggggacatccatcctcggccgccacccccgagagattccggcagccattcacagtccaggtcgcctggccgaccgactcagggagcccttggtgagcagcaggacctcagcaacactacctcaaagcgggaagaatgcctccaggtgaaaaccgtcaaggcagagaagccaatgacatctcagccaagccctggtggtcagtcttcatgcagcagccaacagtcccccatcagcaactattccaacagtgggctcgagcttcctctgaccgatggaggtagtataggagacctcagtgccatcgatgaaaccccaatcatggactcaaccatttccactgcaaccacagcccttgctttgcaagccaggagaaacccggcagggaccaaatggatggagcacgtaaaactagaaaggctaaaacaagtgaatggaatgtttccgcgactgaaccccattctaccccctaaagcccctgcggtctctcctctcataggaaatggcacacagtccaacaacacctgcagcttgggtgggcccatgacgcttctcccgggcagaagcgacctctctggggtggacgtcactatgctgaacatgctcaacagaagggacagcagcgccagcaccatcagctcggcctacctgagcagccgccgctcctcagggatctcgccctgcttctccagccgccgctccagcgaggcgtcacaggccgagggccggccgcagaacgtgagcgtggccgactcctacgaccccatctccaccgacgcctcgcgccgctccagcgaagccagccagagcgacggcctgcccagcctgctcagcctcacgcccgcccagcagtaccgcctcaaggccaagtacgcggctgccacaggagggccgccgccgacgcccctgcccaacatggagaggatgagcctgaagacgcgcctggcgctgctcggggatgccctcgagcctggcgtggccctgcctccagttcatgccccgaggaggtgcagcgacgggggagcccacggctacgggcggcgccacctgcagccgcacgatgcgccgggccacggcgtgaggagggccagcgacccggtgcggacaggctccgagggcctggccctgcctcgtgtgccgcgcttcagcagcctcagcagctgcaaccccccggcgatggccacgtccgcggagaagcgcagtctcgtgcttcagaattacacgcggcccgagggcggccagtcccgaaacttccactcgtccccctgtcctcccagcatcaccgagaacgtcaccctggagtccctgaccatggacgctgatgccaacctgaacgatgaggatttcctgccggacgacgtggtgcagtatttaaattcccagaaccaagcagggtacgagcagcacttccccagcgccctcccggacgacagcaaagtgccccacgggcccggtgactttgacgcgcccgggctgccagacagccacgctggccagcagttccatgccctcgagcagccctgccccgagggcagcaaaaccgacctgcccattcagtggaacgaagtcagctccggaagcgccgacctgtcctcctccaagctcaagtgtgggccgcggcccgctgtgccgcagactcgcgcctttgggttctgcaacggcatggtcgtccacccgcagaaccccttgaggagcgggcctgctgggggctatcagaccctcggggagaacagcaacccctacggtggcccagagcacttgatgctccacaacagccccggaagtggcaccagtggaaacgccttccatgaacagccctgtaaggccccgcagtatgggaactgtctcaacaggcagccagtggcccctggtgcactcgacggtgcctgtggtgccgggattcaagcctcaaagctgaagagcacccccatgcaagggagcgggggccagctgaatttcggcctgccggtagcgccaaatgagtcagctggcagcatggtgaatggcatgcagaaccaggacccagtgggacaggggtacctggctcaccagctcctcggcgacagcatgcagcacccgggggcaggccgccccggtcagcagatgcttgggcagattagtgctacctcacacatcaacatctaccaagggccagagagctgcctgccaggggctcacggcatgggcagccagccgtcaagcttggcagttgtcaggggctaccagccatgtgccagctttgggggcagcaggcgccaggctatgccgagggacagccttgctctgcagtcaggacagctcagtgacacaagtcagacctgcagggtgaatggtatcaagatggagatgaaagggcagccccatccgctgtgctctaatctgcagaattactctggtcagttctatgaccaaaccgtgggcttcagtcagcaagacacgaaagctggttcattctctatttcagacgccagctgcctgctacaggggaccagcgccaaaaactctgagttactttccccaggtgctaatcaggtgacaagcacagtggacagcctcgacagccatgacctggaaggggtacagattgacttcgatgccatcatagacgatggggaccactccagcctgatgtcgggggccctgagcccaagtatcattcagaacctttcccatagctcctcccgcctcaccacgcctcgggcgtccctcccattcccagcgctgtccatgagcaccaccaacatggctatcggggacatgagttctttgctgacctccctagcggaagaaagcaaattccttgcagttatgcaatagtaatgaactagtccgtaacttgaaagtatttcgatttcttggctttatatatcttgtggaaaggacgacacaattgccataatcggaactgt

SEQ ID NO: 2977 - DNA, 3743 bp, Homo sapiens
  source 1..3743: mol_type = genomic DNA
accgccaccatgggggtggactttgatgtgaagactttctgccacaacttgcgggcgactaagccaccatacgagtgcccggtggagacctgccgaaaggtctacaagagttacagtggtattgagtaccacctgtaccactatgaccacgacaacccaccacccccacaacaaactccactccgcaagcacaagaaaaaggggcgccagtcacgcccagccaacaagcagtcacccagcccctcagaggtctcacagtcaccaggccgtgaggtgatgagctatgcacaggcccagcgcatggtggaggtggacttgcatggccgcgtccaccgcatcagcatctttgacaacctggatgtggtgtcagaggatgaggaagcccccgaggaggcccctgagaatggcagcaacaaggagaacactgagacaccagctgctactcccaagtcaggcaaacataagaacaaggagaagcgcaaggactccaaccatcaccaccaccacaatgtttctgcgagcaccactcccaagctgccagaggtggtctatcgggagctggaacaggacacccctgatgccccaccccggccaacttcctattaccggtacatcgagaagtctgcagaggagctggacgaggaagtagagtatgacatggacgaggaggactacatctggctggatatcatgaatgagcgtcggaagacagagggtgtaagtcccatcccgcaggagatctttgagtacctaatggaccgactggagaaggagtcgtactttgagagtcataataaaggcgaccctaatgcgctagtggacgaggatgctgtttgctgtatctgcaatgatggtgagtgccagaacagcaatgtcatcctcttctgtgacatgtgcaacctggccgtgcaccaggagtgctacggtgtcccctatatccctgagggccagtggctgtgccgccgttgcctgcagtcaccctctcgtgctgtggattgtgccctgtgccccaacaagggcggtgccttcaagcagacagatgacgggcgctgggcccatgtggtgtgtgccttgtggatccctgaggtctgcttcgccaacacggtcttcctagagcctattgacagcattgagcacatcccaccagctcgctggaagctcacctgctacatttgcaaacaacggggctcaggggcctgcatccagtgccacaaggccaactgttacacagctttccatgtgacatgcgcccagcaggctggcctttacatgaagatggagcctgtgcgggagacaggcgccaacggcacctctttcagtgtccgcaagacagcctactgcgacatccacacgcctccaggttcagcacgccgactgcctgccctgtcccacagcgagggtgaggaggatgaagatgaggaggaggatgagggtaagggctggagctcagagaaagtcaagaaggccaaggccaagtcccggatcaaaatgaagaaggcacggaagatcctggcagagaagcgggcagcagcacctgtggtgtcagtgccctgcatcccaccacacaggcttagtaaaatcaccaaccgcctgaccatccaaaggaagagccagttcatgcagaggctgcacagctactggacactgaagcggcagtcacggaatggggtcccattgctacgtcgcctgcagacacacctgcaatctcagaggaactgtgaccaagttgggagagattctgaggataagaactgggcccttaaagaacagctcaagtcctggcagcggctccggcatgacttggagcgagctcggctgctcgtggaattgatccgcaagcgggaaaaactcaaaagggagacgatcaaggttcagcagattgccatggagatgcagctgactcctttcctcatcctccttcgcaaaaccttggagcagctccaagagaaggacacaggcaacatcttcagcgagccggtccctctgtctgaggtacctgactacctagaccacatcaaaaagcccatggactttttcaccatgaagcagaacttggaggcttaccgctacctgaattttgatgattttgaggaggacttcaacctcatcgtcagcaactgcctcaagtataacgccaaggacaccatcttctaccgggcagcagtgcggcttcgtgagcagggtggtgctgtgctccgccaggcccggcgccaggcagaaaaaatgggcattgactttgagacgggcatgcatatcccccacagcctggctggagatgaggccacacaccacactgaagatgccgaggaagagcggctggtcttgctggagaaccagaagcacctgccagtggaagaacagctaaagctgcttctggagcggctggacgaagtgaatgccagcaagcagagtgtgggccgctcacggcgtgcaaagatgatcaagaaagagatgacggcactgcggcggaagcttgcccatcagcgagagacgggacgtgatggccctgagcggcatggcccctcgagccggggtagtctgacaccccacccggcagcctgtgacaaggatgggcagacagatagtgcggcagaggagagcagcagccaggagacaagcaaaggcctgggtcccaacatgtcctcaacccccgcacatgaggtgggcaggagaacctcagttctgttctccaaaaagaacccgaagacagctggaccgcccaagaggccgggccggccccccaaaaaccgggagagccagatgacccccagccacggaggcagtcctgtggggcccccccagctccccatcatgagttccctgcgtcagcgcaagcggggtaggagcccccggcccagttcgagctcagacagcgacagtgataagtccacagaagaccccccaatggacttaccagccaatggcttcagcggtggaaaccaaccagtgaagaagagtttcttggtataccgtaatgactgcagccttccccggagcagctcagactctgagtccagcagcagtagcagtagcagcgctgcttcagaccggaccagcacaacgccctcaaaacaaggccggggcaaaccctccttctctcggggcactttcccagaggacagcagtgaggatacctcaggcactgagaatgaggcctactccgtgggcactggccgcggcgtgggccacagcatggtaaggaagagtctgggccggggagctggctggctgtcagaggatgaggactccccgctggatgctctggacctcgtgtgggccaaatgccgaggctatccatcatacccagctctgatcattgatccaaagatgccccgagaaggtatgttccaccatggggttcccatccctgtgcccccactggaggtgctgaaacttggggagcagatgacccaggaagcccgagagcatctctacctcgtcctcttctttgacaacaaacgaacctggcagtggctgcccaggaccaagctggttcctctgggtgtgaaccaggacctagacaaggagaagatgctggagggccgcaagtccaacatccgcaagtcagtacagatcgcctaccacagggctctgcagcaccgcagcaaggtgcaaggcgagcagagcagtgagaccagcgatagtgattagtaatgaactagtccgtaacttgaaagtatttcgatttcttggctttatatatcttgtggaaaggacgaagataataaacccgaacgcctagg

SEQ ID NO: 2978 - DNA, 3461 bp, Homo sapiens
  source 1..3461: mol_type = genomic DNA
accgccaccatgggggtggactttgatgtgaagactttctgccacaacttgcgggcgactaagccaccatacgagtgcccggtggagacctgccgaaaggtctacaagagttacagtggtattgagtaccacctgtaccactatgaccacgacaacccaccacccccacaacaaactccactccgcaagcacaagaaaaaggggcgccagtcacgcccagccaacaagcagtcacccagcccctcagaggtctcacagtcaccaggccgtgaggtgatgagctatgcacaggcccagcgcatggtggaggtggacttgcatggccgcgtccaccgcatcagcatctttgacaacctggatgtggtgtcagaggatgaggaagcccccgaggaggcccctgagaatggcagcaacaaggagaacactgagacaccagctgctactcccaagtcaggcaaacataagaacaaggagaagcgcaaggactccaaccatcaccaccaccacaatgtttctgcgagcaccactcccaagctgccagaggtggtctatcgggagctggaacaggacacccctgatgccccaccccggccaacttcctattaccggtacatcgagaagtctgcagaggagctggacgaggaagtagagtatgacatggacgaggaggactacatctggctggatatcatgaatgagcgtcggaagacagagggtgtaagtcccatcccgcaggagatctttgagtacctaatggaccgactggagaaggagtcgtactttgagagtcataataaaggcgaccctaatgcgctagtggacgaggatgctgtttgctgtatctgcaatgatggtgagtgccagaacagcaatgtcatcctcttctgtgacatgtgcaacctggccgtgcaccaggagtgctacggtgtcccctatatccctgagggccagtggctgtgccgccgttgcctgcagtcaccctctcgtgctgtggattgtgccctgtgccccaacaagggcggtgccttcaagcagacagatgacgggcgctgggcccatgtggtgtgtgccttgtggatccctgaggtctgcttcgccaacacggtcttcctagagcctattgacagcattgagcacatcccaccagctcgctggaagctcacctgctacatttgcaaacaacggggctcaggggcctgcatccagtgccacaaggccaactgttacacagctttccatgtgacatgcgcccagcaggctggcctttacatgaagatggagcctgtgcgggagacaggcgccaacggcacctctttcagtgtccgcaagacagcctactgcgacatccacacgcctccaggttcagcacgccgactgcctgccctgtcccacagcgagggtgaggaggatgaagatgaggaggaggatgagggtaagggctggagctcagagaaagtcaagaaggccaaggccaagtcccggatcaaaatgaagaaggcacggaagatcctggcagagaagcgggcagcagcacctgtggtgtcagtgccctgcatcccaccacacaggcttagtaaaatcaccaaccgcctgaccatccaaaggaagagccagttcatgcagaggctgcacagctactggacactgaagcggcagtcacggaatggggtcccattgctacgtcgcctgcagacacacctgcaatctcagaggaactgtgaccaagttgggagagattctgaggataagaactgggcccttaaagaacagctcaagtcctggcagcggctccggcatgacttggagcgagctcggctgctcgtggaattgatccgcaagcgggaaaaactcaaaagggagacgatcaaggttcagcagattgccatggagatgcagctgactcctttcctcatcctccttcgcaaaaccttggagcagctccaagagaaggacacaggcaacatcttcagcgagccggtccctctgtctgaggtacctgactacctagaccacatcaaaaagcccatggactttttcaccatgaagcagaacttggaggcttaccgctacctgaattttgatgattttgaggaggacttcaacctcatcgtcagcaactgcctcaagtataacgccaaggacaccatcttctaccgggcagcagtgcggcttcgtgagcagggtggtgctgtgctccgccaggcccggcgccaggcagaaaaaatgggcattgactttgagacgggcatgcatatcccccacagcctggctggagatgaggccacacaccacactgaagatgcagccgaggaagagcggctggtcttgctggagaaccagaagcacctgccagtggaagaacagctaaagctgcttctggagcggctggacgaagtgaatgccagcaagcagagtgtgggccgctcacggcgtgcaaagatgatcaagaaagagatgacggcactgcggcggaagcttgcccatcagcgagagacgggacgtgatggccctgagcggcatggcccctcgagccggggtagtctgacaccccacccggcagcctgtgacaaggatgggcagacagatagtgcggcagaggagagcagcagccaggagacaagcaaagacttaccagccaatggcttcagcggtggaaaccaaccagtgaagaagagtttcttggtataccgtaatgactgcagccttccccggagcagctcagactctgagtccagcagcagtagcagtagcagcgctgcttcagaccggaccagcacaacgccctcaaaacaaggccggggcaaaccctccttctctcggggcactttcccagaggacagcagtgaggatacctcaggcactgagaatgaggcctactccgtgggcactggccgcggcgtgggccacagcatggtaaggaagagtctgggccggggagctggctggctgtcagaggatgaggactccccgctggatgctctggacctcgtgtgggccaaatgccgaggctatccatcatacccagctctgatcattgatccaaagatgccccgagaaggtatgttccaccatggggttcccatccctgtgcccccactggaggtgctgaaacttggggagcagatgacccaggaagcccgagagcatctctacctcgtcctcttctttgacaacaaacgaacctggcagtggctgcccaggaccaagctggttcctctgggtgtgaaccaggacctagacaaggagaagatgctggagggccgcaagtccaacatccgcaagtcagtacagatcgcctaccacagggctctgcagcaccgcagcaaggtgcaaggcgagcagagcagtgagaccagcgatagtgattagtaatgaactagtccgtaacttgaaagtatttcgatttcttggctttatatatcttgtggaaaggacgatccagtgtgttatgtttcacgact

SEQ ID NO: 2979 - DNA, 3746 bp, Homo sapiens
  source 1..3746: mol_type = genomic DNA
accgccaccatgggggtggactttgatgtgaagactttctgccacaacttgcgggcgactaagccaccatacgagtgcccggtggagacctgccgaaaggtctacaagagttacagtggtattgagtaccacctgtaccactatgaccacgacaacccaccacccccacaacaaactccactccgcaagcacaagaaaaaggggcgccagtcacgcccagccaacaagcagtcacccagcccctcagaggtctcacagtcaccaggccgtgaggtgatgagctatgcacaggcccagcgcatggtggaggtggacttgcatggccgcgtccaccgcatcagcatctttgacaacctggatgtggtgtcagaggatgaggaagcccccgaggaggcccctgagaatggcagcaacaaggagaacactgagacaccagctgctactcccaagtcaggcaaacataagaacaaggagaagcgcaaggactccaaccatcaccaccaccacaatgtttctgcgagcaccactcccaagctgccagaggtggtctatcgggagctggaacaggacacccctgatgccccaccccggccaacttcctattaccggtacatcgagaagtctgcagaggagctggacgaggaagtagagtatgacatggacgaggaggactacatctggctggatatcatgaatgagcgtcggaagacagagggtgtaagtcccatcccgcaggagatctttgagtacctaatggaccgactggagaaggagtcgtactttgagagtcataataaaggcgaccctaatgcgctagtggacgaggatgctgtttgctgtatctgcaatgatggtgagtgccagaacagcaatgtcatcctcttctgtgacatgtgcaacctggccgtgcaccaggagtgctacggtgtcccctatatccctgagggccagtggctgtgccgccgttgcctgcagtcaccctctcgtgctgtggattgtgccctgtgccccaacaagggcggtgccttcaagcagacagatgacgggcgctgggcccatgtggtgtgtgccttgtggatccctgaggtctgcttcgccaacacggtcttcctagagcctattgacagcattgagcacatcccaccagctcgctggaagctcacctgctacatttgcaaacaacggggctcaggggcctgcatccagtgccacaaggccaactgttacacagctttccatgtgacatgcgcccagcaggctggcctttacatgaagatggagcctgtgcgggagacaggcgccaacggcacctctttcagtgtccgcaagacagcctactgcgacatccacacgcctccaggttcagcacgccgactgcctgccctgtcccacagcgagggtgaggaggatgaagatgaggaggaggatgagggtaagggctggagctcagagaaagtcaagaaggccaaggccaagtcccggatcaaaatgaagaaggcacggaagatcctggcagagaagcgggcagcagcacctgtggtgtcagtgccctgcatcccaccacacaggcttagtaaaatcaccaaccgcctgaccatccaaaggaagagccagttcatgcagaggctgcacagctactggacactgaagcggcagtcacggaatggggtcccattgctacgtcgcctgcagacacacctgcaatctcagaggaactgtgaccaagttgggagagattctgaggataagaactgggcccttaaagaacagctcaagtcctggcagcggctccggcatgacttggagcgagctcggctgctcgtggaattgatccgcaagcgggaaaaactcaaaagggagacgatcaaggttcagcagattgccatggagatgcagctgactcctttcctcatcctccttcgcaaaaccttggagcagctccaagagaaggacacaggcaacatcttcagcgagccggtccctctgtctgaggtacctgactacctagaccacatcaaaaagcccatggactttttcaccatgaagcagaacttggaggcttaccgctacctgaattttgatgattttgaggaggacttcaacctcatcgtcagcaactgcctcaagtataacgccaaggacaccatcttctaccgggcagcagtgcggcttcgtgagcagggtggtgctgtgctccgccaggcccggcgccaggcagaaaaaatgggcattgactttgagacgggcatgcatatcccccacagcctggctggagatgaggccacacaccacactgaagatgcagccgaggaagagcggctggtcttgctggagaaccagaagcacctgccagtggaagaacagctaaagctgcttctggagcggctggacgaagtgaatgccagcaagcagagtgtgggccgctcacggcgtgcaaagatgatcaagaaagagatgacggcactgcggcggaagcttgcccatcagcgagagacgggacgtgatggccctgagcggcatggcccctcgagccggggtagtctgacaccccacccggcagcctgtgacaaggatgggcagacagatagtgcggcagaggagagcagcagccaggagacaagcaaaggcctgggtcccaacatgtcctcaacccccgcacatgaggtgggcaggagaacctcagttctgttctccaaaaagaacccgaagacagctggaccgcccaagaggccgggccggccccccaaaaaccgggagagccagatgacccccagccacggaggcagtcctgtggggcccccccagctccccatcatgagttccctgcgtcagcgcaagcggggtaggagcccccggcccagttcgagctcagacagcgacagtgataagtccacagaagaccccccaatggacttaccagccaatggcttcagcggtggaaaccaaccagtgaagaagagtttcttggtataccgtaatgactgcagccttccccggagcagctcagactctgagtccagcagcagtagcagtagcagcgctgcttcagaccggaccagcacaacgccctcaaaacaaggccggggcaaaccctccttctctcggggcactttcccagaggacagcagtgaggatacctcaggcactgagaatgaggcctactccgtgggcactggccgcggcgtgggccacagcatggtaaggaagagtctgggccggggagctggctggctgtcagaggatgaggactccccgctggatgctctggacctcgtgtgggccaaatgccgaggctatccatcatacccagctctgatcattgatccaaagatgccccgagaaggtatgttccaccatggggttcccatccctgtgcccccactggaggtgctgaaacttggggagcagatgacccaggaagcccgagagcatctctacctcgtcctcttctttgacaacaaacgaacctggcagtggctgcccaggaccaagctggttcctctgggtgtgaaccaggacctagacaaggagaagatgctggagggccgcaagtccaacatccgcaagtcagtacagatcgcctaccacagggctctgcagcaccgcagcaaggtgcaaggcgagcagagcagtgagaccagcgatagtgattagtaatgaactagtccgtaacttgaaagtatttcgatttcttggctttatatatcttgtggaaaggacgacttaagggtgcggctgtattccca

SEQ ID NO: 2980 - DNA, 3422 bp, Homo sapiens
  source 1..3422: mol_type = genomic DNA
accgccaccatgttcaactcgatgaccccaccaccaatcagtagctatggcgagccctgctgtctccggcccctccccagtcagggggcccccagtgtggggacagaaggactgtctggcccgcccttctgccaccaagctaacctcatgtccggcccccacagttatgggccagccagagagaccaacagctgcaccgagggcccactcttttcttctccccggagtgcagtcaagttgaccaagaagcgggcactgtccatctcacctctgtcggatgccagcctggacctgcagacggttatccgcacctcacccagctccctcgtagctttcatcaactcgcgatgcacatctccaggaggctcctacggtcatctctccattggcaccatgagcccatctctgggattcccagcccagatgaatcaccaaaaagggccctcgccttcctttggggtccagccttgtggtccccatgactctgcccggggtgggatgatcccacatcctcagtcccggggacccttcccaacttgccagctgaagtctgagctggacatgctggttggcaagtgccgggaggaacccttggaaggtgatatgtccagccccaactccacaggcatacaggatcccctgttggggatgctggatgggcgggaggacctcgagagagaggagaagcgtgagcctgaatctgtgtatgaaactgactgccgttgggatggctgcagccaggaatttgactcccaagagcagctggtgcaccacatcaacagcgagcacatccacggggagcggaaggagttcgtgtgccactgggggggctgctccagggagctgaggcccttcaaagcccagtacatgctggtggttcacatgcgcagacacactggcgagaagccacacaagtgcacgtttgaagggtgccggaagtcatactcacgcctcgaaaacctgaagacgcacctgcggtcacacacgggtgagaagccatacatgtgtgagcacgagggctgcagtaaagccttcagcaatgccagtgaccgagccaagcaccagaatcggacccattccaatgagaagccgtatgtatgtaagctccctggctgcaccaaacgctatacagatcctagctcgctgcgaaaacatgtcaagacagtgcatggtcctgacgcccatgtgaccaaacggcaccgtggggatggccccctgcctcgggcaccatccatttctacagtggagcccaagagggagcgggaaggaggtcccatcagggaggaaagcagactgactgtgccagagggtgccatgaagccacagccaagccctggggcccagtcatcctgcagcagtgaccactccccggcagggagtgcagccaatacagacagtggtgtggaaatgactggcaatgcagggggcagcactgaagacctctccagcttggacgagggaccttgcattgctggcactggtctgtccactcttcgccgccttgagaacctcaggctggaccagctacatcaactccggccaatagggacccggggtctcaaactgcccagcttgtcccacaccggtaccactgtgtcccgccgcgtgggccccccagtctctcttgaacgccgcagcagcagctccagcagcatcagctctgcctatactgtcagccgccgctcctccctggcctctcctttcccccctggctccccaccagagaatggagcatcctccctgcctggccttatgcctgcccagcactacctgcttcgggcaagatatgcttcagccagagggggtggtacttcgcccactgcagcatccagcctggatcggataggtggtcttcccatgcctccttggagaagccgagccgagtatccaggatacaaccccaatgcaggggtcacccggagggccagtgacccagcccaggctgctgaccgtcctgctccagctagagtccagaggttcaagagcctgggctgtgtccataccccacccactgtggcagggggaggacagaactttgatccttacctcccaacctctgtctactcaccacagccccccagcatcactgagaatgctgccatggatgctagagggctacaggaagagccagaagttgggacctccatggtgggcagtggtctgaacccctatatggacttcccacctactgatactctgggatatgggggacctgaaggggcagcagctgagccttatggagcgaggggtccaggctctctgcctcttgggcctggtccacccaccaactatggccccaacccctgtccccagcaggcctcatatcctgaccccacccaagaaacatggggtgagttcccttcccactctgggctgtacccaggccccaaggctctaggtggaacctacagccagtgtcctcgacttgaacattatggacaagtgcaagtcaagccagaacaggggtgcccagtggggtctgactccacaggactggcaccctgcctcaatgcccaccccagtgaggggcccccacatccacagcctctcttttcccattacccccagccctctcctccccaatatctccagtcaggcccctatacccagccaccccctgattatcttccttcagaacccaggccttgcctggactttgattcccccacccattccacagggcagctcaaggctcagcttgtgtgtaattatgttcaatctcaacaggagctactgtgggagggtgggggcagggaagatgcccccgcccaggaaccttcctaccagagtcccaagtttctggggggttcccaggttagcccaagccgtgctaaagctccagtgaacacatatggacctggctttggacccaacttgcccaatcacaagtcaggttcctatcccaccccttcaccatgccatgaaaattttgtagtgggggcaaatagggcttcacatagggcagcagcaccacctcgacttctgcccccattgcccacttgctatgggcctctcaaagtgggaggcacaaaccccagctgtggtcatcctgaggtgggcaggctaggagggggtcctgccttgtaccctcctcccgaaggacaggtatgtaaccccctggactctcttgatcttgacaacactcagctggactttgtggctattctggatgagccccaggggctgagtcctcctccttcccatgatcagcggggcagctctggacataccccacctccctctgggccccccaacatggctgtgggcaacatgagtgtcttactgagatccctacctggggaaacagaattcctcaactctagtgcctagtaatgaactagtccgtaacttgaaagtatttcgatttcttggctttatatatcttgtggaaaggacgagtgaaataccggcaggttgcaacg

SEQ ID NO: 2981 - DNA, 3038 bp, Homo sapiens
  source 1..3038: mol_type = genomic DNA
accgccaccatgagcccatctctgggattcccagcccagatgaatcaccaaaaagggccctcgccttcctttggggtccagccttgtggtccccatgactctgcccggggtgggatgatcccacatcctcagtcccggggacccttcccaacttgccagctgaagtctgagctggacatgctggttggcaagtgccgggaggaacccttggaaggtgatatgtccagccccaactccacaggcatacaggatcccctgttggggatgctggatgggcgggaggacctcgagagagaggagaagcgtgagcctgaatctgtgtatgaaactgactgccgttgggatggctgcagccaggaatttgactcccaagagcagctggtgcaccacatcaacagcgagcacatccacggggagcggaaggagttcgtgtgccactgggggggctgctccagggagctgaggcccttcaaagcccagtacatgctggtggttcacatgcgcagacacactggcgagaagccacacaagtgcacgtttgaagggtgccggaagtcatactcacgcctcgaaaacctgaagacgcacctgcggtcacacacgggtgagaagccatacatgtgtgagcacgagggctgcagtaaagccttcagcaatgccagtgaccgagccaagcaccagaatcggacccattccaatgagaagccgtatgtatgtaagctccctggctgcaccaaacgctatacagatcctagctcgctgcgaaaacatgtcaagacagtgcatggtcctgacgcccatgtgaccaaacggcaccgtggggatggccccctgcctcgggcaccatccatttctacagtggagcccaagagggagcgggaaggaggtcccatcagggaggaaagcagactgactgtgccagagggtgccatgaagccacagccaagccctggggcccagtcatcctgcagcagtgaccactccccggcagggagtgcagccaatacagacagtggtgtggaaatgactggcaatgcagggggcagcactgaagacctctccagcttggacgagggaccttgcattgctggcactggtctgtccactcttcgccgccttgagaacctcaggctggaccagctacatcaactccggccaatagggacccggggtctcaaactgcccagcttgtcccacaccggtaccactgtgtcccgccgcgtgggccccccagtctctcttgaacgccgcagcagcagctccagcagcatcagctctgcctatactgtcagccgccgctcctccctggcctctcctttcccccctggctccccaccagagaatggagcatcctccctgcctggccttatgcctgcccagcactacctgcttcgggcaagatatgcttcagccagagggggtggtacttcgcccactgcagcatccagcctggatcggataggtggtcttcccatgcctccttggagaagccgagccgagtatccaggatacaaccccaatgcaggggtcacccggagggccagtgacccagcccaggctgctgaccgtcctgctccagctagagtccagaggttcaagagcctgggctgtgtccataccccacccactgtggcagggggaggacagaactttgatccttacctcccaacctctgtctactcaccacagccccccagcatcactgagaatgctgccatggatgctagagggctacaggaagagccagaagttgggacctccatggtgggcagtggtctgaacccctatatggacttcccacctactgatactctgggatatgggggacctgaaggggcagcagctgagccttatggagcgaggggtccaggctctctgcctcttgggcctggtccacccaccaactatggccccaacccctgtccccagcaggcctcatatcctgaccccacccaagaaacatggggtgagttcccttcccactctgggctgtacccaggccccaaggctctaggtggaacctacagccagtgtcctcgacttgaacattatggacaagtgcaagtcaagccagaacaggggtgcccagtggggtctgactccacaggactggcaccctgcctcaatgcccaccccagtgaggggcccccacatccacagcctctcttttcccattacccccagccctctcctccccaatatctccagtcaggcccctatacccagccaccccctgattatcttccttcagaacccaggccttgcctggactttgattcccccacccattccacagggcagctcaaggctcagcttgtgtgtaattatgttcaatctcaacaggagctactgtgggagggtgggggcagggaagatgcccccgcccaggaaccttcctaccagagtcccaagtttctggggggttcccaggttagcccaagccgtgctaaagctccagtgaacacatatggacctggctttggacccaacttgcccaatcacaagtcaggttcctatcccaccccttcaccatgccatgaaaattttgtagtgggggcaaatagggcttcacatagggcagcagcaccacctcgacttctgcccccattgcccacttgctatgggcctctcaaagtgggaggcacaaaccccagctgtggtcatcctgaggtgggcaggctaggagggggtcctgccttgtaccctcctcccgaaggacaggtatgtaaccccctggactctcttgatcttgacaacactcagctggactttgtggctattctggatgagccccaggggctgagtcctcctccttcccatgatcagcggggcagctctggacataccccacctccctctgggccccccaacatggctgtgggcaacatgagtgtcttactgagatccctacctggggaaacagaattcctcaactctagtgcctagtaatgaactagtccgtaacttgaaagtatttcgatttcttggctttatatatcttgtggaaaggacgataccgctgtttgttgggcgatctt

SEQ ID NO: 2982 - DNA, 3299 bp, Homo sapiens
  source 1..3299: mol_type = genomic DNA
accgccaccatgttcaactcgatgaccccaccaccaatcagtagctatggcgagccctgctgtctccggcccctccccagtcagggggcccccagtgtggggacagaagtcaagttgaccaagaagcgggcactgtccatctcacctctgtcggatgccagcctggacctgcagacggttatccgcacctcacccagctccctcgtagctttcatcaactcgcgatgcacatctccaggaggctcctacggtcatctctccattggcaccatgagcccatctctgggattcccagcccagatgaatcaccaaaaagggccctcgccttcctttggggtccagccttgtggtccccatgactctgcccggggtgggatgatcccacatcctcagtcccggggacccttcccaacttgccagctgaagtctgagctggacatgctggttggcaagtgccgggaggaacccttggaaggtgatatgtccagccccaactccacaggcatacaggatcccctgttggggatgctggatgggcgggaggacctcgagagagaggagaagcgtgagcctgaatctgtgtatgaaactgactgccgttgggatggctgcagccaggaatttgactcccaagagcagctggtgcaccacatcaacagcgagcacatccacggggagcggaaggagttcgtgtgccactgggggggctgctccagggagctgaggcccttcaaagcccagtacatgctggtggttcacatgcgcagacacactggcgagaagccacacaagtgcacgtttgaagggtgccggaagtcatactcacgcctcgaaaacctgaagacgcacctgcggtcacacacgggtgagaagccatacatgtgtgagcacgagggctgcagtaaagccttcagcaatgccagtgaccgagccaagcaccagaatcggacccattccaatgagaagccgtatgtatgtaagctccctggctgcaccaaacgctatacagatcctagctcgctgcgaaaacatgtcaagacagtgcatggtcctgacgcccatgtgaccaaacggcaccgtggggatggccccctgcctcgggcaccatccatttctacagtggagcccaagagggagcgggaaggaggtcccatcagggaggaaagcagactgactgtgccagagggtgccatgaagccacagccaagccctggggcccagtcatcctgcagcagtgaccactccccggcagggagtgcagccaatacagacagtggtgtggaaatgactggcaatgcagggggcagcactgaagacctctccagcttggacgagggaccttgcattgctggcactggtctgtccactcttcgccgccttgagaacctcaggctggaccagctacatcaactccggccaatagggacccggggtctcaaactgcccagcttgtcccacaccggtaccactgtgtcccgccgcgtgggccccccagtctctcttgaacgccgcagcagcagctccagcagcatcagctctgcctatactgtcagccgccgctcctccctggcctctcctttcccccctggctccccaccagagaatggagcatcctccctgcctggccttatgcctgcccagcactacctgcttcgggcaagatatgcttcagccagagggggtggtacttcgcccactgcagcatccagcctggatcggataggtggtcttcccatgcctccttggagaagccgagccgagtatccaggatacaaccccaatgcaggggtcacccggagggccagtgacccagcccaggctgctgaccgtcctgctccagctagagtccagaggttcaagagcctgggctgtgtccataccccacccactgtggcagggggaggacagaactttgatccttacctcccaacctctgtctactcaccacagccccccagcatcactgagaatgctgccatggatgctagagggctacaggaagagccagaagttgggacctccatggtgggcagtggtctgaacccctatatggacttcccacctactgatactctgggatatgggggacctgaaggggcagcagctgagccttatggagcgaggggtccaggctctctgcctcttgggcctggtccacccaccaactatggccccaacccctgtccccagcaggcctcatatcctgaccccacccaagaaacatggggtgagttcccttcccactctgggctgtacccaggccccaaggctctaggtggaacctacagccagtgtcctcgacttgaacattatggacaagtgcaagtcaagccagaacaggggtgcccagtggggtctgactccacaggactggcaccctgcctcaatgcccaccccagtgaggggcccccacatccacagcctctcttttcccattacccccagccctctcctccccaatatctccagtcaggcccctatacccagccaccccctgattatcttccttcagaacccaggccttgcctggactttgattcccccacccattccacagggcagctcaaggctcagcttgtgtgtaattatgttcaatctcaacaggagctactgtgggagggtgggggcagggaagatgcccccgcccaggaaccttcctaccagagtcccaagtttctggggggttcccaggttagcccaagccgtgctaaagctccagtgaacacatatggacctggctttggacccaacttgcccaatcacaagtcaggttcctatcccaccccttcaccatgccatgaaaattttgtagtgggggcaaatagggcttcacatagggcagcagcaccacctcgacttctgcccccattgcccacttgctatgggcctctcaaagtgggaggcacaaaccccagctgtggtcatcctgaggtgggcaggctaggagggggtcctgccttgtaccctcctcccgaaggacaggtatgtaaccccctggactctcttgatcttgacaacactcagctggactttgtggctattctggatgagccccaggggctgagtcctcctccttcccatgatcagcggggcagctctggacataccccacctccctctgggccccccaacatggctgtgggcaacatgagtgtcttactgagatccctacctggggaaacagaattcctcaactctagtgcctagtaatgaactagtccgtaacttgaaagtatttcgatttcttggctttatatatcttgtggaaaggacgagcccactctgtgagcgtttatggg

SEQ ID NO: 2983 - DNA, 1232 bp, Homo sapiens
  source 1..1232: mol_type = genomic DNA
accgccaccatggcagccctaggggacattcaggagtccccttctgtcccgtcccctgtcagtctctcatcaccggggacacctggaacccagcaccacgagcctcagcttcacctccatgggcatcaacatggctcccctggctccagccctaaggtgctctcccagccgtccgacctggatctccaagacgtagaggaagtggagatcggcagagacaccttctggcccgactccgagcccaagccggagcaggctccacgctctcctggctctcaggcccctgacgagggggcgggcggggcgctgcgcagcctcctgaggagccttccccgcagggcccggtgcagcgccggcttcgggcctgaatccagcgcggagcggccggcgggccagccgcctggggccgtcccttgcgcccagccgcggggcgcctggcgcgtgacgctcgtgcagcaagcagcggccgggcccgagggtgcgcccgagcgggctgccgagctgggagtcaacttcggtcggagccggcagggcagcgcgcggggggccaagccgcacaggtgcgaggcctgcggcaagagtttcaagtataactcgctgctcctgaagcaccagcgcatccacacgggcgagaagccctacgcctgccacgagtgcggcaagcgcttccgcggctggtcgggcttcatccagcaccaccgcatccacacgggcgagaagccctacgagtgcggccagtgcggccgcgccttcagccacagctcgcacttcacgcagcacctgcgcatccacaacggcgagaagccctacaagtgcggcgagtgcggccaggccttcagccagagctccaacctggtgcgccaccagcggctgcacacgggtgagaagccctacgcctgcagccagtgcggcaaggccttcatctggagctccgtgctcatcgagcaccagcgcatccacactggcgagaagccctacgagtgctccgactgcggcaaagccttccgcggccgctcgcacttcttccggcacctgcggacccacacgggcgagaagcccttcgcgtgtggcgcctgcggcaaggccttcggccagagctcccagctcatccagcaccagcgggtgcactaccgcgagtagtaatgaactagtccgtaacttgaaagtatttcgatttcttggctttatatatcttgtggaaaggacgattgcgaaatgagccgacaacagag

SEQ ID NO: 2984 - DNA, 1394 bp, Homo sapiens
  source 1..1394: mol_type = genomic DNA
accgccaccatggccgccaacatgtacagggtcggagactacgtctactttgagaactcctccagcaacccatacctgatccggagaatcgaggagctcaacaagacggccaatgggaacgtggaggccaaagtggtgtgcttctaccggaggcgggacatctccagcaccctcatcgccctggccgacaagcacgcaaccctgtcagtctgctataaggccggaccgggggcggacaacggcgaggaaggggaaatagaagaggaaatggagaacccggaaatggtggacctgcccgagaaactaaagcaccagctgcggcatcgggagctgttcctctcccggcagctggagtctctgcccgccacgcacatcaggggcaagtgcagcgtcaccctgctcaacgagaccgagtcgctcaagtcctacctggagcgggaggatttcttcttctattctctagtctacgacccacagcagaagaccctgctggcagataaaggagagattcgagtaggaaaccggtaccaggcagacatcaccgacttgttaaaagaaggcgaggaggatggccgagaccagtccaggttggagacccaggtgtgggaggcgcacaacccactcacagacaagcagatcgaccagttcctggtggtggcccgctctgtgggcaccttcgcacgggccctggactgcagcagctccgtccgacagcccagcctgcacatgagcgccgcagctgcctcccgagacatcaccctgttccacgccatggatactctccacaagaacatctacgacatctccaaggccatctcggcgctggtgccgcagggcgggcccgtgctctgcagggacgagatggaggagtggtctgcatcagaggccaaccttttcgaggaagccctggaaaaatatgggaaggatttcacggacattcagcaagattttctcccgtggaagtcgctgaccagcatcattgagtactactacatgtggaagaccaccgacagatacgtgcagcagaaacgcttgaaagcagctgaagctgagagcaagttaaagcaagtttatattcccaactataacaagccaaatccgaaccaaatcagcgtcaacaacgtcaaggccggtgtggtgaacggcacgggggcgccgggccagagccctggggctggccgggcctgcgagagctgttacatgtcgtctctgcgcatcttgttggacatattggaagaaatatggtggcttgaaaatgccaacccggttagatggagagaggccaggaccaaaccgcagtagtaatgaactagtccgtaacttgaaagtatttcgatttcttggctttatatatcttgtggaaaggacgatttccaaggagcgcgccaacggtg

SEQ ID NO: 2985 - DNA, 2249 bp, Homo sapiens
  source 1..2249: mol_type = genomic DNA
accgccaccatggccgccaacatgtacagggtcggagactacgtctactttgagaactcctccagcaacccatacctgatccggagaatcgaggagctcaacaagacggccaatgggaacgtggaggccaaagtggtgtgcttctaccggaggcgggacatctccagcaccctcatcgccctggccgacaagcacgcaaccctgtcagtctgctataaggccggaccgggggcggacaacggcgaggaaggggaaatagaagaggaaatggagaacccggaaatggtggacctgcccgagaaactaaagcaccagctgcggcatcgggagctgttcctctcccggcagctggagtctctgcccgccacgcacatcaggggcaagtgcagcgtcaccctgctcaacgagaccgagtcgctcaagtcctacctggagcgggaggatttcttcttctattctctagtctacgacccacagcagaagaccctgctggcagataaaggagagattcgagtaggaaaccggtaccaggcagacatcaccgacttgttaaaagaaggcgaggaggatggccgagaccagtccaggttggagacccaggtgtgggaggcgcacaacccactcacagacaagcagatcgaccagttcctggtggtggcccgctctgtgggcaccttcgcacgggccctggactgcagcagctccgtccgacagcccagcctgcacatgagcgccgcagctgcctcccgagacatcaccctgttccacgccatggatactctccacaagaacatctacgacatctccaaggccatctcggcgctggtgccgcagggcgggcccgtgctctgcagggacgagatggaggagtggtctgcatcagaggccaaccttttcgaggaagccctggaaaaatatgggaaggatttcacggacattcagcaagattttctcccgtggaagtcgctgaccagcatcattgagtactactacatgtggaagaccaccgacagatacgtgcagcagaaacgcttgaaagcagctgaagctgagagcaagttaaagcaagtttatattcccaactataacaagccaaatccgaaccaaatcagcgtcaacaacgtcaaggccggtgtggtgaacggcacgggggcgccgggccagagccctggggctggccgggcctgcgagagctgttacaccacacagtcttaccagtggtattcttggggtccccctaacatgcagtgtcgtctctgcgcatcttgttggacatattggaagaaatatggtggcttgaaaatgccaacccggttagatggagagaggccaggaccaaaccgcagtaacatgagtccccacggcctcccagcccggagcagcgggagccccaagtttgccatgaagaccaggcaggctttctatctgcacacgacgaagctgacgcggatcgcccggcgcctgtgccgtgagatcctgcgcccgtggcacgctgcgcggcacccctacctgcccatcaacagcgcggccatcaaggccgagtgcacggcgcggctgcccgaagcctcccagagcccgctggtgctgaagcaggcggtacgcaagccgctggaagccgtgcttcggtatcttgagacccacccccgcccccccaagcctgaccccgtgaaaagcgtgtccagcgtgctcagcagcctgacgcccgccaaggtggcccccgtcatcaacaacggctcccccaccatcctgggcaagcgcagctacgagcagcacaacggggtggacggcaacatgaagaagcgcctcttgatgcccagtaggggtctggcaaaccacggacaggccaggcacatgggaccaagccggaacctcctgctcaacgggaagtcctaccccaccaaagtgcgcctgatccgggggggctccctgcccccagtcaagcggcggcggatgaactggatcgacgccccggatgacgtgttctacatggccacagaggagaccaggaagatccgcaagctgctctcatcctcggaaaccaagcgtgctgcccgccggccctacaagcccatcgccctgcgccagagccaggccctgccgccgcggccaccgccacctgcgcccgtcaacgacgagcccatcgtcatcgaggactagtaatgaactagtccgtaacttgaaagtatttcgatttcttggctttatatatcttgtggaaaggacgacgatattccaactgcgaaagtcga

SEQ ID NO: 2986 - DNA, 1589 bp, Homo sapiens
  source 1..1589: mol_type = genomic DNA
accgccaccatggagatgaaggtctgggacccagacaaccctctcacagaccggcagatcgaccagtttcttgtggtggcccgagctgtgggaacctttgcaagagccctagattgtagcagctccattcggcagccaagcttgcacatgagtgcagctgctgcctcccgagatatcactctgtttcacgccatggataccttgcaaaggaacggctacgacctggctaaggccatgtcgaccctggtaccccagggaggcccggtgctgtgtcgggatgagatggaggaatggtcagcctcagaggccatgctatttgaggaggccctagagaagtatgggaaggacttcaatgatattcgccaggattttctaccctggaagtcacttgccagcatagtccagttttattacatgtggaaaaccacagaccggtatattcagcagaaaaggttgaaagctgctgaagcagacagcaaactgaaacaggtctacattcccacctacactaagccaaaccctaaccagatcatttctgtgggttcaaaacctggcatgaatggggctggatttcagaagggcctgacttgtgagagttgccacaccacacagtctgctcagtggtatgcctggggcccacctaacatgcagtgccgcctctgtgcttcctgttggatctactggaagaagtatgggggactgaagaccccaactcagcttgagggggccactcggggcaccacggagccacactcaaggggtcatttatccagacctgaagctcaaagtctctctccttacacaaccagcgccaacagggccaagctactggctaagaacagacaaactttcctgcttcagaccacaaagctgacccgtcttgccagacgcatgtgcagggacctattacagccaaggagggccgcccgacggccttatgctcctatcaatgccaatgccatcaaagcagagtgctccattcgacttcctaaggccgccaagactccattgaagattcaccctctggtgcggctgcccctggcaactatcgtcaaagatctggtggcccaggcacccctgaaaccaaaaacacctcggggtaccaagacaccgatcaacagaaaccagctgtcccagaaccggggactggggggcattatggtgaaacgggcctatgagactatggcaggggcaggggttcctttctctgccaatggaaggcctctggcttcagggattcgttcaagctcacagccagcagccaagcgtcagaaactaaacccagctgatgcccccaatcctgtggtgtttgtggccacaaaggataccagggccctacggaaggctctgacccatctggaaatgcggcgagctgctcgccgacccaacttgcccctgaaggtgaagccaacgctgattgcagtgcggccccctgtccctctacctgcaccctcacatcctgccagcaccaatgagcctattgtcctggaggactagtaatgaactagtccgtaacttgaaagtatttcgatttcttggctttatatatcttgtggaaaggacgatctatacctgcttggcgccaacac

SEQ ID NO: 2987 - DNA, 2108 bp, Homo sapiens
  source 1..2108: mol_type = genomic DNA
accgccaccatggcggccaacatgtaccgggtgggagattacgtctattttgagaactcttccagcaatccttacctggttagacggattgaggagctcaacaagactgcaaatggaaatgtggaggcaaaggttgtctgtcttttccggcgcagggacatttctagtagcctcaacagcctggctgatagtaatgccagggagtttgaagaggaatcaaagcagccaggggtgtctgagcagcagcgccatcaactgaagcaccgggaactttttctttctcggcaatttgaatcattaccagccacccacatacgggggaaatgcagtgtgaccctcttgaatgagacagatatcttgagccagtacctggaaaaggaggactgctttttttactcactggtgtttgaccccgtgcagaagacacttctcgctgatcagggcgagattagagttggttgcaaataccaagctgagatcccagatcgcctagtagagggagaatctgataatcggaaccagcagaagatggagatgaaggtctgggacccagacaaccctctcacagaccggcagatcgaccagtttcttgtggtggcccgagctgtgggaacctttgcaagagccctagattgtagcagctccattcggcagccaagcttgcacatgagtgcagctgctgcctcccgagatatcactctgtttcacgccatggataccttgcaaaggaacggctacgacctggctaaggccatgtcgaccctggtaccccagggaggcccggtgctgtgtcgggatgagatggaggaatggtcagcctcagaggccatgctatttgaggaggccctagagaagtatgggaaggacttcaatgatattcgccaggattttctaccctggaagtcacttgccagcatagtccagttttattacatgtggaaaaccacagaccggtatattcagcagaaaaggttgaaagctgctgaagcagacagcaaactgaaacaggtctacattcccacctacactaagccaaaccctaaccagatcatttctgtgggttcaaaacctggcatgaatggggctggatttcagaagggcctgacttgtgagagttgccacaccacacagtctgctcagtggtatgcctggggcccacctaacatgcagtgccgcctctgtgcttcctgttggatctactggaagaagtatgggggactgaagaccccaactcagcttgagggggccactcggggcaccacggagccacactcaaggggtcatttatccagacctgaagctcaaagtctctctccttacacaaccagcgccaacagggccaagctactggctaagaacagacaaactttcctgcttcagaccacaaagctgacccgtcttgccagacgcatgtgcagggacctattacagccaaggagggccgcccgacggccttatgctcctatcaatgccaatgccatcaaagcagagtgctccattcgacttcctaaggccgccaagactccattgaagattcaccctctggtgcggctgcccctggcaactatcgtcaaagatctggtggcccaggcacccctgaaaccaaaaacacctcggggtaccaagacaccgatcaacagaaaccagctgtcccagaaccggggactggggggcattatggtgaaacgggcctatgagactatggcaggggcaggggttcctttctctgccaatggaaggcctctggcttcagggattcgttcaagctcacagccagcagccaagcgtcagaaactaaacccagctgatgcccccaatcctgtggtgtttgtggccacaaaggataccagggccctacggaaggctctgacccatctggaaatgcggcgagctgctcgccgacccaacttgcccctgaaggtgaagccaacgctgattgcagtgcggccccctgtccctctacctgcaccctcacatcctgccagcaccaatgagcctattgtcctggaggactagtaatgaactagtccgtaacttgaaagtatttcgatttcttggctttatatatcttgtggaaaggacgaaaagatgaggaatccgctcacgaa

SEQ ID NO: 2988 - DNA, 1715 bp, Homo sapiens
  source 1..1715: mol_type = genomic DNA
accgccaccatgctcgcagataagcatgctaaagaaattgaggaagaatctgaaacaacagttgaggctgacttgaccgataagcagaaacatcagttgaaacatagggaactctttttgtcacgccagtatgaatctctgcccgcaacacatatcaggggaaagtgcagtgttgcccttctgaatgagacagaatcagtattgtcatatcttgataaggaggataccttcttctactcattggtctatgacccctcattgaaaacactattagctgacaaaggtgaaatcagagtgggacctagatatcaagcagacattccagaaatgctgttagaaggagaatcagatgagagggaacaatcaaaattggaagttaaagtttgggatccaaatagcccacttacggatcgacagattgaccagtttttagttgtagcacgtgctgttgggacattcgccagagccctggattgcagcagttctgtgaggcagcctagtttgcatatgagtgctgctgcagcttcccgagacatcaccttgtttcacgctatggatacattgtatagacacagctatgatttgagcagtgccattagtgtcttagtaccactcggaggacctgttttatgcagagatgaaatggaggaatggtcagcctctgaagctagcttatttgaagaggcactggaaaaatatggcaaagacttcaatgacatacggcaagattttcttccttggaaatcattgactagcatcattgaatattattacatgtggaaaactactgacagatatgtgcaacagaaacgtctaaaagcagcagaagctgagagtaaactgaaacaagtatatatcccaacctacaaaccaaatcccaaccaaatatccactagtaatgggaagcctggtgctgtgaatggagctgtggggaccacgttccagcctcagaatcctctcttagggagagcctgtgagagctgctatgctacacagtctcaccagtggtattcttggggcccacctaatatgcagtgtagattatgtgcaatttgttggctttattggaaaaaatatggaggcttgaaaatgcccacccagtcagaagaagagaagttatctcctagcccaactacagaggaccctcgtgttagaagtcacgtgtcccgccaggccatgcagggaatgccagtccgaaacactgggagtccaaagtctgcagtgaagacccgccaagctttcttccttcatactacatatttcacaaaatttgctcgtcaggtctgcaaaaataccctccggctgcggcaggcagcaagacggccgtttgttgctattaattatgctgccattagggcagaatatgcagacagacatgctgaactatctggaagtccactgaaaagcaaaagcactaggaagcctttggcatgtatcattgggtatttagagatccatcctgcaaagaaacctaatgtaattcgatctacaccaagcctgcaaaccccaactaccaagcggatgctaacaactccaaatcacacatctctgagcattctggggaaaagaaactacagtcatcacaatggtctggatgaactcacgtgctgtgtgtcagactagtaatgaactagtccgtaacttgaaagtatttcgatttcttggctttatatatcttgtggaaaggacgagaagtgcatgaactgagcggtgtt

SEQ ID NO: 2989 - DNA, 1649 bp, Homo sapiens
  source 1..1649: mol_type = genomic DNA
accgccaccatggcggccaacatgtaccgggtcggagattatgtctactttgagaattcctccagcaacccatacctaataagaaggatagaagaactcaacaagactgcaagtggcaacgtggaagcaaaagtagtatgcttttatagacgacgtgatatttccaacacacttataatgctcgcagataagcatgctaaagaaattgaggaagaatctgaaacaacagttgaggctgacttgaccgataagcagaaacatcagttgaaacatagggaactctttttgtcacgccagtatgaatctctgcccgcaacacatatcaggggaaagtgcagtgttgcccttctgaatgagacagaatcagtattgtcatatcttgataaggaggataccttcttctactcattggtctatgacccctcattgaaaacactattagctgacaaaggtgaaatcagagtgggacctagatatcaagcagacattccagaaatgctgttagaaggagaatcagatgagagggaacaatcaaaattggaagttaaagtttgggatccaaatagcccacttacggatcgacagattgaccagtttttagttgtagcacgtgctgttgggacattcgccagagccctggattgcagcagttctgtgaggcagcctagtttgcatatgagtgctgctgcagcttcccgagacatcaccttgtttcacgctatggatacattgtatagacacagctatgatttgagcagtgccattagtgtcttagtaccactcggaggacctgttttatgcagagatgaaatggaggaatggtcagcctctgaagctagcttatttgaagaggcactggaaaaatatggcaaagacttcaatgacatacggcaagattttcttccttggaaatcattgactagcatcattgaatattattacatgtggaaaactactgacagatatgtgcaacagaaacgtctaaaagcagcagaagctgagagtaaactgaaacaagtatatatcccaacctacagcaaaccaaatcccaaccaaatatccactagtaatgggaagcctggtgctgtgaatggagctgtggggaccacgttccagcctcagaatcctctcttagggagagcctgtgagagctgctatgctacacagtctcaccagtggtattcttggggcccacctaatatgcagtgtagattatgtgcaatttgttggctttattggaaaaaatatggaggcttgaaaatgcccacccagtcagaagaagagaagttatctcctagcccaactacagaggaccctcgtgttagaagtcacgtgtcccgccaggccatgcagggaatgccagtccgaaacactgggagtccaaagtctgcagtgaagacccgccaagctttcttccttcatactacatatttcacaaaatttgctcgtcaggtctgcaaaaataccctccggctgcggcaggcagcaagacggccgtttgttgctattaattatgctgccattagggcagaatgtaagatgcttttaaattcttagtaatgaactagtccgtaacttgaaagtatttcgatttcttggctttatatatcttgtggaaaggacgagtcttgcaggtcttgaagtgggac

SEQ ID NO: 2990 - DNA, 1886 bp, Homo sapiens
  source 1..1886: mol_type = genomic DNA
accgccaccatggcggccaacatgtaccgggtcggagattatgtctactttgagaattcctccagcaacccatacctaataagaaggatagaagaactcaacaagactgcaagtggcaacgtggaagcaaaagtagtatgcttttatagacgacgtgatatttccaacacacttataatgctcgcagataagcatgctaaagaaattgaggaagaatctgaaacaacagttgaggctgacttgaccgataagcagaaacatcagttgaaacatagggaactctttttgtcacgccagtatgaatctctgcccgcaacacatatcaggggaaagtgcagtgttgcccttctgaatgagacagaatcagtattgtcatatcttgataaggaggataccttcttctactcattggtctatgacccctcattgaaaacactattagctgacaaaggtgaaatcagagtgggacctagatatcaagcagacattccagaaatgctgttagaaggagaatcagatgagagggaacaatcaaaattggaagttaaagtttgggatccaaatagcccacttacggatcgacagattgaccagtttttagttgtagcacgtgctgttgggacattcgccagagccctggattgcagcagttctgtgaggcagcctagtttgcatatgagtgctgctgcagcttcccgagacatcaccttgtttcacgctatggatacattgtatagacacagctatgatttgagcagtgccattagtgtcttagtaccactcggaggacctgttttatgcagagatgaaatggaggaatggtcagcctctgaagctagcttatttgaagaggcactggaaaaatatggcaaagacttcaatgacatacggcaagattttcttccttggaaatcattgactagcatcattgaatattattacatgtggaaaactactgacagatatgtgcaacagaaacgtctaaaagcagcagaagctgagagtaaactgaaacaagtatatatcccaacctacagcaaaccaaatcccaaccaaatatccactagtaatgggaagcctggtgctgtgaatggagctgtggggaccacgttccagcctcagaatcctctcttagggagagcctgtgagagctgctatgctacacagtctcaccagtggtattcttggggcccacctaatatgcagtgtagattatgtgcaatttgttggctttattggaaaaaatatggaggcttgaaaatgcccacccagtcagaagaagagaagttatctcctagcccaactacagaggaccctcgtgttagaagtcacgtgtcccgccaggccatgcagggaatgccagtccgaaacactgggagtccaaagtctgcagtgaagacccgccaagctttcttccttcatactacatatttcacaaaatttgctcgtcaggtctgcaaaaataccctccggctgcggcaggcagcaagacggccgtttgttgctattaattatgctgccattagggcagaatatgcagacagacatgctgaactatctggaagtccactgaaaagcaaaagcactaggaagcctttggcatgtatcattgggtatttagagatccatcctgcaaagaaacctaatgtaattcgatctacaccaagcctgcaaaccccaactaccaagcggatgctaacaactccaaatcacacatctctgagcattctggggaaaagaaactacagtcatcacaatggtctggatgaactcacgtgctgtgtgtcagactagtaatgaactagtccgtaacttgaaagtatttcgatttcttggctttatatatcttgtggaaaggacgatcaaaggctcaacacctgataggt

SEQ ID NO: 2991 - DNA, 1778 bp, Homo sapiens
  source 1..1778: mol_type = genomic DNA
accgccaccatggcagtgccggcggctttgatccctccgacccagctggtcccccctcaacccccaatctccacgtctgcttcctcctctggcaccaccacctccacctcttcggcgacttcgtctccggctccttccatcggacccccggcgtcctctgggccaactctgttccgcccggagcccatcgcttcggcggcggcggcggcggccacagtcacctctaccggcggcggcggcggcggcggcggcagcggaggcggcggcggcagcagcggcaacggaggcggcggtggcggcggcggcggtggcagcaactgcaaccccaacctggcggccgcgagcaacggcagcggcggcggcggcggcggcatcagcgctggcggcggcgtcgcttccagcacccccatcaacgccagcaccggcagcagcagcagcagcagtagcagcagcagcagcagcagcagtagtagcagcagcagcagtagcagcagcagctgcggccccctccccgggaaacccgtgtactcaaccccgtccccagtggaaaacacccctcagaataatgagtgcaaaatggtggatctgaggggggccaaagtggcttccttcacggtggagggctgcgagctgatctgcctgccccaggctttcgacctgttcctgaagcacttggtggggggcttgcatacggtctacaccaagctgaagcggctggagatcacgccggtggtgtgcaatgtggaacaagttcgcatcctgaggggactgggcgccatccagccaggagtgaaccgctgcaaactcatctccaggaaggacttcgagaccctctacaatgactgcaccaacgcaagttctagacctggaaggcctcctaagaggactcaaagtgtcacctccccagagaactctcacatcatgccgcattctgtccctggtctcatgtctcctgggataattccaccaacaggtctgacagcagccgctgcagcagctgctgctgctaccaatgcagctattgctgaagcaatgaaggtgaaaaaaatcaaattagaagccatgagcaactatcatgccagtaataaccaacatggagcagactctgaaaacggggacatgaattcaagtgtcgatgagaccccgctttctacaccaaccgcaagagacagccttgacaaactctctctaactgggcatggacaaccactgcctccaggttttccatctccttttctgtttcctgatggactgtcttccatcgagactcttctgactaacatacaggggctgttgaaagttgccatagataatgccagagctcaagagaaacaggtccaactggaaaaaactgagctgaagatggattttttaagggaaagagaactaagggaaacacttgagaagcagttggctatggaacaaaagaatagagccatagttcaaaagaggctaaagaaggagaagaaggcaaagagaaaattgcaggaagcacttgagtttgagacgaaacggcgtgaacaagcagaacagacgctaaaacaggcagcttcaacagatagtctcagggtcttaaatgactctctgaccccagagatagaggctgaccgcagtggcggcagaacagatgctgaaaggacaatacaagatggaagactgtatttgaaaactactgtcatgtactagtaatgaactagtccgtaacttgaaagtatttcgatttcttggctttatatatcttgtggaaaggacgacacaaggttagattatagctgcat

SEQ ID NO: 2992 - DNA, 1616 bp, Homo sapiens
  source 1..1616: mol_type = genomic DNA
accgccaccatggcagtgccggcggctttgatccctccgacccagctggtcccccctcaacccccaatctccacgtctgcttcctcctctggcaccaccacctccacctcttcggcgacttcgtctccggctccttccatcggacccccggcgtcctctgggccaactctgttccgcccggagcccatcgcttcggcggcggcggcggcggccacagtcacctctaccggcggcggcggcggcggcggcggcagcggaggcggcggcggcagcagcggcaacggaggcggcggtggcggcggcggcggtggcagcaactgcaaccccaacctggcggccgcgagcaacggcagcggcggcggcggcggcggcatcagcgctggcggcggcgtcgcttccagcacccccatcaacgccagcaccggcagcagcagcagcagcagtagcagcagcagcagcagcagcagtagtagcagcagcagcagtagcagcagcagctgcggccccctccccgggaaacccgtgtactcaaccccgtccccagtggaaaacacccctcagaataatgagtgcaaaatggtggatctgaggggggccaaagtggcttccttcacggtggagggctgcgagctgatctgcctgccccaggctttcgacctgttcctgaagcacttggtggggggcttgcatacggtctacaccaagctgaagcggctggagatcacgccggtggtgtgcaatgtggaacaagttcgcatcctgaggggactgggcgccatccagccaggagtgaaccgctgcaaactcatctccaggaaggacttcgagaccctctacaatgactgcaccaacgcaagttctagacctggaaggcctcctaagaggactcaaagtgtcacctccccagagaactctcacatcatgccgcattctgtccctggtctcatgtctcctgggataattccaccaacagatgagaccccgctttctacaccaaccgcaagagacagccttgacaaactctctctaactgggcatggacaaccactgcctccaggttttccatctccttttctgtttcctgatggactgtcttccatcgagactcttctgactaacatacaggggctgttgaaagttgccatagataatgccagagctcaagagaaacaggtccaactggaaaaaactgagctgaagatggattttttaagggaaagagaactaagggaaacacttgagaagcagttggctatggaacaaaagaatagagccatagttcaaaagaggctaaagaaggagaagaaggcaaagagaaaattgcaggaagcacttgagtttgagacgaaacggcgtgaacaagcagaacagacgctaaaacaggcagcttcaacagatagtctcagggtcttaaatgactctctgaccccagagatagaggctgaccgcagtggcggcagaacagatgctgaaaggacaatacaagatggaagactgtatttgaaaactactgtcatgtactagtaatgaactagtccgtaacttgaaagtatttcgatttcttggctttatatatcttgtggaaaggacgaatctattgtgactaagccaactta

SEQ ID NO: 2993 - DNA, 2378 bp, Homo sapiens
  source 1..2378: mol_type = genomic DNA
accgccaccatggcagtgccggcggctttgatccctccgacccagctggtcccccctcaacccccaatctccacgtctgcttcctcctctggcaccaccacctccacctcttcggcgacttcgtctccggctccttccatcggacccccggcgtcctctgggccaactctgttccgcccggagcccatcgcttcggcggcggcggcggcggccacagtcacctctaccggcggcggcggcggcggcggcggcagcggaggcggcggcggcagcagcggcaacggaggcggcggtggcggcggcggcggtggcagcaactgcaaccccaacctggcggccgcgagcaacggcagcggcggcggcggcggcggcatcagcgctggcggcggcgtcgcttccagcacccccatcaacgccagcaccggcagcagcagcagcagcagtagcagcagcagcagcagcagcagtagtagcagcagcagcagtagcagcagcagctgcggccccctccccgggaaacccgtgtactcaaccccgtccccagtggaaaacacccctcagaataatgagtgcaaaatggtggatctgaggggggccaaagtggcttccttcacggtggagggctgcgagctgatctgcctgccccaggctttcgacctgttcctgaagcacttggtggggggcttgcatacggtctacaccaagctgaagcggctggagatcacgccggtggtgtgcaatgtggaacaagttcgcatcctgaggggactgggcgccatccagccaggagtgaaccgctgcaaactcatctccaggaaggacttcgagaccctctacaatgactgcaccaacgcaagttctagacctggaaggcctcctaagaggactcaaagtgtcacctccccagagaactctcacatcatgccgcattctgtccctggtctcatgtctcctgggataattccaccaacaggtctgacagcagccgctgcagcagctgctgctgctaccaatgcagctattgctgaagcaatgaaggtgaaaaaaatcaaattagaagccatgagcaactatcatgccagtaataaccaacatggagcagactctgaaaacggggacatgaattcaagtgtcggcagcagtgatggttcctgggataaggaaacactgccctcttccccatcccagggacctcaggcctctataacccacccccgcatgcctggagcacgtagccttccacttagtcatcctctcaaccatcttcagcagagccaccttctgccaaatggactggaacttccttttatgatgatgccccaccctctaattcctgtcagcctacctccagcatctgtcaccatggcaatgagccagatgaaccacctcagcaccattgcaaatatggcagcagcagcacaagttcagagtcccccatccagagttgagacatcagttattaaggagcgtgttcctgatagcccctcacctgccccctctctggaggaggggagaaggcctggcagtcacccatcatcacatcgcagcagcagcgtgtccagctcccctgctcggactgagagctcttctgacagaatcccggtccatcagaatgggttgtccatgaaccagatgctgatgggcttatcaccaaatgtacttcctgggcccaaagagggagatttggccggtcatgacatgggacatgagtcaaaaaggatgcatattgaaaaagatgagaccccgctttctacaccaaccgcaagagacagccttgacaaactctctctaactgggcatggacaaccactgcctccaggttttccatctccttttctgtttcctgatggactgtcttccatcgagactcttctgactaacatacaggggctgttgaaagttgccatagataatgccagagctcaagagaaacaggtccaactggaaaaaactgagctgaagatggattttttaagggaaagagaactaagggaaacacttgagaagcagttggctatggaacaaaagaatagagccatagttcaaaagaggctaaagaaggagaagaaggcaaagagaaaattgcaggaagcacttgagtttgagacgaaacggcgtgaacaagcagaacagacgctaaaacaggcagcttcaacagatagtctcagggtcttaaatgactctctgaccccagagatagaggctgaccgcagtggcggcagaacagatgctgaaaggacaatacaagatggaagactgtatttgaaaactactgtcatgtactagtaatgaactagtccgtaacttgaaagtatttcgatttcttggctttatatatcttgtggaaaggacgatatagacagtcccgcctttcaatg

SEQ ID NO: 2994 - DNA, 2222 bp, Homo sapiens
  source 1..2222: mol_type = genomic DNA
accgccaccatggcagtgccggcggctttgatccctccgacccagctggtcccccctcaacccccaatctccacgtctgcttcctcctctggcaccaccacctccacctcttcggcgacttcgtctccggctccttccatcggacccccggcgtcctctgggccaactctgttccgcccggagcccatcgcttcggcggcggcggcggcggccacagtcacctctaccggcggcggcggcggcggcggcggcagcggaggcggcggcggcagcagcggcaacggaggcggcggtggcggcggcggcggtggcagcaactgcaaccccaacctggcggccgcgagcaacggcagcggcggcggcggcggcggcatcagcgctggcggcggcgtcgcttccagcacccccatcaacgccagcaccggcagcagcagcagcagcagtagcagcagcagcagcagcagcagtagtagcagcagcagcagtagcagcagcagctgcggccccctccccgggaaacccgtgtactcaaccccgtccccagtggaaaacacccctcagaataatgagtgcaaaatggtggatctgaggggggccaaagtggcttccttcacggtggagggctgcgagctgatctgcctgccccaggctttcgacctgttcctgaagcacttggtggggggcttgcatacggtctacaccaagctgaagcggctggagatcacgccggtggtgtgcaatgtggaacaagttcgcatcctgaggggactgggcgccatccagccaggagtgaaccgctgcaaactcatctccaggaaggacttcgagaccctctacaatgactgcaccaacgcaagttctagacctggaaggcctcctaagaggactcaaagtgtcacctccccagagaactctcacatcatgccgcattctgtccctggtctcatgtctcctgggataattccaccaacaggtctgacagcagccgctgcagcagctgctgctgctaccaatgcagctattgctgaagcaatgaaggtgaaaaaaatcaaattagaagccatgagcaactatcatgccagtaataaccaacatggagcagactctgaaaacggggacatgaattcaagtgtcggactggaacttccttttatgatgatgccccaccctctaattcctgtcagcctacctccagcatctgtcaccatggcaatgagccagatgaaccacctcagcaccattgcaaatatggcagcagcagcacaagttcagagtcccccatccagagttgagacatcagttattaaggagcgtgttcctgatagcccctcacctgccccctctctggaggaggggagaaggcctggcagtcacccatcatcacatcgcagcagcagcgtgtccagctcccctgctcggactgagagctcttctgacagaatcccggtccatcagaatgggttgtccatgaaccagatgctgatgggcttatcaccaaatgtacttcctgggcccaaagagggagatttggccggtcatgacatgggacatgagtcaaaaaggatgcatattgaaaaagatgagaccccgctttctacaccaaccgcaagagacagccttgacaaactctctctaactgggcatggacaaccactgcctccaggttttccatctccttttctgtttcctgatggactgtcttccatcgagactcttctgactaacatacaggggctgttgaaagttgccatagataatgccagagctcaagagaaacaggtccaactggaaaaaactgagctgaagatggattttttaagggaaagagaactaagggaaacacttgagaagcagttggctatggaacaaaagaatagagccatagttcaaaagaggctaaagaaggagaagaaggcaaagagaaaattgcaggaagcacttgagtttgagacgaaacggcgtgaacaagcagaacagacgctaaaacaggcagcttcaacagatagtctcagggtcttaaatgactctctgaccccagagatagaggctgaccgcagtggcggcagaacagatgctgaaaggacaatacaagatggaagactgtatttgaaaactactgtcatgtactagtaatgaactagtccgtaacttgaaagtatttcgatttcttggctttatatatcttgtggaaaggacgaggcttatagtcgtaggcgggtgcc

SEQ ID NO: 2995 - DNA, 1901 bp, Homo sapiens
  source 1..1901: mol_type = genomic DNA
accgccaccatggctgtctccgcatctccagtgatctctgcaacttccagcggcgccggcgtcccggggggcttattccgggccgaacccctgtactcgactcccagagagccccctcgtcttactcctaatatgatcaatagtttcgtggttaataaccacagcaacagtgccggaggcggcggcaggggcaacaccaacaccaacgagtgccgcatggtcgacatgcacgggatgaaggtggcttcgttcctgatggacggccaggaactgatctgcctgccgcaagtctttgatctttttctcaagcacctggtgggaggcttgcacactgtgtacaccaagctgaagagactggatatatcccccgtggtgtgtactgttgagcaggtccggatcctccgcgggctgggggccatccagcccggggtaaaccgctgcaaactcatcaccaggaaagacttcgaaactttgttcaccgattgcaccaatgccagaaggaagaggcaaatgacaagaaaacaagctgttaacagttcaagacccggcaggccccctaagcgttctttgggagtgttgcaggaaaatgcccgccttctgacccatgcagtcccaggcctcttatcgccaggacttatcactccgacaggtataacagctgcagcgatggctgaggcgatgaaacttcagaagatgaagcttatggctatgaacactcttcagggaaatggaagccaaaatgggaccgaatcagagcctgatgatcttaattctaacacaggtggaagtgaatcctcctgggataaagataagatgcagtctccatttgctgcacctggaccccaacatggaattgctcatgcagccctagctggccagccaggcattgggggtgctccaaccctcaatccactgcagcagaaccacctgctaaccaatagactggatctgccatttatgatgatgcctcatcccctacttccagtcagcttacctcctgcatcagttgccatggcaatgaatcagatgaaccatctcaatactattgccaacatggctgctgcagcacagattcacagtccactctccagagctggtacctctgttataaaggagcggatcccagagagtccttctcctgctccttctctagaagagaatcatcgtcctgggagccagacctcttcccacaccagcagcagtgtgtccagctctccctctcagatggatcatcatttggaaagaatggaagaggtaccagttcaaattccaataatgaagtcacccttggacaagatacagctgactcctgggcaggcattgcccgctggattccctggaccattcatttttgctgatagtctgtcctccgtggagactctgttgaccaacattcagggtctgctgaaagttgctttggataatgctcgcatccaggagaagcagattcaacaagaaaagaaggagctgcgactggagctctatagagagagagaaattagagaaaaccttgaaagacaacttgcagttgagcttcaaagcagaactactatgcaaaagcgcctgaagaaggagaaaaaaaccaagagaaaattgcaggaagccttggaatttgaatcaaagcgccgggagcaagtggagcaggcacttaagcaagccaccactagtgacagtggcctgaggatgttaaaagatactggaattccagatattgaaatagaaaacaatgggactcctcatgatagtgctgctatgcaaggaggtaactattactgtttagaaatggcacaacagttgtattcagcctagtaatgaactagtccgtaacttgaaagtatttcgatttcttggctttatatatcttgtggaaaggacgacgttactaccgatgttctattggc

SEQ ID NO: 2996 - DNA, 1400 bp, Homo sapiens
  source 1..1400: mol_type = genomic DNA
accgccaccatgacaagaaaacaagctgttaacagttcaagacccggcaggccccctaagcgttctttgggagtgttgcaggaaaatgcccgccttctgacccatgcagtcccaggcctcttatcgccaggacttatcactccgacaggtataacagctgcagcgatggctgaggcgatgaaacttcagaagatgaagcttatggctatgaacactcttcagggaaatggaagccaaaatgggaccgaatcagagcctgatgatcttaattctaacacaggtggaagtgaatcctcctgggataaagataagatgcagtctccatttgctgcacctggaccccaacatggaattgctcatgcagccctagctggccagccaggcattgggggtgctccaaccctcaatccactgcagcagaaccacctgctaaccaatagactggatctgccatttatgatgatgcctcatcccctacttccagtcagcttacctcctgcatcagttgccatggcaatgaatcagatgaaccatctcaatactattgccaacatggctgctgcagcacagattcacagtccactctccagagctggtacctctgttataaaggagcggatcccagagagtccttctcctgctccttctctagaagagaatcatcgtcctgggagccagacctcttcccacaccagcagcagtgtgtccagctctccctctcagatggatcatcatttggaaagaatggaagaggtaccagttcaaattccaataatgaagtcacccttggacaagatacagctgactcctgggcaggcattgcccgctggattccctggaccattcatttttgctgatagtctgtcctccgtggagactctgttgaccaacattcagggtctgctgaaagttgctttggataatgctcgcatccaggagaagcagattcaacaagaaaagaaggagctgcgactggagctctatagagagagagaaattagagaaaaccttgaaagacaacttgcagttgagcttcaaagcagaactactatgcaaaagcgcctgaagaaggagaaaaaaaccaagagaaaattgcaggaagccttggaatttgaatcaaagcgccgggagcaagtggagcaggcacttaagcaagccaccactagtgacagtggcctgaggatgttaaaagatactggaattccagatattgaaatagaaaacaatgggactcctcatgatagtgctgctatgcaaggaggtaactattactgtttagaaatggcacaacagttgtattcagcctagtaatgaactagtccgtaacttgaaagtatttcgatttcttggctttatatatcttgtggaaaggacgagtgcccgatgtgagatccactggc

SEQ ID NO: 2997 - DNA, 1817 bp, Homo sapiens
  source 1..1817: mol_type = genomic DNA
accgccaccatggctgtctccgcatctccagtgatctctgcaacttccagcggcgccggcgtcccggggggcttattccgggccgaacccctgtactcgactcccagagagccccctcgtcttactcctaatatgatcaatagtttcgtggttaataaccacagcaacagtgccggaggcggcggcaggggcaacaccaacaccaacgagtgccgcatggtcgacatgcacgggatgaaggtggcttcgttcctgatggacggccaggaactgatctgcctgccgcaagtctttgatctttttctcaagcacctggtgggaggcttgcacactgtgtacaccaagctgaagagactggatatatcccccgtggtgtgtactgttgagcaggtccggatcctccgcgggctgggggccatccagcccggggtaaaccgctgcaaactcatcaccaggaaagacttcgaaactttgttcaccgattgcaccaatgccagttcaagacccggcaggccccctaagcgttctttgggagtgttgcaggaaaatgcccgccttctgacccatgcagtcccaggcctcttatcgccaggacttatcactccgacaggtataacagctgcagcgatggctgaggcgatgaaacttcagaagatgaagcttatggctatgaacactcttcagggaaatggaagccaaaatgggaccgaatcagagcctgatgatcttaattctaacacaggtggaagtgaatcctcctgggataaagataagatgcagtctccatttgctgcacctggaccccaacatggaattgctcatgcagccctagctggccagccaggcattgggggtgctccaaccctcaatccactgcagcagaaccacctgctaaccaatagactggatctgccatttatgatgatgcctcatcccctacttccagtcagcttacctcctgcatcagttgccatggcaatgaatcagatgaaccatctcaatactattgccaacatggctgctgcagcacagattcacagtccactctccagagctggtacctctgttataaaggagcggatcccagagagtccttctcctgctccttctctagaagagaatcatcgtcctgggagccagacctcttcccacaccagcagcagtgtgtccagctctccctctcagatggatcatcatttggaaagaatggaagaggtaccagttcaaattccaataatgaagtcacccttggacaagatacagctgactcctgggcaggcattgcccgctggattccctggaccattcatttttgctgatagtctgtcctccgtggagactctgttgaccaacattcagggtctgctgaaagttgctttggataatgctcgcatccaggagaagcagattcaacaagaaaagaaggagctgcgactggagctctatagagagagagaaattagagaaaaccttgaaagacaacttgcagttgagcttcaaagcagaactactatgcaaaagcgcctgaagaaggagaaaaaaaccaagagaaaattgcaggaagccttggaatttgaatcaaagcgccgggagcaagtggagcaggcacttaagcaagccaccactagtgacagtggcctgaggatgttaaaagatactggaattccagatattgaaatagaaaacaatgggactcctcatgatagtgctgctatgcaagcctagtaatgaactagtccgtaacttgaaagtatttcgatttcttggctttatatatcttgtggaaaggacgattccgtggatcgcacgggcaatta

SEQ ID NO: 2998 - DNA, 1628 bp, Homo sapiens
  source 1..1628: mol_type = genomic DNA
accgccaccatgtattcgtccccgctctgcctcacccaggatgagttccacccgttcatcgaggccctgctgcctcacgtccgcgccttcgcctacacctggttcaacctgcaggcgcggaagcgcaagtacttcaagaagcacgagaagcggatgtcgaaggacgaggagcgtgcggtcaaggacgagctgctgggcgagaagcccgaggtcaagcagaagtgggcgtcgcggctgctggccaagctgcgcaaggacatccggcccgagtgccgcgaggacttcgtgctgagcatcaccggcaagaaggcgccgggctgcgtgctctccaaccccgaccagaagggcaagatgcggcgcatcgactgtctccggcaggcggacaaggtgtggcggctggacctggtcatggtcatcctgttcaagggcatcccgctggagagcaccgacggcgagcgcctggtcaaggctgcgcagtgcggtcacccggtcctgtgcgtgcagccgcaccacattggcgtggccgtcaaggagctggacctctacctggcctacttcgtgcgtgagcgagatgcagagcaaagcggcagtccccggacagggatgggctctgaccaggaggacagcaagcccatcacgctggacacgaccgacttccaggagagctttgtcacctccggcgtgttcagcgtcactgagctcatccaagtgtcccggacacccgtggtgactggaacaggacccaacttctccctgggggagctgcaggggcacctggcatacgacctgaacccagccagcactggcctcagaagaacgctgcccagcacctcctccagtgggagcaagcggcacaaatcgggctcgatggaggaagacgtggacacgagccctggcggcgattactacacttcgcccagctcgcccacgagtagcagccgcaactggacggaggacatggaaggaggcatctcgtccccggtgaagaagacagagatggacaagtcaccattcaacagcccgtccccccaggactctccccgcctctccagcttcacccagcaccaccggcccgtcatcgccgtgcacagcgggatcgcccggagcccacacccgtcctccgctctgcatttccctacgacgtccatcctaccccagacggcctccacctacttcccccacacggccatccgctacccacctcatctcaacccccaggacccgctcaaagatcttgtctcgctggcctgcgacccagccagccagcaacctggaccgttaaatggaagtggtcagctcaaaatgcccagccactgcctttctgctcagatgctggcacctccgcccccggggctgccacggctggcgctcccccctgccaccaaacccgccaccacctccgagggaggagccacgtcgccgacctcgccttcctactctccgcccgacacgtcccctgcaaaccgttcctttgtgggattaggaccaagggatcctgcgggcatttatcaggcacagtcctggtatctgggatagtaatgaactagtccgtaacttgaaagtatttcgatttcttggctttatatatcttgtggaaaggacgagttcaaagatcagagtaattgtag

SEQ ID NO: 2999 - DNA, 1421 bp, Homo sapiens
  source 1..1421: mol_type = genomic DNA
accgccaccatgtattcgtccccgctctgcctcacccaggatgagttccacccgttcatcgaggccctgctgcctcacgtccgcgccttcgcctacacctggttcaacctgcaggcgcggaagcgcaagtacttcaagaagcacgagaagcggatgtcgaaggacgaggagcgtgcggtcaaggacgagctgctgggcgagaagcccgaggtcaagcagaagtgggcgtcgcggctgctggccaagctgcgcaaggacatccggcccgagtgccgcgaggacttcgtgctgagcatcaccggcaagaaggcgccgggctgcgtgctctccaaccccgaccagaagggcaagatgcggcgcatcgactgtctccggcaggcggacaaggtgtggcggctggacctggtcatggtcatcctgttcaagggcatcccgctggagagcaccgacggcgagcgcctggtcaaggctgcgcagtgcggtcacccggtcctgtgcgtgcagccgcaccacattggcgtggccgtcaaggagctggacctctacctggcctacttcgtgcgtgagcgagatgcagagcaaagcggcagtccccggacagggatgggctctgaccaggaggacagcaagcccatcacgctggacacgaccgacttccaggagagctttgtcacctccggcgtgttcagcgtcactgagctcatccaagtgtcccggacacccgtggtgactggaacaggacccaacttctccctgggggagctgcaggggcacctggcatacgacctgaacccagccagcactggcctcagaagaacgctgcccagcacctcctccagtgggagcaagcggcacaaatcgggctcgatggaggaagacgtggacacgagccctggcggcgattactacacttcgcccagctcgcccacgagtagcagccgcaactggacggaggacatggaaggaggcatctcgtccccggtgaagaagacagagatggacaagtcaccattcaacagcccgtccccccaggactctccccgcctctccagcttcacccagcaccaccggcccgtcatcgccgtgcacagcgggatcgcccggagcccacacccgtcctccgctctgcatttccctacgacgtccatcctaccccagacggcctccacctacttcccccacacggccatccgctacccacctcatctcaacccccaggacccgctcaaagatcttgtctcgctggcctgcgacccagccagccagcaacctggaccgcctactctccgcccgacacgtcccctgcaaaccgttcctttgtgggattagtaatgaactagtccgtaacttgaaagtatttcgatttcttggctttatatatcttgtggaaaggacgaattggattgatgatactctctatt

SEQ ID NO: 3000 - DNA, 1394 bp, Homo sapiens
  source 1..1394: mol_type = genomic DNA
accgccaccatggatgagttccacccgttcatcgaggccctgctgcctcacgtccgcgccttcgcctacacctggttcaacctgcaggcgcggaagcgcaagtacttcaagaagcacgagaagcggatgtcgaaggacgaggagcgtgcggtcaaggacgagctgctgggcgagaagcccgaggtcaagcagaagtgggcgtcgcggctgctggccaagctgcgcaaggacatccggcccgagtgccgcgaggacttcgtgctgagcatcaccggcaagaaggcgccgggctgcgtgctctccaaccccgaccagaagggcaagatgcggcgcatcgactgtctccggcaggcggacaaggtgtggcggctggacctggtcatggtcatcctgttcaagggcatcccgctggagagcaccgacggcgagcgcctggtcaaggctgcgcagtgcggtcacccggtcctgtgcgtgcagccgcaccacattggcgtggccgtcaaggagctggacctctacctggcctacttcgtgcgtgagcgagatgcagagcaaagcggcagtccccggacagggatgggctctgaccaggaggacagcaagcccatcacgctggacacgaccgacttccaggagagctttgtcacctccggcgtgttcagcgtcactgagctcatccaagtgtcccggacacccgtggtgactggaacaggacccaacttctccctgggggagctgcaggggcacctggcatacgacctgaacccagccagcactggcctcagaagaacgctgcccagcacctcctccagtgggagcaagcggcacaaatcgggctcgatggaggaagacgtggacacgagccctggcggcgattactacacttcgcccagctcgcccacgagtagcagccgcaactggacggaggacatggaaggaggcatctcgtccccggtgaagaagacagagatggacaagtcaccattcaacagcccgtccccccaggactctccccgcctctccagcttcacccagcaccaccggcccgtcatcgccgtgcacagcgggatcgcccggagcccacacccgtcctccgctctgcatttccctacgacgtccatcctaccccagacggcctccacctacttcccccacacggccatccgctacccacctcatctcaacccccaggacccgctcaaagatcttgtctcgctggcctgcgacccagccagccagcaacctggaccgcctactctccgcccgacacgtcccctgcaaaccgttcctttgtgggattagtaatgaactagtccgtaacttgaaagtatttcgatttcttggctttatatatcttgtggaaaggacgaaccgtacactatgtaacggatatg

SEQ ID NO: 3001 - DNA, 1388 bp, Homo sapiens
  source 1..1388: mol_type = genomic DNA
accgccaccatgtattcgtccccgctctgcctcacccaggatgagttccacccgttcatcgaggccctgctgcctcacgtccgcgccttcgcctacacctggttcaacctgcaggcgcggaagcgcaagtacttcaagaagcacgagaagcggatgtcgaaggacgaggagcgtgcggtcaaggacgagctgctgggcgagaagcccgaggtcaagcagaagtgggcgtcgcggctgctggccaagctgcgcaaggacatccggcccgagtgccgcgaggacttcgtgctgagcatcaccggcaagaaggcgccgggctgcgtgctctccaaccccgaccagaagggcaagatgcggcgcatcgactgtctccggcaggcggacaaggtgtggcggctggacctggtcatggtcatcctgttcaagggcatcccgctggagagcaccgacggcgagcgcctggtcaaggctgcgcagtgcggtcacccggtcctgtgcgtgcagccgcaccacattggcgtggccgtcaaggagctggacctctacctggcctacttcgtgcgtgagcgagatgcagagcaaagcggcagtccccggacagggatgggctctgaccaggaggacagcaagcccatcacgctggacacgaccgacttccaggagagctttgtcacctccggcgtgttcagcgtcactgagctcatccaagtgtcccggacacccgtggtgactggaacaggacccaacttctccctgggggagctgcaggggcacctggcatacgacctgaacccagccagcactggcctcagaagaacgctgcccagcacctcctccagtgggagcaagcggcacaaatcgggctcgatggaggaagacgtggacacgagccctggcggcgattactacacttcgcccagctcgcccacgagtagcagccgcaactggacggaggacatggaaggaggcatctcgtccccggtgaagaagacagagatggacaagtcaccattcaacagcccgtccccccaggactctccccgcctctccagcttcacccagcaccaccggcccgtcatcgccgtgcacagcgggatcgcccggagcccacacccgtcctccgctctgcatttccctacgacgtccatcctaccccagacggcctccacctacttcccccacacggccatccgctacccacctcatctcaacccccaggacccgctcaaagatcttgtctcgctggcctgcgacccagccagccagcaacctggaccgtcctggtatctgggatagtaatgaactagtccgtaacttgaaagtatttcgatttcttggctttatatatcttgtggaaaggacgagcacatctgaattacacagccgtt

SEQ ID NO: 3002 - DNA, 1601 bp, Homo sapiens
  source 1..1601: mol_type = genomic DNA
accgccaccatggatgagttccacccgttcatcgaggccctgctgcctcacgtccgcgccttcgcctacacctggttcaacctgcaggcgcggaagcgcaagtacttcaagaagcacgagaagcggatgtcgaaggacgaggagcgtgcggtcaaggacgagctgctgggcgagaagcccgaggtcaagcagaagtgggcgtcgcggctgctggccaagctgcgcaaggacatccggcccgagtgccgcgaggacttcgtgctgagcatcaccggcaagaaggcgccgggctgcgtgctctccaaccccgaccagaagggcaagatgcggcgcatcgactgtctccggcaggcggacaaggtgtggcggctggacctggtcatggtcatcctgttcaagggcatcccgctggagagcaccgacggcgagcgcctggtcaaggctgcgcagtgcggtcacccggtcctgtgcgtgcagccgcaccacattggcgtggccgtcaaggagctggacctctacctggcctacttcgtgcgtgagcgagatgcagagcaaagcggcagtccccggacagggatgggctctgaccaggaggacagcaagcccatcacgctggacacgaccgacttccaggagagctttgtcacctccggcgtgttcagcgtcactgagctcatccaagtgtcccggacacccgtggtgactggaacaggacccaacttctccctgggggagctgcaggggcacctggcatacgacctgaacccagccagcactggcctcagaagaacgctgcccagcacctcctccagtgggagcaagcggcacaaatcgggctcgatggaggaagacgtggacacgagccctggcggcgattactacacttcgcccagctcgcccacgagtagcagccgcaactggacggaggacatggaaggaggcatctcgtccccggtgaagaagacagagatggacaagtcaccattcaacagcccgtccccccaggactctccccgcctctccagcttcacccagcaccaccggcccgtcatcgccgtgcacagcgggatcgcccggagcccacacccgtcctccgctctgcatttccctacgacgtccatcctaccccagacggcctccacctacttcccccacacggccatccgctacccacctcatctcaacccccaggacccgctcaaagatcttgtctcgctggcctgcgacccagccagccagcaacctggaccgttaaatggaagtggtcagctcaaaatgcccagccactgcctttctgctcagatgctggcacctccgcccccggggctgccacggctggcgctcccccctgccaccaaacccgccaccacctccgagggaggagccacgtcgccgacctcgccttcctactctccgcccgacacgtcccctgcaaaccgttcctttgtgggattaggaccaagggatcctgcgggcatttatcaggcacagtcctggtatctgggatagtaatgaactagtccgtaacttgaaagtatttcgatttcttggctttatatatcttgtggaaaggacgagattaccggaaatgaaatttgcgg

SEQ ID NO: 3003 - DNA, 1814 bp, Homo sapiens
  source 1..1814: mol_type = genomic DNA
accgccaccatgatgtattctcccatctgtctcactcaggatgaatttcacccattcatcgaggcacttcttccacatgtccgtgcaattgcctatacttggttcaacctgcaggctcgaaaacgcaagtactttaaaaagcatgagaagcgaatgtcaaaggatgaagaaagagcagtcaaagatgagcttctcagtgaaaagcctgaaatcaaacagaagtgggcatccaggctccttgccaaactgcgcaaagatattcgccaggagtatcgagaggactttgtgctcaccgtgactggcaagaagcacccgtgctgtgtcttatccaatcccgaccagaagggtaagattaggagaatcgactgcctgcgacaggcagacaaagtctggcgtctggatctagtcatggtgatcctgttcaaaggcatccccttggaaagtaccgatggagagcggctcatgaaatccccacattgcacaaacccagcactttgtgtccagccacatcatatcacagtatcagttaaggagcttgatttgtttttggcatactacgtgcaggagcaagattctggacaatcaggaagtccaagccacaatgatcctgccaagaatcctccaggttaccttgaggatagttttgtaaaatctggagtcttcaatgtatcagaacttgtaagagtatccagaacgcccataacccagggaactggagtcaacttcccaattggagaaatcccaagccaaccatactatcatgacatgaactcgggggtcaatcttcagaggtctctgtcttctccaccaagcagcaaaagacccaaaactatatccatagatgaaaatatggaaccaagtcctacaggagacttttacccctctccaagttcaccagctgctggaagtcgaacatggcacgaaagagatcaagatatgtcttctccgactactatgaagaagcctgaaaagccattgttcagctctgcatctccacaggattcttccccaagactgagcactttcccccagcaccaccatcccggaatacctggagttgcacacagtgtcatctcaactcgaactccacctccaccttcaccgttgccatttccaacacaagctatccttcctccagccccatcgagctacttttctcatccaacaatcagatatcctccccacctgaatcctcaggatactctgaagaactatgtaccttcttatgacccatccagtccacaaaccagccagcctaacggcagtggtcaagtagtagggaaagtgcctggccatttcactcctgtcttggcaccctctccccatcccagtgcagtgcgacctgtgaccctgagcatgacagatactaaacccatcactacatccactgaaggtgaggcagcttcacctacagcaaccacctacacagcctcaggcacatctcaagccaatcgatatgtgggactaagcccaagagacccatccttcctacatcagcaacagctgaggatttgtgactggaccatgaatcaaaacggcaggcatttataccccagtaccagtgaggatacattgggaattacttggcaaagtcctggtacctgggctagcttggttcctttccaagtgtcaaataggacacccatcttaccggccaatgtccaaaattacggtttgaacataattggagaacctttccttcaagcagaaacaagcaactagtaatgaactagtccgtaacttgaaagtatttcgatttcttggctttatatatcttgtggaaaggacgaaaatataggtcccgcataattacg

SEQ ID NO: 3004 - DNA, 1442 bp, Homo sapiens
  source 1..1442: mol_type = genomic DNA
accgccaccatggaaagaatcccagtgtctgtggacttctgggttgtctgctgtgcagttctgaaatgtaaccctgggattcctaaaagaatgtcaactctgtgctttggattttctgatgaatttcacccattcatcgaggcacttcttccacatgtccgtgcaattgcctatacttggttcaacctgcaggctcgaaaacgcaagtactttaaaaagcatgagaagcgaatgtcaaaggatgaagaaagagcagtcaaagatgagcttctcagtgaaaagcctgaaatcaaacagaagtgggcatccaggctccttgccaaactgcgcaaagatattcgccaggagtatcgagaggactttgtgctcaccgtgactggcaagaagcacccgtgctgtgtcttatccaatcccgaccagaagggtaagattaggagaatcgactgcctgcgacaggcagacaaagtctggcgtctggatctagtcatggtgatcctgttcaaaggcatccccttggaaagtaccgatggagagcggctcatgaaatccccacattgcacaaacccagcactttgtgtccagccacatcatatcacagtatcagttaaggagcttgatttgtttttggcatactacgtgcaggagcaagattctggacaatcaggaagtccaagccacaatgatcctgccaagaatcctccaggttaccttgaggatagttttgtaaaatctggagtcttcaatgtatcagaacttgtaagagtatccagaacgcccataacccagggaactggagtcaacttcccaattggagaaatcccaagccaaccatactatcatgacatgaactcgggggtcaatcttcagaggtctctgtcttctccaccaagcagcaaaagacccaaaactatatccatagatgaaaatatggaaccaagtcctacaggagacttttacccctctccaagttcaccagctgctggaagtcgaacatggcacgaaagagatcaagatatgtcttctccgactactatgaagaagcctgaaaagccattgttcagctctgcatctccacaggattcttccccaagactgagcactttcccccagcaccaccatcccggaatacctggagttgcacacagtgtcatctcaactcgaactccacctccaccttcaccgttgccatttccaacacaagctatccttcctccagccccatcgagctacttttctcatccaacaatcagatatcctccccacctgaatcctcaggatactctgaagaactatgtaccttcttatgacccatccagtccacaaaccagccagtcctggtacctgggctagtaatgaactagtccgtaacttgaaagtatttcgatttcttggctttatatatcttgtggaaaggacgacgagcctagtacctgtatacaata

SEQ ID NO: 3005 - DNA, 1028 bp, Homo sapiens
  source 1..1028: mol_type = genomic DNA
accgccaccatgctcacttttctgtggcaacgtgattctggacaatcaggaagtccaagccacaatgatcctgccaagaatcctccaggttaccttgaggatagttttgtaaaatctggagtcttcaatgtatcagaacttgtaagagtatccagaacgcccataacccagggaactggagtcaacttcccaattggagaaatcccaagccaaccatactatcatgacatgaactcgggggtcaatcttcagaggtctctgtcttctccaccaagcagcaaaagacccaaaactatatccatagatgaaaatatggaaccaagtcctacaggagacttttacccctctccaagttcaccagctgctggaagtcgaacatggcacgaaagagatcaagatatgtcttctccgactactatgaagaagcctgaaaagccattgttcagctctgcatctccacaggattcttccccaagactgagcactttcccccagcaccaccatcccggaatacctggagttgcacacagtgtcatctcaactcgaactccacctccaccttcaccgttgccatttccaacacaagctatccttcctccagccccatcgagctacttttctcatccaacaatcagatatcctccccacctgaatcctcaggatactctgaagaactatgtaccttcttatgacccatccagtccacaaaccagccagctgaggatttgtgactggaccatgaatcaaaacggcaggcatttataccccagtaccagtgaggatacattgggaattacttggcaaagtcctggtacctgggctagcttggttcctttccaagtgtcaaataggacacccatcttaccggccaatgtccaaaattacggtttgaacataattggagaacctttccttcaagcagaaacaagcaactagtaatgaactagtccgtaacttgaaagtatttcgatttcttggctttatatatcttgtggaaaggacgacacacaatgcgctaaagcggccaa

SEQ ID NO: 3006 - DNA, 1031 bp, Homo sapiens
  source 1..1031: mol_type = genomic DNA
accgccaccatgaactcgggggtcaatcttcagaggtctctgtcttctccaccaagcagcaaaagacccaaaactatatccatagatgaaaatatggaaccaagtcctacaggagacttttacccctctccaagttcaccagctgctggaagtcgaacatggcacgaaagagatcaagatatgtcttctccgactactatgaagaagcctgaaaagccattgttcagctctgcatctccacaggattcttccccaagactgagcactttcccccagcaccaccatcccggaatacctggagttgcacacagtgtcatctcaactcgaactccacctccaccttcaccgttgccatttccaacacaagctatccttcctccagccccatcgagctacttttctcatccaacaatcagatatcctccccacctgaatcctcaggatactctgaagaactatgtaccttcttatgacccatccagtccacaaaccagccagcctaacggcagtggtcaagtagtagggaaagtgcctggccatttcactcctgtcttggcaccctctccccatcccagtgcagtgcgacctgtgaccctgagcatgacagatactaaacccatcactacatccactgaagcctacacagcctcaggcacatctcaagccaatcgatatgtgggactaagcccaagagacccatccttcctacatcagcaacagctgaggatttgtgactggaccatgaatcaaaacggcaggcatttataccccagtaccagtgaggatacattgggaattacttggcaaagtcctggtacctgggctagcttggttcctttccaagtgtcaaataggacacccatcttaccggccaatgtccaaaattacggtttgaacataattggagaacctttccttcaagcagaaacaagcaactagtaatgaactagtccgtaacttgaaagtatttcgatttcttggctttatatatcttgtggaaaggacgaggtaggcttactgccgccaacaca

SEQ ID NO: 3007 - DNA, 1565 bp, Homo sapiens
  source 1..1565: mol_type = genomic DNA
accgccaccatgatgtattctcccatctgtctcactcaggatgaatttcacccattcatcgaggcacttcttccacatgtccgtgcaattgcctatacttggttcaacctgcaggctcgaaaacgcaagtactttaaaaagcatgagaagcgaatgtcaaaggatgaagaaagagcagtcaaagatgagcttctcagtgaaaagcctgaaatcaaacagaagtgggcatccaggctccttgccaaactgcgcaaagatattcgccaggagtatcgagaggactttgtgctcaccgtgactggcaagaagcacccgtgctgtgtcttatccaatcccgaccagaagggtaagattaggagaatcgactgcctgcgacaggcagacaaagtctggcgtctggatctagtcatggtgatcctgttcaaaggcatccccttggaaagtaccgatggagagcggctcatgaaatccccacattgcacaaacccagcactttgtgtccagccacatcatatcacagtatcagttaaggagcttgatttgtttttggcatactacgtgcaggagcaagattctggacaatcaggaagtccaagccacaatgatcctgccaagaatcctccaggttaccttgaggatagttttgtaaaatctggagtcttcaatgtatcagaacttgtaagagtatccagaacgcccataacccagggaactggagtcaacttcccaattggagaaatcccaagccaaccatactatcatgacatgaactcgggggtcaatcttcagaggtctctgtcttctccaccaagcagcaaaagacccaaaactatatccatagatgaaaatatggaaccaagtcctacaggagacttttacccctctccaagttcaccagctgctggaagtcgaacatggcacgaaagagatcaagatatgtcttctccgactactatgaagaagcctgaaaagccattgttcagctctgcatctccacaggattcttccccaagactgagcactttcccccagcaccaccatcccggaatacctggagttgcacacagtgtcatctcaactcgaactccacctccaccttcaccgttgccatttccaacacaagctatccttcctccagccccatcgagctacttttctcatccaacaatcagatatcctccccacctgaatcctcaggatactctgaagaactatgtaccttcttatgacccatccagtccacaaaccagccagctgaggatttgtgactggaccatgaatcaaaacggcaggcatttataccccagtaccagtgaggatacattgggaattacttggcaaagtcctggtacctgggctagcttggttcctttccaagtgtcaaataggacacccatcttaccggccaatgtccaaaattacggtttgaacataattggagaacctttccttcaagcagaaacaagcaactagtaatgaactagtccgtaacttgaaagtatttcgatttcttggctttatatatcttgtggaaaggacgatccctcgcgcgattgtcaaccgcc

SEQ ID NO: 3008 - DNA, 1586 bp, Homo sapiens
  source 1..1586: mol_type = genomic DNA
accgccaccatgatgtattctcccatctgtctcactcaggatgaatttcacccattcatcgaggcacttcttccacatgtccgtgcaattgcctatacttggttcaacctgcaggctcgaaaacgcaagtactttaaaaagcatgagaagcgaatgtcaaaggatgaagaaagagcagtcaaagatgagcttctcagtgaaaagcctgaaatcaaacagaagtgggcatccaggctccttgccaaactgcgcaaagatattcgccaggagtatcgagaggactttgtgctcaccgtgactggcaagaagcacccgtgctgtgtcttatccaatcccgaccagaagggtaagattaggagaatcgactgcctgcgacaggcagacaaagtctggcgtctggatctagtcatggtgatcctgttcaaaggcatccccttggaaagtaccgatggagagcggctcatgaaatccccacattgcacaaacccagcactttgtgtccagccacatcatatcacagtatcagttaaggagcttgatttgtttttggcatactacgtgcaggagcaagattctggacaatcaggaagtccaagccacaatgatcctgccaagaatcctccaggttaccttgaggatagttttgtaaaatctggagtcttcaatgtatcagaacttgtaagagtatccagaacgcccataacccagggaactggagtcaacttcccaattggagaaatcccaagccaaccatactatcatgacatgaactcgggggtcaatcttcagaggtctctgtcttctccaccaagcagcaaaagacccaaaactatatccatagatgaaaatatggaaccaagtcctacaggagacttttacccctctccaagttcaccagctgctggaagtcgaacatggcacgaaagagatcaagatatgtcttctccgactactatgaagaagcctgaaaagccattgttcagctctgcatctccacaggattcttccccaagactgagcactttcccccagcaccaccatcccggaatacctggagttgcacacagtgtcatctcaactcgaactccacctccaccttcaccgttgccatttccaacacaagctatccttcctccagccccatcgagctacttttctcatccaacaatcagatatcctccccacctgaatcctcaggatactctgaagaactatgtaccttcttatgacccatccagtccacaaaccagccagcctaacggcagtggtcaagtagtagggaaagtgcctggccatttcactcctgtcttggcaccctctccccatcccagtgcagtgcgacctgtgaccctgagcatgacagatactaaacccatcactacatccactgaagcctacacagcctcaggcacatctcaagccaatcgatatgtgggactaagcccaagagacccatccttcctacatcagcaacagtcctggtacctgggctagtaatgaactagtccgtaacttgaaagtatttcgatttcttggctttatatatcttgtggaaaggacgaagttcaaggactttcctagtggcc

SEQ ID NO: 3009 - DNA, 1352 bp, Homo sapiens
  source 1..1352: mol_type = genomic DNA
accgccaccatgcaatacagtgcgatggatgaatttcacccattcatcgaggcacttcttccacatgtccgtgcaattgcctatacttggttcaacctgcaggctcgaaaacgcaagtactttaaaaagcatgagaagcgaatgtcaaaggatgaagaaagagcagtcaaagatgagcttctcagtgaaaagcctgaaatcaaacagaagtgggcatccaggctccttgccaaactgcgcaaagatattcgccaggagtatcgagaggactttgtgctcaccgtgactggcaagaagcacccgtgctgtgtcttatccaatcccgaccagaagggtaagattaggagaatcgactgcctgcgacaggcagacaaagtctggcgtctggatctagtcatggtgatcctgttcaaaggcatccccttggaaagtaccgatggagagcggctcatgaaatccccacattgcacaaacccagcactttgtgtccagccacatcatatcacagtatcagttaaggagcttgatttgtttttggcatactacgtgcaggagcaagattctggacaatcaggaagtccaagccacaatgatcctgccaagaatcctccaggttaccttgaggatagttttgtaaaatctggagtcttcaatgtatcagaacttgtaagagtatccagaacgcccataacccagggaactggagtcaacttcccaattggagaaatcccaagccaaccatactatcatgacatgaactcgggggtcaatcttcagaggtctctgtcttctccaccaagcagcaaaagacccaaaactatatccatagatgaaaatatggaaccaagtcctacaggagacttttacccctctccaagttcaccagctgctggaagtcgaacatggcacgaaagagatcaagatatgtcttctccgactactatgaagaagcctgaaaagccattgttcagctctgcatctccacaggattcttccccaagactgagcactttcccccagcaccaccatcccggaatacctggagttgcacacagtgtcatctcaactcgaactccacctccaccttcaccgttgccatttccaacacaagctatccttcctccagccccatcgagctacttttctcatccaacaatcagatatcctccccacctgaatcctcaggatactctgaagaactatgtaccttcttatgacccatccagtccacaaaccagccagtcctggtacctgggctagtaatgaactagtccgtaacttgaaagtatttcgatttcttggctttatatatcttgtggaaaggacgagtcttgcccgccacatcagcgctt

SEQ ID NO: 3010 - DNA, 1787 bp, Homo sapiens
  source 1..1787: mol_type = genomic DNA
accgccaccatgatgtattctcccatctgtctcactcaggatgaatttcacccattcatcgaggcacttcttccacatgtccgtgcaattgcctatacttggttcaacctgcaggctcgaaaacgcaagtactttaaaaagcatgagaagcgaatgtcaaaggatgaagaaagagcagtcaaagatgagcttctcagtgaaaagcctgaaatcaaacagaagtgggcatccaggctccttgccaaactgcgcaaagatattcgccaggagtatcgagaggactttgtgctcaccgtgactggcaagaagcacccgtgctgtgtcttatccaatcccgaccagaagggtaagattaggagaatcgactgcctgcgacaggcagacaaagtctggcgtctggatctagtcatggtgatcctgttcaaaggcatccccttggaaagtaccgatggagagcggctcatgaaatccccacattgcacaaacccagcactttgtgtccagccacatcatatcacagtatcagttaaggagcttgatttgtttttggcatactacgtgcaggagcaagattctggacaatcaggaagtccaagccacaatgatcctgccaagaatcctccaggttaccttgaggatagttttgtaaaatctggagtcttcaatgtatcagaacttgtaagagtatccagaacgcccataacccagggaactggagtcaacttcccaattggagaaatcccaagccaaccatactatcatgacatgaactcgggggtcaatcttcagaggtctctgtcttctccaccaagcagcaaaagacccaaaactatatccatagatgaaaatatggaaccaagtcctacaggagacttttacccctctccaagttcaccagctgctggaagtcgaacatggcacgaaagagatcaagatatgtcttctccgactactatgaagaagcctgaaaagccattgttcagctctgcatctccacaggattcttccccaagactgagcactttcccccagcaccaccatcccggaatacctggagttgcacacagtgtcatctcaactcgaactccacctccaccttcaccgttgccatttccaacacaagctatccttcctccagccccatcgagctacttttctcatccaacaatcagatatcctccccacctgaatcctcaggatactctgaagaactatgtaccttcttatgacccatccagtccacaaaccagccagcctaacggcagtggtcaagtagtagggaaagtgcctggccatttcactcctgtcttggcaccctctccccatcccagtgcagtgcgacctgtgaccctgagcatgacagatactaaacccatcactacatccactgaagcctacacagcctcaggcacatctcaagccaatcgatatgtgggactaagcccaagagacccatccttcctacatcagcaacagctgaggatttgtgactggaccatgaatcaaaacggcaggcatttataccccagtaccagtgaggatacattgggaattacttggcaaagtcctggtacctgggctagcttggttcctttccaagtgtcaaataggacacccatcttaccggccaatgtccaaaattacggtttgaacataattggagaacctttccttcaagcagaaacaagcaactagtaatgaactagtccgtaacttgaaagtatttcgatttcttggctttatatatcttgtggaaaggacgagcacttaccgtatgcagggcggga

SEQ ID NO: 3011 - DNA, 1766 bp, Homo sapiens
  source 1..1766: mol_type = genomic DNA
accgccaccatgcaaatgtgccgcccggcctcctcctcggttctctacgtgcccacgcggtggcccggggggtgcggggcaacctggcaaagttgcccaagtcctccaccgagacgcacacgcataccccagcgcccggcagttatgtattctccgctctgtctcacccaggatgaatttcatcctttcatcgaagcacttctgccccacgtccgagcctttgcctacacatggttcaacctgcaggcccgaaaacgaaaatacttcaaaaaacatgaaaagcgtatgtcaaaagaagaagagagagccgtgaaggatgaattgctaagtgaaaaaccagaggtcaagcagaagtgggcatctcgacttctggcaaagttgcggaaagatatccgacccgaatatcgagaggattttgttcttacagttacagggaaaaaacctccatgttgtgttctttccaacccagaccagaaaggcaagatgcgaagaattgactgcctccgccaggcagataaagtctggaggttggaccttgttatggtgattttgtttaaaggtattccgctggaaagtactgatggcgagcgccttgtaaagtccccacaatgctctaatccagggctctgtgtccaaccccatcacataggggtttctgttaaggaactcgatttatatttggcatactttgtgcatgcagcagattcaagtcaatctgaaagtcccagccagccaagtgacgctgacattaaggaccagccagaaaatggacatttgggcttccaggacagttttgtcacatcaggtgtttttagtgtcactgagctagtaagagtgtcacagacaccaatagctgcaggaactggcccaaatttttctctctcagatttggaaagttcttcatactacagcatgagtccaggagcaatgaggaggtctttacccagcacatcctctacgagctccacaaagcgcctcaagtctgtggaggatgaaatggacagtcctggtgaggagccattttatacaggccaagggcgctccccaggaagtggcagtcagtcaagtggatggcatgaagtggagccaggaatgccatctccaaccacactgaagaagtcggagaagtctggtttcagcagcccctccccttcacagacctcctccctgggaacggcgttcacacagcatcaccgacctgtcattacaggacccagagcaagtccgcatgcaacaccatcgactcttcatttcccgacatcacccattatccagcagcctgggccttacttctcacacccagccatccgctatcaccctcaggagacgctgaaagaatttgtccaacttgtctgccctgatgctggtcagcaggctggacaggtggggttcctcaatcccaatgggagcagccaaggcaaggtgcacaacccattccttcccaccccaatgttgccaccgccaccgccaccaccgatggccaggcctgtgcctctgccggtgccagacacaaagcctccaaccacgtcaacagaaggaggtgcagcctcccccacgtcaccaacctactcgacacccagcacctcccccgcaaaccgattcgtcagtgttggaccacgggatccaagctttgtaaatatccctcaacagacacagtcctggtacctgggatagtaatgaactagtccgtaacttgaaagtatttcgatttcttggctttatatatcttgtggaaaggacgacagatcagcgtgcacatgcatatc

SEQ ID NO: 3012 - DNA, 1607 bp, Homo sapiens
  source 1..1607: mol_type = genomic DNA
accgccaccatggatgaatttcatcctttcatcgaagcacttctgccccacgtccgagcctttgcctacacatggttcaacctgcaggcccgaaaacgaaaatacttcaaaaaacatgaaaagcgtatgtcaaaagaagaagagagagccgtgaaggatgaattgctaagtgaaaaaccagaggtcaagcagaagtgggcatctcgacttctggcaaagttgcggaaagatatccgacccgaatatcgagaggattttgttcttacagttacagggaaaaaacctccatgttgtgttctttccaacccagaccagaaaggcaagatgcgaagaattgactgcctccgccaggcagataaagtctggaggttggaccttgttatggtgattttgtttaaaggtattccgctggaaagtactgatggcgagcgccttgtaaagtccccacaatgctctaatccagggctctgtgtccaaccccatcacataggggtttctgttaaggaactcgatttatatttggcatactttgtgcatgcagcagattcaagtcaatctgaaagtcccagccagccaagtgacgctgacattaaggaccagccagaaaatggacatttgggcttccaggacagttttgtcacatcaggtgtttttagtgtcactgagctagtaagagtgtcacagacaccaatagctgcaggaactggcccaaatttttctctctcagatttggaaagttcttcatactacagcatgagtccaggagcaatgaggaggtctttacccagcacatcctctacgagctccacaaagcgcctcaagtctgtggaggatgaaatggacagtcctggtgaggagccattttatacaggccaagggcgctccccaggaagtggcagtcagtcaagtggatggcatgaagtggagccaggaatgccatctccaaccacactgaagaagtcggagaagtctggtttcagcagcccctccccttcacagacctcctccctgggaacggcgttcacacagcatcaccgacctgtcattacaggacccagagcaagtccgcatgcaacaccatcgactcttcatttcccgacatcacccattatccagcagcctgggccttacttctcacacccagccatccgctatcaccctcaggagacgctgaaagaatttgtccaacttgtctgccctgatgctggtcagcaggctggacaggtggggttcctcaatcccaatgggagcagccaaggcaaggtgcacaacccattccttcccaccccaatgttgccaccgccaccgccaccaccgatggccaggcctgtgcctctgccggtgccagacacaaagcctccaaccacgtcaacagaaggaggtgcagcctcccccacgtcaccaacctactcgacacccagcacctcccccgcaaaccgattcgtcagtgttggaccacgggatccaagctttgtaaatatccctcaacagacacagtcctggtacctgggatagtaatgaactagtccgtaacttgaaagtatttcgatttcttggctttatatatcttgtggaaaggacgactaaagcgggacgctaagttacgg

SEQ ID NO: 3013 - DNA, 1631 bp, Homo sapiens
  source 1..1631: mol_type = genomic DNA
accgccaccatgtattctccgctctgtctcacccaggatgaatttcatcctttcatcgaagcacttctgccccacgtccgagcctttgcctacacatggttcaacctgcaggcccgaaaacgaaaatacttcaaaaaacatgaaaagcgtatgtcaaaagaagaagagagagccgtgaaggatgaattgctaagtgaaaaaccagaggtcaagcagaagtgggcatctcgacttctggcaaagttgcggaaagatatccgacccgaatatcgagaggattttgttcttacagttacagggaaaaaacctccatgttgtgttctttccaacccagaccagaaaggcaagatgcgaagaattgactgcctccgccaggcagataaagtctggaggttggaccttgttatggtgattttgtttaaaggtattccgctggaaagtactgatggcgagcgccttgtaaagtccccacaatgctctaatccagggctctgtgtccaaccccatcacataggggtttctgttaaggaactcgatttatatttggcatactttgtgcatgcagcagattcaagtcaatctgaaagtcccagccagccaagtgacgctgacattaaggaccagccagaaaatggacatttgggcttccaggacagttttgtcacatcaggtgtttttagtgtcactgagctagtaagagtgtcacagacaccaatagctgcaggaactggcccaaatttttctctctcagatttggaaagttcttcatactacagcatgagtccaggagcaatgaggaggtctttacccagcacatcctctacgagctccacaaagcgcctcaagtctgtggaggatgaaatggacagtcctggtgaggagccattttatacaggccaagggcgctccccaggaagtggcagtcagtcaagtggatggcatgaagtggagccaggaatgccatctccaaccacactgaagaagtcggagaagtctggtttcagcagcccctccccttcacagacctcctccctgggaacggcgttcacacagcatcaccgacctgtcattacaggacccagagcaagtccgcatgcaacaccatcgactcttcatttcccgacatcacccattatccagcagcctgggccttacttctcacacccagccatccgctatcaccctcaggagacgctgaaagaatttgtccaacttgtctgccctgatgctggtcagcaggctggacaggtggggttcctcaatcccaatgggagcagccaaggcaaggtgcacaacccattccttcccaccccaatgttgccaccgccaccgccaccaccgatggccaggcctgtgcctctgccggtgccagacacaaagcctccaaccacgtcaacagaaggaggtgcagcctcccccacgtcaccaacctactcgacacccagcacctcccccgcaaaccgattcgtcagtgttggaccacgggatccaagctttgtaaatatccctcaacagacacagtcctggtacctgggatagtaatgaactagtccgtaacttgaaagtatttcgatttcttggctttatatatcttgtggaaaggacgaacactataacctcccttagaaacg

SEQ ID NO: 3014 - DNA, 1598 bp, Homo sapiens
  source 1..1598: mol_type = genomic DNA
accgccaccatgtattctccgctctgtctcacccaggatgaatttcatcctttcatcgaagcacttctgccccacgtccgagcctttgcctacacatggttcaacctgcaggcccgaaaacgaaaatacttcaaaaaacatgaaaagcgtatgtcaaaagaagaagagagagccgtgaaggatgaattgctaagtgaaaaaccagaggtcaagcagaagtgggcatctcgacttctggcaaagttgcggaaagatatccgacccgaatatcgagaggattttgttcttacagttacagggaaaaaacctccatgttgtgttctttccaacccagaccagaaaggcaagatgcgaagaattgactgcctccgccaggcagataaagtctggaggttggaccttgttatggtgattttgtttaaaggtattccgctggaaagtactgatggcgagcgccttgtaaagtccccacaatgctctaatccagggctctgtgtccaaccccatcacataggggtttctgttaaggaactcgatttatatttggcatactttgtgcatgcagcagattcaagtcaatctgaaagtcccagccagccaagtgacgctgacattaaggaccagccagaaaatggacatttgggcttccaggacagttttgtcacatcaggtgtttttagtgtcactgagctagtaagagtgtcacagacaccaatagctgcaggaactggcccaaatttttctctctcagatttggaaagttcttcatactacagcatgagtccaggagcaatgaggaggtctttacccagcacatcctctacgagctccacaaagcgcctcaagtctgtggaggatgaaatggacagtcctggtgaggagccattttatacaggccaagggcgctccccaggaagtggcagtcagtcaagtggatggcatgaagtggagccaggaatgccatctccaaccacactgaagaagtcggagaagtctggtttcagcagcccctccccttcacagacctcctccctgggaacggcgttcacacagcatcaccgacctgtcattacaggacccagagcaagtccgcatgcaacaccatcgactcttcatttcccgacatcacccattatccagcagcctgggccttacttctcacacccagccatccgctatcaccctcaggagacgctgaaagaatttgtccaacttgtctgccctgatgctggtcagcaggctggacaggtggggttcctcaatcccaatgggagcagccaaggcaaggtgcacaacccattccttcccaccccaatgttgccaccgccaccgccaccaccgatggccaggcctgtgcctctgccggtgccagacacaaagcctccaaccacgtcaacagaaggaggtgcagcctcccccacgtcaccaatcctggtacctgggataaaagttgcagcgtcccaccatccaccagacagaccacctgaccccttctcaactctgtagtaatgaactagtccgtaacttgaaagtatttcgatttcttggctttatatatcttgtggaaaggacgatcagctatgacatgatgacaggga

SEQ ID NO: 3015 - DNA, 1712 bp, Homo sapiens
  source 1..1712: mol_type = genomic DNA
accgccaccatgtttgaacagctgaagccaatcgaacctgtacagaagacgctcccatgggtgggcgaggtagctgccaccctgcaggaagccatgaagagagattgctggagggaggcacgggtgaagaagaagccagtcacctttgaggatgtggcagtgaatttcacccaggaagagtgggactgtctagatgccagccagagggtcctttaccaggatgttatgtcggaaacctttaagaatctaacatctgtggccagaatctttctgcataagccagagctaatcaccaagcttgagcaagaagaggaacagtggagagagtttgtccatctcccaaacacagaaggcctttcagaaggcaagaagaaagagcttcgagaacaacatcccagtctgagagatgaggggactagtgatgacaaggtcttccttgcatgcagaggggccggccagtgccccctatctgccccagctgggactatggacaggacccgggtgcttcaagcatcccaggctgggccaccctttttttgctacacctgtggcaaatgtttcagcaggcgctcctacctctatagccaccagtttgttcacaatcccaagctgactaacagctgcagtcagtgtgggaagttgtttcggagccccaagtccctcagctatcacagacgcatgcatcttggggagaggcccttctgttgcacgctctgtgacaagacctactgtgatgcttctggactaagtcgtcaccgccgcgtccatctgggttaccggccccattcatgctctgtgtgtgggaagagcttccgggaccagtctgagctcaaacgccaccagaagatacaccaaaaccaggagccagtggatggaaaccaggagtgtactttgaggattccaggcacccaggctgaattccagacacccatcgccagaagccagaggtccatccaggggcttttggatgtgaaccatgcaccagtggccaggtcccaggaacccatatttagaactgagggtcctatggcccagaaccaggcatctgtacttaagaaccaagcacctgtgaccaggacccaggcacccatcactggaaccctctgtcaggatgccagatccaactctcatccagtgaagccctcaagactcaatgtcttctgttgcccccattgttctttgacttttagcaagaaatcctatctctccagacaccagaaggcccacctcacagagccgcccaactactgcttccattgcagcaagtctttcagctcattttccaggctggtcagacaccagcagacccactggaagcagaagagctacctttgccctatctgtgacctctcctttggggagaaagagggccttatggatcactggaggggctataaaggcaaggacctgtgccagagcagccaccataaatgccgggtgatcctgggccagtggcttggcttctctcatgatgtccccactatggctggggaggaatggaagcatggaggtgatcaatctccccccaggatccatacccccaggagaagaggcctaagagagaaggcctgcaaaggagacaaaacaaaggaggcagtgagcatcttgaaacataaatagtaatgaactagtccgtaacttgaaagtatttcgatttcttggctttatatatcttgtggaaaggacgaagaagttagattacgttcgggaat

SEQ ID NO: 3016 - DNA, 1541 bp, Homo sapiens
  source 1..1541: mol_type = genomic DNA
accgccaccatgggttcccccgccgccccggagggagcgctgggctacgtccgcgagttcactcgccactcctccgacgtgctgggcaacctcaacgagctgcgcctgcgcgggatcctcactgacgtcacgctgctggttggcgggcaacccctcagagcacacaaggcagttctcatcgcctgcagtggcttcttctattcaattttccggggccgtgcgggagtcggggtggacgtgctctctctgcccgggggtcccgaagcgagaggcttcgcccctctattggacttcatgtacacttcgcgcctgcgcctctctccagccactgcaccagcagtcctagcggccgccacctatttgcagatggagcacgtggtccaggcatgccaccgcttcatccaggccagctatgaacctctgggcatctccctgcgccccctggaagcagaacccccaacacccccaacggcccctccaccaggtagtcccaggcgctccgaaggacacccagacccacctactgaatctcgaagctgcagtcaaggcccccccagtccagccagccctgaccccaaggcctgcaactggaaaaagtacaagtacatcgtgctaaactctcaggcctcccaagcagggagcctggtcggggagagaagttctggtcaaccttgcccccaagccaggctccccagtggagacgaggcctccagcagcagcagcagcagcagcagcagcagtgaagaaggacccattcctggtccccagagcaggctctctccaactgctgccactgtgcagttcaaatgtggggctccagccagtaccccctacctcctcacatcccaggctcaagacacctctggatcaccctctgaacgggctcgtccactaccgggaagtgaatttttcagctgccagaactgtgaggctgtggcagggtgctcatcggggctggactccttggttcctggggacgaagacaaaccctataagtgtcagctgtgccggtcttcgttccgctacaagggcaaccttgccagtcatcgtacagtgcacacaggggaaaagccttaccactgctcaatctgcggagcccgttttaaccggccagcaaacctgaaaacgcacagccgcatccattcgggagagaagccgtataagtgtgagacgtgcggctcgcgctttgtacaggtggcacatctgcgggcgcacgtgctgatccacaccggggagaagccctacccttgccctacctgcggaacccgcttccgccacctgcagaccctcaagagccacgttcgcatccacaccggagagaagccttaccactgcgacccctgtggcctgcatttccggcacaagagtcaactgcggctgcatctgcgccagaaacacggagctgctaccaacaccaaagtgcactaccacattctcggggggccctagtaatgaactagtccgtaacttgaaagtatttcgatttcttggctttatatatcttgtggaaaggacgagacgatccgcaagtgacactaccg

SEQ ID NO: 3017 - DNA, 1610 bp, Homo sapiens
  source 1..1610: mol_type = genomic DNA
accgccaccatgtactccccgtactgcctcacccaggatgagttccacccgttcatcgaggcactgctgcctcacgtccgcgctttctcctacacctggttcaacctgcaggcgcggaagcgcaagtacttcaagaagcatgaaaagcggatgtcgaaggacgaggagcgggcggtgaaggacgagctgctgggcgagaagcccgagatcaagcagaagtgggcatcccggctgctggccaagctgcgcaaggacatccggcccgagttccgcgaggacttcgtgctgaccatcacgggcaagaagcccccctgctgcgtgctctccaaccccgaccagaagggcaagatccggcggattgactgcctgcgccaggctgacaaggtgtggcggctggacctggtcatggtgattttgtttaaggggatccccctggaaagtactgatggggagcggctctacaagtcgcctcagtgctcgaaccccggcctgtgcgtccagccacatcacattggagtcacaatcaaagaactggatctttatctggcttactttgtccacactccggaatccggacaatcagatagttcaaaccagcaaggagatgcggacatcaaaccactgcccaacgggcacttaagtttccaggactgttttgtgacttccggggtctggaatgtgacggagctggtgagagtatcacagactcctgttgcaacagcatcagggcccaacttctccctggcggacctggagagtcccagctactacaacatcaaccaggtgaccctggggcggcggtccatcacctcccctccttccaccagcaccaccaagcgccccaagtccatcgatgacagtgagatggagagccctgttgatgacgtgttctatcccgggacaggccgttccccagcagctggcagcagccagtccagcgggtggcccaacgatgtggatgcaggcccggcttctctaaagaagtcaggaaagctggacttctgcagtgccctctcctctcagggcagctccccgcgcatggctttcacccaccacccgctgcctgtgcttgctggagtcagaccagggagcccccgggccacagcatcagccctgcacttcccctccacgtccatcatccagcagtcgagcccgtatttcacgcacccgaccatccgctaccaccaccaccacgggcaggactcactgaaggagtttgtgcagtttgtgtgctcggatggctcgggccaggccaccggacagcccaacggtagcggccagggcaaagtcccggggtcatttttgctaccgccgccgcctccagtggccagacctgtgccccttcctatgcctgattccaaatccaccagcactgccccagacggcgccgccttgactcctccatcaccttcattcgcaacgacaggcgcctcctctgccaaccggtttgtcagcatcggaccccgggacggcaactttctgaacatcccacagcagtctcagtcctggttcctctagtaatgaactagtccgtaacttgaaagtatttcgatttcttggctttatatatcttgtggaaaggacgaccaatttatagtgttattgcctag

SEQ ID NO: 3018 - DNA, 1427 bp, Homo sapiens
  source 1..1427: mol_type = genomic DNA
accgccaccatgtactccccgtactgcctcacccaggatgagttccacccgttcatcgaggcactgctgcctcacgtccgcgctttctcctacacctggttcaacctgcaggcgcggaagcgcaagtacttcaagaagcatgaaaagcggatgtcgaaggacgaggagcgggcggtgaaggacgagctgctgggcgagaagcccgagatcaagcagaagtgggcatcccggctgctggccaagctgcgcaaggacatccggcccgagttccgcgaggacttcgtgctgaccatcacgggcaagaagcccccctgctgcgtgctctccaaccccgaccagaagggcaagatccggcggattgactgcctgcgccaggctgacaaggtgtggcggctggacctggtcatggtgattttgtttaaggggatccccctggaaagtactgatggggagcggctctacaagtcgcctcagtgctcgaaccccggcctgtgcgtccagccacatcacattggagtcacaatcaaagaactggatctttatctggcttactttgtccacactccggaatccggacaatcagatagttcaaaccagcaaggagatgcggacatcaaaccactgcccaacgggcacttaagtttccaggactgttttgtgacttccggggtctggaatgtgacggagctggtgagagtatcacagactcctgttgcaacagcatcagggcccaacttctccctggcggacctggagagtcccagctactacaacatcaaccaggtgaccctggggcggcggtccatcacctcccctccttccaccagcaccaccaagcgccccaagtccatcgatgacagtgagatggagagccctgttgatgacgtgttctatcccgggacaggccgttccccagcagctggcagcagccagtccagcgggtggcccaacgatgtggatgcaggcccggcttctctaaagaagtcaggaaagctggacttctgcagtgccctctcctctcagggcagctccccgcgcatggctttcacccaccacccgctgcctgtgcttgctggagtcagaccagggagcccccgggccacagcatcagccctgcacttcccctccacgtccatcatccagcagtcgagcccgtatttcacgcacccgaccatccgctaccaccaccaccacgggcaggactcactgaaggagtttgtgcagtttgtgtgctcggatggctcgggccaggccaccggacagcattcgcaacgacaggcgcctcctctgccaaccggtttgtcagcatcggaccccgggacggcaactttctagtaatgaactagtccgtaacttgaaagtatttcgatttcttggctttatatatcttgtggaaaggacgaaatcgattcccaaacgccgcaagt

SEQ ID NO: 3019 - DNA, 1586 bp, Homo sapiens
  source 1..1586: mol_type = genomic DNA
accgccaccatggatgagttccacccgttcatcgaggcactgctgcctcacgtccgcgctttctcctacacctggttcaacctgcaggcgcggaagcgcaagtacttcaagaagcatgaaaagcggatgtcgaaggacgaggagcgggcggtgaaggacgagctgctgggcgagaagcccgagatcaagcagaagtgggcatcccggctgctggccaagctgcgcaaggacatccggcccgagttccgcgaggacttcgtgctgaccatcacgggcaagaagcccccctgctgcgtgctctccaaccccgaccagaagggcaagatccggcggattgactgcctgcgccaggctgacaaggtgtggcggctggacctggtcatggtgattttgtttaaggggatccccctggaaagtactgatggggagcggctctacaagtcgcctcagtgctcgaaccccggcctgtgcgtccagccacatcacattggagtcacaatcaaagaactggatctttatctggcttactttgtccacactccggaatccggacaatcagatagttcaaaccagcaaggagatgcggacatcaaaccactgcccaacgggcacttaagtttccaggactgttttgtgacttccggggtctggaatgtgacggagctggtgagagtatcacagactcctgttgcaacagcatcagggcccaacttctccctggcggacctggagagtcccagctactacaacatcaaccaggtgaccctggggcggcggtccatcacctcccctccttccaccagcaccaccaagcgccccaagtccatcgatgacagtgagatggagagccctgttgatgacgtgttctatcccgggacaggccgttccccagcagctggcagcagccagtccagcgggtggcccaacgatgtggatgcaggcccggcttctctaaagaagtcaggaaagctggacttctgcagtgccctctcctctcagggcagctccccgcgcatggctttcacccaccacccgctgcctgtgcttgctggagtcagaccagggagcccccgggccacagcatcagccctgcacttcccctccacgtccatcatccagcagtcgagcccgtatttcacgcacccgaccatccgctaccaccaccaccacgggcaggactcactgaaggagtttgtgcagtttgtgtgctcggatggctcgggccaggccaccggacagcccaacggtagcggccagggcaaagtcccggggtcatttttgctaccgccgccgcctccagtggccagacctgtgccccttcctatgcctgattccaaatccaccagcactgccccagacggcgccgccttgactcctccatcaccttcattcgcaacgacaggcgcctcctctgccaaccggtttgtcagcatcggaccccgggacggcaactttctgaacatcccacagcagtctcagtcctggttcctctagtaatgaactagtccgtaacttgaaagtatttcgatttcttggctttatatatcttgtggaaaggacgacgtactctgtcaggacaaagggtt

SEQ ID NO: 3020 - DNA, 1403 bp, Homo sapiens
  source 1..1403: mol_type = genomic DNA
accgccaccatggatgagttccacccgttcatcgaggcactgctgcctcacgtccgcgctttctcctacacctggttcaacctgcaggcgcggaagcgcaagtacttcaagaagcatgaaaagcggatgtcgaaggacgaggagcgggcggtgaaggacgagctgctgggcgagaagcccgagatcaagcagaagtgggcatcccggctgctggccaagctgcgcaaggacatccggcccgagttccgcgaggacttcgtgctgaccatcacgggcaagaagcccccctgctgcgtgctctccaaccccgaccagaagggcaagatccggcggattgactgcctgcgccaggctgacaaggtgtggcggctggacctggtcatggtgattttgtttaaggggatccccctggaaagtactgatggggagcggctctacaagtcgcctcagtgctcgaaccccggcctgtgcgtccagccacatcacattggagtcacaatcaaagaactggatctttatctggcttactttgtccacactccggaatccggacaatcagatagttcaaaccagcaaggagatgcggacatcaaaccactgcccaacgggcacttaagtttccaggactgttttgtgacttccggggtctggaatgtgacggagctggtgagagtatcacagactcctgttgcaacagcatcagggcccaacttctccctggcggacctggagagtcccagctactacaacatcaaccaggtgaccctggggcggcggtccatcacctcccctccttccaccagcaccaccaagcgccccaagtccatcgatgacagtgagatggagagccctgttgatgacgtgttctatcccgggacaggccgttccccagcagctggcagcagccagtccagcgggtggcccaacgatgtggatgcaggcccggcttctctaaagaagtcaggaaagctggacttctgcagtgccctctcctctcagggcagctccccgcgcatggctttcacccaccacccgctgcctgtgcttgctggagtcagaccagggagcccccgggccacagcatcagccctgcacttcccctccacgtccatcatccagcagtcgagcccgtatttcacgcacccgaccatccgctaccaccaccaccacgggcaggactcactgaaggagtttgtgcagtttgtgtgctcggatggctcgggccaggccaccggacagcattcgcaacgacaggcgcctcctctgccaaccggtttgtcagcatcggaccccgggacggcaactttctagtaatgaactagtccgtaacttgaaagtatttcgatttcttggctttatatatcttgtggaaaggacgaaggccctccgcgtgcagaaccaag

SEQ ID NO: 3021 - DNA, 1376 bp, Homo sapiens
  source 1..1376: mol_type = genomic DNA
atcgattgatcaacaagtttgtacaaaaaagttggcatgatgcagagtgcgactgtccccgcggaaggggctgtcaaggggctcccggagatgctaggtgtgccgatgcaacagattccccagtgcgctggctgcaaccagcacatcctggacaagttcatcctgaaggtcctggacagacactggcacagctcctgcctcaagtgtgcagactgccagatgcagctggcggacaggtgcttctccagggctgggagcgtctactgcaaggaggacttcttcaagcgcttcggcacaaaatgcacggcctgccagcagggtatccccccaacccaggtggtccgcaaggcccaggactttgtctaccacctgcactgctttgcttgcatcatctgcaaccggcagctggccacgggggacgaattctacctcatggaggacgggcggctggtgtgcaaggaagactacgagacagccaagcagaacgatgactcagaggctggagctaagcggccccggaccaccatcacagccaagcagctggagacattaaagaatgcatacaagaactcccccaagcctgcccggcacgtgagggagcagctgtcctcagagacaggcctggacatgagggtcgtacaggtttggtttcagaacagaagggccaaagagaaacgcctgaagaaggatgcagggcggcaccgctgggggcagttctataagagcgtcaagaggagccggggcagcagcaagcaggagaaggagagctctgcagaggactgtggggttagtgacagtgagctgagcttccgagaggatcaaattctctcagaacttggccacaccaataggatttatggcaacgtgggggacgttacaggcggacagttaatgaatgggagcttctccatggacgggacaggacaatcctatcaggacttgagggatgggagcccctatggaatcccccagtctccatcctccatatcgtccctgccatcccacgctcctttgctcaatgggctggattacacggtggacagtaatttgggcatcattgcgcatgcagggcagggagtaagccagacgctgagagccatggctgggggacccacctctgacatctccacaggaagcagtgtaggctatcccgactttccaactagcccaggctcttggctcgatgaaatggatcatcctcctttttacccaactttcttgtacaaagtggttgatatcggtaagcctatccctaaccctctcctcggtctcgattctacgtagtaatgaactagtccgtaacttgaaagtatttcgatttcttggctttatatatcttgtggaaaggacgacccaagctattcgcccatctaacg

SEQ ID NO: 3022 - DNA, 1499 bp, Homo sapiens
  source 1..1499: mol_type = genomic DNA
atcgattgatcaacaagtttgtacaaaaaagttggcatgttagttcacagtttttcagccatggaccgtcacgacggcaccagcaacgggacggcacggttgccccagctgggcactgtaggtcaatctccctacacgagcgccccgccgctgtcccacacccccaatgccgacttccagcccccatacttccccccaccctaccagcctatctacccccagtcgcaagatccttactcccacgtcaacgacccctacagcctgaaccccctgcacgcccagccgcagccgcagcacccaggctggcccggccagaggcagagccaggagtctgggctcctgcacacgcaccgggggctgcctcaccagctgtcgggcctggatcctcgcagggactacaggcggcacgaggacctcctgcacggcccacacgcgctcagctcaggactcggagacctctcgatccactccttacctcacgccatcgaggaggtcccgcatgtagaagacccgggtattaacatcccagatcaaactgtaattaagaaaggccccgtgtccctgtccaagtccaacagcaatgccgtctccgccatccctattaacaaggacaacctcttcggcggcgtggtgaaccccaacgaagtcttctgttcagttccgggtcgcctctcgctcctcagctccacctcgaagtacaaggtcacggtggcggaagtgcagcggcggctctcaccacccgagtgtctcaacgcgtcgctgctgggcggagtgctccggagggcgaagtctaaaaatggaggaagatctttaagagaaaaactggacaaaataggattaaatctgcctgcagggagacgtaaagctgccaacgttaccctgctcacatcactagtagagggagaagctgtccacctagccagggactttgggtacgtgtgcgaaaccgaatttcctgccaaagcagtagctgaatttctcaaccgacaacattccgatcccaatgagcaagtgacaagaaaaaacatgctcctggctacaaaacagatatgcaaagagttcaccgacctgctggctcaggaccgatctcccctggggaactcacggcccaaccccatcctggagcccggcatccagagctgcttgacccacttcaacctcatctcccacggcttcggcagccccgcggtgtgtgccgcggtcacggccctgcagaactatctcaccgaggccctcaaggccatggacaaaatgtacctcagcaacaaccccaatagccacacggacaacaacgccaaaagcagtgacaaagaggagaagcacagaaagtgcccaactttcttgtacaaagtggttgatatcggtaagcctatccctaaccctctcctcggtctcgattctacgtagtaatgaactagtccgtaacttgaaagtatttcgatttcttggctttatatatcttgtggaaaggacgagaggaaggtatgtctcaagagcct

SEQ ID NO: 3023 - DNA, 1502 bp, Homo sapiens
  source 1..1502: mol_type = genomic DNA
atcgattgatcaacaagtttgtacaaaaaagttggcatgttatttgagcagggtcagcaggccctggagcttcctgagtgcacaatgcagaaggctgcttactatgaaaacccaggactgtttggaggctatggctacagcaaaactacggacacttacggctacagcaccccccaccagccctacccaccccctgctgctgccagctccctggacactgactatccaggttctgcctgctccatccagagctctgcccctctgagagccccagcccacaaaggagctgaactcaatggcagctgcatgcggccgggcactgggaacagccagggtgggggtggtggcagccagcctcctggtctgaactcagagcagcagccaccacaaccccctcctccaccaccgaccctgcccccatcttcacccaccaatcctggaggtggagtgcctgccaagaagcccaaaggtgggcccaatgcttctagctcctcagccaccatcagcaagcagatcttcccctggatgaaagagtctcgacagaactccaagcagaagaacagctgtgccactgcaggagagagctgcgaggacaagagcccgccaggcccagcatccaagcgggtacgcacggcatacacgagcgcgcagctggtggaattggaaaaggaattccacttcaaccgctacttgtgccggccgcgccgcgtggagatggccaacctgctgaatctcacggaacgccagatcaagatctggttccagaaccggcgcatgaagtacaagaaggaccagaaggccaagggcatcctgcactcgccggctagccagtcccctgagcgcagcccaccgctcggcggcgccgctggccacgtggcctactccggccagctgccgccagtgcccggcctggcctacgacgcgccctcgccgcctgctttcgccaaatcacagcccaatatgtacggcctggccgcctacacggcgccactcagcagctgcctgccacaacagaagcgctacgcagcgccggagttcgagccccatcccatggcgagcaacggcggcggcttcgccagcgccaacctgcagggcagcccggtgtacgtgggcggcaacttcgtcgagtccatggcgcccgcgtccgggcctgtcttcaacctgggccacctctcgcacccgtcgtcggccagcgtggactacagttgcgccgcgcagattccaggcaaccaccaccatggaccttgcgaccctcatcccacctacacagatctctcggcccaccactcgtctcagggacgactgccggaggctcccaaactgacgcatctgtacccaactttcttgtacaaagtggttgatatcggtaagcctatccctaaccctctcctcggtctcgattctacgtagtaatgaactagtccgtaacttgaaagtatttcgatttcttggctttatatatcttgtggaaaggacgaaatctataacataaaaagtgtctc

SEQ ID NO: 3024 - DNA, 1634 bp, Homo sapiens
  source 1..1634: mol_type = genomic DNA
atcgattgatcaacaagtttgtacaaaaaagttggcatggcgtcacgcatagggttgcgcatgcagctcatgcgggagcaggcgcagcaggaggagcagcgggagcgcatgcagcaacaggctgtcatgcattacatgcagcagcagcagcagcagcaacagcagcagctcggagggccgcccaccccggccatcaatacccccgtccacttccagtcgccaccacctgtgcctggggaggtgttgaaggtgcagtcctacctggagaatcccacatcctaccatctgcagcagtcgcagcatcagaaggtgcgggagtacctgtccgagacctatgggaacaagtttgctgcccacatcagcccagcccagggctctccgaaacccccaccagccgcctccccaggggtgcgagctggacacgtgctgtcctcctccgctggcaacagtgctcccaatagccccatggccatgctgcacattggctccaaccctgagagggagttggatgatgtcattgacaacattatgcgtctggacgatgtccttggctacatcaatcctgaaatgcagatgcccaacacgctacccctgtccagcagccacctgaatgtgtacagcagcgacccccaggtcacagcctccctggtgggcgtcaccagcagctcctgccctgcggacctgacccagaagcgagagctcacagatgctgagagcagggccctggccaaggagcggcagaagaaagacaatcacaacttaattgaaaggagacgaaggttcaacatcaatgaccgcatcaaggagttgggaatgctgatccccaaggccaatgacctggacgtgcgctggaacaagggcaccatcctcaaggcctctgtggattacatccggaggatgcagaaggacctgcaaaagtccagggagctggagaaccactctcgccgcctggagatgaccaacaagcagctctggctccgtatccaggagctggagatgcaggctcgagtgcacggcctccctaccacctccccgtccggcatgaacatggctgagctggcccagcaggtggtgaagcaggagctgcctagcgaagagggcccaggggaggccctgatgctgggggctgaggtccctgaccctgagccactgccagctctgcccccgcaagccccgctgcccctgcccacccagccaccatccccattccatcacctggacttcagccacagcctgagctttgggggcagggaggacgagggtcccccgggctaccccgaacccctggcgccggggcatggctccccattccccagcctgtccaagaaggatctggacctcatgctcctggacgactcactgctaccgctggcctctgatccacttctgtccaccatgtcccccgaggcctccaaggccagcagccgccggagcagcttcagcatggaggagggcgatgtgctgtgcccaactttcttgtacaaagtggttgatatcggtaagcctatccctaaccctctcctcggtctcgattctacgtagtaatgaactagtccgtaacttgaaagtatttcgatttcttggctttatatatcttgtggaaaggacgatgcgcacgatattatttttacctt

SEQ ID NO: 3025 - DNA, 677 bp, Homo sapiens
  source 1..677: mol_type = genomic DNA
atcgattgatcaacaagtttgtacaaaaaagttggcaccatgacgactaatcccaaaccgaataaggcattaaaggtcaagaaggaggcgggcgagaacgccccggtgctcagcgatgatgagctggtgtccatgtcggtgcgggagctgaaccagcacctgcggggtctcaccaaggaggaggtgacccgcctgaagcagcgtcggcgcacactcaagaaccgcggctacgcggccagctgccgcatcaagcgggtgacgcagaaggaggagctggagcggcagcgcgtggagctgcagcaggaggtggagaagctggcgcgtgagaacagcagcatgcggctggagctggacgccctgcgctccaagtacgaggcgctgcagaccttcgcgcgcaccgtggcccggggacctgtggcgccctccaaggtggccaccaccagcgtcatcaccatcgtcaagtccaccgagctctcctccacctccgtgcccttctcggctgcatccttgccaactttcttgtacaaagtggttgatatcggtaagcctatccctaaccctctcctcggtctcgattctacgtagtaatgaactagtccgtaacttgaaagtatttcgatttcttggctttatatatcttgtggaaaggacgagacagataataccattgtccccgt

SEQ ID NO: 3026 - DNA, 1346 bp, Homo sapiens
  source 1..1346: mol_type = genomic DNA
atcgattgatcaacaagtttgtacaaaaaagttggcatgatgttctcgggcttcaacgcagactacgaggcgtcatcctcccgctgcagcagcgcgtccccggccggggatagcctctcttactaccactcacccgcagactccttctccagcatgggctcgcctgtcaacgcgcaggacttctgcacggacctggccgtctccagtgccaacttcattcccacggtcactgccatctcgaccagtccggacctgcagtggctggtgcagcccgccctcgtctcctctgtggccccatcgcagaccagagcccctcaccctttcggagtccccgccccctccgctggggcttactccagggctggcgttgtgaagaccatgacaggaggccgagcgcagagcattggcaggaggggcaaggtggaacagttatctccagaagaagaagagaaaaggagaatccgaagggaaaggaataagatggctgcagccaaatgccgcaaccggaggagggagctgactgatacactccaagcggagacagaccaactagaagatgagaagtctgctttgcagaccgagattgccaacctgctgaaggagaaggaaaaactagagttcatcctggcagctcaccgacctgcctgcaagatccctgatgacctgggcttcccagaagagatgtctgtggcttcccttgatctgactgggggcctgccagaggttgccaccccggagtctgaggaggccttcaccctgcctctcctcaatgaccctgagcccaagccctcagtggaacctgtcaagagcatcagcagcatggagctgaagaccgagccctttgatgacttcctgttcccagcatcatccaggcccagtggctctgagacagcccgctccgtgccagacatggacctatctgggtccttctatgcagcagactgggagcctctgcacagtggctccctggggatggggcccatggccacagagctggagcccctgtgcactccggtggtcacctgtactcccagctgcactgcttacacgtcttccttcgtcttcacctaccccgaggctgactccttccccagctgtgcagctgcccaccgcaagggcagcagcagcaatgagccttcctctgactcgctcagctcacccacgctgctggccctgtgcccaactttcttgtacaaagtggttgatatcggtaagcctatccctaaccctctcctcggtctcgattctacgtagtaatgaactagtccgtaacttgaaagtatttcgatttcttggctttatatatcttgtggaaaggacgaattgtcaatggtttgatctcagca

SEQ ID NO: 3027 - DNA, 1352 bp, Homo sapiens
  source 1..1352: mol_type = genomic DNA
atcgattgatcaacaagtttgtacaaaaaagcaggcaccatgatgttctcgggcttcaacgcagactacgaggcgtcatcctcccgctgcagcagcgcgtccccggccggggatagcctctcttactaccactcacccgcagactccttctccagcatgggctcgcctgtcaacgcgcaggacttctgcacggacctggccgtctccagtgccaacttcattcccacggtcactgccatctcgaccagtccggacctgcagtggctggtgcagcccgccctcgtctcctctgtggccccatcgcagaccagagcccctcaccctttcggagtccccgccccctccgctggggcttactccagggctggcgttgtgaagaccatgacaggaggccgagcgcagagcattggcaggaggggcaaggtggaacagttatctccagaagaagaagagaaaaggagaatccgaagggaaaggaataagatggctgcagccaaatgccgcaaccggaggagggagctgactgatacactccaagcggagacagaccaactagaagatgagaagtctgctttgcagaccgagattgccaacctgctgaaggagaaggaaaaactagagttcatcctggcagctcaccgacctgcctgcaagatccctgatgacctgggcttcccagaagagatgtctgtggcttcccttgatctgactgggggcctgccagaggttgccaccccggagtctgaggaggccttcaccctgcctctcctcaatgaccctgagcccaagccctcagtggaacctgtcaagagcatcagcagcatggagctgaagaccgagccctttgatgacttcctgttcccagcatcatccaggcccagtggctctgagacagcccgctccgtgccagacatggacctatctgggtccttctatgcagcagactgggagcctctgcacagtggctccctggggatggggcccatggccacagagctggagcccctgtgcactccggtggtcacctgtactcccagctgcactgcttacacgtcttccttcgtcttcacctaccccgaggctgactccttccccagctgtgcagctgcccaccgcaagggcagcagcagcaatgagccttcctctgactcgctcagctcacccacgctgctggccctgtagaacccagctttcttgtacaaagtggttgatatcggtaagcctatccctaaccctctcctcggtctcgattctacgtagtaatgaactagtccgtaacttgaaagtatttcgatttcttggctttatatatcttgtggaaaggacgaggaccgaagataatctcaccttat

SEQ ID NO: 3028 - DNA, 2132 bp, Homo sapiens
  source 1..2132: mol_type = genomic DNA
atcgattgatcaacaagtttgtacaaaaaagttggcatgtcttccaagcgaccagcctctccgtatggggaagcagatggagaggtagccatggtgacaagcagacagaaagtggaagaagaggagagtgacgggctcccagcctttcaccttcccttgcatgtgagttttcccaacaagcctcactctgaggaatttcagccagtttctctgctgacgcaagagacttgtggccataggactcccacttctcagcacaatacaatggaagttgatggcaataaagttatgtcttcatttgccccacacaactcatctacctcacctcagaaggcagaagaaggtgggcgacagagtggcgagtccttgtctagtacagccctgggaactcctgaacggcgcaagggcagtttagctgatgttgttgacaccttgaagcagaggaaaatggaagagctcatcaaaaacgagccggaagaaacccccagtattgaaaaactactctcaaaggactggaaagacaagcttcttgcaatgggatcggggaactttggcgaaataaaagggactcccgagagcttagctgagaaagaaaggcaactcatgggtatgatcaaccagctgaccagcctccgagagcagctgttggctgcccacgatgagcagaagaaactagctgcctctcagattgagaaacagcgtcagcaaatggagctggccaagcagcaacaagaacaaattgcaagacagcagcagcagcttctacagcaacaacacaaaatcaatttgctccagcaacagatccaggttcaaggtcagctgccgccattaatgattcccgtattccctcctgatcaacggacactggctgcagctgcccagcaaggattcctcctccctccaggcttcagctataaggctggatgtagtgacccttaccctgttcagctgatcccaactaccatggcagctgctgccgcagcaacaccaggcttaggcccactccaactgcagcagttatatgctgcccagctagctgcaatgcaggtatctccaggagggaagctgccaggcataccccaaggcaaccttggtgctgctgtatctcctaccagcattcacacagacaagagcacaaacagcccaccacccaaaagcaaggaaaaaacaacactggagagtctgactcagcaactggcagttaaacagaatgaagaaggaaaatttagccatgcaatgatggatttcaatctgagtggagattctgatggaagtgctggagtctcagagtcaagaatttatagggaatcccgagggcgtggtagcaatgaaccccacataaagcgtccaatgaatgccttcatggtgtgggctaaagatgaacggagaaagatccttcaagcctttcctgacatgcacaactccaacatcagcaagatattgggatctcgctggaaagctatgacaaacctagagaaacagccatattatgaggagcaagcccgtctcagcaagcagcacctggagaagtaccctgactataagtacaagcccaggccaaagcgcacctgcctggtggatggcaaaaagctgcgcattggtgaatacaaggcaatcatgcgcaacaggcggcaggaaatgcggcagtacttcaatgttgggcaacaagcacagatccccattgccactgctggtgttgtgtaccctggagccatcgccatggctgggatgccctcccctcacctgccctcggagcactcaagcgtgtctagcagcccagagcctgggatgcctgttatccagagcacttacggtgtgaaaggagaggagccacatatcaaagaagagatacaggccgaggacatcaatggagaaatttatgatgagtacgacgaggaagaggatgatccagatgtagattatgggagtgacagtgaaaaccatattgcaggacaagccaactgcccaactttcttgtacaaagtggttgatatcggtaagcctatccctaaccctctcctcggtctcgattctacgtagtaatgaactagtccgtaacttgaaagtatttcgatttcttggctttatatatcttgtggaaaggacgatagagctaccaggtatcccgcgcg

SEQ ID NO: 3029 - DNA, 905 bp, Homo sapiens
  source 1..905: mol_type = genomic DNA
atcgattgatcaacaagtttgtacaaaaaagttggcatgagttcctattttgtgaatcccactttccccgggagccttcccagcggccaggactccttcttgggccagctgcccctctaccaggctggctatgacgcgctgaggcccttcccggcctcgtacggggcgtcgagtctcccggacaagacgtacacctcaccttgtttctaccaacagtccaactcggtcctggcctgcaaccgggcgtcctacgagtacggggcctcgtgtttctattctgataaggacctcagtggcgcctcgccctcgggcagtggcaagcagaggggccccggggactacctgcacttttctcccgagcagcagtacaaacccgacagcagcagcgggcagggcaaagcactccatgacgaaggcgccgaccggaagtacacgagcccggtttacccttggatgcagcggatgaactcctgcgcgggtgctgtgtatgggagccatgggcgccgaggccgccagacctacacgcgctaccagacactggagctggagaaggagttccacttcaaccgctacctgacacggcgccgccgcatcgagatcgccaacgcgctctgcctcaccgagcgccagatcaagatctggttccagaaccgccgcatgaagtggaaaaaggaaaacaagctcatcaattccacgcagcccagcggggaggactcagaggcaaaggcgggcgagtacccaactttcttgtacaaagtggttgatatcggtaagcctatccctaaccctctcctcggtctcgattctacgtagtaatgaactagtccgtaacttgaaagtatttcgatttcttggctttatatatcttgtggaaaggacgaatacacataaggattattcccccg

SEQ ID NO: 3030 - DNA, 2000 bp, Homo sapiens
  source 1..2000: mol_type = genomic DNA
atcgattgatcaacaagtttgtacaaaaaagttggcatgccctgtatccaagcccaatatgggacaccagcaccgagtccgggaccccgtgaccacctggcaagcgaccccctgacccctgagttcatcaagcccaccatggacctggccagccccgaggcagcccccgctgcccccactgccctgcccagcttcagcaccttcatggacggctacacaggagagtttgacaccttcctctaccagctgccaggaacagtccagccatgctcctcagcctcctcctcggcctcctccacatcctcgtcctcagccacctcccctgcctctgcctccttcaagttcgaggacttccaggtgtacggctgctaccccggccccctgagcggcccagtggatgaggccctgtcctccagtggctctgactactatggcagcccctgctcggccccgtcgccctccacgcccagcttccagccgccccagctctctccctgggatggctccttcggccacttctcgcccagccagacttacgaaggcctgcgggcatggacagagcagctgcccaaagcctctgggcccccacagcctccagccttcttttccttcagtcctcccaccggccccagccccagcctggcccagagccccctgaagttgttcccctcacaggccacccaccagctgggggagggagagagctattccatgcctacggccttcccaggtttggcacccacttctccacaccttgagggctcggggatactggatacacccgtgacctcaaccaaggcccggagcggggccccaggtggaagtgaaggccgctgtgctgtgtgtggggacaacgcttcatgccagcattatggtgtccgcacatgtgagggctgcaagggcttcttcaagcgcacagtgcagaaaaacgccaagtacatctgcctggctaacaaggactgccctgtggacaagaggcggcgaaaccgctgccagttctgccgcttccagaagtgcctggcggtgggcatggtgaaggaagttgtccgaacagacagcctgaaggggcggcggggccggctaccttcaaaacccaagcagcccccagatgcctcccctgccaatctcctcacttccctggtccgtgcacacctggactcagggcccagcactgccaaactggactactccaagttccaggagctggtgctgccccactttgggaaggaagatgctggggatgtacagcagttctacgacctgctctccggttctctggaggtcatccgcaagtgggcggagaagatccctggctttgctgagctgtcaccggctgaccaggacctgttgctggagtcggccttcctggagctcttcatcctccgcctggcgtacaggtctaagccaggcgagggcaagctcatcttctgctcaggcctggtgctacaccggctgcagtgtgcccgtggcttcggggactggattgacagtatcctggccttctcaaggtccctgcacagcttgcttgtcgatgtccctgccttcgcctgcctctctgcccttgtcctcatcaccgaccggcatgggctgcaggagccgcggcgggtggaggagctgcagaaccgcatcgccagctgcctgaaggagcacgtggcagctgtggcgggcgagccccagccagccagctgcctgtcacgtctgttgggcaaactgcccgagctgcggaccctgtgcacccagggcctgcagcgcatcttctacctcaagctggaggacttggtgccccctccacccatcattgacaagatcttcatggacacgctgcccttctgcccaactttcttgtacaaagtggttgatatcggtaagcctatccctaaccctctcctcggtctcgattctacgtagtaatgaactagtccgtaacttgaaagtatttcgatttcttggctttatatatcttgtggaaaggacgatgacccaggtaacataaacgcctc

SEQ ID NO: 3031 - DNA, 1073 bp, Homo sapiens
  source 1..1073: mol_type = genomic DNA
atcgattgatcaacaagtttgtacaaaaaagttggcatgacaggagtgtttgacagaagggtccccagcatccgatccggcgacttccaagctccgttccagacgtccgcagctatgcaccatccgtctcaggaatcgccaactttgcccgagtcttcagctaccgattctgactactacagccctacggggggagccccgcacggctactgctctcctacctcggcttcctatggcaaagctctcaacccctaccagtatcagtatcacggcgtgaacggctccgccgggagctacccagccaaagcttatgccgactatagctacgctagctcctaccaccagtacggcggcgcctacaaccgcgtcccaagcgccaccaaccagccagagaaagaagtgaccgagcccgaggtgagaatggtgaatggcaaaccaaagaaagttcgtaaacccaggactatttattccagctttcagctggccgcattacagagaaggtttcagaagactcagtacctcgccttgccggaacgcgccgagctggccgcctcgctgggattgacacaaacacaggtgaaaatctggtttcagaacaaaagatccaagatcaagaagatcatgaaaaacggggagatgcccccggagcacagtcccagctccagcgacccaatggcgtgtaactcgccgcagtctccagcggtgtgggagccccagggctcgtcccgctcgctcagccaccaccctcatgcccaccctccgacctccaaccagtccccagcgtccagctacctggagaactctgcatcctggtacacaagtgcagccagctcaatcaattcccacctgccgccgccgggctccttacagcacccgctggcgctggcctccgggacactctattacccaactttcttgtacaaagtggttgatatcggtaagcctatccctaaccctctcctcggtctcgattctacgtagtaatgaactagtccgtaacttgaaagtatttcgatttcttggctttatatatcttgtggaaaggacgattaatgtaccagcgcatcaatggc

SEQ ID NO: 3032 - DNA, 1532 bp, Homo sapiens
  source 1..1532: mol_type = genomic DNA
atcgattgatcaacaagtttgtacaaaaaagttggcatgtcaaacaaagatcgacacattgattccagctgttcgtccttcatcaagacggaaccttccagcccagcctccctgacggacagcgtcaaccaccacagccctggtggctcttcagacgccagtgggagctacagttcaaccatgaatggccatcagaacggacttgactcgccacctctctacccttctgctcctatcctgggaggtagtgggcctgtcaggaaactgtatgatgactgctccagcaccattgttgaagatccccagaccaagtgtgaatacatgctcaactcgatgcccaagagactgtgtttagtgtgtggtgacatcgcttctgggtaccactatggggtagcatcatgtgaagcctgcaaggcattcttcaagaggacaattcaaggcaatatagaatacagctgccctgccacgaatgaatgtgaaatcacaaagcgcagacgtaaatcctgccaggcttgccgcttcatgaagtgtttaaaagtgggcatgctgaaagaaggggtgcgtcttgacagagtacgtggaggtcggcagaagtacaagcgcaggatagatgcggagaacagcccatacctgaaccctcagctggttcagccagccaaaaagccattgctctggtctgatcctgcagataacaagattgtctcacatttgttggtggctgaaccggagaagatctatgccatgcctgaccctactgtccccgacagtgacatcaaagccctcactacactgtgtgacttggccgaccgagagttggtggttatcattggatgggcgaagcatattccaggcttctccacgctgtccctggcggaccagatgagccttctgcagagtgcttggatggaaattttgatccttggtgtcgtataccggtctctttcgtttgaggatgaacttgtctatgcagacgattatataatggacgaagaccagtccaaattagcaggccttcttgatctaaataatgctatcctgcagctggtaaagaaatacaagagcatgaagctggaaaaagaagaatttgtcaccctcaaagctatagctcttgctaattcagactccatgcacatagaagatgttgaagccgttcagaagcttcaggatgtcttacatgaagcgctgcaggattatgaagctggccagcacatggaagaccctcgtcgagctggcaagatgctgatgacactgccactcctgaggcagacctctaccaaggccgtgcagcatttctacaacatcaaactagaaggcaaagtcccaatgcacaaactttttttggaaatgttggaggccaaggtctgcccaactttcttgtacaaagtggttgatatcggtaagcctatccctaaccctctcctcggtctcgattctacgtagtaatgaactagtccgtaacttgaaagtatttcgatttcttggctttatatatcttgtggaaaggacgagtctcaaagcgcgttagtgaggaa

SEQ ID NO: 3033 - DNA, 1520 bp, Homo sapiens
  source 1..1520: mol_type = genomic DNA
atcgattgatcaacaagtttgtacaaaaaagcaggcttcaccatgtcaaacaaagatcgacacattgattccagctgttcgtccttcatcaagacggaaccttccagcccagcctccctgacggacagcgtcaaccaccacagccctggtggctcttcagacgccagtgggagctacagttcaaccatgaatggccatcagaacggacttgactcgccacctctctacccttctgctcctatcctgggaggtagtgggcctgtcaggaaactgtatgatgactgctccagcaccattgttgaagatccccagaccaagtgtgaatacatgctcaactcgatgcccaagagactgtgtttagtgtgtggtgacatcgcttctgggtaccactatggggtagcatcatgtgaagcctgcaaggcattcttcaagaggacaattcaaggcaatatagaatacagctgccctgccacgaatgaatgtgaaatcacaaagcgcagacgtaaatcctgccaggcttgccgcttcatgaagtgtttaaaagtgggcatgctgaaagaaggggtgcgtcttgacagagtacgtggaggtcggcagaagtacaagcgcaggatagatgcggagaacagcccatacctgaaccctcagctggttcagccagccaaaaagccatataacaagattgtctcacatttgttggtggctgaaccggagaagatctatgccatgcctgaccctactgtccccgacagtgacatcaaagccctcactacactgtgtgacttggccgaccgagagttggtggttatcattggatgggcgaagcatattccaggcttctccacgctgtccctggcggaccagatgagccttctgcagagtgcttggatggaaattttgatccttggtgtcgtataccggtctctttcatttgaggatgaacttgtctatgcagacgattatataatggacgaagaccagtccaaattagcaggccttcttgatctaaataatgctatcctgcagctggtaaagaaatacaagagcatgaagctggaaaaagaagaatttgtcaccctcaaagctatagctcttgctaattcagactccatgcacatagaagatgttgaagccgttcagaagcttcaggatgtcttacatgaagcgctgcaggattatgaagctggccagcacatggaagaccctcgtcgagctggcaagatgctgatgacactgccactcctgaggcagacctctaccaaggccgtgcagcatttctacaacatcaaactagaaggcaaagtcccaatgcacaaactttttttggaaatgttggaggccaaggtctgagacccagctttcttgtacaaagtggttgatatcggtaagcctatccctaaccctctcctcggtctcgattctacgtagtaatgaactagtccgtaacttgaaagtatttcgatttcttggctttatatatcttgtggaaaggacgaactagtaatctgcaacaaaaacct

SEQ ID NO: 3034 - DNA, 2408 bp, Homo sapiens
  source 1..2408: mol_type = genomic DNA
atcgattgatcaacaagtttgtacaaaaaagttggcaccatggagcggcggagcgagagcccgtgtctgcgggacagccccgaccggcggagcggcagcccggacgtcaaggggcctcccccagtgaaggtggcccggctggagcagaacggcagccccatgggagcccgcgggaggcccaacggcgccgtggccaaggccgtgggaggtttgatgattcctgtcttttgtgtcgtggagcagttggacggctctcttgaatatgacaacagagaagaacacgccgagtttgtcctggtgcggaaagatgtgctttttagccagctggtggagactgcgctcctggccctggggtattctcacagctctgcggcccaggcccaaggaataatcaagctgggaaggtggaaccctctccccctcagttatgtgacagatgcacccgacgcgacagtggccgacatgctacaagatgtctatcatgttgtgacgttgaaaatccaattacaaagttgttcaaagttggaagacttgcctgcggagcagtggaaccatgccacagtccgcaatgccttaaaggaactgctcaaagagatgaaccagagcacattagccaaagaatgccctctctcccagagtatgatttcatccattgtaaatagcacatattatgccaatgtgtcagcaaccaagtgccaggagtttgggagatggtataaaaagtacaagaagattaaagtggaaagagtggaacgagaaaacctttcagactattgtgttctgggccagcgtccaatgcatttaccaaatatgaaccagctggcatccctggggaaaaccaacgaacagtctcctcacagccaaattcaccacagtactccaatccgaaaccaagtgcccgcattacagcccatcatgagccctggtcttctttctccccagcttagtccacaacttgtaaggcaacaaatagccatggcccatctgataaaccaacagattgccgttagccggctcctggctcaccagcatcctcaagccatcaaccagcagttcctgaaccatccacccatccccagagcagttaagccagagccaaccaactcttccgtggaagtctctccagatatctaccagcaagtcagagatgagctgaagagggccagtgtgtcccaagctgtctttgcaagagtggcattcaaccgcacacagggattgttgtctgagattctgcgtaaggaagaagaccctcggacagcctctcagtctcttctagtaaacctgagggccatgcagaatttcctcaatctgccagaagtggagcgagatcgcatctaccaggatgagagggagcggagcatgaatcccaatgtgagcatggtctcctcggcctccagcagtcccagctcctcccgaacccctcaggccaaaacctcgacaccgacaacagacctccctattaaggtggacggcgccaacatcaacatcacagctgccatttatgacgagatccaacaggagatgaaaagggccaaggtgtctcaagccctgtttgccaaagtggctgcaaataaaagtcagggctggctgtgtgaactgctccgctggaaggagaacccaagcccagaaaaccgcaccctctgggaaaacctctgtaccatccgtcgcttcctgaaccttccccagcatgagagggatgtcatctatgaggaggagtcaaggcatcaccacagcgaacgcatgcaacacgtggtccagcttccccctgagccggtgcaggtacttcatagacagcagtctcagccagccaaggagagttcccctcccagagaagaagcgcctcccccacctcctccgactgaagacagttgtgccaaaaagccccggtctcgcacaaagatctccttagaagccctggggatcctccaaagctttattcatgatgtaggcctgtacccagaccaggaagccatccacactctttcggctcagctggatctccccaaacacaccatcatcaagttcttccagaaccagcggtaccacgtgaagcaccacgggaagctgaaagagcacctgggctccgcggtggacgtggctgaatataaggacgaggagctgctgaccgagtcagaggagaacgacagcgaggaaggctccgaggagatgtacaaagtggaggctgaggaggaaaatgctgacaaaagcaaggcagcacctgccgaaattgaccagagattgccaactttcttgtacaaagtggttgatatcggtaagcctatccctaaccctctcctcggtctcgattctacgtagtaatgaactagtccgtaacttgaaagtatttcgatttcttggctttatatatcttgtggaaaggacgagtgcttggtgtgtatattggtgta

SEQ ID NO: 3035 - DNA, 1172 bp, Homo sapiens
  source 1..1172: mol_type = genomic DNA
accgccaccatgaccaaatcgtacagcgagagtgggctgatgggcgagcctcagccccaaggtcctccaagctggacagacgagtgtctcagttctcaggacgaggagcacgaggcagacaagaaggaggacgacctcgaaaccatgaacgcagaggaggactcactgaggaacgggggagaggaggaggacgaagatgaggacctggaagaggaggaagaagaggaagaggaggatgacgatcaaaagcccaagagacgcggccccaaaaagaagaagatgactaaggctcgcctggagcgttttaaattgagacgcatgaaggctaacgcccgggagcggaaccgcatgcacggactgaacgcggcgctagacaacctgcgcaaggtggtgccttgctattctaagacgcagaagctgtccaaaatcgagactctgcgcttggccaagaactacatctgggctctgtcggagatcctgcgctcaggcaaaagcccagacctggtctccttcgttcagacgctttgcaagggcttatcccaacccaccaccaacctggttgcgggctgcctgcaactcaatcctcggacttttctgcctgagcagaaccaggacatgcccccccacctgccgacggccagcgcttccttccctgtacacccctactcctaccagtcgcctgggctgcccagtccgccttacggtaccatggacagctcccatgtcttccacgttaagcctccgccgcacgcctacagcgcagcgctggagcccttctttgaaagccctctgactgattgcaccagcccttcctttgatggacccctcagcccgccgctcagcatcaatggcaacttctctttcaaacacgaaccgtccgccgagtttgagaaaaattatgcctttaccatgcactatcctgcagcgacactggcaggggcccaaagccacggatcaatcttctcaggcaccgctgcccctcgctgcgagatccccatagacaatattatgtccttcgatagccattcacatcatgagcgagtcatgagtgcccagctcaatgccatatttcatgattagtaatgaactagtccgtaacttgaaagtatttcgatttcttggctttatatatcttgtggaaaggacgataacgccaatgctcggggcccgga

SEQ ID NO: 3036 - DNA, 1166 bp, Homo sapiens
  source 1..1166: mol_type = genomic DNA
atcgattgatcaacaagtttgtacaaaaaagttggcatggagctactgtcgccaccgctccgcgacgtagacctgacggcccccgacggctctctctgctcctttgccacaacggacgacttctatgacgacccgtgtttcgactccccggacctgcgcttcttcgaagacctggacccgcgcctgatgcacgtgggcgcgctcctgaaacccgaagagcactcgcacttccccgcggcggtgcacccggccccgggcgcacgtgaggacgagcatgtgcgcgcgcccagcgggcaccaccaggcgggccgctgcctactgtgggcctgcaaggcgtgcaagcgcaagaccaccaacgccgaccgccgcaaggccgccaccatgcgcgagcggcgccgcctgagcaaagtaaatgaggcctttgagacactcaagcgctgcacgtcgagcaatccaaaccagcggttgcccaaggtggagatcctgcgcaacgccatccgctatatcgagggcctgcaggctctgctgcgcgaccaggacgccgcgccccctggcgccgcagccgccttctatgcgccgggcccgctgcccccgggccgcggcggcgagcactacagcggcgactccgacgcgtccagcccgcgctccaactgctccgacggcatgatggactacagcggccccccgagcggcgcccggcggcggaactgctacgaaggcgcctactacaacgaggcgcccagcgaacccaggcccgggaagagtgcggcggtgtcgagcctagactgcctgtccagcatcgtggagcgcatctccaccgagagccctgcggcgcccgccctcctgctggcggacgtgccttctgagtcgcctccgcgcaggcaagaggctgccgcccccagcgagggagagagcagcggcgaccccacccagtcaccggacgccgccccgcagtgccctgcgggtgcgaaccccaacccgatataccaggtgctctgcccaactttcttgtacaaagtggttgatatcggtaagcctatccctaaccctctcctcggtctcgattctacgtagtaatgaactagtccgtaacttgaaagtatttcgatttcttggctttatatatcttgtggaaaggacgacgcccgactctaatcaaggcaggg

SEQ ID NO: 3037 - DNA, 932 bp, Homo sapiens
  source 1..932: mol_type = genomic DNA
atcgattgatcaacaagtttgtacaaaaaagttggcatgagctcctacttcgtcaaccccctgttctccaaatacaaagccggcgagtccctggaaccggcctattacgactgccggttccctcagagcgtgggcaggagccatgcgctggtgtacgggcccggcggctcggcgcccggcttccagcacgcttcgcaccacgttcaagacttcttccaccacggcacctccggcatctccaactcaggctaccagcagaacccgtgctcgcttagctgccacggagacgcctccaaattctatggctacgaggcgctccccagacagtccctttatggggctcagcaagaggcgagcgtggtgcaatatcccgactgtaaatcctccgccaacactaacagtagcgaaggacaaggccacttaaatcaaaactcgtctcccagcctcatgtttccatggatgagaccccacgctccggggaggcgcagtggacggcaaacttacagccggtatcagaccttggaactagaaaaggagtttctctttaatccttatttgacacgaaaacgtcggattgaagtctctcatgccctgggactgaccgagagacaagtgaagatctggttccagaaccgaaggatgaagtggaaaaaggagaacaacaaggataaactgccgggagcccgagatgaggagaaggtggaggaagaaggaaatgaggaagaggagaaagaagaggaggaaaaggaagaaaacaaggactacccaactttcttgtacaaagtggttgatatcggtaagcctatccctaaccctctcctcggtctcgattctacgtagtaatgaactagtccgtaacttgaaagtatttcgatttcttggctttatatatcttgtggaaaggacgaggaccgggttaaggaattttgttt

SEQ ID NO: 3038 - DNA, 878 bp, Homo sapiens
  source 1..878: mol_type = genomic DNA
atcgattgatcaacaagtttgtacaaaaaagttggcatgagttcctatttcgtgaactccaccttccccgtcactctggccagcgggcaggagtccttcctgggccagctaccgctctattcgtcgggctatgcggacccgctgagacattaccccgcgccctacgggccagggccgggccaggacaagggctttgccacttcctcctattacccgccggcgggcggtggctacggccgagcggcgccctgcgactacgggccggcgccggccttctaccgcgagaaagagtcggcctgcgcactctccggcgccgacgagcagcccccgttccaccccgagccgcggaagtcggactgcgcgcaggacaagagcgtgttcggcgagacagaagagcagaagtgctccactccggtctacccgtggatgcagcggatgaattcgtgcaacagttcctcctttgggcccagcggccggcgaggccgccagacatacacacgttaccagacgctggagctggagaaggagtttcactacaatcgctacctgacgcggcggcggcgcatcgagatcgcgcacgccctgtgcctgacggagaggcagatcaagatatggttccagaaccgacgcatgaagtggaaaaaggagagcaaactgctcagcgcgtctcagctcagtgccgaggaggaggaagaaaaacaggccgagtgcccaactttcttgtacaaagtggttgatatcggtaagcctatccctaaccctctcctcggtctcgattctacgtagtaatgaactagtccgtaacttgaaagtatttcgatttcttggctttatatatcttgtggaaaggacgaagcccagtgtgtcaccacacttcc

SEQ ID NO: 3039 - DNA, 1727 bp, Homo sapiens
  source 1..1727: mol_type = genomic DNA
atcgattgatcaacaagtttgtacaaaaaagttggcaccatgccggcggccgcggtgcaggaagcggtcggcgtgtgctcctacgggatgcagctcagctgggacatcaacgatccgcagatgcctcaggagctggccctctttgaccaattccgagagtggcctgacggctatgtgcgcttcatctacagcagcgatgagaagaaggcacagcgtcacctgagcggctgggccatgcgcaacaccaacaaccacaatggccacatcctcaagaagtcgtgcctgggtgtggtggtgtgtacacaggcctgcaccctgcccgacggttcccgcctgcagctgaggccggccatctgcgacaaggcacggctgaaacagcagaagaaggcatgccctaactgtcattctgctttggagttgattccttgtcgagggcacagcggataccccgtaaccaacttttggcggcttgatggcaacgcgatcttttttcaggccaagggagttcatgatcatccaagaccagagagcaaatcagagacagaagctagaagaagcgccatcaagagacaaatggcctctttctaccaaccccagaaaaagagaattcgagaatccgaggcagaagaaaatcaagacagcagtggtcatttcagcaacatacctcccttggaaaatccagaagactttgatatagttactgaaaccagcttccctattccagggcagccttgcccttccttcccaaagtctgatgtttacaaagctacctgtgacctagccacctttcaaggagacaaaatgccacccttccagaaatactcaagcccaagaatctatttgcctaggccaccttgcagctatgaattggcaaaccctggttatacaaattcaagcccatatcccaccctttataaggattccaccagtatccctaatgacacagactgggttcatctgaacacactacaatgtaatgtcaattcatacagcagctatgagagaagctttgatttcaccaacaaacagcatggctggaaaccagctcttggaaaacccagccttgtggaaaggactaaccatgggcagtttcaggccatggccactcgcccttattataacccagagcttccctgcaggtacctcacgactccaccaccaggtgcccctgccctacaaaccgtgatcaccaccaccactaaagtgtcctaccaggcctaccagccccctgctatgaaatacagtgacagtgtgcgagaggtgaagagcctttcgagctgtaactatgctcctgaagatactgggatgtctgtctatccagaaccctggggtcctccggtgacagtcaccagggcagcctctccttcagggccacctcctatgaaaattgcaggagattgccgggccatcagacccactgtggctattccccacgagccagtttcctctaggacagatgaagcagagacttgggatgtgtgtctgtctgggctgggctccgcagtcagttactcagacagagtgggtcccttctttacctacaacaatgaggattttttgccaactttcttgtacaaagtggttgatatcggtaagcctatccctaaccctctcctcggtctcgattctacgtagtaatgaactagtccgtaacttgaaagtatttcgatttcttggctttatatatcttgtggaaaggacgatatcttcatcgttgtcgttgcagg

SEQ ID NO: 3040 - DNA, 1175 bp, Homo sapiens
  source 1..1175: mol_type = genomic DNA
atcgattgatcaacaagtttgtacaaaaaagttggcatggccgcggagctgagcatggggccagagctgcccaccagcccgctggccatggagtatgtcaacgacttcgacctgctcaagttcgacgtgaagaaggagccactggggcgcgcggagcgtccgggcaggccctgcacacgcctgcagccagccggctcggtgtcctccacaccgctcagcactccgtgtagctccgtgccctcgtcgcccagcttcagcccgaccgaacagaagacacacctcgaggatctgtactggatggcgagcaactaccagcagatgaaccccgaggcgctcaacctgacgcccgaggacgcggtggaagcgctcatcggctcgcacccagtgccacagccgctgcaaagcttcgacagctttcgcggcgctcaccaccaccaccatcaccaccaccctcacccgcaccacgcgtacccgggcgccggcgtggcccacgacgagctgggcccgcacgctcacccgcaccatcaccatcatcaccaagcgtcgccgccgccgtccagcgccgctagcccggcgcaacagctgcccactagccaccccgggcccgggccgcacgcgacggcctcggcgacggcggcgggcggcaacggcagcgtggaggaccgcttctccgatgaccagctcgtgtccatgtccgtgcgcgagctgaaccgccacctgcggggcttcaccaaggacgaggtgatccgcctgaagcagaagcggcggaccctgaagaaccggggctacgcccagtcttgcaggtataaacgcgtccagcagaagcaccacctggagaatgagaagacgcagctcattcagcaggtggagcagcttaagcaggaggtgtcccggctggcccgcgagagagacgcctacaaggtcaagtgcgagaaactcgccaactccggcttcagggaggcgggctccaccagcgacagcccctcctctcccgagttctttctgtgcccaactttcttgtacaaagtggttgatatcggtaagcctatccctaaccctctcctcggtctcgattctacgtagtaatgaactagtccgtaacttgaaagtatttcgatttcttggctttatatatcttgtggaaaggacgacccacggccatcgggttacaaaca

SEQ ID NO: 3041 - DNA, 686 bp, Homo sapiens
  source 1..686: mol_type = genomic DNA
atcgattgatcaacaagtttgtacaaaaaagttggcatggaggagggctccagctcgcccgtgtcccccgtggacagcctgggcaccagcgaggaggagctcgagaggcagcccaagcgcttcggccggaagcggcgctacagcaagaagtcgagcgaagatggcagcccgaccccgggcaagcgcggcaagaagggcagccccagcgcgcagtccttcgaggagctgcagagccagcgcatcctggccaacgtgcgcgagcgccagcgcacccagtcgctcaacgaggccttcgcggcgctgcgcaagatcatccccacgctgccctctgacaagctgagcaagatccagacgctcaagctggccgccaggtacatagacttcctctaccaggtcctgcagagcgacgagatggacaataagatgaccagctgcagctacgtggcccacgagcgcctcagctacgccttctccgtgtggcgcatggagggcgcgtggtccatgtccgcctcccactacccaactttcttgtacaaagtggttgatatcggtaagcctatccctaaccctctcctcggtctcgattctacgtagtaatgaactagtccgtaacttgaaagtatttcgatttcttggctttatatatcttgtggaaaggacgaggcgatagtggcggatacctgcgc

SEQ ID NO: 3042 - DNA, 2516 bp, Homo sapiens
  source 1..2516: mol_type = genomic DNA
atcgattgatcaacaagtttgtacaaaaaagttggcatgttcccgcagagccggcacccgacgccgcaccaggctgcaggccagcccttcaagttcactatcccggagtccctggaccggattaaagaggaattccagttcctgcaggcgcagtatcacagccttaaattggaatgtgagaaactggcaagtgaaaagacagaaatgcagaggcactatgtgatgtattatgaaatgtcatatggattaaacattgaaatgcacaaacagactgaaatcgccaagagattgaatacgatttgtgcacaagtcatcccatttctgtctcaggaacatcaacaacaggtggcccaggctgttgaacgtgccaaacaggtgaccatggcagagttgaatgccatcatcgggcagcagcagttgcaagctcagcatctttctcatggccacggacccccagttccccttacgcctcacccttcgggacttcagcctcctggaatcccgcccctcgggggcagtgccggccttcttgcgctgtccagtgctctgagtgggcagtctcacttggcaataaaagatgacaagaagcaccacgatgcagagcaccacagagacagagagccgggcacaagtaattccctcctggtcccagacagtctaagaggcacagataaacgcagaaatggacctgaattttccaatgacatcaagaaaaggaaggtggatgataaggactccagccactatgacagtgatggtgacaaaagcgatgacaacttagttgtggatgtgtctaatgaggacccttcttctccgcgagcaagccctgcccactcgccccgggaaaatggaatcgacaaaaatcgcctgctaaagaaggatgcttctagcagtccagcttccacggcctcctcggcaagttccacttctttgaaatccaaagaaatgagcttgcatgaaaaagccagcacgcctgttctgaaatccagcacaccaacgcctcggagcgacatgccaacgccgggcaccagcgccactccaggcctccgtccaggtctcggcaagcctccagccatagaccccctcgttaaccaagcggcagctggcttgaggacacccctggcagtgcccggcccatatcctgctccttttgggatggtcccccacgctggcatgaacggcgagctgaccagcccaggcgctgcctacgccagtttacacaacatgtcgccccagatgagcgccgcagccgccgcggccgccgtggtggcctacgggcgctcccccatggtggggtttgatcctccccctcacatgagagtacctaccattcctccaaacctggcaggaatccctggggggaaacctgcatactccttccacgttactgcagacggtcagatgcagcctgtcccttttccccccgacgccctcatcggacccggaatcccccggcatgctcgccagatcaacaccctcaaccacggggaggtggtgtgcgctgtgaccatcagcaaccccacgagacacgtgtacacaggcgggaagggctgcgtcaaggtctgggacatcagccaccctggcaataagagccctgtctcccagctcgactgtctgaacagagacaattatatccgttcctgtaaattgctacccgatggctgcactctcatagtgggaggggaagccagtactttgtccatttgggacctggcggctccaaccccgcgcatcaaggcggagctgacgtcctcggcccccgcctgctacgccctggccatcagccccgattccaaggtctgcttctcatgctgcagcgacggcaacatcgctgtgtgggatctgcacaaccagacactagtgaggcaattccagggccacacagacggagccagctgtattgacatttctaatgatggcaccaagctctggacgggtggtttggacaacacagtcaggtcctgggacctgcgcgaggggcggcagctgcagcagcacgacttcacctcccagatcttctccctggggtactgccccaccggggagtggctggcagtgggcatggagagcagcaatgtggaggtgctgcacgtgaacaagcctgacaagtaccagctgcacctgcatgagagctgcgtgctgtccctgaaatttgcttactgtggtaaatggtttgtgagtactggaaaagataacctcctcaatgcttggcggaccccctatggagccagcatattccagtccaaagagtcctcgtcagtgcttagctgtgacatctctgtggatgataagtacatagtcactggctcgggggacaagaaggctacagtctatgaagtcatctactgcccaactttcttgtacaaagtggttgatatcggtaagcctatccctaaccctctcctcggtctcgattctacgtagtaatgaactagtccgtaacttgaaagtatttcgatttcttggctttatatatcttgtggaaaggacgagcatcagatgatgcaaggcgttcg

SEQ ID NO: 3043 - DNA, 2516 bp, Homo sapiens
  source 1..2516: mol_type = genomic DNA
atcgattgatcaacaagtttgtacaaaaaagttggcatgttcccgcagagccggcacccgacgccgcaccaggctgcaggccagcccttcaagttcactatcccggagtccctggaccggattaaagaggaattccagttcctgcaggcgcagtatcacagccttaaattggaatgtgagaaactggcaagtgaaaagacagaaatgcagaggcactatgtgatgtattatgaaatgtcatatggattaaacattgaaatgcacaaacagactgaaatcgccaagagattgaatacgatttgtgcacaagtcatcccatttctgtctcaggaacatcaacaacaggtggcccaggctgttgaacgtgccaaacaggtgaccatggcagagttgaatgccatcatcgggcagcagcagttgcaagctcagcatctttctcatggccacggacccccagttccccttacgcctcacccttcgggacttcagcctcctggaatcccgcccctcgggggcagtgccggccttcttgcgctgtctagtgctctgagtgggcagtctcacttggcaataaaagatgacaagaagcaccacgatgcagagcaccacagagacagagagccgggcacaagtaattccctcctggtcccagacagtctaagaggcacagataaacgcagaaatggacctgaattttccaatgacatcaagaaaaggaaggtggatgataaggactccagccactatgacagtgatggtgacaaaagcgatgacaacttagttgtggatgtgtctaatgaggacccttcttctccgcgagcaagccctgcccactcgccccgggaaaatggaatcgacaaaaatcgcctgctaaagaaggatgcttctagcagtccagcttccacggcctcctcggcaagttccacttctttgaaatccaaagaaatgagcttgcatgaaaaagccagcacgcctgttctgaaatccagcacaccaacgcctcggagcgacatgccaacgccgggcaccagcgccactccaggcctccgtccaggtctcggcaagcctccagccatagaccccctcgttaaccaagcggcagctggcttgaggacacccctggcagtgcccggcccatatcctgctccttttgggatggtcccccacgctggcatgaacggcgagctgaccagcccaggcgctgcctacgccagtttacacaacatgtcgccccagatgagcgccgcagccgccgcggccgccgtggtggcctacgggcgctcccccatggtggggtttgatcctccccctcacatgagagtacctaccattcctccaaacctggcaggaatccctggggggaaacctgcatactccttccacgttactgcagacggtcagatgcagcctgtcccttttccccccgacgccctcatcggacccggaatcccccggcatgctcgccagatcaacaccctcaaccacggggaggtggtgtgcgctgtgaccatcagcaaccccacgagacacgtgtacacaggcgggaagggctgcgtcaaggtctgggacatcagccaccctggcaataagagccctgtctcccagctcgactgtctgaacagagacaattatatccgttcctgtaaattgctacccgatggctgcactctcatagtgggaggggaagccagtactttgtccatttgggacctggcggctccaaccccgcgcatcaaggcggagctgacgtcctcggcccccgcctgctacgccctggccatcagccccgattccaaggtctgcttctcatgctgcagcgacggcaacatcgctgtgtgggatctgcacaaccagacactagtgaggcaattccagggccacacagacggagccagctgtattgacatttctaatgatggcaccaagctctggacgggtggtttggacaacacagtcaggtcctgggacctgcgcgaggggcggcagctgcagcagcacgacttcacctcccagatcttctccctggggtactgccccaccggggagtggctggcagtgggcatggagagcagcaatgtggaggtgctgcacgtgaacaagcctgacaagtaccagctgcacctgcatgagagctgcgtgctgtccctgaaatttgcttactgtggtaaatggtttgtgagtactggaaaagataacctcctcaatgcttggcggaccccctatggagccagcatattccagtccaaagagtcctcgtcagtgcttagctgtgacatctctgtggatgataagtacatagtcactggctcgggggacaagaaggctacagtctatgaagtcatctactgcccaactttcttgtacaaagtggttgatatcggtaagcctatccctaaccctctcctcggtctcgattctacgtagtaatgaactagtccgtaacttgaaagtatttcgatttcttggctttatatatcttgtggaaaggacgagttgagtagatatgcccgaggggc

SEQ ID NO: 3044 - DNA, 1439 bp, Homo sapiens
  source 1..1439: mol_type = genomic DNA
atcgattgatcaacaagtttgtacaaaaaagcaggcttcaccatgaataccacagacaacggtgtcaactgtctgtgtgctatctgtggggacagagcaacaggaaaacactatggggcatccagctgtgatgggtgcaagggtttcttcagacgcagcattcgtaagagtcacgtttattcttgcaggttcagtcggcaatgtgttgttgacaaggacaaaaggaatcaatgtagatattgtcgattaagaaagtgttttagagcgggaatgaaaaaagaagctgtacaaaatgaacgtgacagaataagcaccagaagaagcacatttgatggcagcaacatcccctccattaacacactggcacaagctgaagttcggtctcgccagatctcagtctcaagccctgggtcaagcactgacataaacgttaagaaaattgcaagtattggtgatgtctgtgaatctatgaaacagcagctcttagtcttggtggaatgggctaaatatattcctgccttctgtgaattaccattggatgatcaggtggcactgttgagagctcacgcaggggagcacttactgcttggagctacaaagagatccatgatgtataaagatattttgcttttgggaaacaactatgttattcaccgcaacagctgtgaagttgagattagccgtgtggccaatcgtgttctagatgagctggttagaccatttcaagaaatccagattgatgacaatgagtatgcttgtttaaaggcaattgtattttttgatccagatgcaaaagggctaagcgatccagtaaaaattaagaacatgaggttccaagtgcagatcggtttggaggactacatcaatgatcggcagtatgactcccgggggaggtttggagagttgcttctgctcctgcccacactgcagagcatcacgtggcaaatgattgagcaaatacagtttgttaaactttttgggatggttaaaattgacaatctacttcaggaaatgctattaggtggggcttccaatgatggcagtcatctccatcatccaatgcatccacatttgtctcaagacccattaactggacaaactatacttttaggtcccatgtcaacactggttcatgcagaccagatctcaactcctgaaaccccactcccttccccaccacaaggctctgggcaagaacagtacaaaatagctgcaaaccaagcatcagtcatttcacaccagcatctctccaaacaaaagcaattgtgagacccagctttcttgtacaaagtggttgatatcggtaagcctatccctaaccctctcctcggtctcgattctacgtagtaatgaactagtccgtaacttgaaagtatttcgatttcttggctttatatatcttgtggaaaggacgaaggaaactgaacgcaaatgattcg

SEQ ID NO: 3045 - DNA, 1157 bp, Homo sapiens
  source 1..1157: mol_type = genomic DNA
atcgattgatcaacaagtttgtacaaaaaagttggcatgtcccacggccccaagcagcccggcgcggccgccgcgccggcgggcggcaaggctccgggccagcatgggggcttcgtggtgactgtcaagcaagagcgcggcgagggtccacgcgcgggcgagaaggggtcccacgaggaggagccggtgaagaaacgcggctggcccaagggcaagaagcggaagaagattctgccgaatgggcccaaggcaccggtcacgggctacgtgcgcttcctgaacgagcggcgcgagcagatccgcacgcgccacccggatctgccctttcccgagatcaccaagatgctgggcgccgagtggagcaagctgcagccaacggaaaagcagcggtacctggatgaggccgagagagagaagcagcagtacatgaaggagctgcgggcgtaccagcagtctgaagcctataagatgtgcacggagaagatccaggagaagaagatcaagaaagaagactcgagctctgggctcatgaacactctcctgaatggacacaagggtggggactgcgatggcttctccaccttcgatgttcccatcttcactgaagagttcttggaccaaaacaaagcgcgtgaggcggagcttcggcgcttgcggaagatgaatgtggccttcgaggagcagaacgcggtactgcagaggcacacgcagagcatgagcagcgcgcgcgagcgtctggagcaggagctggcgctggaggagcggaggacgctggcgctgcagcagcagctccaggccgtgcgccaggcgctcaccgccagcttcgcctcactgccggtgccgggcacgggcgaaacgcccacgctgggcactctggacttctacatggcccggcttcacggagccatcgagcgcgaccccgcccagcacgagaagctcatcgtccgcatcaaggaaatcctggcccaggtcgccagcgagcacctgtgcccaactttcttgtacaaagtggttgatatcggtaagcctatccctaaccctctcctcggtctcgattctacgtagtaatgaactagtccgtaacttgaaagtatttcgatttcttggctttatatatcttgtggaaaggacgatcttgtgtctttccgtagtgtcga

SEQ ID NO: 3046 - DNA, 1460 bp, Homo sapiens
  source 1..1460: mol_type = genomic DNA
atcgattgatcaacaagtttgtacaaaaaagttggcaccatgcgactctccaaaaccctcgtcgacatggacatggccgactacagtgctgcactggacccagcctacaccaccctggaatttgagaatgtgcaggtgttgacgatgggcaatgacacgtccccatcagaaggcaccaacctcaacgcgcccaacagcctgggtgtcagcgccctgtgtgccatctgcggggaccgggccacgggcaaacactacggtgcctcgagctgtgacggctgcaagggcttcttccggaggagcgtgcggaagaaccacatgtactcctgcagatttagccggcagtgcgtggtggacaaagacaagaggaaccagtgccgctactgcaggctcaagaaatgcttccgggctggcatgaagaaggaagccgtccagaatgagcgggaccggatcagcactcgaaggtcaagctatgaggacagcagcctgccctccatcaatgcgctcctgcaggcggaggtcctgtcccgacagatcacctcccccgtctccgggatcaacggcgacattcgggcgaagaagattgccagcatcgcagatgtgtgtgagtccatgaaggagcagctgctggttctcgttgagtgggccaagtacatcccagctttctgcgagctccccctggacgaccaggtggccctgctcagagcccatgctggcgagcacctgctgctcggagccaccaagagatccatggtgttcaaggacgtgctgctcctaggcaatgactacattgtccctcggcactgcccggagctggcggagatgagccgggtgtccatacgcatccttgacgagctggtgctgcccttccaggagctgcagatcgatgacaatgagtatgcctacctcaaagccatcatcttctttgacccagatgccaaggggctgagcgatccagggaagatcaagcggctgcgttcccaggtgcaggtgagcttggaggactacatcaacgaccgccagtatgactcgcgtggccgctttggagagctgctgctgctgctgcccaccttgcagagcatcacctggcagatgatcgagcagatccagttcatcaagctcttcggcatggccaagattgacaacctgttgcaggagatgctgctgggaggtccgtgccaagcccaggaggggcggggttggagtggggactccccaggagacaggcctcacacagtgagctcacccctcagctccttggcttccccactgtgccgctttgggcaagttgctttgccaactttcttgtacaaagtggttgatatcggtaagcctatccctaaccctctcctcggtctcgattctacgtagtaatgaactagtccgtaacttgaaagtatttcgatttcttggctttatatatcttgtggaaaggacgaagcacactgacagtataaccggag

SEQ ID NO: 3047 - DNA, 1637 bp, Homo sapiens
  source 1..1637: mol_type = genomic DNA
atcgattgatcaacaagtttgtacaaaaaagcaggcttcaccatgcgactctccaaaaccctcgtcgacatggacatggccgactacagtgctgcactggacccagcctacaccaccctggaatttgagaatgtgcaggtgttgacgatgggcaatgacacgtccccatcagaaggcaccaacctcaacgcgcccaacagcctgggtgtcagcgccctgtgtgccatctgcggggaccgggccacgggcaaacactacggtgcctcgagctgtgacggctgcaagggcttcttccggaggagcgtgcggaagaaccacatgtactcctgcagatttagccggcagtgcgtggtggacaaagacaagaggaaccagtgccgctactgcaggctcaagaaatgcttccgggctggcatgaagaaggaagccgtccagaatgagcgggaccggatcagcactcgaaggtcaagctatgaggacagcagcctgccctccatcaatgcgctcctgcaggcggaggtcctgtcccgacagatcacctcccccgtctccgggatcaacggcgacattcgggcgaagaagattgccagcatcgcagatgtgtgtgagtccatgaaggagcagctgctggttctcgttgagtgggccaagtacatcccagctttctgcgagctccccctggacgaccaggtggccctgctcagagcccatgctggcgagcacctgctgctcggagccaccaagagatccatggtgttcaaggacgtgctgctcctaggcaatgactacattgtccctcggcactgcccggagctggcggagatgagccgggtgtccatacgcatccttgacgagctggtgctgcccttccaggagctgcagatcgatgacaatgagtatgcctacctcaaagccatcatcttctttgacccagatgccaaggggctgagcgatccagggaagatcaagcggctgcgttcccaggtgcaggtgagcttggaggactacatcaacgaccgccagtatgactcgcgtggccgctttggagagctgctgctgctgctgcccaccttgcagagcatcacctggcagatgatcgagcagatccagttcatcaagctcttcggcatggccaagattgacaacctgttgcaggagatgctgctgggagggtcccccagcgatgcaccccatgcccaccaccccctgcaccctcacctgatgcaggaacatatgggaaccaacgtcatcgttgccaacacaatgcccactcacctcagcaacggacagatgtgtgagtggccccgacccaggggacaggcagccacccctgagaccccacagccctcaccgccaggtggctcagggtctgagccctataagctcctgccgggagccgtcgccacaatcgtcaagcccctctctgccatcccccagccgaccatcaccaagcaggaagttatctgagacccagctttcttgtacaaagtggttgatatcggtaagcctatccctaaccctctcctcggtctcgattctacgtagtaatgaactagtccgtaacttgaaagtatttcgatttcttggctttatatatcttgtggaaaggacgacagaggcttcaaggccatacacca

SEQ ID NO: 3048 - DNA, 2567 bp, Homo sapiens
  source 1..2567: mol_type = genomic DNA
atcgattgatcaacaagtttgtacaaaaaagcaggcaccatgagcgaccaagatcactccatggatgaaatgacagctgtggtgaaaattgaaaaaggagttggtggcaataatgggggcaatggtaatggtggtggtgccttttcacaggctcgaagtagcagcacaggcagtagcagcagcactggaggaggagggcaggagtcccagccatcccctttggctctgctggcagcaacttgcagcagaattgagtcacccaatgagaacagcaacaactcccagggcccgagtcagtcagggggaacaggtgagcttgacctcacagccacacaactttcacagggtgccaatggctggcagatcatctcttcctcctctggggctacccctacctcaaaggaacagagtggcagcagtaccaatggcagcaatggcagtgagtcttccaagaatcgcacagtctctggtgggcagtatgttgtggctgccgctcccaacttacagaaccagcaagttctgacaggactacctggagtgatgcctaatattcagtatcaagtaatcccacagttccagaccgttgatgggcaacagctgcagtttgctgccactggggcccaagtgcagcaggatggttctggtcaaatacagatcataccaggtgcaaaccaacagattatcacaaatcgaggaagtggaggcaacatcattgctgctatgccaaacctactccagcaggctgtccccctccaaggcctggctaataatgtactctcaggacagactcagtatgtgaccaatgtaccagtggccctgaatgggaacatcaccttgctacctgtcaacagcgtttctgcagctaccttgactcccagctctcaggcagtcacgatcagcagctctgggtcccaggagagtggctcacagcctgtcacctcagggactaccatcagttctgccagcttggtatcatcacaagccagttccagctcctttttcaccaatgccaatagctactcaactactactaccaccagcaacatgggaattatgaactttactaccagtggatcatcagggaccaactctcaaggccagacaccccagagggtcagtgggctacaggggtctgatgctctgaacatccagcaaaaccagacatctggaggctcattgcaagcaggccagcaaaaagaaggagagcaaaaccagcagacacagcagcaacaaattcttatccagcctcagctagttcaagggggacaggccctccaggccctccaagcagcaccattgtcagggcagacctttacaactcaagccatctcccaggaaaccctccagaacctccagcttcaggctgttccaaactctggtcccatcatcatccggacaccaacagtggggcccaatggacaggtcagttggcagactctacagctgcagaacctccaagttcagaacccacaagcccaaacaatcaccttagccccaatgcagggtgtttccttggggcagaccagcagcagcaacaccactctcacacccattgcctcagctgcttccattcctgctggcacagtcactgtgaatgctgctcaactctcctccatgccaggcctccagaccattaacctcagtgcattgggtacttcaggaatccaggtgcacccaattcaaggcctgccgttggctatagcaaatgccccaggtgatcatggagctcagcttggtctccatggggctggtggtgatggaatacatgatgacacagcaggtggagaggaaggagaaaacagcccagatgcccaaccccaagccggtcggaggacccggcgggaagcatgcacctgcccctactgtaaagacagtgaaggaaggggctcgggggatcctggcaaaaagaaacagcatatttgccacatccaaggctgtgggaaagtgtatggcaagacctctcacctgcgggcacacttgcgctggcatacaggcgagaggccatttatgtgtacctggtcatactgtgggaaacgcttcacacgttcggatgagctacagaggcacaaacgtacacacacaggtgagaagaaatttgcctgccctgagtgtcctaagcgcttcatgaggagtgaccacctgtcaaaacatatcaagacccaccagaataagaagggaggcccaggtgtagctctgagtgtgggcactttgcccctggacagtggggcaggttcagaaggcagtggcactgccactccttcagcccttattaccaccaatatggtagccatggaggccatctgtccagagggcattgcccgtcttgccaacagtggcatcaacgtcatgcaggtggcagatctgcagtccattaatatcagtggcaatggcttctgagacccagctttcttgtacaaagtggttgatatcggtaagcctatccctaaccctctcctcggtctcgattctacgtagtaatgaactagtccgtaacttgaaagtatttcgatttcttggctttatatatcttgtggaaaggacgaagagtaataagttctaagtcatct

SEQ ID NO: 3049 - DNA, 2723 bp, Homo sapiens
  source 1..2723: mol_type = genomic DNA
atcgattgatcaacaagtttgtacaaaaaagcaggcaccatggcggaaccttcccaggccccgaccccggccccggctgcgcagccccggccccttcagtccccagcccctgccccaactccgactcctgcacccagcccggcttcagccccgattccgactcccaccccggcaccagcccctgccccagctgcagccccagccggcagcacagggactggggggcccggggtaggaagtgggggggccgggagcgggggggatccggctcgacctggcctgagccagcagcagcgcgccagtcagaggaaggcgcaagtccgggggctgccgcgcgccaagaagcttgagaagctaggggtcttctcggcttgcaaggccaatgaaacctgtaagtgtaatggctggaaaaaccccaagccccccactgcaccccgcatggatctgcagcagccagctgccaacctgagtgagctgtgccgcagttgtgagcaccccttggctgaccacgtatcccacttggagaatgtgtcagaggatgagataaaccgactgctggggatggtggtggatgtggagaatctcttcatgtctgttcacaaggaagaggacacagacaccaagcaggtctatttctacctcttcaagctactgcggaaatgcatcctgcagatgacccggcctgtggtggaggggtccctgggcagccctccatttgagaaacctaatattgagcagggtgtgctgaactttgtgcagtacaagtttagtcacctggctccccgggagcggcagacgatgttcgagctctcaaagatgttcttgctctgccttaactactggaagcttgagacacctgcccagtttcggcagaggtctcaggctgaggacgtggctacctacaaggtcaattacaccagatggctctgttactgccacgtgccccagagctgtgatagcctcccccgctacgaaaccactcatgtctttgggcgaagccttctccggtccattttcaccgttacccgccggcagctgctggaaaagttccgagtggagaaggacaaattggtgcccgagaagaggaccctcatcctcactcacttccccaaattcctgtccatgctggaggaggagatctatggggcaaactctccaatctgggagtcaggcttcaccatgccaccctcagaggggacacagctggttccccggccagcttcagtcagtgcagcggttgttcccagcacccccatcttcagccccagcatgggtgggggcagcaacagctccctgagtctggattctgcaggggccgagcctatgccaggcgagaagaggacgctcccagagaacctgaccctggaggatgccaagcggctccgtgtgatgggtgacatccccatggagctggtcaatgaggtcatgctgaccatcactgaccctgctgccatgctggggcctgagacgagcctgctttcggccaatgcggcccgggatgagacagcccgcctggaggagcgccgcggcatcatcgagttccatgtcatcggcaactcactgacgcccaaggccaaccggcgggtgttgctgtggctcgtggggctgcagaatgtcttttcccaccagctgccgcgcatgcctaaggagtatatcgcccgcctcgtctttgacccgaagcacaagactctggccttgatcaaggatgggcgggtcatcggtggcatctgcttccgcatgtttcccacccagggcttcacggagattgtcttctgtgctgtcacctcgaatgagcaggtcaagggttatgggacccacctgatgaaccacctgaaggagtatcacatcaagcacaacattctctacttcctcacctacgccgacgagtacgccatcggctacttcaaaaagcagggtttctccaaggacatcaaggtgcccaagagccgctacctgggctacatcaaggactacgagggagcgacgctgatggagtgtgagctgaatccccgcatcccctacacggagctgtcccacatcatcaagaagcagaaagagatcatcaagaagctgattgagcgcaaacaggcccagatccgcaaggtctacccggggctcagctgcttcaaggagggcgtgaggcagatccctgtggagagcgttcctggcattcgagagacaggctggaagccattggggaaggagaaggggaaggagctgaaggaccccgaccagctctacacaaccctcaaaaacctgctggcccaaatcaagtctcaccccagtgcctggcccttcatggagcctgtgaagaagtcggaggcccctgactactacgaggtcatccgcttccccattgacctgaagaccatgactgagcggctgcgaagccgctactacgtgacccggaagctctttgtggccgacctgcagcgggtcatcgccaactgtcgcgagtacaaccccccggacagcgagtactgccgctgtgccagcgccctggagaagttcttctacttcaagctcaaggagggaggcctcattgacaagtaggacccagctttcttgtacaaagtggttgatatcggtaagcctatccctaaccctctcctcggtctcgattctacgtagtaatgaactagtccgtaacttgaaagtatttcgatttcttggctttatatatcttgtggaaaggacgatgttttaacctcatgttacaaagt

SEQ ID NO: 3050 - DNA, 3014 bp, Homo sapiens
  source 1..3014: mol_type = genomic DNA
atcgattgatcaacaagtttgtacaaaaaagcaggcttcaccatgactgaactgaaggcaaagggtccccgggctccccacgtggcgggcggcccgccctcccccgaggtcggatccccactgctgtgtcgcccagccgcaggtccgttcccggggagccagacctcggacaccttgcccgaagtttcggccatacctatctccctggacgggctactcttccctcggccctgccagggacaggacccctccgacgaaaagacgcaggaccagcagtcgctgtcggacgtggagggcgcatattccagagctgaagctacaaggggtgctggaggcagcagttctagtcccccagaaaaggacagcggactgctggacagtgtcttggacactctgttggcgccctcaggtcccgggcagagccaacccagccctcccgcctgcgaggtcaccagctcttggtgcctgtttggccccgaacttcccgaagatccaccggctgcccccgccacccagcgggtgttgtccccgctcatgagccggtccgggtgcaaggttggagacagctccgggacggcagctgcccataaagtgctgccccggggcctgtcaccagcccggcagctgctgctcccggcctctgagagccctcactggtccggggccccagtgaagccgtctccgcaggccgctgcggtggaggttgaggaggaggatggctctgagtccgaggagtctgcgggtccgcttctgaagggcaaacctcgggccctgggtggcgcggcggctggaggaggagccgcggctgtcccgccgggggcggcagcaggaggcgtcgccctggtccccaaggaagattcccgcttctcagcgcccagggtcgccctggtggagcaggacgcgccgatggcgcccgggcgctccccgctggccaccacggtgatggatttcatccacgtgcctatcctgcctctcaatcacgccttattggcagcccgcactcggcagctgctggaagacgaaagttacgacggcggggccggggctgccagcgcctttgccccgccgcggagttcaccctgtgcctcgtccaccccggtcgctgtaggcgacttccccgactgcgcgtacccgcccgacgccgagcccaaggacgacgcgtaccctctctatagcgacttccagccgcccgctctaaagataaaggaggaggaggaaggtgcggaggcctccgcgcgctccccgcgttcctaccttgtggccggtgccaaccccgcagccttcccggatttcccgttggggccaccgcccccgctgccgccgcgagcgaccccatccagacccggggaagcggcggtgacggccgcacccgccagtgcctcagtctcgtctgcgtcctcctcggggtcgaccctggagtgcatcctgtacaaagcggagggcgcgccgccccagcagggcccgttcgcgccgccgccctgcaaggcgccgggcgcgagcggctgcctgctcccgcgggacggcctgccctccacctccgcctctgccgccgccgccggggcggcccccgcgctctaccctgcactcggcctcaacgggctcccgcagctcggctaccaggccgccgtgctcaaggagggcctgccgcaggtctacccgccctatctcaactacctgaggccggattcagaagccagccagagcccacaatacagcttcgagtcattacctcagaagatttgtttaatctgtggggatgaagcatcaggctgtcattatggtgtccttacctgtgggagctgtaaggtcttctttaagagggcaatggaagggcagcacaactacttatgtgctggaagaaatgactgcatcgttgataaaatccgcagaaaaaactgcccagcatgtcgccttagaaagtgctgtcaggctggcatggtccttggaggtcgaaaatttaaaaagttcaataaagtcagagttgtgagagcactggatgctgttgctctcccacagccagtgggcgttccaaatgaaagccaagccctaagccagagattcactttttcaccaggtcaagacatacagttgattccaccactgatcaacctgttaatgagcattgaaccagatgtgatctatgcaggacatgacaacacaaaacctgacacctccagttctttgctgacaagtcttaatcaactaggcgagaggcaacttctttcagtagtcaagtggtctaaatcattgccaggttttcgaaacttacatattgatgaccagataactctcattcagtattcttggatgagcttaatggtgtttggtctaggatggagatcctacaaacacgtcagtgggcagatgctgtattttgcacctgatctaatactaaatgaacagcggatgaaagaatcatcattctattcattatgccttaccatgtggcagatcccacaggagtttgtcaagcttcaagttagccaagaagagttcctctgtatgaaagtattgttacttcttaatacaattcctttggaagggctacgaagtcaaacccagtttgaggagatgaggtcaagctacattagagagctcatcaaggcaattggtttgaggcaaaaaggagttgtgtcgagctcacagcgtttctatcaacttacaaaacttcttgataacttgcatgatcttgtcaaacaacttcatctgtactgcttgaatacatttatccagtcccgggcactgagtgttgaatttccagaaatgatgtctgaagttattgctgcacaattacccaagatattggcagggatggtgaaaccccttctctttcataaaaagtgagacccagctttcttgtacaaagtggttgatatcggtaagcctatccctaaccctctcctcggtctcgattctacgtagtaatgaactagtccgtaacttgaaagtatttcgatttcttggctttatatatcttgtggaaaggacgacccatccgaaagcaactaaccctt

SEQ ID NO: 3051 - DNA, 1607 bp, Homo sapiens
  source 1..1607: mol_type = genomic DNA
atcgattgatcaacaagtttgtacaaaaaagttggcatggcaaccatagaagaaattgcacatcaaattattgaacaacagatgggagagattgttacagagcagcaaactgggcagaaaatccagattgtgacagcacttgatcataatacccaaggcaagcagttcattctgacaaatcacgacggctctactccaagcaaagtcattctggccaggcaagattccactccgggaaaagttttccttacaactccagatgcagcaggtgtcaaccagttattttttaccactcctgatctgtctgcacaacacctgcagctcctaacagataattctccagaccaaggaccaaataaggtttttgatctttgcgtagtatgtggagacaaagcatcaggacgtcattatggagcagtaacttgtgaaggctgcaaaggattttttaaaagaagcatccgaaaaaatttagtatattcatgtcgaggatcaaaggattgtattattaataagcaccaccgaaaccgctgtcaatactgcaggttacagagatgtattgcgtttggaatgaagcaagactctgtccaatgtgaaagaaaacccattgaagtatcacgagaaaaatcttccaactgtgccgcttcaacagaaaaaatctatatccgaaaggaccttcgtagcccattaactgcaactccaacttttgtaacagatagtgaaagtacaaggtcaacaggactgttagattcaggaatgttcatgaatattcatccatctggagtaaaaactgagtcagctgtgctgatgacatcagataaggctgaatcatgtcagggagatttaagtacattggccaatgtggttacatcattagcgaatcttggaaaaactaaagatctttctcaaaatagtaatgaaatgtctatgattgaaagcttaagcaatgatgatacctctttgtgtgaatttcaagaaatgcagaccaacggtgatgtttcaagggcatttgacactcttgcaaaagcattgaatcctggagagagcacagcctgccagagctcagtagcgggcatggaaggaagtgtacacctaatcactggagattcaagcataaattacaccgaaaaagaggggccacttctcagcgattcacatgtagctttcaggctcaccatgccttctcctatgcctgagtacctgaatgtgcactacattggggagtctgcctccagactgctgttcttatcaatgcactgggcactttcgattccttctttccaggctctagggcaagaaaacagcatatcactggtgaaagcttactggaatgaactttttactcttggtcttgcccagtgctggcaagtgatgaatgtagcaactatattagcaacatttgtcaattgtcttcacaatagtcttcaacaagcagaggggtacccaactttcttgtacaaagtggttgatatcggtaagcctatccctaaccctctcctcggtctcgattctacgtagtaatgaactagtccgtaacttgaaagtatttcgatttcttggctttatatatcttgtggaaaggacgagtaggggttcaccgaaatctacac

SEQ ID NO: 3052 - DNA, 2156 bp, Homo sapiens
  source 1..2156: mol_type = genomic DNA
atcgattgatcaacaagtttgtacaaaaaagcaggcttcaccatggctacaaatatggaggggctggttcagcacagagtggggacccagcaggtggctgaggtaacacgtacacagacctctcggccggaatctccagggatgaccagcccctccccacgcatccagataatctccaccgactctgctgtagcctcacctcagcgcattcagggctctgaacctgcctctggcccattgagtgttttcacatctttgaacaaagagaagattgtcacagaccagcagacaggacagaaaatccagatagtcaccgcagtggacgcctccggatcccccaaacagcagttcatcctgaccagcccagatggagctggaactgggaaggtgatcctggcttccccagagacatccagcgccaagcaactcatattcaccacctcagacaacctcgtccctggcaggatccagattgtcacggattctgcctctgtggagcgtttactggggaagacggacgtccagcggccccaggtggtagagtactgtgtggtctgtggcgacaaagcctccggccgtcactatggggctgtcagttgtgaaggttgcaaaggtttcttcaaaaggagtgtgaggaaaaatttgacctacagctgccggagcaaccaagactgcatcatcaataaacatcaccggaaccgctgtcagttttgccggctgaaaaaatgcttagagatgggcatgaaaatggaatctgtgcagagtgaacggaagcccttcgatgtgcaacgggagaaaccaagcaattgtgctgcttcaactgagaaaatctatatccggaaagacctgagaagtcccctgatagctactcccacgtttgtggcagacaaagatggagcaagacaaacaggtcttcttgatccagggatgcttgtgaacatccagcagcctttgatacgtgaggatggtacagttctcctggccacggattctaaggctgaaacaagccagggagctctgggcacactggcaaatgtagtgacctcccttgccaacctaagtgaatctttgaacaacggtgacacttcagaaatccagccagaggaccagtctgcaagtgagataactcgggcatttgataccttagctaaagcacttaataccacagacagctcctcttctccaagcttggcagatgggatagacaccagtggaggagggagcatccacgtcatcagcagagaccagtcgacacccatcattgaggttgaaggccccctcctttcagacacacacgtcacatttaagctaacaatgcccagtccaatgccagagtacctcaacgtgcactacatctgtgagtctgcatcccgtctgcttttcctctcaatgcactgggctcggtcaatcccagcctttcaggcacttgggcaggactgcaacaccagccttgtgcgggcctgctggaatgagctcttcaccctcggcctggcccagtgtgcccaggtcatgagtctctccaccatcctggctgccattgtcaaccacctgcagaacagcatccaggaagataaactttctggtgaccggataaagcaagtcatggagcacatctggaagctgcaggagttctgtaacagcatggcgaagctggatatagatggctatgagtatgcataccttaaagctatagttctctttagccccgatcatccaggtttgaccagcacaagccagattgaaaaattccaagaaaaggcacagatggagttgcaggactatgttcagaaaacctactcagaagacacctaccgattggcccggatcctcgttcgcctgccggcactcaggctgatgagctccaacataacagaagaacttttttttactggtctcattggcaatgtttcgatagacagcataatcccctacatcctcaagatggagacagcagagtataatggccagatcaccggagccagtctagacccagctttcttgtacaaagtggttgatatcggtaagcctatccctaaccctctcctcggtctcgattctacgtagtaatgaactagtccgtaacttgaaagtatttcgatttcttggctttatatatcttgtggaaaggacgagctattgacagtttagagagagtt

SEQ ID NO: 3053 - DNA, 2060 bp, Homo sapiens
  source 1..2060: mol_type = genomic DNA
atcgattgatcaacaagtttgtacaaaaaagcaggcttcaccatgaccagcccctccccacgcatccagataatctccaccgactctgctgtagcctcacctcagcgcattcagggctctgaacctgcctctggcccattgagtgttttcacatctttgaacaaagagaagattgtcacagaccagcagacaggacagaaaatccagatagtcaccgcagtggacgcctccggatcccccaaacagcagttcatcctgaccagcccagatggagctggaactgggaaggtgatcctggcttccccagagacatccagcgccaagcaactcatattcaccacctcagacaacctcgtccctggcaggatccagattgtcacggattctgcctctgtggagcgtttactggggaagacggacgtccagcggccccaggtggtagagtactgtgtggtctgtggcgacaaagcctccggccgtcactatggggctgtcagttgtgaaggttgcaaaggtttcttcaaaaggagtgtgaggaaaaatttgacctacagctgccggagcaaccaagactgcatcatcaataaacatcaccggaaccgctgtcagttttgccggctgaaaaaatgcttagagatgggcatgaaaatggaatctgtgcagagtgaacggaagcccttcgatgtgcaacgggagaaaccaagcaattgtgctgcttcaactgagaaaatctatatccggaaagacctgagaagtcccctgatagctactcccacgtttgtggcagacaaagatggagcaagacaaacaggtcttcttgatccagggatgcttgtgaacatccagcagcctttgatacgtgaggatggtacagttctcctggccacggattctaaggctgaaacaagccagggagctctgggcacactggcaaatgtagtgacctcccttgccaacctaagtgaatctttgaacaacggtgacacttcagaaatccagccagaggaccagtctgcaagtgagataactcgggcatttgataccttagctaaagcacttaataccacagacagctcctcttctccaagcttggcagatgggatagacaccagtggaggagggagcatccacgtcatcagcagagaccagtcgacacccatcattgaggttgaaggccccctcctttcagacacacacgtcacatttaagctaacaatgcccagtccaatgccagagtacctcaacgtgcactacatctgtgagtctgcatcccgtctgcttttcctctcaatgcactgggctcggtcaatcccagcctttcaggcacttgggcaggactgcaacaccagccttgtgcgggcctgctggaatgagctcttcaccctcggcctggcccagtgtgcccaggtcatgagtctctccaccatcctggctgccattgtcaaccacctgcagaacagcatccaggaagataaactttctggtgaccggataaagcaagtcatggagcacatctggaagctgcaggagttctgtaacagcatggcgaagctggatatagatggctatgagtatgcataccttaaagctatagttctctttagccccgatcatccaggtttgaccagcacaagccagattgaaaaattccaagaaaaggcacagatggagttgcaggactatgttcagaaaacctactcagaagacacctaccgattggcccggatcctcgttcgcctgccggcactcaggctgatgagctccaacataacagaagaacttttttttactggtctcattggcaatgtttcgatagacagcataatcccctacatcctcaagatggagacagcagagtataatggccagatcaccggagccagtctatgagacccagctttcttgtacaaagtggttgatatcggtaagcctatccctaaccctctcctcggtctcgattctacgtagtaatgaactagtccgtaacttgaaagtatttcgatttcttggctttatatatcttgtggaaaggacgagaattcccaacaaactgacatgca

SEQ ID NO: 3054 - DNA, 2159 bp, Homo sapiens
  source 1..2159: mol_type = genomic DNA
atcgattgatcaacaagtttgtacaaaaaagcaggcttcaccatggctacaaatatggaggggctggttcagcacagagtggggacccagcaggtggctgaggtaacacgtacacagacctctcggccggaatctccagggatgaccagcccctccccacgcatccagataatctccaccgactctgctgtagcctcacctcagcgcattcagggctctgaacctgcctctggcccattgagtgttttcacatctttgaacaaagagaagattgtcacagaccagcagacaggacagaaaatccagatagtcaccgcagtggacgcctccggatcccccaaacagcagttcatcctgaccagcccagatggagctggaactgggaaggtgatcctggcttccccagagacatccagcgccaagcaactcatattcaccacctcagacaacctcgtccctggcaggatccagattgtcacggattctgcctctgtggagcgtttactggggaagacggacgtccagcggccccaggtggtagagtactgtgtggtctgtggcgacaaagcctccggccgtcactatggggctgtcagttgtgaaggttgcaaaggtttcttcaaaaggagtgtgaggaaaaatttgacctacagctgccggagcaaccaagactgcatcatcaataaacatcaccggaaccgctgtcagttttgccggctgaaaaaatgcttagagatgggcatgaaaatggaatctgtgcagagtgaacggaagcccttcgatgtgcaacgggagaaaccaagcaattgtgctgcttcaactgagaaaatttatatccggaaagacctgagaagtcccctgatagctactcccacgtttgtggcagacaaagatggagcaagacaaacaggtcttcttgatccagggatgcttgtgaacatccagcagcctttgatacgtgaggatggtacagttctcctggccacggattctaaggctgaaacaagccagggagctctgggcacactggcaaatgtagtgacctcccttgccaacctaagtgaatctttgaacaacggtgacacttcagaaatccagccagaggaccagtctgcaagtgagataactcgggcatttgataccttagctaaagcacttaataccacagacagctcctcttctccaagcttggcagatgggatagacaccagtggaggagggagcatccacgtcatcagcagagaccagtcgacacccatcattgaggttgaaggccccctcctttcagacacacacgtcacatttaagctaacaatgcccagtccaatgccagagtacctcaacgtgcactacatctgtgagtctgcatcccgtctgcttttcctctcaatgcactgggctcggtcaatcccagcctttcaggcacttgggcaggactgcaacaccagccttgtgcgggcctgctggaatgagctcttcaccctcggcctggcccagtgtgcccaggtcatgagtctctccaccatcctggctgccattgtcaaccacctgcagaacagcatccaggaagataaactttctggtgaccggataaagcaagtcatggagcacatctggaagctgcaggagttctgtaacagcatggcgaagctggatatagatggctatgagtatgcataccttaaagctatagttctctttagccccgatcatccaggtttgaccagcacaagccagattgaaaaattccaagaaaaggcacagatggagttgcaggactatgttcagaaaacctactcagaagacacctaccgattggcccggatcctcgttcgcctgccggcactcaggctgatgagctccaacataacagaagaacttttttttactggtctcattggcaatgtttcgatagacagcataatcccctacatcctcaagatggagacagcagagtataatggccagatcaccggagccagtctatgagacccagctttcttgtacaaagtggttgatatcggtaagcctatccctaaccctctcctcggtctcgattctacgtagtaatgaactagtccgtaacttgaaagtatttcgatttcttggctttatatatcttgtggaaaggacgagtagttgactttacaatatgtatt

SEQ ID NO: 3055 - DNA, 2057 bp, Homo sapiens
  source 1..2057: mol_type = genomic DNA
atcgattgatcaacaagtttgtacaaaaaagcaggcttcaccatgaccagcccctccccacgcatccagataatctccaccgactctgctgtagcctcacctcagcgcattcagggctctgaacctgcctctggcccattgagtgttttcacatctttgaacaaagagaagattgtcacagaccagcagacaggacagaaaatccagatagtcaccgcagtggacgcctccggatcccccaaacagcagttcatcctgaccagcccagatggagctggaactgggaaggtgatcctggcttccccagagacatccagcgccaagcaactcatattcaccacctcagacaacctcgtccctggcaggatccagattgtcacggattctgcctctgtggagcgtttactggggaagacggacgtccagcggccccaggtggtagagtactgtgtggtctgtggcgacaaagcctccggccgtcactatggggctgtcagttgtgaaggttgcaaaggtttcttcaaaaggagtgtgaggaaaaatttgacctacagctgccggagcaaccaagactgcatcatcaataaacatcaccggaaccgctgtcagttttgccggctgaaaaaatgcttagagatgggcatgaaaatggaatctgtgcagagtgaacggaagcccttcgatgtgcaacgggagaaaccaagcaattgtgctgcttcaactgagaaaatctatatccggaaagacctgagaagtcccctgatagctactcccacgtttgtggcagacaaagatggagcaagacaaacaggtcttcttgatccagggatgcttgtgaacatccagcagcctttgatacgtgaggatggtacagttctcctggccacggattctaaggctgaaacaagccagggagctctgggcacactggcaaatgtagtgacctcccttgccaacctaagtgaatctttgaacaacggtgacacttcagaaatccagccagaggaccagtctgcaagtgagataactcgggcatttgataccttagctaaagcacttaataccacagacagctcctcttctccaagcttggcagatgggatagacaccagtggaggagggagcatccacgtcatcagcagagaccagtcgacacccatcattgaggttgaaggccccctcctttcagacacacacgtcacatttaagctaacaatgcccagtccaatgccagagtacctcaacgtgcactacatctgtgagtctgcatcccgtctgcttttcctctcaatgcactgggctcggtcaatcccagcctttcaggcacttgggcaggactgcaacaccagccttgtgcgggcctgctggaatgagctcttcaccctcggcctggcccagtgtgcccaggtcatgagtctctccaccatcctggctgccattgtcaaccacctgcagaacagcatccaggaagataaactttctggtgaccggataaagcaagtcatggagcacatctggaagctgcaggagttctgtaacagcatggcgaagctggatatagatggctatgagtatgcataccttaaagctatagttctctttagccccgatcatccaggtttgaccagcacaagccagattgaaaaattccaagaaaaggcacagatggagttgcaggactatgttcagaaaacctactcagaagacacctaccgattggcccggatcctcgttcgcctgccggcactcaggctgatgagctccaacataacagaagaacttttttttactggtctcattggcaatgtttcgatagacagcataatcccctacatcctcaagatggagacagcagagtataatggccagatcaccggagccagtctagacccagctttcttgtacaaagtggttgatatcggtaagcctatccctaaccctctcctcggtctcgattctacgtagtaatgaactagtccgtaacttgaaagtatttcgatttcttggctttatatatcttgtggaaaggacgaccgtagactgtaacgttaataggg

SEQ ID NO: 3056 - DNA, 1616 bp, Homo sapiens
  source 1..1616: mol_type = genomic DNA
atcgattgatcaacaagtttgtacaaaaaagttggcatggcgggcgagaaccaccagtggcagggcagcatcctctacaacatgcttatgagcgcgaagcaaacgcgcgcggctcctgaggctccagagacgcggctggtggatcagtgctggggctgttcgtgcggcgatgagcccggggtgggcagagaggggctgctgggcgggcggaacgtggcgctcctgtaccgctgctgcttttgcggtaaagaccacccacggcagggcagcatcctctacagcatgctgacgagcgcaaagcaaacgtacgcggcaccgaaggcgcccgaggcgacgctgggtccgtgctggggctgttcgtgcggctctgatcccggggtgggcagagcggggcttccgggtgggcggcccgtggcactcctgtaccgctgctgcttttgtggtgaagaccacccgcggcagggcagcatcctctacagcttgctcactagctcaaagcaaacgcacgtggctccggcagcgcccgaggcacggccagggggcgcgtggtgggaccgctcctacttcgcgcagaggccagggggtaaagaggcgctaccaggcgggcgggccacggcgcttctgtaccgctgctgcttttgcggtgaagaccacccgcagcagggcagcaccctctactgcgtgcccacgagcacaaatcaagcgcaggcggctccggaggagcggccgagggccccctggtgggacacctcctctggtgcgctgcggccggtggcgctcaagagtccacaggtggtctgcgaggcagcctcagcgggcctgttgaagacgctgcgcttcgtcaagtacttgccctgcttccaggtgctgcccctggaccagcagctggtgctggtgcgcaactgctgggcgtccctgctcatgcttgagctggcccaggaccgcttgcagttcgagactgtggaagtctcggagcccagcatgctgcagaagatcctcaccaccaggcggcgggagaccgggggcaacgagccactgcccgtgcccacgctgcagcaccatttggcaccgccggcggaggccaggaaggtgccctccgcctcccaggtccaagccatcaagtgctttctttccaaatgctggagtctgaacatcagtaccaaggagtacgcctacctcaaggggaccgtgctctttaacccggacgtgccgggcctgcagtgcgtgaagtacattcagggactccagtggggaactcagcaaatactcagtgaacacaccaggatgacgcaccaagggccccatgacagattcatcgaacttaatagtacccttttcctgctgagattcatcaatgccaatgtcattgctgaactgttcttcaggcccatcatcggcacagtcagcatggatgatatgatgctggaaatgctctgtacaaagatatacccaactttcttgtacaaagtggttgatatcggtaagcctatccctaaccctctcctcggtctcgattctacgtagtaatgaactagtccgtaacttgaaagtatttcgatttcttggctttatatatcttgtggaaaggacgaaacattccgaccatcctaccggaa

SEQ ID NO: 3057 - DNA, 1625 bp, Homo sapiens
  source 1..1625: mol_type = genomic DNA
atcgattgatcaacaagtttgtacaaaaaagcaggcttcaccatggcgggcgagaaccaccagtggcagggcagcatcctctacaacatgcttatgagcgcgaagcaaacgcgcgcggctcctgaggctccagagacgcggctggtggatcagtgctggggctgttcgtgcggcgatgagcccggggtgggcagagaggggctgctgggcgggcggaacgtggcgctcctgtaccgctgctgcttttgcggtaaagaccacccacggcagggcagcatcctctacagcatgctgacgagcgcaaagcaaacgtacgcggcaccgaaggcgcccgaggcgacgctgggtccgtgctggggctgttcgtgcggctctgatcccggggtgggcagagcggggcttccgggtgggcggcccgtggcactcctgtaccgctgctgcttttgtggtgaagaccacccgcggcagggcagcatcctctacagcttgctcactagctcaaagcaaacgcacgtggctccggcagcgcccgaggcacgaccagggggcgcgtggtgggaccgctcctacttcgcgcagaggccagggggtaaagaggcgctaccaggcgggcgggccacggcgcttctgtaccgctgctgcttttgcggtgaagaccacccgcagcagggcagcaccctctactgcgtgcccacgagcacaaatcaagcgcaggcggctccggaggagcggccgagggccccctggtgggacacctcctctggtgcgctgcggccggtggcgctcaagagtccacaggtggtctgcgaggcagcctcagcgggcctgttgaagacgctgcgcttcgtcaagtacttgccctgcttccaggtgctgcccctggaccagcagctggtgctggtgcgcaactgctgggcgtccctgctcatgcttgagctggcccaggaccgcttgcagttcgagactgtggaagtctcggagcccagcatgctgcagaagatcctcaccaccaggcggcgggagaccgggggcaacgagccactgcccgtgcccacgctgcagcaccatttggcaccgccggcggaggccaggaaggtgccctccgcctcccaggtccaagccatcaagtgctttctttccaaatgctggagtctgaacatcagtaccaaggagtacgcctacctcaaggggaccgtgctctttaacccggacgtgccgggcctgcagtgcgtgaagtacattcagggactccagtggggaactcagcaaatactcagtgaacacaccaggatgacgcaccaagggccccatgacagattcatcgaacttaatagtacccttttcctgctgagattcatcaatgccaatgtcattgctgaactgttcttcaggcccatcatcggcacagtcagcatggatgatatgatgctggaaatgctctgtacaaagatatgagacccagctttcttgtacaaagtggttgatatcggtaagcctatccctaaccctctcctcggtctcgattctacgtagtaatgaactagtccgtaacttgaaagtatttcgatttcttggctttatatatcttgtggaaaggacgactgacgtacattcctggaattacc

SEQ ID NO: 3058 - DNA, 1622 bp, Homo sapiens
  source 1..1622: mol_type = genomic DNA
atcgattgatcaacaagtttgtacaaaaaagcaggcttcaccatggcgggcgagaaccaccagtggcagggcagcatcctctacaacatgcttatgagcgcgaagcaaacgcgcgcggctcctgaggctccagagacgcggctggtggatcagtgctggggctgttcgtgcggcgatgagcccggggtgggcagagaggggctgctgggcgggcggaacgtggcgctcctgtaccgctgctgcttttgcggtaaagaccacccacggcagggcagcatcctctacagcatgctgacgagcgcaaagcaaacgtacgcggcaccgaaggcgcccgaggcgacgctgggtccgtgctggggctgttcgtgcggctctgatcccggggtgggcagagcggggcttccgggtgggcggcccgtggcactcctgtaccgctgctgcttttgtggtgaagaccacccgcggcagggcagcatcctctacagcttgctcactagctcaaagcaaacgcacgtggctccggcagcgcccgaggcacgaccagggggcgcgtggtgggaccgctcctacttcgcgcagaggccagggggtaaagaggcgctaccaggcgggcgggccacggcgcttctgtaccgctgctgcttttgcggtgaagaccacccgcagcagggcagcaccctctactgcgtgcccacgagcacaaatcaagcgcaggcggctccggaggagcggccgagggccccctggtgggacacctcctctggtgcgctgcggccggtggcgctcaagagtccacaggtggtctgcgaggcagcctcagcgggcctgttgaagacgctgcgcttcgtcaagtacttgccctgcttccaggtgctgcccctggaccagcagctggtgctggtgcgcaactgctgggcgtccctgctcatgcttgagctggcccaggaccgcttgcagttcgagactgtggaagtctcggagcccagcatgctgcagaagatcctcaccaccaggcggcgggagaccgggggcaacgagccactgcccgtgcccacgctgcagcaccatttggcaccgccggcggaggccaggaaggtgccctccgcctcccaggtccaagccatcaagtgctttctttccaaatgctggagtctgaacatcagtaccaaggagtacgcctacctcaaggggaccgtgctctttaacccggacgtgccgggcctgcagtgcgtgaagtacattcagggactccagtggggaactcagcaaatactcagtgaacacaccaggatgacgcaccaagggccccatgacagattcatcgaacttaatagtacccttttcctgctgagattcatcaatgccaatgtcattgctgaactgttcttcaggcccatcatcggcacagtcagcatggatgatatgatgctggaaatgctctgtacaaagatagacccagctttcttgtacaaagtggttgatatcggtaagcctatccctaaccctctcctcggtctcgattctacgtagtaatgaactagtccgtaacttgaaagtatttcgatttcttggctttatatatcttgtggaaaggacgaaccttttgtgtgctgggtaggttt

SEQ ID NO: 3059 - DNA, 1556 bp, Homo sapiens
  source 1..1556: mol_type = genomic DNA
atcgattgatcaacaagtttgtacaaaaaagttggcatgcctcacaactccatcagatctggccatggagggctgaaccagctgggaggggcctttgtgaatggcagacctctgccggaagtggtccgccagcgcatcgtagacctggcccaccagggtgtaaggccctgcgacatctctcgccagctccgcgtcagccatggctgcgtcagcaagatccttggcaggtactacgagactggcagcatccggcctggagtgatagggggctccaagcccaaggtggccacccccaaggtggtggagaagattggggactacaaacgccagaaccctaccatgtttgcctgggagatccgagaccggctcctggctgagggcgtctgtgacaatgacactgtgcccagtgtcagctccattaatagaatcatccggaccaaagtgcagcaaccattcaacctccctatggacagctgcgtggccaccaagtccctgagtcccggacacacgctgatccccagctcagctgtaactcccccggagtcaccccagtcggattccctgggctccacctactccatcaatgggctcctgggcatcgctcagcctggcagcgacaagaggaaaatggatgacagtgatcaggatagctgccgactaagcattgactcacagagcagcagcagcggaccccgaaagcaccttcgcacggatgccttcagccagcaccacctcgagccgctcgagtgcccatttgagcggcagcactacccagaggcctatgcctcccccagccacaccaaaggcgagcagggcctctacccgctgcccttgctcaacagcaccctggacgacgggaaggccaccctgaccccttccaacacgccactggggcgcaacctctcgactcaccagacctaccccgtggtggcagatcctcactcacccttcgccataaagcaggaaacccccgaggtgtccagttctagctccaccccttcctctttatctagctccgcctttttggatctgcagcaagtcggctccggggtcccgcccttcaatgcctttccccatgctgcctccgtgtacgggcagttcacgggccaggccctcctctcagggcgagagatggtggggcccacgctgcccggatacccaccccacatccccaccagcggacagggcagctatgcctcctctgccatcgcaggcatggtggcaggaagtgaatactctggcaatgcctatggccacaccccctactcctcctacagcgaggcctggcgcttccccaactccagcttgctgagttccccatattattacagttccacatcaaggccgagtgcaccgcccaccactgccacggcctttgaccatctgtacccaactttcttgtacaaagtggttgatatcggtaagcctatccctaaccctctcctcggtctcgattctacgtagtaatgaactagtccgtaacttgaaagtatttcgatttcttggctttatatatcttgtggaaaggacgaagcacctcaacccactcttggtcg

SEQ ID NO: 3060 - DNA, 1760 bp, Homo sapiens
  source 1..1760: mol_type = genomic DNA
atcgattgatcaacaagtttgtacaaaaaagttggcatggacagggccccacagagacagcaccgagcctcacgggagctgctggctgcaaagaagacccacacctcacaaattgaagtgatcccttgcaaaatctgtggggacaagtcgtctgggatccactacggggttatcacctgtgaggggtgcaagggcttcttccgccggagccagcgctgtaacgcggcctactcctgcacccgtcagcagaactgccccatcgaccgcaccagccgaaaccgatgccagcactgccgcctgcagaaatgcctggcgctgggcatgtcccgagatgctgtcaagttcggccgcatgtccaagaagcagagggacagcctgcatgcagaagtgcagaaacagctgcagcagcggcaacagcagcaacaggaaccagtggtcaagacccctccagcaggggcccaaggagcagataccctcacctacaccttggggctcccagacgggcagctgcccctgggctcctcgcctgacctgcctgaggcttctgcctgtccccctggcctcctgaaagcctcaggctctgggccctcatattccaacaacttggccaaggcagggctcaatggggcctcatgccaccttgaatacagccctgagcggggcaaggctgagggcagagagagcttctatagcacaggcagccagctgacccctgaccgatgtggacttcgttttgaggaacacaggcatcctgggcttggggaactgggacagggcccagacagctacggcagccccagtttccgcagcacaccggaggcaccctatgcctccctgacagagatagagcacctggtgcagagcgtctgcaagtcctacagggagacatgccagctgcggctggaggacctgctgcggcagcgctccaacatcttctcccgggaggaagtgactggctaccagaggaagtccatgtgggagatgtgggaacggtgtgcccaccacctcaccgaggccattcagtacgtggtggagttcgccaagaggctctcaggctttatggagctctgccagaatgaccagattgtgcttctcaaagcaggagcaatggaagtggtgctggttaggatgtgccgggcctacaatgctgacaaccgcacggtcttttttgaaggcaaatacggtggcatggagctgttccgagccttgggctgcagcgagctcatcagctccatctttgacttctcccactccctaagtgccttgcacttttccgaggatgagattgccctctacacagcccttgttctcatcaatgcccatcggccagggctccaagagaaaaggaaagtagaacagctgcagtacaatctggagctggcctttcatcatcatctctgcaagactcatcgccaaagcatcctggcaaagctgccacccaaggggaagcttcggagcctgtgtagccagcatgtggaaaggctgcagatcttccagcacctccaccccatcgtggtccaagccgctttccctccactctacaaggagctcttcagcactgaaaccgagtcacctgtggggctgtccaagtgcccaactttcttgtacaaagtggttgatatcggtaagcctatccctaaccctctcctcggtctcgattctacgtagtaatgaactagtccgtaacttgaaagtatttcgatttcttggctttatatatcttgtggaaaggacgaactagttaagaatcgaagcccgtt

SEQ ID NO: 3061 - DNA, 1637 bp, Homo sapiens
  source 1..1637: mol_type = genomic DNA
atcgattgatcaacaagtttgtacaaaaaagttggcaccatgggatcaaaaatgaatctcattgaacattcccatttacctaccacagatgaattttctttttctgaaaatttatttggtgttttaacagaacaagtggcaggtcctctgggacagaacctggaagtggaaccatactcgcaatacagcaatgttcagtttccccaagttcaaccacagatttcctcgtcatcctattattccaacctgggtttctacccccagcagcctgaagagtggtactctcctggaatatatgaactcaggcgtatgccagctgagactctctaccagggagaaactgaggtagcagagatgcctgtaacaaagaagccccgcatgggcgcgtcagcagggaggatcaaaggggatgagctgtgtgttgtttgtggagacagagcctctggataccactataatgcactgacctgtgaggggtgtaaaggtttcttcaggagaagcattaccaaaaacgctgtgtacaagtgtaaaaacgggggcaactgtgtgatggatatgtacatgcgaagaaagtgtcaagagtgtcgactaaggaaatgcaaagagatgggaatgttggctgaatgtatgtatacaggcttgttaactgaaattcagtgtaaatctaagcgactgagaaaaaatgtgaagcagcatgcagatcagaccgtgaatgaagacagtgaaggtcgtgacttgcgacaagtgacctcgacaacaaagtcatgcagggagaaaactgaactcaccccagatcaacagactcttctacattttattatggattcatataacaaacagaggatgcctcaggaaataacaaataaaattttaaaagaagaattcagtgcagaagaaaattttctcattttgacggaaatggcaaccaatcatgtacaggttcttgtagaattcacaaaaaagctaccaggatttcagactttggaccatgaagaccagattgctttgctgaaagggtctgcggttgaagctatgttccttcgttcagctgagattttcaataagaaacttccgtctgggcattctgacctattggaagaaagaattcgaaatagtggtatctctgatgaatatataacacctatgtttagtttttataaaagtattggggaactgaaaatgactcaagaggagtatgctctgcttacagcaattgttatcctgtctccagatagacaatacataaaggatagagaggcagtagagaagcttcaggagccacttcttgatgtgctacaaaagttgtgtaagattcaccagcctgaaaatcctcaacactttgcctgtctcctgggtcgcctgactgaattacggacattcaatcatcaccacgctgagatgctgatgtcatggagagtaaacgaccacaagtttaccccacttctctgtgaaatctgggacgtgcagttgccaactttcttgtacaaagtggttgatatcggtaagcctatccctaaccctctcctcggtctcgattctacgtagtaatgaactagtccgtaacttgaaagtatttcgatttcttggctttatatatcttgtggaaaggacgacctgcacggctattcgtgcaaagc

SEQ ID NO: 3062 - DNA, 1631 bp, Homo sapiens
  source 1..1631: mol_type = genomic DNA
atcgattgatcaacaagtttgtacaaaaaagcaggcttcaccatgggatcaaaaatgaatctcattgaacattcccatttacctaccacagatgaattttctttttctgaaaatttatttggtgttttaacagaacaagtggcaggtcctctgggacagaacctggaagtggaaccatactcgcaatacagcaatgttcagtttccccaagttcaaccacagatttcctcgtcatcctattattccaacctgggtttctacccccagcagcctgaagagtggtactctcctggaatatatgaactcaggcgtatgccagctgagactctctaccagggagaaactgaggtagcagagatgcctgtaacaaagaagccccgcatgggcgcgtcagcagggaggatcaaaggggatgagctgtgtgttgtttgtggagacagagcctctggataccactataatgcactgacctgtgaggggtgtaaaggtttcttcaggagaagcattaccaaaaacgctgtgtacaagtgtaaaaacgggggcaactgtgtgatggatatgtacatgcgaagaaagtgtcaagagtgtcgactaaggaaatgcaaagagatgggaatgttggctgaatgcttgttaactgaaattcagtgtaaatctaagcgactgagaaaaaatgtgaagcagcatgcagatcagaccgtgaatgaagacagtgaaggtcgtgacttgcgacaagtgacctcgacaacaaagtcatgcagggagaaaactgaactcaccccagatcaacagactcttctacattttattatggattcatataacaaacagaggatgcctcaggaaataacaaataaaattttaaaagaagaattcagtgcagaagaaaattttctcattttgacggaaatggcaaccaatcatgtacaggttcttgtagaattcacaaaaaagctaccaggatttcagactttggaccatgaagaccagattgctttgctgaaagggtctgcggttgaagctatgttccttcgttcagctgagattttcaataagaaacttccgtctgggcattctgacctattggaagaaagaattcgaaatagtggtatctctgatgaatatataacacctatgtttagtttttataaaagtattggggaactgaaaatgactcaagaggagtatgctctgcttacagcaattgttatcctgtctccagatagacaatacataaaggatagagaggcagtagagaagcttcaggagccacttcttgatgtgctacaaaagttgtgtaagattcaccagcctgaaaatcctcaacactttgcctgtctcctgggtcgcctgactgaattacggacattcaatcatcaccacgctgagatgctgatgtcatggagagtaaacgaccacaagtttaccccacttctctgtgaaatctgggacgtgcagtgagacccagctttcttgtacaaagtggttgatatcggtaagcctatccctaaccctctcctcggtctcgattctacgtagtaatgaactagtccgtaacttgaaagtatttcgatttcttggctttatatatcttgtggaaaggacgaaatgacccccagagagcgcttgtc

SEQ ID NO: 3063 - DNA, 1289 bp, Homo sapiens
  source 1..1289: mol_type = genomic DNA
atcgattgatcaacaagtttgtacaaaaaagttggcatggagcagccacaggaggaagcccctgaggtccgggaagaggaggagaaagaggaagtggcagaggcagaaggagccccagagctcaatgggggaccacagcatgcacttccttccagcagctacacagacctctcccggagctcctcgccaccctcactgctggaccaactgcagatgggctgtgacggggcctcatgcggcagcctcaacatggagtgccgggtgtgcggggacaaggcatcgggcttccactacggtgttcatgcatgtgaggggtgcaagggcttcttccgtcgtacgatccgcatgaagctggagtacgagaagtgtgagcgcagctgcaagattcagaagaagaaccgcaacaagtgccagtactgccgcttccagaagtgcctggcactgggcatgtcacacaacgctatccgttttggtcggatgccggaggctgagaagaggaagctggtggcagggctgactgcaaatgaggggagccagtacaacccacaggtggccgacctgaaggccttctccaagcacatctacaatgcctacctgaaaaacttcaacatgaccaaaaagaaggcccgcagcatcctcaccggcaaagccagccacacggcgccctttgtgatccacgacatcgagacattgtggcaggcagagaaggggctggtgtggaagcagttggtgaatggcctgcctccctacaaggagatcagcgtgcacgtcttctaccgctgccagtgcaccacagtggagaccgtgcgggagctcactgagttcgccaagagcatccccagcttcagcagcctcttcctcaacgaccaggttacccttctcaagtatggcgtgcacgaggccatcttcgccatgctggcctctatcgtcaacaaggacgggctgctggtagccaacggcagtggctttgtcacccgtgagttcctgcgcagcctccgcaaacccttcagtgatatcattgagcctaagtttgaatttgctgtcaagttcaacgccctggaacttgatgacagtgacctggccctattcattgcggccatcattctgtgtggaggtgagtgcccaactttcttgtacaaagtggttgatatcggtaagcctatccctaaccctctcctcggtctcgattctacgtagtaatgaactagtccgtaacttgaaagtatttcgatttcttggctttatatatcttgtggaaaggacgactctatgccaaactaccaatacat

SEQ ID NO: 3064 - DNA, 1484 bp, Homo sapiens
  source 1..1484: mol_type = genomic DNA
accgccaccatgtcctctcctaccacgagttccctggatacccccctgcctggaaatggcccccctcagcctggcgccccttcttcttcacccactgtaaaggaggagggtccggagccgtggcccgggggtccggaccctgatgtcccaggcactgatgaggccagctcagcctgcagcacagactgggtcatcccagatcccgaagaggaaccagagcgcaagcgaaagaagggcccagccccgaagatgctgggccacgagctttgccgtgtctgtggggacaaggcctccggcttccactacaacgtgctcagctgcgaaggctgcaagggcttcttccggcgcagtgtggtccgtggtggggccaggcgctatgcctgccggggtggcggaacctgccagatggacgctttcatgcggcgcaagtgccagcagtgccggctgcgcaagtgcaaggaggcagggatgagggagcagtgcgtcctttctgaagaacagatccggaagaagaagattcggaaacagcagcaggagtcacagtcacagtcgcagtcacctgtggggccgcagggcagcagcagctcagcctctgggcctggggcttcccctggtggatctgaggcaggcagccagggctccggggaaggcgagggtgtccagctaacagcggctcaagaactaatgatccagcagttggtggcggcccaactgcagtgcaacaaacgctccttctccgaccagcccaaagtcacgccctggcccctgggcgcagacccccagtcccgagatgcccgccagcaacgctttgcccacttcacggagctggccatcatctcagtccaggagatcgtggacttcgctaagcaagtgcctggtttcctgcagctgggccgggaggaccagatcgccctcctgaaggcatccactatcgagatcatgctgctagagacagccaggcgctacaaccacgagacagagtgtatcaccttcttgaaggacttcacctacagcaaggacgacttccaccgtgcaggcctgcaggtggagttcatcaaccccatcttcgagttctcgcgggccatgcggcggctgggcctggacgacgctgagtacgccctgctcatcgccatcaacatcttctcggccgaccggcccaacgtgcaggagccgggccgcgtggaggcgttgcagcagccctacgtggaggcgctgctgtcctacacgcgcatcaagaggccgcaggaccagctgcgcttcccgcgcatgctcatgaagctggtgagcctgcgcacgctgagctctgtgcactcggagcaggtcttcgccttgcggctccaggacaagaagctgccgcctctgctgtcggagatctgggacgtccacgagtagtaatgaactagtccgtaacttgaaagtatttcgatttcttggctttatatatcttgtggaaaggacgatccaacctgagaatcataaataga

SEQ ID NO: 3065 - DNA, 3179 bp, Homo sapiens
  source 1..3179: mol_type = genomic DNA
accgccaccatgcatcggaaaaaggtggataaccgaatccggattctcattgagaatggagtagctgagcggcaaagatctctctttgttgtagttggggatcgaggaaaagatcaggtggtaatacttcatcacatgttatccaaagcaactgtgaaggctcggccttcagtgctgtggtgttataagaaagagctggggtttagcagtcaccggaagaaaagaatgcgacagctgcagaagaaaataaagaatggaacactgaacataaagcaggacgacccctttgaactcttcatagcagccacaaacattcgctactgctactacaacgagacccacaagatcctgggcaataccttcggcatgtgtgtgctgcaggattttgaagccttaactccaaacttgctggccaggactgtagaaacagtggaaggtggtgggctagtggtcatcctcctacggaccatgaactcactcaagcaattgtacacagtgactatggatgtgcattccaggtacagaactgaggcccatcaggatgtggtgggaagatttaatgaaaggtttattctgtctctggcctcttgtaagaagtgtctcgtcattgatgaccagctcaacatcctgcccatctcctcccacgttgccaccatggaggccctgcctccccagactccggatgagagtcttggtccttctgatctggagctgagggagttgaaggagagcttgcaggacacccagcctgtgggtgtgttggtggactgctgtaagactctagaccaggccaaagctgtcttgaaatttatcgagggcatctctgaaaagaccctgaggagtactgttgcactcacagctgctcgaggacggggaaaatctgcagccctgggattggcgattgctggggcggtggcatttgggtactccaatatctttgttacctccccaagccctgataacctccatactctgtttgaatttgtatttaaaggatttgatgctctgcaatatcaggaacatctggattatgagattatccagtctctaaatcctgaatttaacaaagcagtgatcagagtgaatgtatttcgagaacacaggcagactattcagtatatacatcctgcagatgctgtgaagctgggccaggctgaactagttgtgattgatgaagctgccgccatccccctccccttggtgaagagcctacttggcccctaccttgttttcatggcatccaccatcaatggctatgagggcactggccggtcactgtccctcaagctaattcagcagctccgtcaacagagcgcccagagccaggtcagcaccactgctgagaataagaccacgacgacagccagattggcatcagcgcggacactgtatgaggtttccctccaggagtcaatccgatacgcccctggggatgcagtggagaagtggctgaatgacttgctgtgcctggattgcctcaacatcactcggatagtctcaggctgccccttgcctgaagcttgtgaactgtactatgttaatagagataccctcttttgctaccacaaggcctctgaagttttcctccaacggcttatggccctctacgtggcttctcactacaagaactctcccaatgatctccagatgctctccgatgcacctgctcaccatctcttctgccttctgcctcccgtgccccccacccagaatgcccttccagaagtgcttgctgttatccaggtgtgccttgaaggggagatttctcgccagtccatcttgaacagtctgtctcgaggcaagaaggcttcaggggacctgattccatggacagtgtcagaacagttccaagatccagactttggtggtctgtctggtggaagggtcgttcgcattgctgttcacccagattatcaagggatgggctatggcagccgtgctctgcagctgctgcagatgtactatgaaggcaggtttccttgtctggaggaaaaggtccttgagacaccacaggaaattcacaccgtaagcagcgaggctgtcagcttgttggaagaggtcatcactccccggaaggacctgcctcctttactcctcaaattgaatgagaggcctgccgaacgcctggattacctgggtgtttcctatggcttgacccccaggctcctcaagttctggaaacgagctggatttgttcctgtttatctgagacagaccccgaatgacctgaccggagagcactcgtgcatcatgctgaagacgctcactgatgaggatgaggctgaccagggaggctggcttgcagccttctggaaagatttccgacggcggttcctagccttgctctcctaccagttcagtaccttctctccttccctggctctgaacatcattcagaacaggaacatggggaagccagcccagcctgccctgagccgggaggagctggaagcactcttcctcccctatgacctgaagcggctggagatgtattcacggaatatggtggactatcacctcatcatggacatgatcccggccatctctcgcatctatttcctgaaccagctgggggacctggccctgtctgcggctcagtcggctcttctcttggggattggcctgcagcataagtctgtggaccagctggaaaaggagattgagctgccctcgggccagttgatgggacttttcaaccggatcatccgcaaagttgtgaagctatttaatgaagttcaggaaaaggccattgaggagcagatggtggcagcgaaggatgtggtcatggagcccacgatgaagaccctcagtgacgacctagatgaagcagcaaaggaatttcaggagaaacacaagaaggaagtagggaagctgaagagcatggacctctctgaatacataatccgtggggacgatgaagagtggaatgaagttttgaacaaagctgggccgaacgcctcgatcatcagcctgaaaagtgacaagaaaaggaagttagaggccaaacaagaacccaaacagagcaagaagttgaagaacagagagacaaagaacaaaaaagatatgaaactgaagcggaagaaatagtaatgaactagtccgtaacttgaaagtatttcgatttcttggctttatatatcttgtggaaaggacgagcacgaatcgtcgttatcgtatgg

SEQ ID NO: 3066 - DNA, 1766 bp, Homo sapiens
  source 1..1766: mol_type = genomic DNA
atcgattgatcaacaagtttgtacaaaaaagttggcatgtctcaggataatgacacattgatgagagacatcctggggcatgagctcgctgctatgaggctgcagaagctggaacagcagcggcggctgtttgaaaagaagcagcgacagaagcgccaggagctcctcatggttcaggccaatcctgacgcttccccgtggctttggcgctcttgtctgcgggaggagcgccttttaggtgacagaggccttgggaaccctttcctccggaagaaagtgtcagaggcacatctgccctctggcatccacagtgccctgggcaccgtgagctgtggtggagacggcaggggcgagcgcggcctcccgacaccgcggacagaagcagtgttcaggaatctcggtctccagtcccctttcttatcctggctcccagacaattccgatgcagaattggaggaagtctccgtggagaatggttccgtctctcccccaccttttaaacagtctccgagaatccgacgcaagggttggcaagcccaccaacgacctgggacccgtgcagagggtgagagtgactcccaggatatgggagatgcacacaagtcacccaatatgggaccaaaccctggaatggatggtgactgtgtatatgaaaacttggccttccaaaaggaagaagacttggaaaagaagagagaggcctctgagtctacagggacgaactcctcagcagcacacaacgaagagttgtccaaggccctgaaaggcgagggtggcacggacagcgaccatatgaggcacgaagcctccttggcaatccgctccccctgccctgggctggaggaggacatggaagcctacgtgctgcggccagcgctcccgggcaccatgatgcagtgctacctcacccgtgacaagcacggcgtggacaagggcttgttccccctctactacctctacctggagacctctgacagcctgcagcgcttcctcctggctgggcgaaagagaagaaggagcaaaacttctaattacctcatctccctggatcctacacacctatctcgggacggggacaatttcgtgggcaaagtcagatccaatgtcttcagcaccaagttcaccatctttgacaatggggtgaatcctgaccgggagcatttaaccaggaatactgcccggatcagacaggagctgggggctgtgtgttatgagcccaacgtcttaggatacctggggcctcggaaaatgactgtgattctcccaggaaccaacagccagaaccagcgaatcaatgtccagccactaaatgaacaggagtcgctactgagtcgttaccaacgtggggacaaacaagggttgcttttgttgcacaacaaaaccccgtcgtgggacaaggagaacggtgtctacacgctcaatttccatggtcgagtcactcgggcttcggtgaagaacttccaaatcgtggatcccaaacaccaagaacatctggtgctccagttcggccgagtgggcccagacacattcaccatggacttctgctttccatttagcccgctccaggccttcagcatctgcttgtccagtttcaattacccaactttcttgtacaaagtggttgatatcggtaagcctatccctaaccctctcctcggtctcgattctacgtagtaatgaactagtccgtaacttgaaagtatttcgatttcttggctttatatatcttgtggaaaggacgagctgttcgagcgccctacaaccat

SEQ ID NO: 3067 - DNA, 2327 bp, Homo sapiens
  source 1..2327: mol_type = genomic DNA
atcgattgatcaacaagtttgtacaaaaaagttggcaccatgaccacgttgaaggaggcagtgaccttcaaggacgtggctgtggtcttcactgaggaagagctgaggctgctggaccttgcccagaggaaactgtaccgagaagtgatgctggagaacttcaggaacctgctctcagtggggcatcaatcactccacagagatactttccacttcctaaaggaagaaaagttttggatgatggagacagcaacccaaagagaagggaatttaggaggcaagatccaaatggagatggagactgtttcagaatcaggaacacatgaaggcttgttcagtcatcaaacctgggaacaaatttcaagtgacttaaccaggtttcaagactccatggtaaacagctttcagttctccaaacaagatgatatgccctgccaggttgatgcaggactatctataattcacgtaagacagaaaccttctgagggtaggacgtgtaaaaagtcctttagtgatgtctccgtccttgatcttcatcaacaactacagtcaagagagaagtctcatacatgtgatgaatgtggaaagagtttctgttatagctcagctcttcgtattcatcagagagttcacatgggggagaaactctataattgtgatgtgtgtggtaaggaattcaatcagagctcacatctgcaaattcatcagagaatccacactggagagaaaccattcaaatgtgagcagtgtgggaaaggctttagtcgtagatcaggactttatgttcatcgtaaattacacacaggagtgaaacctcatatttgtgagaaatgtgggaaggccttcattcatgattcccagcttcaggaacatcaaagaatccatactggggagaagccattcaaatgtgatatatgttgtaagagcttccgtagtagagcaaatcttaataggcattccatggttcacatgcgagagaaaccattcagatgtgatacatgtggtaagagctttggtctgaaatcagcacttaatagtcatcgcatggtccacacaggagagaaacggtacaaatgtgaggaatgtggaaaacgcttcatttataggcaagatctttataagcatcaaatagaccacacaggggagaagccatataattgtaaagaatgtggaaagagcttcagatgggcctcaggtctttcaagacatgtgcgagtccacagtggagagacaacattcaaatgtgaagaatgtgggaagggattttatacaaattcacaacgttattctcaccagagagcgcacagtggagaaaagccatatagatgtgaggagtgtgggaagggctacaaaaggaggttggatcttgactttcatcagagggtccacagaggagagaaaccctataattgtaaggaatgtgggaagagctttggctgggcctcgtgtcttttgaatcatcagagaatccacagtggagaaaaaccatttaaatgtgaagaatgtgggaaaagatttactcagaattcacaactttatacccatcgtagagtccacagtggagaaaaaccattcaaatgtgaagagtgtgggaaaagatttactcagaattcacaactttattctcatcgcagagtccacactggagtaaagccatacaaatgtgaagagtgtgggaagggcttcaacagtaagtttaatcttgacatgcaccagagggtccacaccggagagagaccttataattgtaaagaatgtgggaagagctttagccgggcctcaagtattttgaatcataagagactccatggtgatgaaaagccattcaaatgtgaagagtgtgggaagagatttactgagaattcacagcttcattcccatcagagggttcacactggggaaaagccatacaaatgtgagaagtgtggaaagagcttcagatgggcctcaactcatctaacccatcagagactccacagtagagaaaaactacttcaatgtgaggactgtgggaagagcattgtgcacagttcatgccttaaagaccaacaaagagaccaaagtggagagaaaacatctaaatgtgaggactgtgggaagcgctacaagaggcgcttgaatcttgatacgcttttgtcattatttttaaatgacacattgccaactttcttgtacaaagtggttgatatcggtaagcctatccctaaccctctcctcggtctcgattctacgtagtaatgaactagtccgtaacttgaaagtatttcgatttcttggctttatatatcttgtggaaaggacgaagaccactgatcaagatctattta

SEQ ID NO: 3068 - DNA, 977 bp, Homo sapiens
  source 1..977: mol_type = genomic DNA
atcgattgatcaacaagtttgtacaaaaaagttggcatgagcaccagccaaccaggggcctgcccatgccagggagctgcaagccgccccgccattctctacgcacttctgagctccagcctcaaggctgtcccccgaccccgtagccgctgcctatgtaggcagcaccggcccgtccagctatgtgcacctcatcgcacctgccgggaggccttggatgttctggccaagacagtggccttcctcaggaacctgccatccttctggcagctgcctccccaggaccagcggcggctgctgcagggttgctggggccccctcttcctgcttgggttggcccaagatgctgtgacctttgaggtggctgaggccccggtgcccagcatactcaagaagattctgctggaggagcccagcagcagtggaggcagtggccaactgccagacagaccccagccctccctggctgcggtgcagtggcttcaatgctgtctggagtccttctggagcctggagcttagccccaaggaatatgcctgcctgaaagggaccatcctcttcaaccccgatgtgccaggcctccaagccgcctcccacattgggcacctgcagcaggaggctcactgggtgctgtgtgaagtcctggaaccctggtgcccagcagcccaaggccgcctgacccgtgtcctcctcacggcctccaccctcaagtccattccgaccagcctgcttggggacctcttctttcgccctatcattggagatgttgacatcgctggccttcttggggacatgcttttgctcaggtgcccaactttcttgtacaaagtggttgatatcggtaagcctatccctaaccctctcctcggtctcgattctacgtagtaatgaactagtccgtaacttgaaagtatttcgatttcttggctttatatatcttgtggaaaggacgattcactctattaaattcctatctt

SEQ ID NO: 3069 - DNA, 983 bp, Homo sapiens
  source 1..983: mol_type = genomic DNA
atcgattgatcaacaagtttgtacaaaaaagcaggcaccatgagcaccagccaaccaggggcctgcccatgccagggagctgcaagccgccccgccattctctacgcacttctgagctccagcctcaaggctgtcccccgaccccgtagccgctgcctatgtaggcagcaccggcccgtccagctatgtgcacctcatcgcacctgccgggaggccttggatgttctggccaagacagtggccttcctcaggaacctgccatccttctggcagctgcctccccaggaccagcggcggctgctgcagggttgctggggccccctcttcctgcttgggttggcccaagatgctgtgacctttgaggtggctgaggccccggtgcccagcatactcaagaagattctgctggaggagcccagcagcagtggaggcagtggccaactgccagacagaccccagccctccctggctgcggtgcagtggcttcaatgctgtctggagtccttctggagcctggagcttagccccaaggaatatgcctgcctgaaagggaccatcctcttcaaccccgatgtgccaggcctccaagccgcctcccacattgggcacctgcagcaggaggctcactgggtgctgtgtgaagtcctggaaccctggtgcccagcagcccaaggccgcctgacccgtgtcctcctcacggcctccaccctcaagtccattccgaccagcctgcttggggacctcttctttcgccctatcattggagatgttgacatcgctggccttcttggggacatgcttttgctcaggtagaacccagctttcttgtacaaagtggttgatatcggtaagcctatccctaaccctctcctcggtctcgattctacgtagtaatgaactagtccgtaacttgaaagtatttcgatttcttggctttatatatcttgtggaaaggacgacagttcgacaacctctatgtcgat

SEQ ID NO: 3070 - DNA, 1502 bp, Homo sapiens
  source 1..1502: mol_type = genomic DNA
atcgattgatcaacaagtttgtacaaaaaagttggcaccatgcccaaccccaggcctggcaagccctcggccccttccttggcccttggcccatccccaggagcctcgcccagctggagggctgcacccaaagcctcagacctgctgggggcccggggcccagggggaaccttccagggccgagatcttcgaggcggggcccatgcctcctcttcttccttgaaccccatgccaccatcgcagctgcagctgcccacactgcccctagtcatggtggcaccctccggggcacggctgggccccttgccccacttacaggcactcctccaggacaggccacatttcatgcaccagctctcaacggtggatgcccacgcccggacccctgtgctgcaggtgcaccccctggagagcccagccatgatcagcctcacaccacccaccaccgccactggggtcttctccctcaaggcccggcctggcctcccacctgggatcaacgtggccagcctggaatgggtgtccagggagccggcactgctctgcaccttcccaaatcccagtgcacccaggaaggacagcaccctttcggctgtgccccagagctcctacccactgctggcaaatggtgtctgcaagtggcccggatgtgagaaggtcttcgaagagccagaggacttcctcaagcactgccaggcggaccatcttctggatgagaagggcagggcacaatgtctcctccagagagagatggtacagtctctggagcagcagctggtgctggagaaggagaagctgagtgccatgcaggcccacctggctgggaaaatggcactgaccaaggcttcatctgtggcatcatccgacaagggctcctgctgcatcgtagctgctggcagccaaggccctgtcgtcccagcctggtctggcccccgggaggcccctgacagcctgtttgctgtccggaggcacctgtggggtagccatggaaacagcacattcccagagttcctccacaacatggactacttcaagttccacaacatgcgaccccctttcacctacgccacgctcatccgctgggccatcctggaggctccagagaagcagcggacactcaatgagatctaccactggttcacacgcatgtttgccttcttcagaaaccatcctgccacctggaagaacgccatccgccacaacctgagtctgcacaagtgctttgtgcgggtggagagcgagaagggggctgtgtggaccgtggatgagctggagttccgcaagaaacggagccagaggcccagcaggtgttccaaccctacacctggccccttgccaactttcttgtacaaagtggttgatatcggtaagcctatccctaaccctctcctcggtctcgattctacgtagtaatgaactagtccgtaacttgaaagtatttcgatttcttggctttatatatcttgtggaaaggacgatagcgctggatatgccgggcacca

SEQ ID NO: 3071 - DNA, 1673 bp, Homo sapiens
  source 1..1673: mol_type = genomic DNA
atcgattgatcaacaagtttgtacaaaaaagttggcatgaaagagttggatccaaagaatgacatttcggaagacaagctctccgttgttggggaggccacggggggacccacgaggaatggtgccaggggtcctggctcagaaggagtgtgggaaccaggcagctggccagagaggccgcggggagatgcaggtgcagagtgggagccattgggaattccccaggggaacaaactcttagggggctcagtacccgcatgtcatgaactgaaggcatttgccaaccaaggctgtgtcctggtcccaccacggctggacgaccccacagaaaagggggcctgtccacccgtaaggcgtggcaagaacttctccagcacttcagacctcagtaagccccccatgccctgcgaggagaagaaaacctacgactgcagcgagtgtggcaaggcctttagccgaagctcgtccctgataaagcaccaaaggatccacacgggagaaaagccgtttgagtgtgacacctgtgggaagcacttcatcgagcgctcgtccctcaccatccaccagcgggtgcacacgggcgagaagccctatgcctgcggggactgcggcaaggccttcagccagcgcatgaacctcactgtgcaccagcgcacgcacacgggcgagaagccgtatgtgtgcgacgtgtgtggcaaggccttccggaagacttcctctctcacccagcacgagcggatccacacgggggagaagccctacgcgtgcggggactgcggcaaggccttcagccagaacatgcacctcatcgtgcaccagcgcacgcacaccggggagaagccgtacgtgtgccccgagtgcgggcgagccttcagccagaacatgcacctgaccgagcaccagcgcacgcacaccggggagaagccgtacgcctgcaaggagtgcggcaaggccttcaacaagagctcctctctcaccctgcaccagaggaaccacaccggcgagaagccctacgtgtgcggcgagtgcggcaaggccttcagccagagctcctacctcatccagcaccagcgcttccacatcggcgtgaagccgttcgagtgcagcgagtgcggcaaggccttcagcaagaactcctcgctcacgcagcaccagcgcatccacaccggcgagaagccctacgagtgctacatctgcaagaagcacttcacggggcgctcgtccctcatcgtgcaccagatcgtgcacaccggggagaagccctacgtgtgcggcgagtgcggcaaggccttcagccagagcgcctacctcatcgagcaccagcggatccacaccggcgagaagccgtacaggtgcggccagtgcgggaagtccttcatcaagaactcctccctcactgtgcaccagcggatccacacgggcgagaagccctaccgatgcggcgagtgcgggaagaccttcagccgcaacacgaacctgacgcgccacctgcggattcacacctgcccaactttcttgtacaaagtggttgatatcggtaagcctatccctaaccctctcctcggtctcgattctacgtagtaatgaactagtccgtaacttgaaagtatttcgatttcttggctttatatatcttgtggaaaggacgatagtcccgggcccatatgcatacc

SEQ ID NO: 3072 - DNA, 2270 bp, Homo sapiens
  source 1..2270: mol_type = genomic DNA
atcgattgatcaacaagtttgtacaaaaaagttggcatggctcggaaattagtgatgttcagggatgttgccattgacttctctcaggaagagtgggaatgcctggactctgctcagagagatttgtatagagatgtgatgttggagaactatagcaacttggtatcactagacttgccttcaaggtgtgcaagtaaggacttatctccagaaaagaacacttatgaaacagaattatcccaatgggaaatgagtgacagacttgaaaactgtgatcttgaagagtccaattccagggattatttggaagccaaaggcaagatggagaagcaacaagaaaatcagaaggaatatttcaggcaagggatgatcatatatgacaaaatgtccattttcaaccagcatacttacttatctcaacattcaagatgtcattctactgagaaaccctataaatgtaaggaatgtgggaaagccttcagacgagcctcacacctaacacaacatcaaagtattcatactggtgaaaaaccctatgaatgtaagcaatgcgggaaggcctttagtcgtgattcacaactcagtcttcatcagagacttcatactggtgagaaaccctatgcatgtaaggaatgtgggaaggcctttactcaaagctcacaacttattttacatcatagaattcatactggtgaaaaaccatataaatgtgaagaatgtgggaaagcctttattcgtagctcacaacttacccgacatcaaaaagttcatactggtgagaaaccttatgaatgtaaagaatgtgggaaggcctttactcagaattcacaacttacactacaccagagacttcatactggtgaaaagctctatgaatgtaaagaatgtaggaaggtctttactcagctctcacaacttattctgcataagagaattcataccggtgagaaaccctatgaatgtaaggaatgtggaaaagcttttatttgtggctcacagctttctcaacatcagaaaattcataatggggaaaaaccatatgaatgtaaggaatgtggaagggcctttattcggggctcactactgatgcaacatcagaggattcatactggtgaaaaaccctataaatgtgaagaatgtgggaaggcctttatccgtggctcacaacttactcaacaccagagaattcacaccaatgaaaagccctatgaatgtaaggaatgtggaaagatgtttagtcatggctcacaacttactcaacatcagagaatacacactggtgagaaaccctatcaatgtaaggaatgtggaaaagcgtttaatcgtggctcactccttacacgacaccagaggattcatactggtgagaaaccctatgaatgtaaagaatgtggaaaaacctttagtcgtggctcagaacttactcaacatgagcgaattcacacaggtgagaaaccctatgaatgtaaggaatgtgggaaatcttttattcgtggttcccagcttactcaacatcagagaatccatactggtgagaaaccttatgaatgtaaagaatgtagaatggcctttactcagagttcacatctttcccaacatcaaagacttcacactggtgagaaaccctatgtgtgtaatgaatgtggaaaggcctttgcgcgtggcttactacttatacaacatcagagaattcatactggtgagaaaccatatcaatgtaaggaatgtgggaaagcctttattcgtggttcacagttgactcaacatcagcgaattcacactggagaaaaaccctatgaatgcaaggagtgtggcaaggcctttagtcatggctctcagcttactctacatcagagaatccatactggtgagaagccctatgaatgcagagaatgtagaaaggcctttactcagagttcacatctttctcggcatcagagaattcatactggtgagaaaccatatcaatgtaaggaatgtgggaaggcctttactcgtggttcacagctaactcaacatcagagaattcatatcagtgagaaatcttttgaatataaggaatgtgggattgactttagtcatggctcacaagtttacatgtgcccaactttcttgtacaaagtggttgatatcggtaagcctatccctaaccctctcctcggtctcgattctacgtagtaatgaactagtccgtaacttgaaagtatttcgatttcttggctttatatatcttgtggaaaggacgaagcggaccgagcaaagctactggt

SEQ ID NO: 3073 - DNA, 2423 bp, Homo sapiens
  source 1..2423: mol_type = genomic DNA
atcgattgatcaacaagtttgtacaaaaaagttggcatggcgcctcagaagcacggcggtgggggagggggcggctcggggcccagcgcggggtccgggggaggcggcttcgggggttcggcggcggtggcggcggcgacggcttcgggcggcaaatccggcggcgggagctgtggagggggtggcagttactcggcctcctcctcctcctccgcggcggcagcggcgggggctgcggtgttaccggtgaagaagccgaaaatggagcacgtccaggctgaccacgagcttttcctccaggcctttgagaagccaacacagatctatagatttcttcgaactcggaatctcatagcaccaatatttttgcacagaactcttacttacatgtctcatcgaaactccagaacaaacatcaaaaggaaaacatttaaagttgatgatatgttatcaaaagtagagaaaatgaaaggagagcaagaatctcatagcttgtcagctcatttgcagcttacgtttactggtttcttccacaaaaatgataagccatcaccaaactcagaaaatgaacaaaattctgttaccctggaagtcctgcttgtgaaagtttgccacaaaaaaagaaaggatgtaagttgtccaataaggcaagttcccacaggtaaaaagcaggtgcctttgaatcctgacctcaatcaaacaaaacccggaaatttcccgtcccttgcagtttccagtaatgaatttgaacctagtaacagccatatggtgaagtcttactcgttgctatttagagtgactcgtccaggaagaagagagtttaatggaatgattaatggagaaaccaatgaaaatattgatgtcaatgaagagcttccagccagaagaaaacgaaatcgtgaggatggggaaaagacatttgttgcacaaatgacagtatttgataaaaacaggcgcttacagcttttagatggggaatatgaagtagccatgcaggaaatggaagaatgtccaataagcaagaaaagagcaacatgggagactattcttgatgggaagaggctgcctccattcgaaacattttctcagggacctacgttgcagttcactcttcgttggacaggagagaccaatgataaatctacggctcctattgccaaacctcttgccactagaaattcagagagtctccatcaggaaaacaagcctggttcagttaaacctactcaaactattgctgttaaagaatcattgactacagatctacaaacaagaaaagaaaaggatactccaaatgaaaaccgacaaaaattaagaatattttatcagtttctctataacaacaatacaaggcaacaaactgaagcaagagatgacctgcattgcccttggtgtactctgaactgccgcaaactttatagtttactcaagcatcttaaactctgccatagcagatttatcttcaactatgtttatcatccaaaaggtgctaggatagatgtttctatcaatgagtgttatgatggctcctatgcaggaaatcctcaggatattcatcgccaacctggatttgcttttagtcgcaacggaccagttaagagaacacctatcacacatattcttgtgtgcaggccaaaacgaacaaaagcaagcatgtctgaatttcttgaatctgaagatggggaagtagaacagcaaagaacatatagtagtggccacaatcgtctgtatttccatagtgatacctgcttacctctccgtccacaagaaatggaagtagatagtgaagatgaaaaggatcctgaatggctaagagaaaaaaccattacacaaattgaagagttttctgatgttaatgaaggagagaaagaagtgatgaaactctggaatctccatgtcatgaagcatgggtttattgctgacaatcaaatgaatcatgcctgtatgctgtttgtagaaaattatggacagaaaataattaagaagaatttatgtcgaaacttcatgcttcatctagtcagcatgcatgactttaatcttattagcataatgtcaatagataaagctgttaccaagctccgtgaaatgcagcaaaaattagaaaagggggaatctgcttcccctgcaaacgaagaaataactgaagaacaaaatgggacagcaaatggatttagtgaaattaactcaaaagagaaagctttggaaacagatagtgtctcaggggtttcaaaacagagcaaaaaacaaaaactctgcccaactttcttgtacaaagtggttgatatcggtaagcctatccctaaccctctcctcggtctcgattctacgtagtaatgaactagtccgtaacttgaaagtatttcgatttcttggctttatatatcttgtggaaaggacgaattaacttcataccccgtatcctt

SEQ ID NO: 3074 - DNA, 1685 bp, Homo sapiens
  source 1..1685: mol_type = genomic DNA
atcgattgatcaacaagtttgtacaaaaaagcaggcaccatgtctacagcctctgccgcctcctcctcctcctcgtcttcggccggtgagatgatcgaagccccttcccaggtcctcaactttgaagagatcgactacaaggagatcgaggtggaagaggttgttggaagaggagcctttggagttgtttgcaaagctaagtggagagcaaaagatgttgctattaaacaaatagaaagtgaatctgagaggaaagcgtttattgtagagcttcggcagttatcccgtgtgaaccatcctaatattgtaaagctttatggagcctgcttgaatccagtgtgtcttgtgatggaatatgctgaagggggctctttatataatgtgctgcatggtgctgaaccattgccatattatactgctgcccacgcaatgagttggtgtttacagtgttcccaaggagtggcttatcttcacagcatgcaacccaaagcgctaattcacagggacctgaaaccaccaaacttactgctggttgcaggggggacagttctaaaaatttgtgattttggtacagcctgtgacattcagacacacatgaccaataacaaggggagtgctgcttggatggcacctgaagtttttgaaggtagtaattacagtgaaaaatgtgacgtcttcagctggggtattattctttgggaagtgataacgcgtcggaaaccctttgatgagattggtggcccagctttccgaatcatgtgggctgttcataatggtactcgaccaccactgataaaaaatttacctaagcccattgagagcctgatgactcgttgttggtctaaagatccttcccagcgcccttcaatggaggaaattgtgaaaataatgactcacttgatgcggtactttccaggagcagatgagccattacagtatccttgtcagtattcagatgaaggacagagcaactctgccaccagtacaggctcattcatggacattgcttctacaaatacgagtaacaaaagtgacactaatatggagcaagttcctgccacaaatgatactattaagcgcttagaatcaaaattgttgaaaaatcaggcaaagcaacagagtgaatctggacgtttaagcttgggagcctcccgtgggagcagtgtggagagcttgcccccaacctctgagggcaagaggatgagtgctgacatgtctgaaatagaagctaggatcgccgcaaccacaggcaacggacagccaagacgtagatccatccaagacttgactgtaactggaacagaacctggtcaggtgagcagtaggtcatccagtcccagtgtcagaatgattactacctcaggaccaacctcagaaaagccaactcgaagtcatccatggacccctgatgattccacagataccaatggatcagataactccatcccaatggcttatcttacactggatcaccaactacaggcaagaactagttgcagaactggaccaggatagaacccagctttcttgtacaaagtggttgatatcggtaagcctatccctaaccctctcctcggtctcgattctacgtagtaatgaactagtccgtaacttgaaagtatttcgatttcttggctttatatatcttgtggaaaggacgagtcggacgcggtctctgatgaccg

SEQ ID NO: 3075 - DNA, 1547 bp, Homo sapiens
  source 1..1547: mol_type = genomic DNA
atcgattgatcaacaagtttgtacaaaaaagttggcatgggggaaccccgggctggggccgccctggacgatggcagcggctggacgggcagtgaggaaggcagtgaggagggtaccggcggcagtgagggggctgggggtgacgggggcccggatgcagagggggtgtggagcccagacattgagcagagcttccaggaggccctggccatctatccaccctgcggccgccggaaaataattttgtctgatgaaggcaagatgtatggtcggaatgaactgatcgcccgctacatcaagctgagaacggggaagacccgaactcgaaaacaggtttctagtcacatccaggttttggcccgaaggaaatcaagggaaatccagtccaagttgaaggaccaggtttccaaggacaaggctttccagacaatggcaaccatgtcctctgcccagctcatctccgcgccttctctgcaggccaaactgggtcccactggtcctcaggcctctgagcttttccagttttggtctggaggatctgggcccccctggaatgttccagatgtgaagccattctcacagacaccgttcaccttgtcactgactcccccatctactgacctcccagggtacgagcccccccaagccctctcacccctgcccccacctaccccatcgcccccagcctggcaggctcggggcctgggcaccgcccggttgcagctggtagagttctcagccttcgtggaaccgccagatgcagttgattcttaccagaggcacctgttcgtgcacatcagccagcactgccccagccccggagcgccgccgctcgagagtgtggacgtccggcagatctacgacaaattccctgagaaaaagggtggcctccgagagctatatgatcgtggccccccccatgccttcttcctggtcaagttctgggcggacctgaactggggcccaagtggtgaggaggcaggggccggtggcagcatcagcagtggtggcttctacggagtgagcagccagtatgagagcctggaacacatgaccctcacctgttcctccaaggtctgctcttttggcaagcaggtggtggagaaggtggagacggaacgggcccagctggaggacggcagatttgtgtaccgcctgctgcgctcgcccatgtgcgagtacctggtgaatttcttgcacaagttgcggcagctgcctgagcgatacatgatgaacagcgtcctggaaaacttcaccatcctccaggtggtgacaaacagagacacccaggaactgctgctctgcaccgcctatgtcttcgaggtctccaccagcgagcgtggggcccagcatcacatttaccgcctggtcagggactgcccaactttcttgtacaaagtggttgatatcggtaagcctatccctaaccctctcctcggtctcgattctacgtagtaatgaactagtccgtaacttgaaagtatttcgatttcttggctttatatatcttgtggaaaggacgaggacgtccgaaggagaccatattc

SEQ ID NO: 3076 - DNA, 1664 bp, Homo sapiens
  source 1..1664: mol_type = genomic DNA
atcgattgatcaacaagtttgtacaaaaaagttggcatggtagctgggatgttagggctcagggaagaaaagtcagaagaccaggacctccagggcctcaaggacaaacccctcaagtttaaaaaggtgaagaaagataagaaagaagagaaagagggcaagcatgagcccgtgcagccatcagcccaccactctgctgagcccgcagaggcaggcaaagcagagacatcagaagggtcaggctccgccccggctgtgccggaagcttctgcctcccccaaacagcggcgctccatcatccgtgaccggggacccatgtatgatgaccccaccctgcctgaaggctggacacggaagcttaagcaaaggaaatctggccgctctgctgggaagtatgatgtgtatttgatcaatccccagggaaaagcctttcgctctaaagtggagttgattgcgtacttcgaaaaggtaggcgacacatccctggaccctaatgattttgacttcacggtaactgggagagggagcccctcccggcgagagcagaaaccacctaagaagcccaaatctcccaaagctccaggaactggcagaggccggggacgccccaaagggagcggcaccacgagacccaaggcggccacgtcagagggtgtgcaggtgaaaagggtcctggagaaaagtcctgggaagctccttgtcaagatgccttttcaaacttcgccagggggcaaggctgaggggggtggggccaccacatccacccaggtcatggtgatcaaacgccccggcaggaagcgaaaagctgaggccgaccctcaggccattcccaagaaacggggccgaaagccggggagtgtggtggcagccgctgccgccgaggccaaaaagaaagccgtgaaggagtcttctatccgatctgtgcaggagaccgtactccccatcaagaagcgcaagacccgggagacggtcagcatcgaggtcaaggaagtggtgaagcccctgctggtgtccaccctcggtgagaagagcgggaaaggactgaagacctgtaagagccctgggcggaaaagcaaggagagcagccccaaggggcgcagcagcagcgcctcctcaccccccaagaaggagcaccaccaccatcaccaccactcagagtccccaaaggcccccgtgccactgctcccacccctgcccccacctccacctgagcccgagagctccgaggaccccaccagcccccctgagccccaggacttgagcagcagcgtctgcaaagaggagaagatgcccagaggaggctcactggagagcgacggctgccccaaggagccagctaagactcagcccgcggttgccaccgccgccacggccgcagaaaagtacaaacaccgaggggagggagagcgcaaagacattgtttcatcctccatgccaaggccaaacagagaggagcctgtggacagccggacgcccgtgaccgagagagttagctgcccaactttcttgtacaaagtggttgatatcggtaagcctatccctaaccctctcctcggtctcgattctacgtagtaatgaactagtccgtaacttgaaagtatttcgatttcttggctttatatatcttgtggaaaggacgatcggacatatcggtagcccttaac

SEQ ID NO: 3077 - DNA, 1781 bp, Homo sapiens
  source 1..1781: mol_type = genomic DNA
atcgattgatcaacaagtttgtacaaaaaagcaggcaccatggagtcagctccggcagcccccgaccccgccgccagcgagccaggcagcagcggcgcggacgcggccgccggctccagggagaccccgctgaaccaggaatccgcccgcaagagcgagccgcctgccccggtgcgcagacagagctattccagcaccagcagaggtatctcagtaacgaagaagacacatacatctcaaattgaaattattccatgcaagatctgtggagacaaatcatcaggaatccattatggtgtcattacatgtgaaggctgcaagggctttttcaggagaagtcagcaaagcaatgccacctactcctgtcctcgtcagaagaactgtttgattgatcgaaccagtagaaaccgctgccaacactgtcgattacagaaatgccttgccgtagggatgtctcgagatgctgtaaaatttggccgaatgtcaaaaaagcagagagacagcttgtatgcagaagtacagaaacaccggatgcagcagcagcagcgcgaccaccagcagcagcctggagaggctgagccgctgacgcccacctacaacatctcggccaacgggctgacggaacttcacgacgacctcagtaactacattgacgggcacacccctgaggggagtaaggcagactccgccgtcagcagcttctacctggacatacagccttccccagaccagtcaggtcttgatatcaatggaatcaaaccagaaccaatatgtgactacacaccagcatcaggcttctttccctactgttcgttcaccaacggcgagacttccccaactgtgtccatggcagaattagaacaccttgcacagaatatatctaaatcgcatctggaaacctgccaatacttgagagaagagctccagcagataacgtggcagacctttttacaggaagaaattgagaactatcaaaacaagcagcgggaggtgatgtggcaattgtgtgccatcaaaattacagaagctatacagtatgtggtggagtttgccaaacgcattgatggatttatggaactgtgtcaaaatgatcaaattgtgcttctaaaagcaggttctctagaggtggtgtttatcagaatgtgccgtgcctttgactctcagaacaacaccgtgtactttgatgggaagtatgccagccccgacgtcttcaaatccttaggttgtgaagactttattagctttgtgtttgaatttggaaagagtttatgttctatgcacctgactgaagatgaaattgcattattttctgcatttgtactgatgtcagcagatcgctcatggctgcaagaaaaggtaaaaattgaaaaactgcaacagaaaattcagctagctcttcaacacgtcctacagaagaatcaccgagaagatggaatactaacaaagttaatatgcaaggtgtctacattaagagccttatgtggacgacatacagaaaagctaatggcatttaaagcaatatacccagacattgtgcgacttcattttcctccattatacaaggagttgttcacttcagaatttgagccagcaatgcaaattgatgggtaagacccagctttcttgtacaaagtggttgatatcggtaagcctatccctaaccctctcctcggtctcgattctacgtagtaatgaactagtccgtaacttgaaagtatttcgatttcttggctttatatatcttgtggaaaggacgaccggaaaggcaaatattagtttat

SEQ ID NO: 3078 - DNA, 1097 bp, Homo sapiens
  source 1..1097: mol_type = genomic DNA
atcgattgatcaacaagtttgtacaaaaaagttggcatgatgtcttatcttaagcaaccgccttacgcagtcaatgggctgagtctgaccacttcgggtatggacttgctgcacccctccgtgggctacccggggccctgggcttcttgtcccgcagccaccccccggaaacagcgccgggagaggacgacgttcactcgggcgcagctagatgtgctggaagcactgtttgccaagacccggtacccagacatcttcatgcgagaggaggtggcactgaaaatcaacttgcccgagtcgagggtgcaggtatggtttaagaatcgaagagctaagtgccgccaacaacagcaacaacagcagaatggaggtcaaaacaaagtgagacctgccaaaaagaagacatctccagctcgggaagtgagttcagagagtggaacaagtggccaattcactcccccctctagcacctcagtcccgaccattgccagcagcagtgctcctgtgtctatctggagcccagcttccatctccccactgtcagatcccttgtccacctcctcttcctgcatgcagaggtcctatcccatgacctatactcaggcttcaggttatagtcaaggatatgctggctcaacttcctactttgggggcatggactgtggatcatatttgacccctatgcatcaccagcttcccggaccaggggccacactcagtcccatgggtaccaatgcagtcaccagccatctcaatcagtccccagcttctctttccacccagggatatggagcttcaagcttgggttttaactcaaccactgattgcttggattataaggaccaaactgcctcctggaagcttaacttcaatgctgactgcttggattataaagatcagacatcctcgtggaaattccaggttttgtgcccaactttcttgtacaaagtggttgatatcggtaagcctatccctaaccctctcctcggtctcgattctacgtagtaatgaactagtccgtaacttgaaagtatttcgatttcttggctttatatatcttgtggaaaggacgatccgcacgctcgaaaaaacgtcgt

SEQ ID NO: 3079 - DNA, 1484 bp, Homo sapiens
  source 1..1484: mol_type = genomic DNA
accgccaccatgggtagcaacagtgggcaggctggccgccacatctataaatccctagctgatgatggcccctttgactctgtggagccgcctaaaagacccaccagcagactcatcatgcacagcatggccatgttcggaagagagttctgctacgcggtggaggcagcgtatgtgaccccagtcctgctcagcgtaggtctgcccagcagcctgtacagcattgtgtggttcctcagccccatcctgggattcctgctgcagcccgtggtcggatcggccagcgaccactgccggtccaggtggggccgccggagaccctacatcctcaccctgggagtcatgatgctcgtgggcatggctctgtacctcaatggggctactgttgtagcagctttgattgctaacccaaggaggaagctggtttgggccataagtgtcaccatgataggtgtcgttctctttgattttgctgccgacttcattgatgggcccatcaaagcctacttatttgatgtctgctcccatcaggacaaggagaagggcctccactaccatgccctcttcacaggttttggaggtgccctgggttaccttttgggtgctatagactgggcccatctggagctgggaagactgttgggtacagaattccaggtcatgttcttcttctctgcattggtgctcactttgtgttttactgttcatctgtgcagtatctctgaagccccacttacagaggttgcaaagggcattcccccacagcaaacccctcaggaccctccattgtcatcagatggaatgtacgagtatggttctatcgagaaagttaaaaatggttacgtaaatccagagctggcaatgcagggagcaaaaaacaaaaatcatgctgaacagactcgcagggcaatgacattaaagtcactgctgagagcactggtgaacatgcctcctcactaccgctacctttgcatcagccacctcattggatggacagccttcctgtccaacatgctgttcttcacagatttcatgggccagattgtgtaccgcggggatccctatagtgcacacaactccacagagtttctcatctacgaaagaggagtcgaggttggatgttggggcttgtgcatcaactccgtgttttcctcactttattcttactttcagaaagttttggtatcctacattggattaaagggtctttacttcacgggatatttgctgtttggcctggggacgggatttattgggctcttcccgaatgtctactccaccctggtcctgtgcagcctgtttggtgtaatgtccagcaccctgtacactgtgccctttaacctcattactgagtaccaccgcgaggaagaaaaggaggtgtgctgtcattagtaatgaactagtccgtaacttgaaagtatttcgatttcttggctttatatatcttgtggaaaggacgaagctcgggagacataatgtagggc

SEQ ID NO: 3080 - DNA, 2432 bp, Homo sapiens
  source 1..2432: mol_type = genomic DNA
atcgattgatcaacaagtttgtacaaaaaagttggcatgctttctctgaagaaatacttaacggaaggacttctccagttcaccattctgctgagtttgattggggtacgggtggacgtggatacttacctgacctcacagcttcccccactccgggagatcatcctggggcccagttctgcctatactcagacccagttccacaacctgaggaataccttggatggctatggtatccaccccaagagcatagacctggacaattacttcactgcccggcggctcctcagtcaggtgagggccctggacaggttccaggtgccaaccactgaggtaaatgcctggctggttcaccgagacccagaggggtctgtctctggcagtcagcccaactcaggcctcgccctcgagagttccagtggcctccaagatgtgacaggcccagacaacggggtgcgagaaagcgaaacggagcagggattcggtgaagatttggaggatttgggggctgtagcccccccagtcagtggagacttaaccaaagaggacatagatctgattgacatcctttggcgacaggatattgatctgggggctgggcgtgaggtttttgactatagtcaccgccagaaggagcaggatgtggagaaggagctgcgagatggaggcgagcaggacacctgggcaggcgagggcgcggaagctctggcacggaacctgctagtggatggagagactggggagagcttccctgcacagtttccagcagacatttccagcataacagaagcagtgcctagtgagagtgagccccctgctcttcaaaacaacctcttgtctcctcttctgaccgggacagagtcaccatttgatttggaacagcagtggcaagatctcatgtccatcatggaaatgcaggccatggaagtgaacacatcagcaagtgaaatcctgtacagtgcccctcctggagacccactgagcaccaactacagccttgcccccaacactcccatcaatcagaatgtcagcctgcatcaggcgtccctggggggctgcagccaggacttcttactcttcagccccgaggtggaaagcctgcctgtggccagtagctccacgctgctcccgttggcccccagcaattctaccagcctcaactccaccttcggctccaccaacctgacagggctcttctttccaccccagctcaatggcacagccaatgacacagcaggcccagagctgcctgaccctttggggggtctgttagatgaagctatgttggatgagatcagccttatggacctggccattgaagaaggctttaaccctgtgcaggcctcccagctggaggaggaatttgactctgactcaggcctttccttagactcgagccatagcccttcttccctaagcagctctgaaggcagttcttcctcttcttcctcctcctcttcctcttcttcctctgcttcttcctctgcctcttcctccttttctgaggaaggtgcggttggctacagctctgactctgagaccctggatctggaagaggccgagggtgctgtgggctaccagcctgagtattccaagttctgccgcatgagctaccaggatccagctcagctctcatgcctgccctacctggagcacgtgggccacaaccacacatacaacatggcacccagtgccctggactcagccgacctgccaccacccagtgccctcaagaaaggcagcaaggagaagcaggctgacttcctggacaagcagatgagccgggatgagcaccgagcccgagccatgaagatccctttcaccaatgacaaaatcatcaacctgcctgtggaggagttcaatgaactgctgtccaaataccagttgagtgaagcccagctgagcctcatccgagacatccggcgccggggcaagaacaagatggcggcgcagaactgccgcaagcgcaagctggacaccatcctgaatctggagcgtgatgtggaggacctgcagcgtgacaaagcccggctgctgcgggagaaagtggagttcctgcgctccctgcgacagatgaagcagaaggtccagagcctgtaccaggaggtgtttgggcggctgcgagatgagaacggacgaccctactcgcccagtcagtatgcgctccagtacgccggggacggcagtgtcctcctcatcccccgcacgatggccgaccagcaggcccggcggcaggagaggaagccaaaggaccggagaaagtgcccaactttcttgtacaaagtggttgatatcggtaagcctatccctaaccctctcctcggtctcgattctacgtagtaatgaactagtccgtaacttgaaagtatttcgatttcttggctttatatatcttgtggaaaggacgatatggagtgccgttttggcgttta

SEQ ID NO: 3081 - DNA, 608 bp, Homo sapiens
  source 1..608: mol_type = genomic DNA
atcgattgatcaacaagtttgtacaaaaaagttggcatgaaagccttcagtcccgtgaggtccgttaggaaaaacagcctgtcggaccacagcctgggcatctcccggagcaaaacccctgtggacgacccgatgagcctgctatacaacatgaacgactgctactccaagctcaaggagctggtgcccagcatcccccagaacaagaaggtgagcaagatggaaatcctgcagcacgtcatcgactacatcttggacctgcagatcgccctggactcgcatcccactattgtcagcctgcatcaccagagacccgggcagaaccaggcgtccaggacgccgctgaccaccctcaacacggatatcagcatcctgtccttgcaggcttctgaattcccttctgagttaatgtcaaatgacagcaaagcactgtgtggctgcccaactttcttgtacaaagtggttgatatcggtaagcctatccctaaccctctcctcggtctcgattctacgtagtaatgaactagtccgtaacttgaaagtatttcgatttcttggctttatatatcttgtggaaaggacgatccagcagaccagcgggtttacaa

SEQ ID NO: 3082 - DNA, 1139 bp, Homo sapiens
  source 1..1139: mol_type = genomic DNA
atcgattgatcaacaagtttgtacaaaaaagttggcatggacttaaaactaaaagactgtgaattttggtatagtctccatggccaggtcccagggctgctggactgggacatgaggaatgagttatttctgccttgtaccacagaccagtgctctttagctgagcaaatccttgccaaatacagagtcggagtaatgaagcccccagaaatgcctcagaagaggagacccagtcctgatggagatggtcctccctgtgaacccaatctgtggatgtgggtggaccccaatatcctgtgcccccttggcagccaggaggccccaaagcccagtggaaaagaggatctgacaaacatttctcctttccctcagcccccacaaaaagacgaagggtctaactgctcagaggacaaagtggtagagtctctgccatcttcctccagtgagcagtctcctttacagaagcagggtatccattcccccagtgactttgagctcacagaagaggaggctgaggaaccagacgacaactccctccagtcccctgaaatgaaatgttaccagagccagaaactatggcaaatcaacaaccaagagaagtcctggcaaaggccccctctcaattgtagccaccttattgccctagcattaagaaacaacccccactgtggcctcagtgtgcaggagatctacaatttcacccgacagcatttcccctttttctggacagctccggatggctggaagagcaccattcattacaacctctgcttcctggacagctttgagaaggtgccagacagccttaaggatgaagataatgcaagacctcgctcttgcctttggaagctcactaaggaggggcaccgccgcttttgggaggagactcgtgtcttagcctttgctcaaagggagagaatccaagagtgcatgagtcagccagagttgttgacctctctctttgatctttgcccaactttcttgtacaaagtggttgatatcggtaagcctatccctaaccctctcctcggtctcgattctacgtagtaatgaactagtccgtaacttgaaagtatttcgatttcttggctttatatatcttgtggaaaggacgaacaagtgtagacgtaaatctcaat

SEQ ID NO: 3083 - DNA, 1436 bp, Homo sapiens
  source 1..1436: mol_type = genomic DNA
atcgattgatcaacaagtttgtacaaaaaagttggcatgcacaggaagcacctccaggagattccagacctgagtagcaacgttgccaccagcttcacgtggggatgggattccagcaagacttctgaactgctgtcaggcatgggggtctccgccctggagaaagaggagcccgacagtgagaacatcccccaggaactgctctcaaacctgggccacccggagagccccccacggaaacggctgaagagcaaagggagtgacaaagactttgtgattgtccgcaggcctaagctaaatcgagagaactttccaggtgtttcatgggactcccttccggatgagctgctcttgggaatcttttcctgtctgtgcctccctgagctgctaaaggtctctggtgtttgtaagaggtggtatcgcctagcgtctgatgagtctctatggcagaccttagacctcacaggtaaaaatctgcacccggatgtgactggtcggttgctgtctcaaggggtgattgccttccgctgcccacgatcatttatggaccaaccattggctgaacatttcagcccttttcgtgtacagcacatggacctatcgaactcagttatagaagtgtccaccctccacggcatactgtctcagtgttccaagttgcagaatctaagcctggaaggcctgcggctttcggatcccattgtcaatactctcgcaaaaaactcaaatttagtgcgacttaacctttctgggtgttctggattctctgaatttgccctgcagactttgctaagcagctgttccagactggatgagctgaacctctcctggtgttttgatttcactgaaaagcatgtacaggtggctgttgcgcatgtgtcagagaccatcacccagctgaatcttagcggctacagaaagaatctccagaaatcagatctctctactttagttagaagatgccccaatcttgtccatctagacttaagtgatagtgtcatgctaaagaatgactgctttcaggaatttttccagctcaactacctccaacacctatcactcagtcggtgctatgatataatacctgaaactttactattagtgacaagagctggggttaggatccggttggactctgacatcggatgccctcaaacatacagaacttccaaactcaagtccagccataagctattttgccaacatgtcagagtaatctgtatttttgtatgtgatttctacttttatagacttgttttaaaacaatacccaactttcttgtacaaagtggttgatatcggtaagcctatccctaaccctctcctcggtctcgattctacgtagtaatgaactagtccgtaacttgaaagtatttcgatttcttggctttatatatcttgtggaaaggacgaatctggtaatgttgataataccct

SEQ ID NO: 3084 - DNA, 1484 bp, Homo sapiens
  source 1..1484: mol_type = genomic DNA
atcgattgatcaacaagtttgtacaaaaaagcaggcaccatgcacaggaagcacctccaggagattccagacctgagtagcaacgttgccaccagcttcacgtggggatgggattccagcaagacttctgaactgctgtcaggcatgggggtctccgccctggagaaagaggagcccgacagtgagaacatcccccaggaactgctctcaaacctgggccacccggagagccccccacggaaacggctgaagagcaaagggagtgacaaagactttgtgattgtccgcaggcctaagctaaatcgagagaactttccaggtgtttcatgggactcccttccggatgagctgctcttgggaatcttttcctgtctgtgcctccctgagctgctaaaggtctctggtgtttgtaagaggtggtatcgcctagcgtctgatgagtctctatggcagaccttagacctcacaggtaaaaatctgcacccggatgtgactggtcggttgctgtctcaaggggtgattgccttccgctgcccacgatcatttatggaccaaccattggctgaacatttcagcccttttcgtgtacagcacatggacctatcgaactcagttatagaagtgtccaccctccacggcatactgtctcagtgttccaagttgcagaatctaagcctggaaggcctgcggctttcggatcccattgtcaatactctcgcaaaaaactcaaatttagtgcgacttaacctttctgggtgttctggattctctgaatttgccctgcagactttgctaagcagctgttccagactggatgagctgaacctctcctggtgttttgatttcactgaaaagcatgtacaggtggctgttgcgcatgtgtcagagaccatcacccagctgaatcttagcggctacagaaagaatctccagaaatcagatctctctactttagttagaagatgccccaatcttgtccatctagacttaagtgatagtgtcatgctaaagaatgactgctttcaggaatttttccagctcaactacctccaacacctatcactcagtcggtgctatgatataatacctgaaactttacttgaacttggagaaattcccacactaaaaacactacaagtttttggaatcgtgccagatggtacccttcaactgttaaaggaagcccttcctcatctacagattaattgctcccatttcaccaccattgccaggccaactattggcaacaaaaagaaccaggagatatggggcatcaaatgccgactgacactgcaaaagcccagttgtctatagaacccagctttcttgtacaaagtggttgatatcggtaagcctatccctaaccctctcctcggtctcgattctacgtagtaatgaactagtccgtaacttgaaagtatttcgatttcttggctttatatatcttgtggaaaggacgaccgtccctatgtcactgctattac

SEQ ID NO: 3085 - DNA, 1442 bp, Homo sapiens
  source 1..1442: mol_type = genomic DNA
atcgattgatcaacaagtttgtacaaaaaagcaggcaccatgcacaggaagcacctccaggagattccagacctgagtagcaacgttgccaccagcttcacgtggggatgggattccagcaagacttctgaactgctgtcaggcatgggggtctccgccctggagaaagaggagcccgacagtgagaacatcccccaggaactgctctcaaacctgggccacccggagagccccccacggaaacggctgaagagcaaagggagtgacaaagactttgtgattgtccgcaggcctaagctaaatcgagagaactttccaggtgtttcatgggactcccttccggatgagctgctcttgggaatcttttcctgtctgtgcctccctgagctgctaaaggtctctggtgtttgtaagaggtggtatcgcctagcgtctgatgagtctctatggcagaccttagacctcacaggtaaaaatctgcacccggatgtgactggtcggttgctgtctcaaggggtgattgccttccgctgcccacgatcatttatggaccaaccattggctgaacatttcagcccttttcgtgtacagcacatggacctatcgaactcagttatagaagtgtccaccctccacggcatactgtctcagtgttccaagttgcagaatctaagcctggaaggcctgcggctttcggatcccattgtcaatactctcgcaaaaaactcaaatttagtgcgacttaacctttctgggtgttctggattctctgaatttgccctgcagactttgctaagcagctgttccagactggatgagctgaacctctcctggtgttttgatttcactgaaaagcatgtacaggtggctgttgcgcatgtgtcagagaccatcacccagctgaatcttagcggctacagaaagaatctccagaaatcagatctctctactttagttagaagatgccccaatcttgtccatctagacttaagtgatagtgtcatgctaaagaatgactgctttcaggaatttttccagctcaactacctccaacacctatcactcagtcggtgctatgatataatacctgaaactttactattagtgacaagagctggggttaggatccggttggactctgacatcggatgccctcaaacatacagaacttccaaactcaagtccagccataagctattttgccaacatgtcagagtaatctgtatttttgtatgtgatttctacttttatagacttgttttaaaacaataagacccagctttcttgtacaaagtggttgatatcggtaagcctatccctaaccctctcctcggtctcgattctacgtagtaatgaactagtccgtaacttgaaagtatttcgatttcttggctttatatatcttgtggaaaggacgaaccggatcccgagacatatgatct

SEQ ID NO: 3086 - DNA, 1022 bp, Homo sapiens
  source 1..1022: mol_type = genomic DNA
atcgattgatcaacaagtttgtacaaaaaagttggcatgaaaggcaagaaaggtattgttgcagcatctggcagtgagactgaggatgaggacagcatggacattcccttggacctttcttcatccgctggctcaggcaagagaaggagaaggggcaacctacccaaggagtctgtgcagattcttcgggattggctgtatgagcaccgttacaatgcctatccttcagagcaagaaaaagcgttgctgtcccagcaaacacacctgtctacgctacaggtctgtaactggttcatcaacgcccgccgcaggctcctccctgacatgctgagaaaggatggcaaagatccaaatcagttcacaatttcccgccgtggggccaagatttctgaaacgagctctgtggagtccgtgatgggcatcaaaaacttcatgccagctctagaggagaccccatttcattcctgtacagctgggccaaacccaaccctagggaggccactgtctcctaagccgtcatccccgggatcagttttggctcgtccatcagtgatctgccataccactgtgactgcattgaaagatgtccctttctctctctgccagtcggtcggtgtgggacaaaacacagatatacagcagatagcggccaaaaacttcacagacacctctctcatgtacccagaggacacttgtaaatctggaccaagtacgaatacacagagtggtcttttcaacactcctccccctactccaccggacctcaaccaggacttcagtggatttcagcttctagtggatgttgcactcaaacgggctgcagagatggagcttcaggcaaaacttacagctaacccaactttcttgtacaaagtggttgatatcggtaagcctatccctaaccctctcctcggtctcgattctacgtagtaatgaactagtccgtaacttgaaagtatttcgatttcttggctttatatatcttgtggaaaggacgatccctaattgaacatcctttgcgt

SEQ ID NO: 3087 - DNA, 1604 bp, Homo sapiens
  source 1..1604: mol_type = genomic DNA
atcgattgatcaacaagtttgtacaaaaaagttggcatggaggtggcgccggagcagccgcgctggatggcgcacccggccgtgctgaatgcgcagcaccccgactcacaccacccgggcctggcgcacaactacatggaacccgcgcagctgctgcctccagacgaggtggacgtcttcttcaatcacctcgactcgcagggcaacccctactatgccaaccccgctcacgcgcgggcgcgcgtctcctacagccccgcgcacgcccgcctgaccggaggccagatgtgccgcccacacttgttgcacagcccgggtttgccctggctggacgggggcaaagcagccctctctgccgctgcggcccaccaccacaacccctggaccgtgagccccttctccaagacgccactgcacccctcagctgctggaggccctggaggcccactctctgtgtacccaggggctgggggtgggagcgggggaggcagcgggagctcagtggcctccctcacccctacagcagcccactctggctcccaccttttcggcttcccacccacgccacccaaagaagtgtctcctgaccctagcaccacgggggctgcgtctccagcctcatcttccgcggggggtagtgcagcccgaggagaggacaaggacggcgtcaagtaccaggtgtcactgacggagagcatgaagatggaaagtggcagtcccctgcgcccaggcctagctactatgggcacccagcctgctacacaccaccccatccccacctacccctcctatgtgccggcggctgcccacgactacagcagcggactcttccaccccggaggcttcctggggggaccggcctccagcttcacccctaagcagcgcagcaaggctcgttcctgttcagaaggccgggagtgtgtcaactgtggggccacagccacccctctctggcggcgggacggcaccggccactacctgtgcaatgcctgtggcctctaccacaagatgaatgggcagaaccgaccactcatcaagcccaagcgaagactgacgacaaccaccaccttatggcgccgaaacgccaacggggaccctgtctgcaacgcctgtggcctctactacaagctgcacaatgttaacaggccactgaccatgaagaaggaagggatccagactcggaaccggaagatgtccaacaagtccaagaagagcaagaaaggggcggagtgcttcgaggagctgtcaaagtgcatgcaggagaagtcatcccccttcagtgcagctgccctggctggacacatggcacctgtgggccacctcccgcccttcagccactccggacacatcctgcccactccgacgcccatccacccctcctccagcctctccttcggccacccccacccgtccagcatggtgaccgccatgggccacccaactttcttgtacaaagtggttgatatcggtaagcctatccctaaccctctcctcggtctcgattctacgtagtaatgaactagtccgtaacttgaaagtatttcgatttcttggctttatatatcttgtggaaaggacgacaccctcccccaggagttctagat

SEQ ID NO: 3088 - DNA, 1646 bp, Homo sapiens
  source 1..1646: mol_type = genomic DNA
atcgattgatcaacaagtttgtacaaaaaagttggcatggaggtggcgccggagcagccgcgctggatggcgcacccggccgtgctgaatgcgcagcaccccgactcacaccacccgggcctggcgcacaactacatggaacccgcgcagctgctgcctccagacgaggtggacgtcttcttcaatcacctcgactcgcagggcaacccctactatgccaaccccgctcacgcgcgggcgcgcgtctcctacagccccgcgcacgcccgcctgaccggaggccagatgtgccgcccacacttgttgcacagcccgggtttgccctggctggacgggggcaaagcagccctctctgccgctgcggcccaccaccacaacccctggaccgtgagccccttctccaagacgccactgcacccctcagctgctggaggccctggaggcccactctctgtgtacccaggggctgggggtgggagcgggggaggcagcgggagctcagtggcctccctcacccctacagcagcccactctggctcccaccttttcggcttcccacccacgccacccaaagaagtgtctcctgaccctagcaccacgggggctgcgtctccagcctcatcttccgcggggggtagtgcagcccgaggagaggacaaggacggcgtcaagtaccaggtgtcactgacggagagcatgaagatggaaagtggcagtcccctgcgcccaggcctagctactatgggcacccagcctgctacacaccaccccatccccacctacccctcctatgtgccggcggctgcccacgactacagcagcggactcttccaccccggaggcttcctggggggaccggcctccagcttcacccctaagcagcgcagcaaggctcgttcctgttcagaaggccgggagtgtgtcaactgtggggccacagccacccctctctggcggcgggacggcaccggccactacctgtgcaatgcctgtggcctctaccacaagatgaatgggcagaaccgaccactcatcaagcccaagcgaagactgtcggccgccagaagagccggcacctgttgtgcaaattgtcagacgacaaccaccaccttatggcgccgaaacgccaacggggaccctgtctgcaacgcctgtggcctctactacaagctgcacaatgttaacaggccactgaccatgaagaaggaagggatccagactcggaaccggaagatgtccaacaagtccaagaagagcaagaaaggggcggagtgcttcgaggagctgtcaaagtgcatgcaggagaagtcatcccccttcagtgcagctgccctggctggacacatggcacctgtgggccacctcccgcccttcagccactccggacacatcctgcccactccgacgcccatccacccctcctccagcctctccttcggccacccccacccgtccagcatggtgaccgccatgggctacccaactttcttgtacaaagtggttgatatcggtaagcctatccctaaccctctcctcggtctcgattctacgtagtaatgaactagtccgtaacttgaaagtatttcgatttcttggctttatatatcttgtggaaaggacgacggtatccggcttgtaactcaatc

SEQ ID NO: 3089 - DNA, 998 bp, Homo sapiens
  source 1..998: mol_type = genomic DNA
accgccaccatggagaacttccaaaaggtggaaaagatcggagagggcacgtacggagttgtgtacaaagccagaaacaagttgacgggagaggtggtggcgcttaagaaaatccgcctggacactgagactgagggtgtgcccagtactgccatccgagagatctctctgcttaaggagcttaaccatcctaatattgtcaagctgctggatgtcattcacacagaaaataaactctacctggtttttgaatttctgcaccaagatctcaagaaattcatggatgcctctgctctcactggcattcctcttcccctcatcaagagctatctgttccagctgctccagggcctagctttctgccattctcatcgggtcctccaccgagaccttaaacctcagaatctgcttattaacacagagggggccatcaagctagcagactttggactagccagagcttttggagtccctgttcgtacttacacccatgaggtggtgaccctgtggtaccgagctcctgaaatcctcctgggctgcaaatattattccacagctgtggacatctggagcctgggctgcatctttgctgagatggtgactcgccgggccctattccctggagattctgagattgaccagctcttccggatctttcggactctggggaccccagatgaggtggtgtggccaggagttacttctatgcctgattacaagccaagtttccccaagtgggcccggcaagattttagtaaagttgtacctcccctggatgaagatggacggagcttgttatcgcaaatgctgcactacgaccctaacaagcggatttcggccaaggcagccctggctcaccctttcttccaggatgtgaccaagccagtaccccatcttcgactctagtaatgaactagtccgtaacttgaaagtatttcgatttcttggctttatatatcttgtggaaaggacgacttcgtgacaatacctttcggaat

SEQ ID NO: 3090 - DNA, 1049 bp, Homo sapiens
  source 1..1049: mol_type = genomic DNA
atcgattgatcaacaagtttgtacaaaaaagttggcatgagtcagcagcggccggcgaggaagttacccagtctcctcctggacccgacggaggagacggttcgccgtcggtgccgagaccccatcaacgtggagggcctgctgccatcaaaaataaggattaatttagaagataatgtacaatatgtgtccatgagaaaagctctaaaagtgaagagacctcgttttgatgtatcgctggtttatttaactcgaaaatttatggatcttgtcagatctgctcccgggggtattcttgacttaaacaaggttgcaacgaaactgggagtccgaaagcggagagtgtatgacatcaccaatgtcttagatggaatcgacctcgttgaaaagaaatccaagaaccatattagatggataggatctgatcttagcaattttggagcagttccccaacaaaagaagctacaggaggaactttctgacttatcagcaatggaagatgctttggatgagttaattaaggattgtgctcagcagctgtttgagttaacagatgacaaagaaaatgaaagactagcatatgtgacctatcaagacattcatagcattcaggccttccatgaacagatcgtcattgcagttaaagctccagcagaaaccagattggatgttccagctcccagagaagactctatcacagtgcacataaggagcaccaacggacctatcgatgtctatttgtgtgaagtggagcagggtcagaccagtaacaaaaggtctgaaggtgtcgggacctcttcatctgagagcactcatccagaaggccctgaggaagaagaaaatcctcagcaaagtgaagaattgcttgaagtaagcaactgcccaactttcttgtacaaagtggttgatatcggtaagcctatccctaaccctctcctcggtctcgattctacgtagtaatgaactagtccgtaacttgaaagtatttcgatttcttggctttatatatcttgtggaaaggacgagagaagaatgctgtacaaccttga

SEQ ID NO: 3091 - DNA, 734 bp, Homo sapiens
  source 1..734: mol_type = genomic DNA
atcgattgatcaacaagtttgtacaaaaaagttggcatggcttcctcgtctggcaacgatgatgatctcactatccccagagctgctatcaataaaatgatcaaagagactcttcctaatgtccgggtggccaacgatgctcgagagctggtggtgaactgctgcactgaattcattcaccttatatcttctgaagccaatgagatttgtaacaaatcggaaaagaagaccatctcaccagagcatgtcatacaagcactagaaagtttgggatttggctcttacatcagtgaagtaaaagaagtcttgcaagagtgtaaaacagtagcattaaaaagaagaaaggccagttctcgtttggaaaaccttggcattcctgaagaagagttattgagacagcaacaagaattatttgcaaaagctagacagcaacaagcagaattggcccaacaggaatggcttcaaatgcagcaagctgcccaacaagcccagcttgctgctgcctcagccagtgcatctaatcaggcgggatcttctcaggatgaagaagatgatgatgatatctgcccaactttcttgtacaaagtggttgatatcggtaagcctatccctaaccctctcctcggtctcgattctacgtagtaatgaactagtccgtaacttgaaagtatttcgatttcttggctttatatatcttgtggaaaggacgagtgatttatataacactggtaaac

SEQ ID NO: 3092 - DNA, 1211 bp, Homo sapiens
  source 1..1211: mol_type = genomic DNA
atcgattgatcaacaagtttgtacaaaaaagttggcatgtccacagaaggaggatttggtggtactagcagcagtgatgcccagcaaagcctacagtcgttctggcctcgggtcatggaagaaatccggaatttaacagtgaaagacttccgagtgcaggaactcccactggctcgtattaagaagattatgaaactggatgaagatgtgaagatgatcagtgcagaagcgcctgtactctttgccaaggcagcccagatttttatcacagagttgactcttcgagcctggattcacacagaagataacaagcgccggactctacagagaaatgatatcgccatggcaattacaaaatttgatcagtttgattttctcatcgatattgttccaagagatgaactgaaacctccaaagcgtcaggaggaggtgcgccagtctgtaactcctgccgagccagtccagtactatttcacgctggctcagcaacccaccgctgtccaagtccagggccagcagcaaggccagcagaccaccagctccacgaccaccatccagcctgggcagatcatcatcgcacagcctcagcagggccagaccacacctgtgacaatgcaggttggagaaggtcagcaggtgcagattgtccaggctcagccacagggtcaagcccaacaggcccagagtggcactggacagaccatgcaggtgatgcagcagatcatcactaacacaggagagatccagcagatcccggtgcagctgaatgccggccagctgcagtatatccgcttagcccagcctgtatcaggcactcaagttgtgcagggacagatccagacacttgccaccaatgctcaacagattacacagacagaggtccagcaaggacagcagcagttcagccagttcacagatggacagcagctctaccagatccagcaagtcaccatgcctgcgggccaggacctcgcccagcccatgttcatccagtcagccaaccagccctccgacgggcaggccccccaggtgaccggcgactgcccaactttcttgtacaaagtggttgatatcggtaagcctatccctaaccctctcctcggtctcgattctacgtagtaatgaactagtccgtaacttgaaagtatttcgatttcttggctttatatatcttgtggaaaggacgaaacattttgatgattcggttacgc

SEQ ID NO: 3093 - DNA, 1319 bp, Homo sapiens
  source 1..1319: mol_type = genomic DNA
atcgattgatcaacaagtttgtacaaaaaagttggcaccatgccaattcatgaacttctcagcctttatggttatggtagtactgttcgactacctgaagaagatgaggaagaggaagaagaggaagaagaaggtgaagatgatgaagatgctgataatgatgacaacagtggctgtagtggggaaaataaagaggagaatataaaggattcatcaggtcaggaggatgaaactcagtcttccaatgatgatccatcacaatctgttgcttctcaagatgcccaggaaataatccgcccacgtcgatgtaaatattttgatacaaatagtgaagtagaagaagaatctgaagaagatgaagattatattccatcagaagactggaaaaaggagattatggtgggctccatgtttcaagcagaaattccagttggcatttgtagatacaaagaaaatgaaaaagtatatgaaaatgatgatcagctcctgtgggaccctgagtacttaccagaagataaagtgattatatttcttaaagatgcatctagaagaacaggtgatgagaagggtgtagaagcaattcctgaaggatctcacataaaagacaatgaacaggctttatatgaattggttaaatgcaattttgatacagaagaagcattgagaagattaagatttaatgtaaaagcagctagagaggaattatctgtttggacagaggaagagtgtagaaattttgaacaagggctgaaggcctatggaaaggattttcatttgattcaggctaataaagtccgaacaaggtcagttggtgaatgtgtagcattctattacatgtggaaaaaatctgaacgttatgatttctttgctcagcaaacacgatttggaaagaagaaatataatcttcatcctggtgtaacggattacatggatcgtcttctagacgaaagtgaaagtgctgcatctagtcgagcaccatcccctcccccaactgcatcaaacagtagtaacagccagtctgagaaagaagatggcactgtaagcactgctaatcaaaatggagtgtcatctaatggaccaggcatactccaaatgcttcttccagttcatttttcagccatcagttcaagagccaatgcctttttaaaattgccaactttcttgtacaaagtggttgatatcggtaagcctatccctaaccctctcctcggtctcgattctacgtagtaatgaactagtccgtaacttgaaagtatttcgatttcttggctttatatatcttgtggaaaggacgacttttgccgttttaccgcaaagca

SEQ ID NO: 3094 - DNA, 1238 bp, Homo sapiens
  source 1..1238: mol_type = genomic DNA
atcgattgatcaacaagtttgtacaaaaaagttggcatgcatcggactacacggatcaaaatcacagagctgaacccccacctcatgtgtgccctctgcggggggtacttcatcgacgccaccactatcgtggagtgcctgcattccttctgcaaaacctgcatcgtgcgctacctggagaccaacaaatactgccccatgtgtgacgtgcaggtccataaaacccggccgctgctgagcatcaggtctgacaaaacacttcaagacattgtctacaaattggtccctgggctttttaaagatgagatgaaacggcggcgggatttctatgcagcgtaccccctgacggaggtccccaacggctccaatgaggaccgcggcgaggtcttggagcaggagaagggggctctgagtgatgatgagattgtcagcctctccatcgaattctacgaaggtgccagggaccgggacgagaagaagggccccctggagaatggggatggggacaaagagaaaacaggggtgcgcttcctgcgatgcccagcagccatgaccgtcatgcatcttgccaagtttctccgcaacaagatggatgtgcccagcaagtacaaggtggaggttctgtacgaggacgagccactgaaggaatactacaccctcatggacatcgcctacatctacccctggcggcggaacgggcctctccccctcaagtaccgtgtccagccagcctgcaagcggctcaccctagccacggtgcccaccccctccgagggcaccaacaccagcggggcgtccgagtgtgagtcagtcagcgacaaggctcccagccctgccaccctgccagccacctcctcctccctgcccagcccagccaccccatcccatggctctcccagttcccatgggcctccagccacccaccctacctcccccactcccccttcgacagccagtggggccaccacagctgccaacgggggtagcttgaactgcctgcagacaccatcctccaccagcagggggcgcaagatgactgtcaacggcgctcccgtgccccccttaacttgcccaactttcttgtacaaagtggttgatatcggtaagcctatccctaaccctctcctcggtctcgattctacgtagtaatgaactagtccgtaacttgaaagtatttcgatttcttggctttatatatcttgtggaaaggacgaggacattataacaatctagaacct

SEQ ID NO: 3095 - DNA, 1862 bp, Homo sapiens
  source 1..1862: mol_type = genomic DNA
atcgattgatcaacaagtttgtacaaaaaagttggcatggacaatatgtctattacgaatacaccaacaagtaatgatgcctgtctgagcattgtgcatagtttgatgtgccatagacaaggtggagagagtgaaacatttgcaaaaagagcaattgaaagtttggtaaagaagctgaaggagaaaaaagatgaattggattctttaataacagctataactacaaatggagctcatcctagtaaatgtgttaccatacagagaacattggatgggaggcttcaggtggctggtcggaaaggatttcctcatgtgatctatgcccgtctctggaggtggcctgatcttcacaaaaatgaactaaaacatgttaaatattgtcagtatgcgtttgacttaaaatgtgatagtgtctgtgtgaatccatatcactacgaacgagttgtatcacctggaattgatctctcaggattaacactgcagagtaatgctccatcaagtatgatggtgaaggatgaatatgtgcatgactttgagggacagccatcgttgtccactgaaggacattcaattcaaaccatccagcatccaccaagtaatcgtgcatcgacagagacatacagcaccccagctctgttagccccatctgagtctaatgctaccagcactgccaactttcccaacattcctgtggcttccacaagtcagcctgccagtatactggggggcagccatagtgaaggactgttgcagatagcatcagggcctcagccaggacagcagcagaatggatttactggtcagccagctacttaccatcataacagcactaccacctggactggaagtaggactgcaccatacacacctaatttgcctcaccaccaaaacggccatcttcagcaccacccgcctatgccgccccatcccggacattactggcctgttcacaatgagcttgcattccagcctcccatttccaatcatcctgctcctgagtattggtgttccattgcttactttgaaatggatgttcaggtaggagagacatttaaggttccttcaagctgccctattgttactgttgatggatacgtggacccttctggaggagatcgcttttgtttgggtcaactctccaatgtccacaggacagaagccattgagagagcaaggttgcacataggcaaaggtgtgcagttggaatgtaaaggtgaaggtgatgtttgggtcaggtgccttagtgaccacgcggtctttgtacagagttactacttagacagagaagctgggcgtgcacctggagatgctgttcataagatctacccaagtgcatatataaaggtctttgatttgcgtcagtgtcatcgacagatgcagcagcaggcggctactgcacaagctgcagcagctgcccaggcagcagccgtggcaggaaacatccctggcccaggatcagtaggtggaatagctccagctatcagtctgtcagctgctgctggaattggtgttgatgaccttcgtcgcttatgcatactcaggatgagttttgtgaaaggctggggaccggattacccaagacagagcatcaaagaaacaccttgctggattgaaattcacttacaccgggccctccagctcctagacgaagtacttcataccatgccgattgcagacccacaacctttagactgcccaactttcttgtacaaagtggttgatatcggtaagcctatccctaaccctctcctcggtctcgattctacgtagtaatgaactagtccgtaacttgaaagtatttcgatttcttggctttatatatcttgtggaaaggacgatcgtcacacagcccggtgttggga

SEQ ID NO: 3096 - DNA, 1583 bp, Homo sapiens
  source 1..1583: mol_type = genomic DNA
atcgattgatcaacaagtttgtacaaaaaagttggcatggcctctggggtggaagtcctgcgcttccagctgcccggccacgaggccgcaacgctacggaacatgaaccagctccgggcagaggagcggttctgcgacgtgaccattgtggccgacagcctcaagtttcgaggccacaaggtcatcttggccgcctgctcacccttcctgcgggaccagttcctgctgaaccccagctcggagctgcaggtctccctgatgcacagtgcacgcatcgtggccgacttgctcctctcctgctacacgggcgccttggaattcgctgttagggacatcgtcaactaccttacagccgcctcctacctgcagatggagcacgtggtggagaaatgccggaatgccctcagccagttcattgagcccaaaataggcctcaaagaggatggggtcagtgaggctagccttgtgagcagcatcagcgccaccaagtccctcctccctccagccaggaccccaaagccagccccgaagcccccacccccacctcctctaccccctccactcctgcggccagtgaagctggagttcccactggatgaagacttggagctgaaagccgaggaagaggatgaggatgaggatgaggacgtgtctgacatctgcatcgtcaaggtggagtcggccctggaggtggcacaccggctcaaaccccctggaggcctgggagggggtctgggcattggaggctccgtgggtggccaccttggggagctggcccagagcagcgttccccccagcactgtagccccaccgcagggtgtggtgaaggcctgctatagcctgtcggaagatgcagaaggggagggcctgctgttgattcccggaggccgggccagcgtgggggccacctcgggcctggtggaagcagcagcggtggccatggctgcccggggggcggggggcagcctgggggcggggggcagccggggacccctgcctgggggcttctcaggtggaaaccccttaaagaacatcaagtgcaccaagtgcccggaagtgttccagggcgtggagaagctggtcttccacatgcgggcgcagcacttcatcttcatgtgccctcgctgtggcaagcagttcaaccacagcagcaacctcaaccgccacatgaacgtgcatcgtggtgtcaagtcacactcgtgcggcatctgcggcaagtgcttcacacagaagtccacccttcacgaccacctcaacctgcactcgggagcgcggccctaccgctgctcctactgcgacgtgcgcttcgcccacaagcctgccattaggcggcacctcaaggagcaacacggcaagaccacggccgagaacgtgctggaggccagtgtggccgagattaacgtcctcatccgctacccaactttcttgtacaaagtggttgatatcggtaagcctatccctaaccctctcctcggtctcgattctacgtagtaatgaactagtccgtaacttgaaagtatttcgatttcttggctttatatatcttgtggaaaggacgactgaccgtaaaatggcttgcctgt

SEQ ID NO: 3097 - DNA, 1601 bp, Homo sapiens
  source 1..1601: mol_type = genomic DNA
atcgattgatcaacaagtttgtacaaaaaagttggcatgaatgtgacaagtttattttcctttacaagtccagctgtgaagagacttcttgggtggaaacagggcgatgaagaagaaaaatgggcagagaaagctgttgatgctttggtgaaaaaactgaagaaaaagaaaggtgccatggaggaactggaaaaggccttgagctgcccagggcaaccgagtaactgtgtcaccattccccgctctctggatggcaggctgcaagtctcccaccggaagggactgcctcatgtcatttactgccgtgtgtggcgctggcccgatcttcagagccaccatgaactaaaaccactggaatgctgtgagtttccttttggttccaagcagaaggaggtctgcatcaatccctaccactataagagagtagaaagccctgtacttcctcctgtgctggttccaagacacagcgaatataatcctcagcacagcctcttagctcagttccgtaacttaggacaaaatgagcctcacatgccactcaacgccacttttccagattctttccagcaacccaacagccacccgtttcctcactctcccaatagcagttacccaaactctcctgggagcagcagcagcacctaccctcactctcccaccagctcagacccaggaagccctttccagatgccagctgatacgcccccacctgcttacctgcctcctgaagaccccatgacccaggatggctctcagccgatggacacaaacatgatggcgcctcccctgccctcagaaatcaacagaggagatgttcaggcggttgcttatgaggaaccaaaacactggtgctctattgtctactatgagctcaacaatcgtgtgggtgaagcgttccatgcctcctccacaagtgtgttggtggatggtttcactgatccttccaacaataagaaccgtttctgccttgggctgctctccaatgttaaccggaattccactattgaaaacaccaggcggcatattggaaaaggagttcatctttattatgttggaggggaggtgtatgccgaatgccttagtgacagtagcatctttgtgcaaagtcggaactgcaactaccatcatggatttcatcctactactgtttgcaagatccctagtgggtgtagtctgaaaatttttaacaaccaagaatttgctcagttattggcacagtctgtgaaccatggatttgagacagtctatgagcttacaaaaatgtgtactatacgtatgagctttgtgaagggctggggagcagaataccaccgccaggatgttactagcaccccctgctggattgagatacatctgcacggccccctccagtggctggataaagttcttactcaaatgggttcacctcataatcctatttcatctgtatcttacccaactttcttgtacaaagtggttgatatcggtaagcctatccctaaccctctcctcggtctcgattctacgtagtaatgaactagtccgtaacttgaaagtatttcgatttcttggctttatatatcttgtggaaaggacgaagttcctacgctaatacatgcctt

SEQ ID NO: 3098 - DNA, 1043 bp, Homo sapiens
  source 1..1043: mol_type = genomic DNA
accgccaccatgtacgtgagctacctcctggacaaggacgtgagcatgtaccctagctccgtgcgccactctggcggcctcaacctggcgccgcagaacttcgtcagccccccgcagtacccggactacggcggttaccacgtggcggccgcagctgcagcggcagcgaacttggacagcgcgcagtccccggggccatcctggccggcagcgtatggcgccccactccgggaggactggaatggctacgcgcccggaggcgccgcggccgccgccaacgccgtggctcacggcctcaacggtggctccccggccgcagccatgggctacagcagccccgcagactaccatccgcaccaccacccgcatcaccacccgcaccacccggccgccgcgccttcctgcgcttctgggctgctgcaaacgctcaaccccggccctcctgggcccgccgccaccgctgccgccgagcagctgtctcccggcggccagcggcggaacctgtgcgagtggatgcggaagccggcgcagcagtccctcggcagccaagtgaaaaccaggacgaaagacaaatatcgagtggtgtacacggaccaccagcggctggagctggagaaggagtttcactacagtcgctacatcaccatccggaggaaagccgagctagccgccacgctggggctctctgagaggcaggttaaaatctggtttcagaaccgcagagcaaaggagaggaaaatcaacaagaagaagttgcagcagcaacagcagcagcagccaccacagccgcctccgccgccaccacagcctccccagcctcagccaggtcctctgagaagtgtcccagagcccttgagtccggtgtcttccctgcaagcctcagtgcctggctctgtccctggggttctggggccaactgggggggtgctaaaccccaccgtcacccagtagtaatgaactagtccgtaacttgaaagtatttcgatttcttggctttatatatcttgtggaaaggacgacccatgcaaaagttggtatatgac

SEQ ID NO: 3099 - DNA, 1790 bp, Homo sapiens
  source 1..1790: mol_type = genomic DNA
atcgattgatcaacaagtttgtacaaaaaagttggcaccatgactgcagaattgagagaagccatggccctagccccatggggcccagtgaaggtgaaaaaggaggaggaagaagaagaaaacttcccaggtcaggcatccagccaacaagtgcactccgagaacatcaaagtctgggccccagtgcagggtcttcagacaggccttgatggatcagaagaggaagaaaagggtcagaacatatcctgggatatggcggtagtcctgaaagcaactcaggaggcacctgctgcttcaacccttggcagctactcattaccagggactctggccaagagtgagatactggagactcatgggaccatgaactttctaggtgctgaaaccaagaacctacagttactggttccaaaaactgagatatgtgaggaagctgaaaaacccctcatcatatcagaaagaatccagaaagctgatcctcaaggacctgagttaggagaagcttgtgaaaagggaaacatgttaaagaggcagagaataaagagagaaaagaaagatttcagacaagtgatagtgaatgactgtcacttacctgaaagcttcaaagaagaggaaaaccagaaatgtaagaaatctggaggaaaatatagccttaattctggcgctgttaaaaatccaaaaacccagcttggacaaaagccttttacgtgtagcgtgtgtgggaaaggatttagtcagagtgcaaacctcgttgtgcatcagcgaatccacactggagagaaaccctttgaatgtcatgagtgtgggaaggccttcattcagagtgcaaacctcgttgtgcatcagagaatccacactggacagaaaccttatgtttgctcaaaatgtgggaaagccttcactcagagttcaaatctgactgtacatcaaaaaatccactccttagaaaaaacttttaagtgcaatgaatgtgagaaagcctttagttacagctcacaacttgctcggcaccagaaagtccacattacggaaaaatgctatgaatgtaatgaatgtgggaaaacatttactaggagctcaaacctcattgtccaccagaggatccacactggggagaagccctttgcctgtaacgactgtggcaaagcctttacccagagtgcaaatcttattgtacatcagcgaagccatactggtgagaagccatatgagtgtaaagagtgtgggaaagcctttagttgtttttcacaccttattgtgcaccagagaattcacactgcagagaaaccttacgactgcagcgaatgtgggaaagccttcagtcagctctcttgccttattgtccaccagagaattcacagtggagatcttccttacgtgtgtaatgaatgtgggaaggccttcacatgtagctcatacctacttattcatcagagaattcataatggagaaaaaccttacacatgtaatgagtgtgggaaggccttcagacagaggtcgagcctcaccgtgcaccagagaacccacactggggagaagccctatgaatgtgagaagtgtggtgcagctttcatttccaactcacacctcatgcgacaccatagaacccatcttgttgaattgccaactttcttgtacaaagtggttgatatcggtaagcctatccctaaccctctcctcggtctcgattctacgtagtaatgaactagtccgtaacttgaaagtatttcgatttcttggctttatatatcttgtggaaaggacgatacattttataaatgttagcgccc

SEQ ID NO: 3100 - DNA, 1262 bp, Homo sapiens
  source 1..1262: mol_type = genomic DNA
atcgattgatcaacaagtttgtacaaaaaagttggcatggccagtagggaagatgagctgaggaactgtgtggtatgtggggaccaagccacaggctaccactttaatgcgctgacttgtgagggctgcaagggtttcttcaggagaacagtcagcaaaagcattggtcccacctgcccctttgctggaagctgtgaagtcagcaagactcagaggcgccactgcccagcctgcaggttgcagaagtgcttagatgctggcatgaggaaagacatgatactgtcggcagaagccctggcattgcggcgagcaaagcaggcccagcggcgggcacagcaaacacctgtgcaactgagtaaggagcaagaagagctgatccggacactcctgggggcccacacccgccacatgggcaccatgtttgaacagtttgtgcagtttaggcctccagctcatctgttcatccatcaccagcccttgcccaccctggcccctgtgctgcctctggtcacacacttcgcagacatcaacactttcatggtactgcaagtcatcaagtttactaaggacctgcctgtcttccgttccctgcccattgaagaccagatctcccttctcaagggagcagctgtggaaatctgtcacatcgtactcaataccactttctgtctccaaacacaaaacttcctctgcgggcctcttcgctacacaattgaagatggagcccgtgtatctcccacagtggggttccaggtagagtttttggagttgctctttcacttccatggaacactacgaaaactgcagctccaagagcctgagtatgtgctcttggctgccatggccctcttctctcctgaccgacctggagttacccagagagatgagattgatcagctgcaagaggagatggcactgactctgcaaagctacatcaagggccagcagcgaaggccccgggatcggtttctgtatgcgaagttgctaggcctgctggctgagctccggagcattaatgaggcctacgggtaccaaatccagcacatccagggcctgtctgccatgatgccgctgctccaggagatctgcagctgcccaactttcttgtacaaagtggttgatatcggtaagcctatccctaaccctctcctcggtctcgattctacgtagtaatgaactagtccgtaacttgaaagtatttcgatttcttggctttatatatcttgtggaaaggacgaacgtcttccaatccctctgctcta

SEQ ID NO: 3101 - DNA, 1925 bp, Homo sapiens
  source 1..1925: mol_type = genomic DNA
atcgattgatcaacaagtttgtacaaaaaagttggcatggatgctaagtcactaactgcctggtcccggacactggtgaccttcaaggatgtatttgtggacttcaccagggaggagtggaagctgctggacactgctcagcagatcgtgtacagaaatgtgatgctggagaactataagaacctggtttccttgggttatcagcttactaagccagatgtgatcctccggttggagaagggagaagagccctggctggtggagagagaaattcaccaagagacccatcctgattcagagactgcatttgaaatcaaatcatcagtttccagcaggagcatttttaaagataagcaatcctgtgacattaaaatggaaggaatggcaaggaatgatctctggtatttgtcattagaagaagtctggaaatgtagagaccagttagacaagtatcaggaaaacccagagagacatttgaggcaagtggcattcacccaaaagaaagtacttactcaggagagagtctctgaaagtggtaaatatgggggaaactgtcttcttcctgctcagctagtactgagagagtatttccataaacgtgactcacatactaaaagtttaaaacatgatttagttcttaatggtcatcaggacagttgtgcaagtaacagtaatgaatgtggtcaaactttctgtcaaaacattcaccttattcagtttgcaagaactcacacaggtgataaatcctacaaatgccctgataatgacaactctcttactcatggttcatctcttggtatatcaaagggcatacatagagagaaaccctatgaatgtaaggaatgtggaaaattcttcagctggcgctctaatcttactaggcatcagcttattcatactggagaaaaaccgtatgagtgtaaagaatgtggaaagtctttcagccggagttctcacctcattggacatcaaaagacccatactggtgaggaaccctatgaatgtaaagaatgtggaaaatccttcagctggttctctcaccttgttactcatcagagaactcatacaggagacaaactgtacacatgtaatcagtgtgggaaatcttttgttcatagctctaggcttattagacaccagaggacacatactggagagaaaccctatgaatgtcctgaatgtgggaaatctttcagacagagcacacatctcattctgcatcagagaacccatgtgagagtgaggccctatgaatgcaatgaatgtggaaagtcttacagccagagatctcaccttgttgtgcatcatagaattcacactggactaaaaccttttgagtgtaaggattgtggaaaatgttttagtcgaagctctcacctttattcacatcaaagaacccacactggagagaaaccatatgagtgtcatgattgtggaaaatctttcagccagagttctgcccttattgtgcatcagaggatacacactggagagaaaccatatgaatgctgtcagtgtgggaaagccttcatccggaagaatgacctcattaagcaccagagaattcatgttggagaagagacctataaatgtaatcaatgtggcattatcttcagccagaactctccatttatagttcatcaaatagctcacactggagagcagttcttaacatgcaatcaatgtgggacagcgcttgttaatacctctaaccttattggataccagacaaatcatattagagaaaatgcttactacccaactttcttgtacaaagtggttgatatcggtaagcctatccctaaccctctcctcggtctcgattctacgtagtaatgaactagtccgtaacttgaaagtatttcgatttcttggctttatatatcttgtggaaaggacgatgtttcattctgtgccacccggca

SEQ ID NO: 3102 - DNA, 896 bp, Homo sapiens
  source 1..896: mol_type = genomic DNA
atcgattgatcaacaagtttgtacaaaaaagttggcatgaagcagagttcgaacgtgccggctttcctcagcaagctgtggacgcttgtggaggaaacccacactaacgagttcatcacctggagccagaatggccaaagttttctggtcttggatgagcaacgatttgcaaaagaaattcttcccaaatatttcaagcacaataatatggcaagctttgtgaggcaactgaatatgtatggtttccgtaaagtagtacatatcgactctggaattgtaaagcaagaaagagatggtcctgtagaatttcagcatccttacttcaaacaaggacaggatgacttgttggagaacattaaaaggaaggtttcatcttcaaaaccagaagaaaataaaattcgtcaggaagatttaacaaaaattataagtagtgctcagaaggttcagataaaacaggaaactattgagtccaggctttctgaattaaaaagtgagaatgagtccctttggaaggaggtgtcagaattacgagcaaagcatgcacaacagcaacaagttattcgaaagattgtccagtttattgttacattggttcaaaataaccaacttgtgagtttaaaacgtaaaaggcctctacttctaaacactaatggagcccaaaagaagaacctgtttcagcacatagtcaaagaaccaactgataatcatcatcataaagtaattttttacccaactttcttgtacaaagtggttgatatcggtaagcctatccctaaccctctcctcggtctcgattctacgtagtaatgaactagtccgtaacttgaaagtatttcgatttcttggctttatatatcttgtggaaaggacgagatcaagaacgccaggattcagcc

SEQ ID NO: 3103 - DNA, 1703 bp, Homo sapiens
  source 1..1703: mol_type = genomic DNA
atcgattgatcaacaagtttgtacaaaaaagttggcatggggcggaagaaaatacaaatcacacgcataatggatgaaaggaaccgacaggtcacttttacaaagagaaagtttggattaatgaagaaagcctatgaacttagtgtgctctgtgactgtgaaatagcactcatcattttcaacagctctaacaaactgtttcaatatgctagcactgatatggacaaagttcttctcaagtatacagaatataatgaacctcatgaaagcagaaccaactcggatattgttgaggctctgaacaagaaggaacacagagggtgcgacagcccagaccctgatacttcatatgtgctaactccacatacagaagaaaaatataaaaaaattaatgaggaatttgataatatgatgcggaatcataaaatcgcacctggtctgccacctcagaacttttcaatgtctgtcacagttccagtgaccagccccaatgctttgtcctacactaacccagggagttcactggtgtccccatctttggcagccagctcaacgttaacagattcaagcatgctctctccacctcaaaccacattacatagaaatgtgtctcctggagctcctcagagaccaccaagtactggcaatgcaggtgggatgttgagcactacagacctcacagtgccaaatggagctggaagcagtccagtggggaatggatttgtaaactcaagagcttctccaaatttgattggagctactggtgcaaatagcttaggcaaagtcatgcctacaaagtctccccctccaccaggtggtggtaatcttggaatgaacagtaggaaaccagatcttcgagttgtcatccccccttcaagcaagggcatgatgcctccactaaatacccaaaggatcagtagttctcaagccactcaacctcttgctaccccagtcgtgtctgtgacaaccccaagcttgcctccgcaaggacttgtgtactcagcaatgccgactgcctacaacactgattattcactgaccagcgctgacctgtcagcccttcaaggcttcaactcgccaggaatgctgtcgctgggacaggtgtcggcctggcagcagcaccacctaggacaagcagccctcagctctcttgttgctggagggcagttatctcagggttccaatttatccattaataccaaccaaaacatcagcatcaagtccgaaccgatttcacctcctcgggatcgtatgaccccatcgggcttccagcagcagcagcagcagcagcagcagcagcagccgccgccaccaccgcagccccagccacaacccccgcagccccagccccgacaggaaatggggcgctcccctgtggacagtctgagcagctctagtagctcctatgatggcagtgatcgggaggatccacggggcgacttccattctccaattgtgcttggccgacccccaaacactgaggacagagaaagcccttctgtaaagcgaatgaggatggacgcgtgggttacctacccaactttcttgtacaaagtggttgatatcggtaagcctatccctaaccctctcctcggtctcgattctacgtagtaatgaactagtccgtaacttgaaagtatttcgatttcttggctttatatatcttgtggaaaggacgactcacacgagaggtcgtgttgccg

SEQ ID NO: 3104 - DNA, 656 bp, Homo sapiens
  source 1..656: mol_type = genomic DNA
atcgattgatcaacaagtttgtacaaaaaagttggcatgagcaagatatcgcagcaaaacagcactccaggggtgaacggaattagtgttatccatacccaggcacatgccagcggcttacagcaggttcctcagctggtgcctgctggccctgggggaggaggcaaagctgtggctcccagcaagcagagcaaaaagagttcgcccatggatcgaaacagtgacgagtatcggcaacgccgagagaggaacaacatggctgtgaaaaagagccggttgaaaagcaagcagaaagcacaagacacactgcagagagtcaatcagctcaaagaagagaatgaacggttggaagcaaaaatcaaattgctgaccaaggaattaagtgtactcaaagatttgtttcttgagcatgcacacaaccttgcagacaacgtacagtccattagcactgaaaatacgacagcagatggcgacaatgcaggacagtacccaactttcttgtacaaagtggttgatatcggtaagcctatccctaaccctctcctcggtctcgattctacgtagtaatgaactagtccgtaacttgaaagtatttcgatttcttggctttatatatcttgtggaaaggacgagccccggctggcgtatcgccagaa

SEQ ID NO: 3105 - DNA, 1631 bp, Homo sapiens
  source 1..1631: mol_type = genomic DNA
atcgattgatcaacaagtttgtacaaaaaagcaggcttccaattgaccatggtggacacggaaagcccactctgccccctctccccactcgaggccggcgatctagagagcccgttatctgaagagttcctgcaagaaatgggaaacatccaagagatttcgcaatccatcggcgaggatagttctggaagctttggctttacggaataccagtatttaggaagctgtcctggctcagatggctcggtcatcacggacacgctttcaccagcttcgagcccctcctcggtgacttatcctgtggtccccggcagcgtggacgagtctcccagtggagcattgaacatcgaatgtagaatctgcggggacaaggcctcaggctatcattacggagtccacgcgtgtgaaggctgcaagggcttctttcggcgaacgattcgactcaagctggtgtatgacaagtgcgaccgcagctgcaagatccagaaaaagaacagaaacaaatgccagtattgtcgatttcacaagtgcctttctgtcgggatgtcacacaacgcgattcgttttggacgaatgccaagatctgagaaagcaaaactgaaagcagaaattcttacctgtgaacatgacatagaagattctgaaactgcagatctcaaatctctggccaagagaatctacgaggcctacttgaagaacttcaacatgaacaaggtcaaagcccgggtcatcctctcaggaaaggccagtaacaatccaccttttgtcatacatgatatggagacactgtgtatggctgagaagacgctggtggccaagctggtggccaatggcatccagaacaaggaggcggaggtccgcatctttcactgctgccagtgcacgtcagtggagaccgtcacggagctcacggaattcgccaaggccatcccaggcttcgcaaacttggacctgaacgatcaagtgacattgctaaaatacggagtttatgaggccatattcgccatgctgtcttctgtgatgaacaaagacgggatgctggtagcgtatggaaatgggtttataactcgtgaattcctaaaaagcctaaggaaaccgttctgtgatatcatggaacccaagtttgattttgccatgaagttcaatgcactggaactggatgacagtgatatctccctttttgtggctgctatcatttgctgtggagatcgtcctggccttctaaacgtaggacacattgaaaaaatgcaggagggtattgtacatgtgctcagactccacctgcagagcaaccacccggacgatatctttctcttcccaaaacttcttcaaaaaatggcagacctccggcagctggtgacggagcatgcgcagctggtgcagatcatcaagaagacggagtcggatgctgcgctgcacccgctactgcaggagatctacagggacatgtactgagctagcgacccagctttcttgtacaaagtggttgatatcggtaagcctatccctaaccctctcctcggtctcgattctacgtagtaatgaactagtccgtaacttgaaagtatttcgatttcttggctttatatatcttgtggaaaggacgatcaccaaaaacacatcgtctcatc

SEQ ID NO: 3106 - DNA, 938 bp, Homo sapiens
  source 1..938: mol_type = genomic DNA
atcgattgatcaacaagtttgtacaaaaaagttggcatgacggagccgggcgcctctcccgaggacccttgggtcaaggtggagtatgcctacagcgacaacagcctggaccccgggctttttgtagaaagcacccgcaaggggagtgtagtgtccagagctaatagcatcggttccaccagtgcctcttctgtccccaacacagatgatgaggacagtgattaccaccaggaggcctacaaggagtcctacaaagaccggcggcggcgcgcacacactcaggctgagcagaagaggagggacgccatcaagagaggctatgatgaccttcagaccatcgtccccacttgccagcagcaggacttctccattggctcccaaaagctcagcaaagccatcgttctacaaaagaccattgactacattcagtttttgcacaaggagaagaaaaagcaggaggaggaggtgtccacgttacgcaaggatgtcaccgccctaaagatcatgaaagtgaactatgagcagattgtgaaggcacaccaggacaacccccatgaaggggaggaccaggtctctgaccaggtcaagttcaacgtgtttcaaggcatcatggattccctgttccagtccttcaatgcctccatctcagtggccagcttccaggagctgtcagcatgtgtcttcagctggatcgaggagcactgtaagcctcagaccctgcgggagattgtgattggcgtcctgcaccaattgaaaaaccagctttactgcccaactttcttgtacaaagtggttgatatcggtaagcctatccctaaccctctcctcggtctcgattctacgtagtaatgaactagtccgtaacttgaaagtatttcgatttcttggctttatatatcttgtggaaaggacgaacgtaatggagaaagatacaatcc

SEQ ID NO: 3107 - DNA, 827 bp, Homo sapiens
  source 1..827: mol_type = genomic DNA
atcgattgatcaacaagtttgtacaaaaaagttggcatgtacctccacacagagggcttctctgggccctctccaggtgacggggccatgggctatggctatgagaaacctctgcgaccattcccagatgatgtctgcgttgtccctgagaaatttgaaggagacatcaagcaggaaggggtcggtgcatttcgagaggggccgccctaccagcgccggggtgccctgcagctgtggcaatttctggtggccttgctggatgacccaacaaatgcccatttcattgcctggacgggccggggaatggagttcaagctcattgagcctgaggaggtcgccaggctctggggcatccagaagaaccggccagccatgaattacgacaagctgagccgctcgctccgatactattatgagaaaggcatcatgcagaaggtggctggtgagcgttacgtgtacaagtttgtgtgtgagcccgaggccctcttctctttggccttcccggacaatcagcgtccagctctcaaggctgagtttgaccggcctgtcagtgaggaggacacagtccctttgtcccacttggatgagagccccgcctacctcccagagctggctggccccgcccagccatttggccccaagggtggctactcttactacccaactttcttgtacaaagtggttgatatcggtaagcctatccctaaccctctcctcggtctcgattctacgtagtaatgaactagtccgtaacttgaaagtatttcgatttcttggctttatatatcttgtggaaaggacgaatagcctcatcacgtttcctccga

SEQ ID NO: 3108 - DNA, 851 bp, Homo sapiens
  source 1..851: mol_type = genomic DNA
atcgattgatcaacaagtttgtacaaaaaagttggcaccatgacgcctcaaccctcgggtgcgcccactgtccaagtgacccgtgagacggagcggtccttccccagagcctcggaagacgaagtgacctgccccacgtccgccccgcccagccccactcgcacacgggggaactgcgcagaggcggaagagggaggctgccgaggggccccgaggaagctccgggcacggcgcgggggacgcagccggcctaagagcgagttggcactgagcaagcagcgacggagtcggcgaaagaaggccaacgaccgcgagcgcaatcgaatgcacaacctcaactcggcactggacgccctgcgcggtgtcctgcccaccttcccagacgacgcgaagctcaccaagatcgagacgctgcgcttcgcccacaactacatctgggcgctgactcaaacgctgcgcatagcggaccacagcttgtacgcgctggagccgccggcgccgcactgcggggagctgggcagcccaggcggttcccccggggactgggggtccctctactccccagtctcccaggctggcagcctgagtcccgccgcgtcgctggaggagcgacccgggctgctgggggccaccttttccgcctgcttgagcccaggcagtctggctttctcagattttctgttgccaactttcttgtacaaagtggttgatatcggtaagcctatccctaaccctctcctcggtctcgattctacgtagtaatgaactagtccgtaacttgaaagtatttcgatttcttggctttatatatcttgtggaaaggacgacgtggccccggagcggctaattgg

SEQ ID NO: 3109 - DNA, 2435 bp, Homo sapiens
  source 1..2435: mol_type = genomic DNA
atcgattgatcaacaagtttgtacaaaaaagttggcatgaacaatccgtcagaaaccagtaaaccatctatggagagtggagatggcaacacaggcacacaaaccaatggtctggactttcagaagcagcctgtgcctgtaggaggagcaatctcaacagcccaggcgcaggctttccttggacatctccatcaggtccaactcgctggaacaagtttacaggctgctgctcagtctttaaatgtacagtctaaatctaatgaagaatcgggggattcgcagcagccaagccagccttcccagcagccttcagtgcaggcagccattccccagacccagcttatgctagctggaggacagataactgggcttactttgacgcctgcccagcaacagttactactccagcaggcacaggcacaggcacagctgctggctgctgcagtgcagcagcactccgccagccagcagcacagtgctgctggagccaccatctccgcctctgctgccacgcccatgacgcagatccccctgtctcagcccatacagatcgcacaggatcttcaacaactgcaacagcttcaacagcagaatctcaacctgcaacagtttgtgttggtgcatccaaccaccaatttgcagccagcgcagtttatcatctcacagacgccccagggccagcagggtctcctgcaagcgcaaaatcttctaacgcaactacctcagcaaagccaagccaacctcctacagtcgcagccaagcatcaccctcacctcccagccagcaaccccaacacgcacaatagcagcaaccccaattcagacacttccacagagccagtcaacaccaaagcgaattgatactcccagcttggaggagcccagtgaccttgaggagcttgagcagtttgccaagaccttcaaacaaagacgaatcaaacttggattcactcagggtgatgttgggctcgctatggggaaactatatggaaatgacttcagccaaactaccatctctcgatttgaagccttgaacctcagctttaagaacatgtgcaagttgaagccacttttagagaagtggctaaatgatgcagagaacctctcatctgattcgtccctctccagcccaagtgccctgaattctccaggaattgagggcttgagccgtaggaggaagaaacgcaccagcatagagaccaacatccgtgtggccttagagaagagtttcttggagaatcaaaagcctacctcggaagagatcactatgattgctgatcagctcaatatggaaaaagaggtgattcgtgtttggttctgtaaccgccgccagaaagaaaaaagaatcaacccaccaagcagtggtgggaccagcagctcacctattaaagcaattttccccagcccaacttcactggtggcgaccacaccaagccttgtgactagcagtgcagcaactaccctcacagtcagccctgtcctccctctgaccagtgctgctgtgacgaatctttcagttacaggcacttcagacaccacctccaacaacacagcaaccgtgatttccacagcgcctccagcttcctcagcagtcacgtccccctctctgagtccctccccttctgcctcagcctccacctccgaggcatccagtgccagtgagaccagcacaacacagaccacctccactcctttgtcctcccctcttgggaccagccaggtgatggtgacagcatcaggtttgcaaacagcagcagctgctgcccttcaaggagctgcacagttgccagcaaatgccagtcttgctgccatggcagctgctgcaggactaaacccaagcctgatggcaccctcacagtttgcggctggaggtgccttactcagtctgaatccagggaccctgagcggtgctctcagcccagctctaatgagcaacagtacactggcaactattcaagctcttgcttctggtggctctcttccaataacatcacttgatgcaactgggaacctggtatttgccaatgcgggaggagcccccaacatcgtgactgcccctctgttcctgaaccctcagaacctctctctgctcaccagcaaccctgttagcttggtctctgccgccgcagcatctgcagggaactctgcacctgtagccagccttcacgccacctccacctctgctgagtccatccagaactctctcttcacagtggcctctgccagcggggctgcgtccaccaccaccaccgcctccaaggcacagtgcccaactttcttgtacaaagtggttgatatcggtaagcctatccctaaccctctcctcggtctcgattctacgtagtaatgaactagtccgtaacttgaaagtatttcgatttcttggctttatatatcttgtggaaaggacgagggagactgcatgaggcttgatta

SEQ ID NO: 3110 - DNA, 1763 bp, Homo sapiens
  source 1..1763: mol_type = genomic DNA
atcgattgatcaacaagtttgtacaaaaaagttggcaccatggcggcccttcccggcacggtaccgagaatgatgcggccggctccggggcagaactacccccgcacgggattccctttggaagtgtccaccccgcttggccaaggccgggtcaatcagctgggaggggtcttcatcaatgggcgacccctgcctaaccacatccgccacaagatagtggagatggcccaccatggcatccggccctgtgtcatctcccgacagctgcgtgtctcccacggctgcgtctccaagattctttgccgctaccaggagaccgggtccatccggcctggggccatcggcggcagcaagcccagacaggtggcgactccggatgtagagaaaaagattgaggagtacaagagggaaaacccaggcatgttcagctgggagatccgggacaggctgctgaaggatgggcactgtgaccgaagcactgtgccctcagtgagttcgattagccgcgtgctcagaatcaagttcgggaagaaagaggaggaggatgaagcggacaagaaggaggacgacggcgaaaagaaggccaaacacagcatcgacggcatcctgggcgacaaagggaaccggctggacgagggctcggatgtggagtcggaacctgacctcccactgaagcgcaagcagcgacgcagtcggaccacattcacggccgagcagctggaggagctggagaaggcctttgagaggacccactacccagacatatacacccgcgaggagctggcgcagaggaccaagctgacagaggcgcgtgtgcaggtctggttcagtaaccgccgcgcccgttggcgtaagcaggcaggagccaaccagctggcggcgttcaaccaccttctgccaggaggcttcccgcccaccggcatgcccacgctgcccccctaccagctgccggactccacctaccccaccaccaccatctcccaagatgggggcagcactgtgcaccggcctcagcccctgccaccgtccaccatgcaccagggcgggctggctgcagcggctgcagccgccgacaccagctctgcctacggagcccgccacagcttctccagctactctgacagcttcatgaatccggcggcgccctccaaccacatgaacccggtcagcaacggcctgtctcctcaggtgatgagcatcttgggcaaccccagtgcggtgcccccgcagccacaggctgacttctccatctccccgctgcatggcggcctggactcggccacctccatctcagccagctgcagccagcgggccgactccatcaagccaggagacagcctgcccacctcccaggcctactgcccacccacctacagcaccaccggctacagcgtggaccccgtggccggctatcagtacggccagtacggccagagtgagtgcctggtgccctgggcgtcccccgtccccattccttctcccacccccagggcctcctgcttgtttatggagagctacaaggtggtgtcagggtggggaatgtccatttcacagatggaaaaattgaagtccagccagatggaacagttcaccttgccaactttcttgtacaaagtggttgatatcggtaagcctatccctaaccctctcctcggtctcgattctacgtagtaatgaactagtccgtaacttgaaagtatttcgatttcttggctttatatatcttgtggaaaggacgattgatgccctactataacccttac

SEQ ID NO: 3111 - DNA, 926 bp, Homo sapiens
  source 1..926: mol_type = genomic DNA
atcgattgatcaacaagtttgtacaaaaaagttggcatgacctctttgccctgccccctccccggccgggacgcctccaaagctgtcttcccagacctcgcccctgtcccgtcggtagcggctgcctacccgcttggcttgtcccctacaaccgcagcctcccccaatttgtcctactccaggccgtatggccacctcctgtcttacccctacaccgagccagcgaaccccggagactcctacctgtcctgccagcaacccgcggcgctctctcagcccctctgcggacctgcagagcaccctcaggaactcgaggcagactcggagaagccgcggctgtccccggaaccctccgagcggcgccctcaggcccccgccaaaaagctccgcaagccgaggaccatctactccagcctgcagctgcagcacctaaaccagcgtttccagcacacgcagtacctggcgctgcccgagagggcccagctggcagcgcagctcggcctcacccagacccaggtaaagatctggtttcagaacaaacgctccaagtataagaagctcctgaagcagaattctggggggcaggaaggggacttccctgggaggaccttctctgtgtctccctgctccccacccctcccctccctctgggatctacccaaggcagggaccctgcccaccagtggctatggcaacagctttggagcctggtatcagcatcactcctcagatgtcctggcttcgcctcagatgatgtgcccaactttcttgtacaaagtggttgatatcggtaagcctatccctaaccctctcctcggtctcgattctacgtagtaatgaactagtccgtaacttgaaagtatttcgatttcttggctttatatatcttgtggaaaggacgatgtttggtctgatgtgtgtgataa

SEQ ID NO: 3112 - DNA, 1595 bp, Homo sapiens
  source 1..1595: mol_type = genomic DNA
atcgattgatcaacaagtttgtacaaaaaagttggcatgtatggaaattattctcacttcatgaagtttcccgcaggctatggaggctcccctggccacactggctctacatccatgagcccatcagcagccttgtccacagggaagccaatggacagccaccccagctacacagataccccagtgagtgccccacggactctgagtgcagtggggacccccctcaatgccctgggctctccatatcgagtcatcacctctgccatgggcccaccctcaggagcacttgcagcgcctccaggaatcaacttggttgccccacccagctctcagctaaatgtggtcaacagtgtcagcagttcagaggacatcaagcccttaccagggcttcccgggattggaaacatgaactacccatccaccagccccggatctctggttaaacacatctgtgccatctgtggagacagatcctcaggaaagcactacggggtatacagttgtgaaggctgcaaagggttcttcaagaggacgataaggaaggacctcatctacacgtgtcgggataataaagactgcctcattgacaagcgtcagcgcaaccgctgccagtactgtcgctatcagaagtgccttgtcatgggcatgaagagggaagctgtgcaagaagaaagacagaggagccgagagcgagctgagagtgaggcagaatgtgctaccagtggtcatgaagacatgcctgtggagaggattctagaagctgaacttgctgttgaaccaaagacagaatcctatggtgacatgaatatggagaactcgacaaatgaccctgttaccaacatatgtcatgctgctgacaagcagcttttcaccctcgttgaatgggccaagcgtattccccacttctctgacctcaccttggaggaccaggtcattttgcttcgggcagggtggaatgaattgctgattgcctctttctcccaccgctcagtttccgtgcaggatggcatccttctggccacgggtttacatgtccaccggagcagtgcccacagtgctggggtcggctccatctttgacagagtcctaactgagctggtttccaaaatgaaagacatgcagatggacaagtcggaactgggatgcctgcgagccattgtactctttaacccagatgccaagggcctgtccaacccctctgaggtggagactctgcgagagaaggtttatgccacccttgaggcctacaccaagcagaagtatccggaacagccaggcaggtttgccaagctgctgctgcgcctcccagctctgcgttccattggcttgaaatgcctggagcacctcttcttcttcaagctcatcggggacacccccattgacaccttcctcatggagatgttggagaccccgctgcagatcacctgcccaactttcttgtacaaagtggttgatatcggtaagcctatccctaaccctctcctcggtctcgattctacgtagtaatgaactagtccgtaacttgaaagtatttcgatttcttggctttatatatcttgtggaaaggacgatgagatggcgaaccgttggaatag

SEQ ID NO: 3113 - DNA, 1223 bp, Homo sapiens
  source 1..1223: mol_type = genomic DNA
atcgattgatcaacaagtttgtacaaaaaagcaggcaccatgttaacactaccgtttgatgagtctgttgtaatgccagaatcccagatgtgcagaaagttttctagagaatgcgaggaccagaagcaaattaagaagccagaaagcttttccaaacagattgtccttcgaggaaagagcatcaaaagggcccctggagaagaaaccgagaaagaagaagaggaggaagacagggaagaggaagatgaaaatgggttgcctagaaggaggggtcttaggaaaaaaaagacaacaaagctgcgattggaaagggtcaagttcaggagacaggaagcgaacgcgcgcgagaggaacaggatgcacggcctcaacgacgctctggacaacttaagaaaagtggtcccctgttattctaaaacccagaaactgtccaaaatagagactttacgactggccaaaaactacatctgggcactttctgaaattctgagaatcggcaagagaccagatctgctcacattcgtccaaaacttatgcaaaggtctttcccagccaactacaaacttggtggcaggctgcttgcagctcaacgccaggagtttcctgatgggtcagggtggggaggctgcacaccacacaaggtcaccctactctaccttctacccaccctaccacagccctgagctcaccactcccccagggcatgggactcttgataattccaagtccatgaaaccctacaattattgcagtgcgtatgaatccttctatgaaagtacttcccctgagtgtgccagccctcagtttgaaggtcccttaagtcctcccccaattaactataatgggatattttccctgaagcaagaagaaaccttggactatggtaaaaattacaattacggcatgcattactgtgcagtgccacccaggggtccccttgggcagggtgccatgttcaggttgcccaccgacagccacttcccttacgacttacatctgcgcagccaatctctcacaatgcaagatgaattaaatgcagtttttcataattagaacccagctttcttgtacaaagtggttgatatcggtaagcctatccctaaccctctcctcggtctcgattctacgtagtaatgaactagtccgtaacttgaaagtatttcgatttcttggctttatatatcttgtggaaaggacgatcaggattgtccctacacaaatat

SEQ ID NO: 3114 - DNA, 1217 bp, Homo sapiens
  source 1..1217: mol_type = genomic DNA
atcgattgatcaacaagtttgtacaaaaaagttggcatgaagcgcccctgcgaggagacgacctccgagagcgacatggacgagaccatcgacgtggggagcgagaacaattactcggggcaaagtactagctctgtgattagattgaattctccaacaacaacatctcagattatggcaagaaagaaaaggagagggattatagagaaaaggcgtcgggatcggataaataacagtttatctgagttgagaagacttgtgccaactgcttttgaaaaacaaggatctgcaaagttagaaaaagctgaaatattgcaaatgacagtggatcatttgaagatgcttcaggcaacagggggtaaaggctactttgacgcacacgctcttgccatggacttcatgagcataggattccgagagtgcctaacagaagttgcgcggtacctgagctccgtggaaggcctggactcctcggatccgctgcgggtgcggcttgtgtctcatctcagcacttgcgccacccagcgggaggcggcggccatgacatcctccatggcccaccaccatcatccgctccacccgcatcactgggccgccgccttccaccacctgcccgcagccctgctccagcccaacggcctccatgcctcagagtcaaccccttgtcgcctctccacaacttcagaagtgcctcctgcccacggctctgctctcctcacggccacgtttgcccatgcggattcagccctccgaatgccatccacgggcagcgtcgccccctgcgtgccacctctctccacctctctcttgtccctctctgccaccgtccacgccgcagccgcagcagccaccgcggctgcacacagcttccctctgtccttcgcgggggcattccccatgcttcccccaaacgcagcagcagcagtggccgcggccacagccatcagcccgcccttgtcagtatcagccacgtccagtcctcagcagaccagcagtggaacaaacaataaaccttaccgaccctgggggacagaagttggagctttttacccaactttcttgtacaaagtggttgatatcggtaagcctatccctaaccctctcctcggtctcgattctacgtagtaatgaactagtccgtaacttgaaagtatttcgatttcttggctttatatatcttgtggaaaggacgagcagccaaagcaaggatgcccgga

SEQ ID NO: 3115 - DNA, 932 bp, Homo sapiens
  source 1..932: mol_type = genomic DNA
atcgattgatcaacaagtttgtacaaaaaagttggcatgatgatggacctttttgaaactggctcctatttcttctacttggatggggaaaatgttactctgcagccattagaagtggcagaaggctctcctttgtatccagggagtgatggtaccttgtccccctgccaggaccaaatgcccccggaagcggggagcgacagcagcggagaggaacatgtcctggcgcccccgggcctgcagcctccacactgccccggccagtgtctgatctgggcttgcaagacctgcaagagaaaatctgcccccactgaccggcgaaaagccgccaccctgcgcgaaaggaggaggctaaagaaaatcaacgaggccttcgaggcactgaagcggcgaactgtggccaaccccaaccagaggctgcccaaggtggagattctgcggagcgccatcagctatattgagcggctgcaggacctgctgcaccggctggatcagcaggagaagatgcaggagctgggggtggaccccttcagctacagacccaaacaagaaaatcttgagggtgcggatttcctgcgcacctgcagctcccagtggccaagtgtttccgatcattccagggggctcgtgataacggctaaggaaggaggagcaagtattgattcgtcagcctcgagtagccttcgatgcctttcttccatcgtggacagtatttcctcggaggaacgcaaactcccctgcgtggaggaagtggtggagaagtacccaactttcttgtacaaagtggttgatatcggtaagcctatccctaaccctctcctcggtctcgattctacgtagtaatgaactagtccgtaacttgaaagtatttcgatttcttggctttatatatcttgtggaaaggacgagccctaagtttttcagtggagcga

SEQ ID NO: 3116 - DNA, 1229 bp, Homo sapiens
  source 1..1229: mol_type = genomic DNA
atcgattgatcaacaagtttgtacaaaaaagttggcatgaccatggaatctggagccgagaaccagcagagtggagatgcagctgtaacagaagctgaaaaccaacaaatgacagttcaagcccagccacagattgccacattagcccaggtatctatgccagcagctcatgcaacatcatctgctcccaccgtaactctagtacagctgcccaatgggcagacagttcaagtccatggagtcattcaggcggcccagccatcagttattcagtctccacaagtccaaacagttcagtcttcctgtaaggacttaaaaagacttttctccggaacacagatttcaactattgcagaaagtgaagattcacaggagtcagtggatagtgtaactgattcccaaaagcgaagggaaattctttcaaggaggccttcctacaggaaaattttgaatgacttatcttctgatgcaccaggagtgccaaggattgaagaagagaagtctgaagaggagacttcagcacctgccatcaccactgtaacggtgccaactccaatttaccaaactagcagtggacagtatattgccattacccagggaggagcaatacagctggctaacaatggtaccgatggggtacagggcctgcaaacattaaccatgaccaatgcagcagccactcagccgggtactaccattctacagtatgcacagaccactgatggacagcagatcttagtgcccagcaaccaagttgttgttcaagctgcctctggagacgtacaaacataccagattcgcacagcacccactagcactattgcccctggagttgttatggcatcctccccagcacttcctacacagcctgctgaagaagcagcacgaaagagagaggtccgtctaatgaagaacagggaagcagctcgagagtgtcgtagaaagaagaaagaatatgtgaaatgtttagaaaacagagtggcagtgcttgaaaatcaaaacaagacattgattgaggagctaaaagcacttaaggacctttactgccacaaatcagattacccaactttcttgtacaaagtggttgatatcggtaagcctatccctaaccctctcctcggtctcgattctacgtagtaatgaactagtccgtaacttgaaagtatttcgatttcttggctttatatatcttgtggaaaggacgaggtgtgtatcctcgacaattcggg

SEQ ID NO: 3117 - DNA, 1337 bp, Homo sapiens
  source 1..1337: mol_type = genomic DNA
atcgattgatcaacaagtttgtacaaaaaagttggcaccatgctaaccgctgtctgcggctctctgggcagccagcacacggaagcgccgcacgcctccccgccgcgcctcgacctgcagcctctccaaacttaccagggccacacgagccctgaggccggggactacccctccccgctgcagcctggagagctgcagagcctcccgctgggcccggaggtggacttctcgcagggctatgagctgccaggggcctcctcgcgggtaacctgcgaggacctggaaagcgacagtcccttggccccgggccccttttccaagctcctgcagccggacatgtcacaccattatgaatcgtggttcaggccgactcacccaggcgcggaggatggctcgtggtgggaccttcatccgggcaccagctggatggacctcccccacactcagggcgcgctgacctcacctggccacccgggggcgcttcaggcgggcttggggggctacgtcggagaccaccagctttgtgccccgccaccccacccgcatgcgcaccacctccttccagctgccggagggcagcatctcctagggccgcccgacggggctaaggccttggaagtagccgccccggagtctcaagggctggattccagcctggacggggcggcgcgtcccaaaggctcccggcggtcggtgccccgcagctcaggccagaccgtctgtcgctgccccaactgtctggaggcggagcgactgggggctccatgtgggcccgatgggggcaagaagaagcatttgcacaactgccacatcccgggctgcgggaaagcctacgccaagacgtcgcacctgaaggcgcacctgcgctggcacagcggcgaccgtcccttcgtgtgcaactggctcttctgcggcaagcgcttcacgcgctcggacgagctgcagcgccacctccagacccacaccggcaccaagaagttcccctgtgcagtctgcagccgcgtcttcatgcgcagcgaccacctggccaagcacatgaaaacccacgagggcgccaaggaggaggcggctggggcggcctcgggagagggcaaggccggcggcgcagtggagccccccgggggcaaaggcaaacgcgaggccgagggcagcgtggctccctccaacttgccaactttcttgtacaaagtggttgatatcggtaagcctatccctaaccctctcctcggtctcgattctacgtagtaatgaactagtccgtaacttgaaagtatttcgatttcttggctttatatatcttgtggaaaggacgatagggtttgaccttcgtcgagagg

SEQ ID NO: 3118 - DNA, 1391 bp, Homo sapiens
  source 1..1391: mol_type = genomic DNA
atcgattgatcaacaagtttgtacaaaaaagttggcatgatggctgcaaaagtggttcctatgcccccaaagccaaagcagtcctttatactgagagttccgccagactccaagctgggccaagacctacttcgagatgccactaacgggcccaagaccatccaccagctagtgctggagcacttcctcaccttcttgcccaagccaagcctggtccagcccagtcagaaagtcaaggagaccttggttattatgaaagatgtgagctcaagccttcagaacagagtgcatcctcgtcccttggtgaagcttctgcccaaaggagtccaaaaggaacaagagacagtgtctctgtatttgaaagctaaccctgaggagctggtggtctttgaggatttgaatgtatttcactgccaggaagaatgtgtgagcttggatcctactcaacaactcacgtcagagaaggaagatgacagcagtgtcggggaaatgatgttactggcagtcaatggcagtaatcctgaaggtgaagatcctgagagggaacctgtagaaaatgaagattatagagaaaagtcttcagatgatgatgaaatggattcttccttggtctctcagcagcctcccgataaccaggaaaaggaacgactaaatacatccattccacaaaaaaggaaaatgagaaatctgttagttaccattgagaatgatactcctctagaggaactctcaaaatatgtagacatcagtattattgcccttactcgaaatcggaggacaaggagatggtacacttgtccactgtgtgggaaacagtttaatgaaagttcttacctcatttcccaccagaggacccacactggagaaaaaccctatgactgtaatcactgtgggaaaagcttcaatcataaaacaaacctcaataaacatgagcgaattcatacaggagagaaaccttattcctgttctcagtgtggaaaaaacttccgtcagaattctcatcggagtcgtcatgaaggaatccatataagggagaagatatttaagtgtccagaatgtgggaaaaccttcccaaagaatgaggagtttgtgcttcatctgcagagtcatgaggctgagagaccatatggttgcaaaaaatgtgggagaagatttggtcggctgtcaaactgtacccggcatgagaaaacccactcagcctgtaagacccgaaagcagaagtacccaactttcttgtacaaagtggttgatatcggtaagcctatccctaaccctctcctcggtctcgattctacgtagtaatgaactagtccgtaacttgaaagtatttcgatttcttggctttatatatcttgtggaaaggacgactctgcaatcatcatatcgttacc

SEQ ID NO: 3119 - DNA, 1268 bp, Homo sapiens
  source 1..1268: mol_type = genomic DNA
atcgattgatcaacaagtttgtacaaaaaagttggcatgtcccgcctgctgcatgcagaagagtgggctgaagtgaaggagttgggagaccaccatcgccagccccagccgcatcatctcccgcaaccgccgccgccgccgcagccacctgcaactttgcaggcgagagagcatcccgtctacccgcctgagctgtccctcctggacagcaccgacccacgcgcctggctggctcccactttgcagggcatctgcacggcacgcgccgcccagtatttgctacattccccggagctgggtgcctcagaggccgctgcgccccgggacgaggtggacggccggggggagctggtaaggaggagcagcggcggtgccagcagcagcaagagccccgggccggtgaaagtgcgggaacagctgtgcaagctgaaaggcggggtggtggtagacgagctgggctgcagccgccaacgggccccttccagcaaacaggtgaatggggtgcagaagcagagacggctagcagccaacgccagggagcggcgcaggatgcatgggctgaaccacgccttcgaccagctgcgcaatgttatcccgtcgttcaacaacgacaagaagctgtccaaatatgagaccctgcagatggcccaaatctacatcaacgccttgtccgagctgctacaaacgcccagcggaggggaacagccaccgccgcctccagcctcctgcaaaagcgaccaccaccaccttcgcaccgcggcctcctatgaagggggcgcgggcaacgcgaccgcagctggggctcagcaggcttccggagggagccagcggccgaccccgcccgggagttgccggactcgcttctcagccccagcttctgcgggagggtactcggtgcagctggacgctctgcacttctcgactttcgaggacagcgccctgacagcgatgatggcgcaaaagaatttgtctccttctctccccgggagcatcttgcagccagtgcaggaggaaaacagcaaaacttcgcctcggtcccacagaagcgacggggaattttccccccattcccattacagtgactcggatgaggcaagttacccaactttcttgtacaaagtggttgatatcggtaagcctatccctaaccctctcctcggtctcgattctacgtagtaatgaactagtccgtaacttgaaagtatttcgatttcttggctttatatatcttgtggaaaggacgagcgtgtagacgagatgttgacgcc

SEQ ID NO: 3120 - DNA, 1832 bp, Homo sapiens
  source 1..1832: mol_type = genomic DNA
atcgattgatcaacaagtttgtacaaaaaagttggcatgtgggagcacaggaaagagccctggaccatagaaagccaagtacgagtagcaagaaaaccaaaagggtgggaatggatcaaaggtgtgaaaacagatctgtctcgtaactgtgtaatcaaggaactagcaccacaacaggaaggtaacccaggagaagtattccacacagtgacattggaacaacatgaaaaacatgacattgaagagttttgcttcagggaaatcaagaaaaaaatacacgactttgactgtcagtggagagatgatgaaagaaattgcaacaaagtgactacggccccaaaagaaaatcttacttgtaggagagaccaacgcgatagaagaggtataggaaacaagtctattaaacatcagcttggattaagctttctaccacatccccatgaactgcagcagtttcaagctgaagggaaaatttatgaatgtaaccatgttgagaagtctgtcaaccatggttcctcagtttcaccaccccaaataatttcttctaccatcaaaacccatgtttctaataaatatgggactgatttcatctgttcttcattactcacacaagaacagaaatcatgcattagggaaaaaccttacagatatattgagtgcgacaaagccttgaatcatggctcacacatgactgtacgtcaggtaagtcattctggagagaaaggatataaatgtgatctgtgtggcaaggtctttagtcaaaaatcaaaccttgcgcgtcattggagagttcatactggagagaaaccatacaaatgtaatgaatgtgacagaagtttcagtcgcaactcatgccttgcactacatcggagagttcacactggagagaaaccttacaaatgttatgagtgtgacaaggtcttcagtcgaaattcatgccttgcactacatcagaaaactcatattggagagaaaccttacacatgtaaagagtgtggcaaagcctttagtgtgaggtcaacacttaccaaccatcaggtaattcatagtggcaagaaaccttacaaatgcaatgaatgtggcaaggtgttcagtcagacttcaagccttgcaactcatcagagaattcacactggggagaaaccatacaagtgtaatgaatgtggtaaagtcttcagtcagacttcaagccttgcaaggcattggagaattcatactggagagaaaccttacaaatgcaatgaatgtggtaaggttttcagttacaattcacaccttgcgagtcatcggagagttcatactggagagaaaccttacaagtgtaatgagtgtgggaaagcctttagtgtgcattcgaacttaactacccatcaggtcatccatactggagagaagccttacaaatgtaatcaatgtggcaaaggcttcagtgtgcattcaagcctaactacccatcaggtcatccatactggagaaaaaccttacaaatgtaatgagtgtggcaaatcctttagtgtgcgcccaaacctcactagacatcagataatccatactggaaagaaaccttacaaatgtagtgattgtgggaagtcctttagtgtgcgcccaaacctcttcagacatcaaattatccatactaaggagaaaccttataaaagaaattacccaactttcttgtacaaagtggttgatatcggtaagcctatccctaaccctctcctcggtctcgattctacgtagtaatgaactagtccgtaacttgaaagtatttcgatttcttggctttatatatcttgtggaaaggacgactccgcaagctaggattttgtaac

SEQ ID NO: 3121 - DNA, 1256 bp, Homo sapiens
  source 1..1256: mol_type = genomic DNA
atcgattgatcaacaagtttgtacaaaaaagttggcatggcaatgagacagacgccgctcacctgctctggccacacgcgacccgtggttgatttggccttcagtggcatcacgccttatgggtatttcttaatcagcgcttgcaaagatggtaaacctatgctacgccagggagatacaggagactggattggaacatttttgggtcataaaggtgctgtttggggtgcaacactgaataaggatgccaccaaagcagctacagcagctgcagatttcacagccaaagtgtgggatgctgtctcaggagatgaattgatgaccctggctcataaacacattgtcaagactgtggatttcacgcaggatagtaattatttgttaaccgggggacaggataaactgttacgcatatatgacttgaacaaacctgaagcagaacctaaggaaattagtggtcatacttctggtataaaaaaagctctgtggtgcagtgaggataaacagattctttctgctgatgacaaaactgttcgactttgggatcatgctactatgacagaagtgaaatctctaaattttaatatgtctgttagtagtatggaatatattcctgagggagagattttggttataacttatggacgatctattgcttttcatagtgcagtaagtttggacccaattaaatcctttgaagctcctgcaaccatcaattctgcatctcttcatcctgagaaagaatttcttgttgcaggcggtgaagattttaaactttataagtatgattataatagtggagaagaattagaatcctacaagggacactttggtcctattcactgtgtgagatttagtcctgatggagaactctatgccagtggttcagaagatggaacattgagactatggcaaactgtggtaggaaaaacgtatggcctttggaaatgtgtgcttcctgaagaagatagtggtgagctggcaaagccaaagattggttttccagagacaacagaagaggagctagaagaaattgcttcagagaattcagattgcatctttccttcagctcctgatgttaaggcctgcccaactttcttgtacaaagtggttgatatcggtaagcctatccctaaccctctcctcggtctcgattctacgtagtaatgaactagtccgtaacttgaaagtatttcgatttcttggctttatatatcttgtggaaaggacgatgccatgcggctgggatggctatc

SEQ ID NO: 3122 - DNA, 1271 bp, Homo sapiens
  source 1..1271: mol_type = genomic DNA
atcgattgatcaacaagtttgtacaaaaaagttggcatgtcggtgaattacgcggcggggctgtcgccgtacgcggacaagggcaagtgcggcctcccggagatcttcgaccccccggaggagctggagcggaaggtgtgggaactggcgaggctggtctggcagtcttccagtgtggtgttccacacgggtgccggcatcagcactgcctctggcatccccgacttcaggggtccccacggagtctggaccatggaggagcgaggtctggcccccaagttcgacaccacctttgagagcgcgcggcccacgcagacccacatggcgctggtgcagctggagcgcgtgggcctcctccgcttcctggtcagccagaacgtggacgggctccatgtgcgctcaggcttccccagggacaaactggcagagctccacgggaacatgtttgtggaagaatgtgccaagtgtaagacgcagtacgtccgagacacagtcgtgggcaccatgggcctgaaggccacgggccggctctgcaccgtggctaaggcaagggggctgcgagcctgcaggggagagctgagggacaccatcctagactgggaggactccctgcccgaccgggacctggcactcgccgatgaggccagcaggaacgccgacctgtccatcacgctgggtacatcgctgcagatccggcccagcgggaacctgccgctggctaccaagcgccggggaggccgcctggtcatcgtcaacctgcagcccaccaagcacgaccgccatgctgacctccgcatccatggctacgttgacgaggtcatgacccggctcatgaagcacctggggctggagatccccgcctgggacggcccccgtgtgctggagagggcgctgccacccctgccccgcccgcccacccccaagctggagcccaaggaggaatctcccacccggatcaacggctctatccccgccggccccaagcaggagccctgcgcccagcacaacggctcagagcccgccagccccaaacgggagcggcccaccagccctgccccccacagaccccccaaaagggtgaaggccaaggcggtccccagctgcccaactttcttgtacaaagtggttgatatcggtaagcctatccctaaccctctcctcggtctcgattctacgtagtaatgaactagtccgtaacttgaaagtatttcgatttcttggctttatatatcttgtggaaaggacgagcaattgcagttctacactcactc

SEQ ID NO: 3123 - DNA, 1157 bp, Homo sapiens
  source 1..1157: mol_type = genomic DNA
atcgattgatcaacaagtttgtacaaaaaagttggcatgttccaggcggccgagcgcccccaggagtgggccatggagggcccccgcgacgggctgaagaaggagcggctactggacgaccgccacgacagcggcctggactccatgaaagacgaggagtacgagcagatggtcaaggagctgcaggagatccgcctcgagccgcaggaggtgccgcgcggctcggagccctggaagcagcagctcaccgaggacggggactcgttcctgcacttggccatcatccatgaagaaaaggcactgaccatggaagtgatccgccaggtgaagggagacctggccttcctcaacttccagaacaacctgcagcagactccactccacttggctgtgatcaccaaccagccagaaattgctgaggcacttctgggagctggctgtgatcctgagctccgagactttcgaggaaatacccccctacaccttgcctgtgagcagggctgcctggccagcgtgggagtcctgactcagtcctgcaccaccccgcacctccactccatcctgaaggctaccaactacaatggccacacgtgtctacacttagcctctatccatggctacctgggcatcgtggagcttttggtgtccttgggtgctgatgtcaatgctcaggagccctgtaatggccggactgcccttcacctcgcagtggacctgcaaaatcctgacctggtgtcactcctgttgaagtgtggggctgatgtcaacagagttacctaccagggctattctccctaccagctcacctggggccgcccaagcacccggatacagcagcagctgggccagctgacactagaaaaccttcagatgctgccagagagtgaggatgaggagagctatgacacagagtcagagttcacggagttcacagaggacgagctgccctatgatgactgtgtgtttggaggccagcgtctgacgttatgcccaactttcttgtacaaagtggttgatatcggtaagcctatccctaaccctctcctcggtctcgattctacgtagtaatgaactagtccgtaacttgaaagtatttcgatttcttggctttatatatcttgtggaaaggacgatacacacccttcttagccattcat

SEQ ID NO: 3124 - DNA, 1268 bp, Homo sapiens
  source 1..1268: mol_type = genomic DNA
atcgattgatcaacaagtttgtacaaaaaagttggcatgatgtcttacctcaaacaacccccatacggcatgaacgggctgggcctggccgggcccgccatggacctcctgcacccatccgtgggctatccggccactccgcggaagcagcggcgggagcgcaccaccttcacgcgttcacagctggacgtgctcgaggcgctcttcgccaagactcgctaccctgacatcttcatgcgggaggaggtggcgctcaagatcaacctgccggagtctagagtccaggtctggttcaagaaccgccgcgccaaatgccgccagcagcagcagagcgggagcggaaccaagagccgcccagccaagaagaagtcctctccagtgcgggagagctcgggctccgaaagcagtggccaattcacgccgccagctgtgtccagctctgcctcgtcctctagctcggcgtccagctcttccgccaacccagcggctgcagcggctgcgggactaggtgggaacccggtggcggccgcgtcgtcgctgagtacaccagctgcctcatctatctggagcccggcctccatctcgccaggctcagcgcccgcgtccgtgtcggtgccggagccattggccgcgcctagcaacacctcgtgtatgcagcgctccgtagctgcaggcgccgccaccgcagcagcctcttatcccatgtcctacggccagggcggcagctacggccaaggctaccctacgccctcctcttcctactttggcggcgtggactgcagctcatacctagcgcccatgcactcacatcaccacccgcaccagctgagccccatggcaccctcctccatggcgggccaccatcatcaccacccacatgcgcaccacccgttgagccagtcctcaggccaccaccaccaccatcaccaccaccaccaccaaggctacggtggctctgggcttgccttcaactctgccgactgcttggattacaaggagcctggcgccgctgctgcttcctccgcctggaaactcaacttcaactcccccgactgtctggactataaggaccaagcctcatggcggttccaggtcttgtgcccaactttcttgtacaaagtggttgatatcggtaagcctatccctaaccctctcctcggtctcgattctacgtagtaatgaactagtccgtaacttgaaagtatttcgatttcttggctttatatatcttgtggaaaggacgagtagatcggtagtcgggctaacac

SEQ ID NO: 3125 - DNA, 1274 bp, Homo sapiens
  source 1..1274: mol_type = genomic DNA
atcgattgatcaacaagtttgtacaaaaaagttggcatggctggggtcgcgtgcttgggaaaagctgccgacgcagatgaatggtgcgacagcggcctgggctccctgggtccggacgcagcggcccccggaggacctgggttgggcgcggagttgggcccggggctgtcgtgggctcccctcgtcttcggctacgtcactgaggatggggacacggcactgcacttggctgtgattcatcagcatgaacccttcctggattttcttctaggcttctcggccggcactgagtacatggacctgcagaatgacctaggccagacagccctgcacctggcagccatcctgggggagacatccacggtggagaagctgtacgcagcaggcgccgggctgtgtgtggcggagcgtaggggccacacggcgctgcacctggcctgccgtgtgggggcacacgcctgtgcccgtgccctgcttcagccccgcccccggcgccccagggaagcccccgacacctacctcgctcagggccctgaccgtactcccgacaccaaccatacccctgtcgccttgtaccccgattccgacttggagaaggaagaagaggagagtgaggaggactggaagctgcagctggaggctgaaaactacgagggccacaccccactccacgtggccgttatccacaaagatgtggagatggtccggctgctccgagatgctggagctgaccttgacaaaccggagcccacgtgcggccggagcccccttcatttggcagtggaggcccaggcagccgatgtgctggagcttctcctgagggcaggcgcgaaccctgctgcccgcatgtacggtggccgcaccccactcggcagtgccatgctccggcccaaccccatcctcgcccgcctcctccgtgcacacggagcccctgagcccgagggcgaggacgagaaatccggcccctgcagcagcagtagcgacagcgacagcggagacgagggcgatgaatacgacgacattgtggttcacagcagccgcagccaaacccggctgcctcccaccccagcctcaaaacctcttcctgacgacccccgccccgtgtgcccaactttcttgtacaaagtggttgatatcggtaagcctatccctaaccctctcctcggtctcgattctacgtagtaatgaactagtccgtaacttgaaagtatttcgatttcttggctttatatatcttgtggaaaggacgataaactctggatcggattacctcc

SEQ ID NO: 3126 - DNA, 1259 bp, Homo sapiens
  source 1..1259: mol_type = genomic DNA
atcgattgatcaacaagtttgtacaaaaaagttggcatgaccgaaatgagcttcctgagcagcgaggtgttggtgggggacttgatgtcccccttcgaccagtcgggtttgggggctgaagaaagcctaggtctcttagatgattacctggaggtggccaagcacttcaaacctcatgggttctccagcgacaaggctaaggcgggctcctccgaatggctggctgtggatgggttggtcagtccctccaacaacagcaaggaggatgccttctccgggacagattggatgttggagaaaatggatttgaaggagttcgacttggatgccctgttgggtatagatgacctggaaaccatgccagatgaccttctgaccacgttggatgacacttgtgatctctttgcccccctagtccaggagactaataagcagcccccccagacggtgaacccaattggccatctcccagaaagtttaacaaaacccgaccaggttgcccccttcaccttcttacaacctcttcccctttccccaggggtcctgtcctccactccagatcattcctttagtttagagctgggcagtgaagtggatatcactgaaggagataggaagccagactacactgcttacgttgccatgatccctcagtgcataaaggaggaagacaccccttcagataatgatagtggcatctgtatgagcccagagtcctatctggggtctcctcagcacagcccctctaccaggggctctccaaataggagcctcccatctccaggtgttctctgtgggtctgcccgtcccaaaccttacgatcctcctggagagaagatggtagcagcaaaagtaaagggtgagaaactggataagaagctgaaaaaaatggagcaaaacaagacagcagccactaggtaccgccagaagaagagggcggagcaggaggctcttactggtgagtgcaaagagctggaaaagaagaacgaggctctaaaagagagggcggattccctggccaaggagatccagtacctgaaagatttgatagaagaggtccgcaaggcaagggggaagaaaagggtcccctacccaactttcttgtacaaagtggttgatatcggtaagcctatccctaaccctctcctcggtctcgattctacgtagtaatgaactagtccgtaacttgaaagtatttcgatttcttggctttatatatcttgtggaaaggacgacagactagagggggaggcgaccta

SEQ ID NO: 3127 - DNA, 1253 bp, Homo sapiens
  source 1..1253: mol_type = genomic DNA
atcgattgatcaacaagtttgtacaaaaaagttggcatgccggtggaaaggatgcgcatgcgcccgtggctggaggagcagataaactccaacacgatcccggggctcaagtggcttaacaaggaaaagaagatttttcagatcccctggatgcatgcggctagacatgggtgggatgtggaaaaagatgcaccactctttagaaactgggcaatccatacaggaaagcatcaaccaggagtagataaacctgatcccaaaacatggaaggcgaatttcagatgcgccatgaattccttgcctgatattgaagaagtcaaggataaaagcataaagaaaggaaataatgccttcagggtctaccgaatgctgcccctatcagaacggccttctaagaaaggaaagaaaccaaagacagaaaaagaagacaaagttaagcacatcaagcaagaaccagttgagtcatctctggggcttagtaatggagtaagtgatctttctcctgagtatgcggtcctgacttcaactataaaaaatgaagtggatagtacggtgaacatcatagttgtaggacagtcccatctggacagcaacattgagaatcaagagattgtcaccaatccgccagacatttgccaagttgtagaggtgaccactgagagcgacgagcagccggtcagcatgagcgagctctaccctctgcagatctcccccgtgtcttcctatgcagaaagcgaaacgactgatagtgtgcccagcgatgaagagagtgccgaggggcggccacactggcggaagaggaatattgaaggcaaacagtacctcagcaacatggggactcgaggctcctacctgctgcccggcatggcgtccttcgtcacttccaacaaaccggacctccaggtcaccatcaaagaggagagcaatccggtgccttacaacagctcctggcccccttttcaagacctccccctttcttcctccatgaccccagcatccagcagcagtcggccagaccgggagacccgggccagcgtcatcaagaaaacatcggatatcacccaggcccgcgtcaagagctgttacccaactttcttgtacaaagtggttgatatcggtaagcctatccctaaccctctcctcggtctcgattctacgtagtaatgaactagtccgtaacttgaaagtatttcgatttcttggctttatatatcttgtggaaaggacgagagtataacctagccaacctaagc

SEQ ID NO: 3128 - DNA, 1259 bp, Homo sapiens
  source 1..1259: mol_type = genomic DNA
atcgattgatcaacaagtttgtacaaaaaagcaggcaccatgccggtggaaaggatgcgcatgcgcccgtggctggaggagcagataaactccaacacgatcccggggctcaagtggcttaacaaggaaaagaagatttttcagatcccctggatgcatgcggctagacatgggtgggatgtggaaaaagatgcaccactctttagaaactgggcaatccatacaggaaagcatcaaccaggagtagataaacctgatcccaaaacatggaaggcgaatttcagatgcgccatgaattccttgcctgatattgaagaagtcaaggataaaagcataaagaaaggaaataatgccttcagggtctaccgaatgctgcccctatcagaacggccttctaagaaaggaaagaaaccaaagacagaaaaagaagacaaagttaagcacatcaagcaagaaccagttgagtcatctctggggcttagtaatggagtaagtgatctttctcctgagtatgcggtcctgacttcaactataaaaaatgaagtggatagtacggtgaacatcatagttgtaggacagtcccatctggacagcaacattgagaatcaagagattgtcaccaatccgccagacatttgccaagttgtagaggtgaccactgagagcgacgagcagccggtcagcatgagcgagctctaccctctgcagatctcccccgtgtcttcctatgcagaaagcgaaacgactgatagtgtgcccagcgatgaagagagtgccgaggggcggccacactggcggaagaggaatattgaaggcaaacagtacctcagcaacatggggactcgaggctcctacctgctgcccggcatggcgtccttcgtcacttccaacaaaccggacctccaggtcaccatcaaagaggagagcaatccggtgccttacaacagctcctggcccccttttcaagacctccccctttcttcctccatgaccccagcatccagcagcagtcggccagaccgggagacccgggccagcgtcatcaagaaaacatcggatatcacccaggcccgcgtcaagagctgttagaacccagctttcttgtacaaagtggttgatatcggtaagcctatccctaaccctctcctcggtctcgattctacgtagtaatgaactagtccgtaacttgaaagtatttcgatttcttggctttatatatcttgtggaaaggacgaccattgtaacacccaaatcccgca

SEQ ID NO: 3129 - DNA, 1412 bp, Homo sapiens
  source 1..1412: mol_type = genomic DNA
atcgattgatcaacaagtttgtacaaaaaagttggcatgccccactctgctgggggtactgcaggggtggggctggaggctgcagagcccacagccctgctcaccagggcagagcccccttcagaacccacagagatccgtccacaaaagcggaaaaaggggccagcccccaaaatgctggggaacgagctatgcagcgtgtgtggggacaaggcctcgggcttccactacaatgttctgagctgcgagggctgcaagggattcttccgccgcagcgtcatcaagggagcgcactacatctgccacagtggcggccactgccccatggacacctacatgcgtcgcaagtgccaggagtgtcggcttcgcaaatgccgtcaggctggcatgcgggaggagtgtgtcctgtcagaagaacagatccgcctgaagaaactgaagcggcaagaggaggaacaggctcatgccacatccttgccccccagggcttcctcacccccccaaatcctgccccagctcagcccggaacaactgggcatgatcgagaagctcgtcgctgcccagcaacagtgtaaccggcgctccttttctgaccggcttcgagtcacgccttggcccatggcaccagatccccatagccgggaggcccgtcagcagcgctttgcccacttcactgagctggccatcgtctctgtgcaggagatagttgactttgctaaacagctacccggcttcctgcagctcagccgggaggaccagattgccctgctgaagacctctgcgatcgaggtgatgcttctggagacatctcggaggtacaaccctgggagtgagagtatcaccttcctcaaggatttcagttataaccgggaagactttgccaaagcagggctgcaagtggaattcatcaaccccatcttcgagttctccagggccatgaatgagctgcaactcaatgatgccgagtttgccttgctcattgctatcagcatcttctctgcagaccggcccaacgtgcaggaccagctccaggtagagaggctgcagcacacatatgtggaagccctgcatgcctacgtctccatccaccatccccatgaccgactgatgttcccacggatgctaatgaaactggtgagcctccggaccctgagcagcgtccactcagagcaagtgtttgcactgcgtctgcaggacaaaaagctcccaccgctgctctctgagatctgggatgtgcacgaatgcccaactttcttgtacaaagtggttgatatcggtaagcctatccctaaccctctcctcggtctcgattctacgtagtaatgaactagtccgtaacttgaaagtatttcgatttcttggctttatatatcttgtggaaaggacgaagtgtaaccggatttcccaacaca

SEQ ID NO: 3130 - DNA, 1625 bp, Homo sapiens
  source 1..1625: mol_type = genomic DNA
atcgattgatcaacaagtttgtacaaaaaagttggcaccatgaacaattcccagggaagagtgaccttcgaggatgtcactgtgaacttcacccagggggagtggcagcggctgaatcccgaacagagaaacttgtacagggatgtgatgctggagaattacagcaaccttgtctctgtgggacaaggggaaaccaccaaacccgatgtgatcttgaggttggaacaaggaaaggagccatggttggaggaagaggaagtgctgggaagtggccgtgcagaaaaaaatggggacattggagggcagatttggaagccaaaggatgtgaaagagagtctcgcaagagaagtcccatcaatcaataaggaaacgctgactacgcagaaaggtgtagaatgtgacggatctaagaaaatacttccactgggcatagatgatgtatcttccttgcaacactatgtacaaaataattctcacgatgataatggatacagaaaattagttggcaataatccatccaaatttgtaggacaacaactgaaatgtaatgcctgtagaaagttattcagttcaaagtcacgccttcaaagtcacctgaggaggcatgcctgtcaaaaaccctttgaatgtcatagctgtggaagagcattcggggagaagtggaagcttgataaacatcagaaaactcacgcagaggaaaggccctataaatgtgagaactgtggaaatgcctacaagcagaagtcaaatctctttcaacatcagaaaatgcatactaaagagaaaccctatcagtgtaagacatgtggaaaagccttttcctggaaatcatcctgcattaatcatgagaaaattcataatgccaagaaatcctatcagtgtaatgaatgtgagaaatccttcaggcagaactcaaccctcattcaacataaaaaagttcacactggacaaaaaccctttcaatgtacggactgtggaaaggctttcatttacaagtcagatcttgtgaaacaccagagaatacacacgggagagaaaccctataaatgtagcatatgtgagaaggccttttcccagaaatccaatgtcatcgatcatgagaaaattcacactgggaagagagcttatgagtgtgatctatgtggaaatacctttatccagaagaaaaacctcattcaacataaaaaaatccatactggggaaaagccctatgaatgtaacagatgtggaaaagccttctttcagaagtcaaaccttcatagccatcagaaaactcatagcggagagaggacctatagatgtagtgaatgtggaaaaaccttcatccggaaattaaaccttagtttgcataaaaaaacccatactggacaaaaaccttatggatgttctgaatgcggtaaagccttcgctgacaggtcataccttgttaggcaccagaaaagaattcactccagattgccaactttcttgtacaaagtggttgatatcggtaagcctatccctaaccctctcctcggtctcgattctacgtagtaatgaactagtccgtaacttgaaagtatttcgatttcttggctttatatatcttgtggaaaggacgaggtacgcttatagacccaatacca

SEQ ID NO: 3131 - DNA, 905 bp, Homo sapiens
  source 1..905: mol_type = genomic DNA
atcgattgatcaacaagtttgtacaaaaaagttggcatggcgctaccaggctcctcacaggaccaggcctggagcctggagcctccggctgccacggctgctgcctcctcatcttcgggaccccaggagcgggagggcgctgggagccccgcggcccccgggacgctgcccctggagaaggtgaagcggccgatgaacgcgttcatggtgtggagctccgctcagcgccgccagatggcgcagcagaaccccaagatgcacaactccgagatctccaagcgcctgggcgcgcagtggaagctgctggacgaggacgagaagcggcccttcgtggaggaggccaagcggctccgcgcccgacacctgcgcgactaccccgactacaagtaccggcctcggcgcaaggccaagagctcgggcgccggaccttcccgctgcggacagggaagaggcaacctggccagcggcggcccgctctgggggccggggtacgcgaccacccaaccgagcagaggctttgggtacagaccccccagctactcgacagcctacctgcctggcagctatggctcttcccactgcaaactggaagccccctcaccgtgctccctccctcagagtgaccctaggctccagggggaactgctgcccacctatacccactacctgccccctggctctcccactccatacaaccctccccttgctggtgcccccatgcccctaacccacctctacccaactttcttgtacaaagtggttgatatcggtaagcctatccctaaccctctcctcggtctcgattctacgtagtaatgaactagtccgtaacttgaaagtatttcgatttcttggctttatatatcttgtggaaaggacgatagagtttctaatttaaaatttcg

SEQ ID NO: 3132 - DNA, 998 bp, Homo sapiens
  source 1..998: mol_type = genomic DNA
atcgattgatcaacaagtttgtacaaaaaagttggcatggagtctggcaagacggcttctcccaagagcatgccgaaagatgcacagatgatggcacaaatcctgaaggatatggggattacagaatatgagccaagagttataaatcagatgttggagtttgccttccgatatgtgaccacaattctagatgatgcaaaaatttattcaagccatgctaagaaagctactgttgatgcagatgatgtgcgattggcaatccagtgccgcgctgatcagtcttttacctctcctcccccaagagattttttattagatattgcaaggcaaagaaatcaaacccctttgccattgatcaagccatattcaggtcctaggttgccacctgatagatactgcttaacagctccaaactataggctgaaatctttacagaaaaaggcatcaacttctgcgggaagaataacagtcccgcggttaagtgttggttcagttactagcagaccaagtactcccacactaggcacaccaaccccacagaccatgtctgtttcaactaaagtagggactcccatgtccctcacaggtcaaaggtttacagtacagatgcctacttctcagtctccagctgtaaaagcttcaattcctgcaacctcagcagttcagaatgttctgattaatccatcattaatcgggtccaaaaacattcttattaccactaatatgatgtcatcacaaaatactgccaatgaatcatcaaatgcattgaaaagaaaacgtgaagatgatgatgatgacgatgatgatgatgatgactatgataatctgtacccaactttcttgtacaaagtggttgatatcggtaagcctatccctaaccctctcctcggtctcgattctacgtagtaatgaactagtccgtaacttgaaagtatttcgatttcttggctttatatatcttgtggaaaggacgaccacgtctccgtatcggagtgaat

SEQ ID NO: 3133 - DNA, 1739 bp, Homo sapiens
  source 1..1739: mol_type = genomic DNA
atcgattgatcaacaagtttgtacaaaaaagttggcaccatggcgatgagagagctgaacgcggattcatgctcaagcccccagatgggggctatgtgggagactagtgggtctgtgaaagagaactccagtcagagtaagaaatacagcacaaaaatagagaatcttggtcctgagagcgcttgcaggcacttctggagcttccgttatcatgaagcaaccggaccgcttgagactatcagccaacttcagaaattgtgccatcagtggctgaggccagagatccactcaaaagagcagatcttggaaatgctggtgttagagcagttcctgagcattctgcccaaggagacccagaactgggtgcagaagcatcatccacagaatgtcaaacaggctctggtcctggtggaattcttgcagagggagcctgatggaacaaagaatgaggtcacagcccatgagctgggaaaggaggcagtgctcttgggaggaacagcagtggccccaggcttcaagtggaagccagcagagccccaaccaatgggtgtgttccagaaagaatattggaatacataccgggtactacaagaacagctgggctggaacactcacaaagaaacccagcctgtatatgaaagagctgtgcatgatcaacagatgttagccctttctgagcagaaaagaatcaaacactggaagatggcatctaaactcatcctgcctgagtccctgagtttgttgacatttgaagatgtggctgtgtatttttctgaggaagagtggcaattattgaatcctcttgagaagactctctacaatgatgtaatgcaggatatctatgagactgtcatctctctagggttaaagctaaaaaatgacactggaaatgatcatcctatatctgtttctacatcagaaatacaaacatcaggatgcgaagtatcaaaaaagaccagaatgaaaattgcccagaaaacaatgggcagggaaaatcctggtgatacacacagtgtacagaaatggcatcgagcttttccaaggaagaaaagaaagaaacctgcaacttgtaaacaagagcttccaaaacttatggatcttcatgggaaaggccccacaggggagaaaccttttaagtgtcaggaatgtgggaaaagcttcagagttagctctgatcttattaaacaccacagaattcacactggagagaaaccctataaatgtcaacaatgtgacaggaggtttagatggagttcagatcttaataagcacttcatgacccatcaaggaataaaaccatatagatgctcatggtgtgggaaaagctttagtcataacacaaatctacacacacaccaaagaattcacacaggagagaagccctttaaatgtgatgaatgtggaaaaagattcattcagaactcccaccttattaaacaccagagaactcacacaggtgagcagccttatacatgtagcttatgcaagagaaactttagtaggcgatcgagccttcttagacaccagaaactccacagaagaagggaagcatgtctagtgtctccaaacttgccaactttcttgtacaaagtggttgatatcggtaagcctatccctaaccctctcctcggtctcgattctacgtagtaatgaactagtccgtaacttgaaagtatttcgatttcttggctttatatatcttgtggaaaggacgaggtgatactgcgaacgacaatggc

SEQ ID NO: 3134 - DNA, 1760 bp, Homo sapiens
  source 1..1760: mol_type = genomic DNA
atcgattgatcaacaagtttgtacaaaaaagttggcaccatgtcccttgggtcagaattgttcagggatgtggccatagtcttctcccaagaagaatggcagtggttggcacctgctcagagggatttgtacagagacgtgatgttggagacctacagcaacctggtctcactgggtcttgccgtttccaaacctgatgtgatctccttcctagagcaaggcaaagagccctggatggtggagagagtggtgtctggaggcctgtgtccagtattggagtccagatatgataccaaggaattatttccaaagcagcatgtttatgaagtcgaatcaccccaatgggagataatggaaagccttacaagttatggtcttgagtgttcaagtttccaagatgattgggaatgcagaaaccagtttgacagacaacagggaaatccagacagacatttccatcagatgatcatcagacatgaagaaatgcccacttttgaccagcatgcatcccttactttttatcagaaaattcatactagagaaaaaccttttgggtataataaatgtagaaaagacttctggcaaaaggaactccttattaatcatcaaggaatttatactaatgagaaaccctataaatgtaaggaatgtgggaaggcctttaaatatggctcacgactaattcaacatgagaatattcattctggtaagaaaccatatgaatgtaaggaatgtggaaaggccttcaattctggttcaaattttatacaacatcagagagttcatactggtgagaaaccgtatgaatgtaaagattgtgagaaggcctttagtcgaagctcacagttgattgaacatcagcgaactcacacaggcgagaaaccctatcagtgtaaggaatgtggcaaggccttcaatcggatctcacatcttaaagtacattatagaattcatactggtgaaaaaccctatgcatgcaaggaatgtgggaaaacctttagtcatcgttctcagttgattcaacatcagactgttcatactggcaggaaactctatgaatgtaaggaatgtgggaaggcttttaatcaaggctcaactcttatacgacatcagagaattcataccggtgagaaaccctatgagtgcaaagtatgtggaaaggcctttagagtgagctcacaactcaagcaacatcagagaattcacactggagagaaaccctaccaatgtaaggtatgtggtagggccttcaaacgggtctcacatcttactgtacattacagaattcatacaggtgaaaagccatatgaatgtaaggaatgtgggaaggcttttagtcattgctcacaattgattcatcatcaggttattcacactgagaaaaagccctatgaatataaggaatgtgagaagaccttgagtcatgattcaactaccgttcaacctcagagaatgcataatagagaaacacatgtgaatataataaatgtagaaaagccttccatcagcagttaccccttactaatcatcagagaatttatgttggcaagcaaccatatgaatggaagtaatggggaaagcccattagccttgccaactttcttgtacaaagtggttgatatcggtaagcctatccctaaccctctcctcggtctcgattctacgtagtaatgaactagtccgtaacttgaaagtatttcgatttcttggctttatatatcttgtggaaaggacgaacataccttcagtagccgcctccc

SEQ ID NO: 3135 - DNA, 1817 bp, Homo sapiens
  source 1..1817: mol_type = genomic DNA
atcgattgatcaacaagtttgtacaaaaaagttggcaccatggcgctcaccagctttttacctgcacctactcagctatctcaggaccagcttgaggctgaagaaaaggcaagatcccagagatcacggcagacctcactggtctcctcccgaagagaacctcccccgtacggataccggaaaggctggatacctcggttattagaggattttggagatggaggtgcttttccagagatccatgtggcccagtatccactggatatgggacgaaagaaaaaaatgtcgaatgcgctggccattcaggtggattctgaaggaaaaattaaatatgatgcaattgctcgacaaggacagtcaaaagacaaggtcatttatagcaaatacactgacctggttccaaaggaggttatgaatgcagatgatccagacctgcaaaggcccgatgaagaagctattaaagagataacagaaaagacaagagtagccttagaaaaatctgtatcacagaaggtcgccgcagccatgccagttcgagcagctgacaaattggctcctgctcagtatatccgatacacaccatctcagcaaggagtggcattcaactctggagctaaacagagggttattcggatggtagaaatgcagaaagatccaatggagcctccaaggttcaagattaataagaaaattccccggggaccaccttctcctcctgcgcctgtcatgcattctcctagccgaaagatgactgtaaaggaacaacaagagtggaagattcctccttgtatttctaactggaaaaatgcaaagggttatacaattccattagacaaacgtctggctgctgatggaagaggactacagacagtacacataaatgaaaatttcgccaaattggcagaagccctctacattgctgatcggaaggctcgtgaagctgtggaaatgcgtgcccaagtagagagaaaaatggctcagaaagaaaaggaaaaacatgaagagaaacttagagaaatggcccagaaagccagggaaagaagagctgggatcaaaactcatgtggaaaaagaggatggggaggcacgtgagagggatgaaatccggcatgacaggcgaaaagagagacagcatgaccggaatctttccagggcagctcctgataagaggtcgaaacttcagagaaatgaaaatcgggatatcagtgaagttattgctctcggtgttcctaatcctcggacttccaatgaagttcagtatgaccaaaggctcttcaaccaatccaagggtatggacagtggatttgcaggtggagaagatgaaatttataatgtttatgatcaagcctggagaggtggtaaagatatggcccagagtatttataggcccagtaaaaatctggacaaggacatgtatggtgatgacctagaagccagaataaagaccaacagatttgttcccgacaaggagttttctggttcagaccgtagacagagaggccgagaaggaccagttcagtttgaggaagatccttttggtttggacaagtttttggaagaagccaaacagcatggtggctctaaaagaccctcagatagcagccgccccaaggaacacgagcatgaaggcaagaagaggaggaaggaattgccaactttcttgtacaaagtggttgatatcggtaagcctatccctaaccctctcctcggtctcgattctacgtagtaatgaactagtccgtaacttgaaagtatttcgatttcttggctttatatatcttgtggaaaggacgacgagggtatcgtattacatgaact

SEQ ID NO: 3136 - DNA, 2237 bp, Homo sapiens
  source 1..2237: mol_type = genomic DNA
atcgattgatcaacaagtttgtacaaaaaagttggcaccatgcagggcactgtggcatttgaagatgtggctgtgaacttttcccaggaggagtggagtctccttagtgaggttcagagatgcctttaccatgacgtgatgctggagaactgggtacttatatcctccctgggttgttggtgtggatcagaagatgaggaggcaccttctaagaagagcatttctatacaaagagtgtctcaggtcagcactcctggggcaggtgtgtctcccaagaaggcccactcttgtgaaatgtgtggcgcgatcttgggagacattttgcacttggcagatcatcaggggacacatcacaagcagaaactgcacaggtgtgaggcatgggggaataaattgtatgatagttcaaaccgtccgcaccagaatcagtaccttggagagaaaccctatagaagcagtgttgaggaagcattgtttgtgaagaggtgtaagttccatgtgtcagaggagtcatctatcttcattcagagtggaaaggactttttgcccagctcaggattactgctgcaggaggccactcacactggggagaagtcaaacagcaaacctgagtgtgagtctccctttcagtggggagatactcattacagctgtggagaatgcatgaaacattctagcaccaaacacgtatttgttcaacagcagagacttccctctagagaggaatgttattgctgggaatgtgggaaatcctttagcaaatatgatagcgtcagtaatcatcagagagttcacactgggaaaagaccttatgaatgtggagaatgtgggaaatcttttagtcataagggcagccttgttcagcatcagcgagttcacactgggaaaagaccttatgaatgtggagaatgtgggaaatcttttagtcataagggcagccttgttcagcatcagcgagttcatactggagaaagaccttatgagtgtggagaatgtgggaaatcttttagtcaaaatggtactctcattaaacatcaacgagttcacactggagaaagaccttatgagtgtgaagaatgtgggaaatgttttactcagaagggcaatctcattcaacatcaacgaggtcacactagtgaaagaccttatgagtgtgaagaatgtggaaaatgttttagtcaaaagggcaccctaactgaacatcatcgagttcacactagagaacgaccttatgagtgtggagaatgtgggaaatcttttagtcgaaagggacaccttaggaaccatcagcgaggtcacactggagaaagaccttacgagtgtggagaatgtgggaaatcttttagtcgaaagggcaacctcattcagcatcagcgaagccacactggagaaaggccttatgagtgtagagagtgtaggaaattatttaggggcaagtcccacctcattgaacaccagagagttcacactggagaaaggccatatgaatgtaatgaatgtgggaaatcatttcaagacagctctgggtttcgtgttcatcagagagttcacactggagaaaaaccgtttgagtgtagtgaatgtgggaagtcatttcctcaaagctgttccctccttcgacatcggagagttcatactggagaaaggccttatgaatgtggagaatgtggaaagtcatttcatcagagctcttccctccttcgacatcagaaaactcacactgcagaaagaccttatgagtgcagagaatgtgggaaattcttctccagtctccttgaacacaggagagttcacactggagaaaggccttatgaatgcagggaatgtggaaaaacatttactcgaaggtctgcgcattttaaacatcagagacttcatactcgaggaaagccttacgagtgcagcgaatgtgggaaatcctttgctgaaaccttcagtcttactgaacacaggagagtacacactggagaaaggccttatgagtgcagtgaatgtggaaaatcatttcatcgaagctcttctctccttcgacatcagagagttcacacagaaagaagtccttacaagttgccaactttcttgtacaaagtggttgatatcggtaagcctatccctaaccctctcctcggtctcgattctacgtagtaatgaactagtccgtaacttgaaagtatttcgatttcttggctttatatatcttgtggaaaggacgatgtttccttcatatttccgtgttg

SEQ ID NO: 3137 - DNA, 1856 bp, Homo sapiens
  source 1..1856: mol_type = genomic DNA
atcgattgatcaacaagtttgtacaaaaaagttggcaccatgctggagaactacaagaatttggccacagtaggatatcagctcttcaaacccagtctgatctcttggctggaacaagaagagtctaggacagtgcagagaggtgatttccaagcttcagaatggaaagtgcaacttaaaaccaaagagttagcccttcagcaggatgttttgggggagccaacctccagtgggattcaaatgataggaagccacaacggaggggaggtcagtgatgttaagcaatgtggagatgtctccagtgaacactcatgccttaagacacatgtgagaactcaaaatagtgagaacacatttgagtgttatctgtatggagtagacttccttactctgcacaagaaaacctctactggagagcaacgttctgtatttagtcagtgtggaaaagccttcagcctgaacccagatgttgtttgccagagaacgtgcacaggagagaaagcttttgattgcagtgactctgggaaatccttcattaatcattcacaccttcagggacatttaagaactcacaatggagaaagtctccatgaatggaaggaatgtgggagaggctttattcactccacagaccttgctgtgcgtatacaaactcacaggtcagaaaaaccctacaaatgtaaggaatgtggaaaaggatttagatattctgcataccttaatattcacatgggaacccacactggagacaatccctatgagtgtaaggagtgtgggaaagccttcaccaggtcttgtcaacttactcagcacagaaaaactcacactggagagaaaccttataaatgtaaggattgtgggagagccttcactgtttcctcttgcttaagtcaacatatgaaaatccatgtgggtgagaagccttatgaatgcaaggaatgtgggatagccttcactagatcttctcaacttactgaacatttaaaaactcacactgcaaaggatccctttgaatgtaagatatgtggaaaatcctttagaaattcctcatgcctcagtgatcactttcgaattcacactggaataaaaccctataaatgtaaggattgtgggaaagccttcactcagaactcagaccttactaagcatgcacgaactcacagtggagagaggccctatgaatgtaaggaatgtggaaaggcctttgccagatcctctcgccttagtgaacatacaagaactcacactggagagaagccttttgaatgtgtcaaatgtgggaaagcctttgctatttcttcaaatcttagtggacatttgagaattcacactggagagaagccctttgagtgcctggaatgtggtaaagcatttacgcattcctccagtcttaataatcacatgcggacccacagcgccaaaaaaccattcacgtgtatggaatgtggcaaagcctttaagtttcccacgtgtgttaaccttcacatgcggatccacactggagaaaaaccctacaaatgtaaacagtgtgggaaatccttcagttactccaattcgtttcagttacatgaacgaactcacactggagagaaaccctatgaatgtaaggagtgcgggaaagccttcagttcttccagttcctttcgaaatcatgaaagaaggcatgcggatgagagactgtcagcattgccaactttcttgtacaaagtggttgatatcggtaagcctatccctaaccctctcctcggtctcgattctacgtagtaatgaactagtccgtaacttgaaagtatttcgatttcttggctttatatatcttgtggaaaggacgaattatcggtccgtctaaccgaagc

SEQ ID NO: 3138 - DNA, 2207 bp, Homo sapiens
  source 1..2207: mol_type = genomic DNA
atcgattgatcaacaagtttgtacaaaaaagttggcatgaaaatgcatgctgagaagaagcacaaatgtagtaagtgcagcaattcgtacggtacagaatgggacctgaaaagacatgcagaggactgtggcaagaccttccggtgcacatgcggctgtccctacgccagtagaacagcactgcagtctcacatctaccgaactgggcacgagatacctgcagaacacagggacccacctagtaagaaaaggaaaatggaaaactgtgcacaaaaccagaagttatccaacaagaccattgaatcattgaacaaccaaccaatccctagaccagacactcaagaactagaagcttcagaaataaagctagaaccatcttttgaagactcttgtggctctaacactgacaagcagactcttacaacaccaccgaggtatcctcagaagttgcttttaccaaagcccaaagtggctttggttaaactacccgtgatgcagttttctgtcatgcctgtctttgtgcctacagccgactcctcagcccagcctgtggtgttaggtgttgatcagggctctgccacaggggctgtgcacttaatgcccttgtcagtaggaaccctgatcctcggcctagattcagaggcttgctctcttaaggagagcctacctcttttcaaaattgctaatcctattgctggtgagccaataagtactggtgttcaagtgaactttggtaaaagtccatctaatcctttacaagaactagggaacacgtgtcaaaagaatagcatttcttcaatcaacgtgcagacagatctgtcttatgcctcacaaaactttataccttctgcacagtgggccactgctgattcctctgtgtcgtcttgttctcaaactgatttgtcgtttgattctcaagtgtctcttcccattagtgttcacactcagacatttttgcccagctctaaggtaacttcatctatagctgctcagactgatgcatttatggacacctgtttccagtcaggtggggtctccagagaaactcaaaccagtgggatagaaagtccaacggatgaccatgtacagatggaccaagctggaatgtgcggagacatttttgagagtgttcattcatcatataatgttgctacaggtaacattataagcaacagtttagtagcagagacagtaactcatagtttgttacctcagaatgagcctaagactttaaatcaagatattgagaaatctgcaccaattataaatttcagtgcacagaatagtatgcttccttcacagaacatgacagataatcagacccaaaccatagatttattaagtgatttggaaaacatcttgtcaagtaatctgcctgcccagacattggatcatcgtagtcttttgtctgacacaaatcctggacctgacacccagctcccatctggcccagcccagaaccccggaatcgattttgatatcgaagagttcttttcggcctcaaatatccagactcaaactgaagagagtgaacttagcaccatgaccaccgagccagtcttggagtcactggacatagagactcaaacggacttcttactcgcagatacctctgctcagtcctatgggtgtaggggaaattctaacttcttaggccttgagatgtttgacacacagacacagacagacttaaactttttcttagacagtagccctcatctgcctctgggaagtattctgaaacactccagcttttccgtgagtactgattcatctgacacagagacccaaactgaaggagtctccactgctaaaaatatacctgctctagaaagcaaagttcagttgaacagtacagaaacacagaccatgagttctgggtttgaaaccctggggagcttgttcttcaccagcaacgaaactcagacagcaatggatgactttcttctggctgatctggcctggaacacgatggagtctcagttcagctctgtagaaacccagacttctgcggaaccacacacagtctccaacttctacccaactttcttgtacaaagtggttgatatcggtaagcctatccctaaccctctcctcggtctcgattctacgtagtaatgaactagcccgtaacttgaaagtatttcgatttcttggctttatatatcttgtggaaaggacgatgtaccttcatcgatgcattatct

SEQ ID NO: 3139 - DNA, 1097 bp, Homo sapiens
  source 1..1097: mol_type = genomic DNA
atcgattgatcaacaagtttgtacaaaaaagttggcatggaagattataccaaaatagagaaaattggagaaggtacctatggagttgtgtataagggtagacacaaaactacaggtcaagtggtagccatgaaaaaaatcagactagaaagtgaagaggaaggggttcctagtactgcaattcgggaaatttctctattaaaggaacttcgtcatccaaatatagtcagtcttcaggatgtgcttatgcaggattccaggttatatctcatctttgagtttctttccatggatctgaagaaatacttggattctatccctcctggtcagtacatggattcttcacttgttaagagttatttataccaaatcctacaggggattgtgttttgtcactctagaagagttcttcacagagacttaaaacctcaaaatctcttgattgatgacaaaggaacaattaaactggctgattttggccttgccagagcttttggaatacctatcagagtatatacacatgaggtagtaacactctggtacagatctccagaagtattgctggggtcagctcgttactcaactccagttgacatttggagtataggcaccatatttgctgaactagcaactaagaaaccacttttccatggggattcagaaattgatcaactcttcaggattttcagagctttgggcactcccaataatgaagtgtggccagaagtggaatctttacaggactataagaatacatttcccaaatggaaaccaggaagcctagcatcccatgtcaaaaacttggatgaaaatggcttggatttgctctcgaaaatgttaatctatgatccagccaaacgaatttctggcaaaatggcactgaatcatccatattttaatgatttggacaatcagattaagaagatgtacccaactttcttgtacaaagtggttgatatcggtaagcctatccctaaccctctcctcggtctcgattctacgtagtaatgaactagtccgtaacttgaaagtatttcgatttcttggctttatatatcttgtggaaaggacgacaccccccggcgtttaaactccaa

SEQ ID NO: 3140 - DNA, 1106 bp, Homo sapiens
  source 1..1106: mol_type = genomic DNA
atcgattgatcaacaagtttgtacaaaaaagcaggcttcaccatggaagattataccaaaatagagaaaattggagaaggtacctatggagttgtgtataagggtagacacaaaactacaggtcaagtggtagccatgaaaaaaatcagactagaaagtgaagaggaaggggttcctagtactgcaattcgggaaatttctctattaaaggaacttcgtcatccaaatatagtcagtcttcaggatgtgcttatgcaggattccaggttatatctcatctttgagtttctttccatggatctgaagaaatacttggattctatccctcctggtcagtacatggattcttcacttgttaagagttatttataccaaatcctacaggggattgtgttttgtcactctagaagagttcttcacagagacttaaaacctcaaaatctcttgattgatgacaaaggaacaattaaactggctgattttggccttgccagagcttttggaatacctatcagagtatatacacatgaggtagtaacactctggtacagatctccagaagtattgctggggtcagctcgttactcaactccagttgacatttggagtataggcaccatatttgctgaactagcaactaagaaaccacttttccatggggattcagaaattgatcaactcttcaggattttcagagctttgggcactcccaataatgaagtgtggccagaagtggaatctttacaggactataagaatacatttcccaaatggaaaccaggaagcctagcatcccatgtcaaaaacttggatgaaaatggcttggatttgctctcgaaaatgttaatctatgatccagccaaacgaatttctggcaaaatggcactgaatcatccatattttaatgatttggacaatcagattaagaagatgtaggacccagctttcttgtacaaagtggttgatatcggtaagcctatccctaaccctctcctcggtctcgattctacgtagtaatgaactagtccgtaacttgaaagtatttcgatttcttggctttatatatcttgtggaaaggacgagccagcgagcctgctcacaagtat

SEQ ID NO: 3141 - DNA, 1106 bp, Homo sapiens
  source 1..1106: mol_type = genomic DNA
atcgattgatcaacaagtttgtacaaaaaagcaggcttcaccatggaagattataccaaaatagagaaaattggagaaggtacctatggagttgtgtataagggtagacacaaaactacaggtcaagtggtagccatgaaaaaaatcagactagaaagtgaagaggaaggggttcctagtactgcaattcgggaaatttctctattaaaggaacttcgtcatccaaatatagtcagtcttcaggatgtgcttatgcaggattccaggttatatctcatctttgagtttctttccatggatctgaagaaatacttggattctatccctcctggtcagtacatggattcttcacttgttaagagttatttataccaaatcctacaggggattgtgttttgtcactctagaagagttcttcacagagacttaaaacctcaaaatctcttgattgatgacaaaggaacaattaaactggctgattttggccttgccagagcttttggaatacctatcagagtatatacacatgaggtagtaacactctggtacagatctccagaagtattgctggggtcagctcgttactcaactccagttgacatttggagtataggcaccatatttgctgaactagcaactaagaaaccacttttccatggggattcagaaattgatcaactcttcaggattttcagagctttgggcactcccaataatgaagtgtggccagaagtggaatctttacaggactataagaatacatttcccaaatggaaaccaggaagcctagcatcccatgtcaaaaacttggatgaaaatggcttggatttgctctcgaaaatgttaatctatgatccagccaaacgaatttctggcaaaatggcactgaatcatccatattttaatgatttggacaatcagattaagaagatgtaggacccagctttcttgtacaaagtggttgatatcggtaagcctatccctaaccctctcctcggtctcgattctacgtagtaatgaactagtccgtaacttgaaagtatttcgatttcttggctttatatatcttgtggaaaggacgaaatgatgtgtttgcacgtttcagc

SEQ ID NO: 3142 - DNA, 4469 bp, Homo sapiens
  source 1..4469: mol_type = genomic DNA
atcgattgatcaacaagtttgtacaaaaaagttggcaccatgagtggattaggagaaaacttggatccactggccagtgattcacgaaaacgcaaattgccatgtgatactccaggacaaggtcttacctgcagtggtgaaaaacggagacgggagcaggaaagtaaatatattgaagaattggctgagctgatatctgccaatcttagtgatattgacaatttcaatgtcaaaccagataaatgtgcgattttaaaggaaacagtaagacagatacgtcaaataaaagagcaaggaaaaactatttccaatgatgatgatgttcaaaaagccgatgtatcttctacagggcagggagttattgataaagactccttaggaccgcttttacttcaggcattggatggtttcctatttgtggtgaatcgagacggaaacattgtatttgtatcagaaaatgtcacacaatacctgcaatataagcaagaggacctggttaacacaagtgtttacaatatcttacatgaagaagacagaaaggattttcttaagaatttaccaaaatctacagttaatggagtttcctggacaaatgagacccaaagacaaaaaagccatacatttaattgccgtatgttgatgaaaacaccacatgatattctggaagacataaacgccagtcctgaaatgcgccagagatatgaaacaatgcagtgctttgccctgtctcagccacgagctatgatggaggaaggggaagatttgcaatcttgtatgatctgtgtggcacgccgcattactacaggagaaagaacatttccatcaaaccctgagagctttattaccagacatgatctttcaggaaaggttgtcaatatagatacaaattcactgagatcctccatgaggcctggctttgaagatataatccgaaggtgtattcagagattttttagtctaaatgatgggcagtcatggtcccagaaacgtcactatcaagaagcttatcttaatggccatgcagaaaccccagtatatcgattctcgttggctgatggaactatagtgactgcacagacaaaaagcaaactcttccgaaatcctgtaacaaatgatcgacatggctttgtctcaacccacttccttcagagagaacagaatggatatagaccaaacccaaatcctgttggacaagggattagaccacctatggctggatgcaacagttcggtaggcggcatgagtatgtcgccaaaccaaggcttacagatgccgagcagcagggcctatggcttggcagaccctagcaccacagggcagatgagtggagctaggtatgggggttccagtaacatagcttcattgacccctgggccaggcatgcaatcaccatcttcctaccagaacaacaactatgggctcaacatgagtagccccccacatgggagtcctggtcttgccccaaaccagcagaatatcatgatttctcctcgtaatcgtgggagtccaaagatagcctcacatcagttttctcctgttgcaggtgtgcactctcccatggcatcttctggcaatactgggaaccacagcttttccagcagctctctcagtgccctgcaagccatcagtgaaggtgtggggacttcccttttatctactctgtcatcaccaggccccaaattggataactctcccaatatgaatattacccaaccaagtaaagtaagcaatcaggattccaagagtcctctgggcttttattgcgaccaaaatccagtggagagttcaatgtgtcagtcaaatagcagagatcacctcagtgacaaagaaagtaaggagagcagtgttgagggggcagagaatcaaaggggtcctttggaaagcaaaggtcataaaaaattactgcagttacttacctgttcttctgatgaccggggtcattcctccttgaccaactcccccctagattcaagttgtaaagaatcttctgttagtgtcaccagcccctctggagtctcctcctctacatctggaggagtatcctctacatccaatatgcatgggtcactgttacaagagaagcaccggattttgcacaagttgctgcagaatgggaattcaccagctgaggtagccaagattactgcagaagccactgggaaagacaccagcagtataacttcttgtggggacggaaatgttgtcaagcaggagcagctaagtcctaagaagaaggagaataatgcacttcttagatacctgctggacagggatgatcctagtgatgcactctctaaagaactacagccccaagtggaaggagtggataataaaatgagtcagtgcaccagctccaccattcctagctcaagtcaagagaaagaccctaaaattaagacagagacaagtgaagagggatctggagacttggataatctagatgctattcttggtgatctgactagttctgacttttacaataattccatatcctcaaatggtagtcatctggggactaagcaacaggtgtttcaaggaactaattctctgggtttgaaaagttcacagtctgtgcagtctattcgtcctccatataaccgagcagtgtctctggatagccctgtttctgttggctcaagtcctccagtaaaaaatatcagtgctttccccatgttaccaaagcaacccatgttgggtgggaatccaagaatgatggatagtcaggaaaattatggctcaagtatgggtgggccaaaccgaaatgtgactgtgactcagactccttcctcaggagactggggcttaccaaactcaaaggccggcagaatggaacctatgaattcaaactccatgggaagaccaggaggagattataatacttctttacccagacctgcactgggtggctctattcccacattgcctcttcggtctaatagcataccaggtgcgagaccagtattgcaacagcagcagcagatgcttcaaatgaggcctggtgaaatccccatgggaatgggggctaatccctatggccaagcagcagcatctaaccaactgggttcctggcccgatggcatgttgtccatggaacaagtttctcatggcactcaaaataggcctcttcttaggaattccctggatgatcttgttgggccaccttccaacctggaaggccagagtgacgaaagagcattattggaccagctgcacactcttctcagcaacacagatgccacaggcctggaagaaattgacagagctttgggcattcctgaacttgtcaatcagggacaggcattagagcccaaacaggatgctttccaaggccaagaagcagcagtaatgatggatcagaaggcaggattatatggacagacatacccagcacaggggcctccaatgcaaggaggctttcatcttcagggacaatcaccatcttttaactctatgatgaatcagatgaaccagcaaggcaattttcctctccaaggaatgcacccacgagccaacatcatgagaccccggacaaacacccccaagcaacttagaatgcagcttcagcagaggctgcagggccagcagtttttgaatcagagccgacaggcacttgaattgaaaatggaaaaccctactgctggtggtgctgcggtgatgaggcctatgatgcagccccagcagggttttcttaatgctcaaatggtcgcccaacgcagcagagagctgctaagtcatcacttccgacaacagagggtggctatgatgatgcagcagcagcagcagcagcaacagcagcagcagcagcagcagcagcagcaacagcaacagcaacagcaacagcagcaacagcagcaaacccaggccttcagcccacctcctaatgtgactgcttcccccagcatggatgggcttttggcaggacccacaatgccacaagctcctccgcaacagtttccatatcaaccaaattatggaatgggacaacaaccagatccagcctttggtcgagtgtctagtcctcccaatgcaatgatgtcgtcaagaatgggtccctcccagaatcccatgatgcaacacccgcaggctgcatccatctatcagtcctcagaaatgaagggctggccatcaggaaatttggccaggaacagctccttttcccagcagcagtttgcccaccaggggaatcctgcagtgtatagtatggtgcacatgaatggcagcagtggtcacatgggacagatgaacatgaaccccatgcccatgtctggcatgcctatgggtcctgatcagaaatactgcttgccaactttcttgtacaaagtggttgatatcggtaagcctatccctaaccctctcctcggtctcgattctacgtagtaatgaactagtccgtaacttgaaagtatttcgatttcttggctttatatatcttgtggaaaggacgagagaatctgcttattctacccccg

SEQ ID NO: 3143 - DNA, 1565 bp, Homo sapiens
  source 1..1565: mol_type = genomic DNA
atcgattgatcaacaagtttgtacaaaaaagttggcatgggtgtgaaaacatttactcatagctcctcttcccacagccaggaaatgcttggaaagctaaatatgctgcgaaatgatggacatttttgtgatatcactattcgtgtccaggacaaaatcttccgggcacataaggtggtactagcagcttgcagtgatttctttcgcaccaaacttgtaggccaagccgaggatgagaacaagaatgtgttggatctgcatcatgttacagtgactggctttatacctcttttagaatatgcttacacagccactctatcaattaacacagaaaatattattgatgttctagcagcagccagctatatgcaaatgttcagtgttgccagcacctgctcagagttcatgaaatcaagcattttatggaatacacccaacagccaacctgaaaagggtctagatgctggacaagaaaataattctaactgcaattttacttctcgagatgggagcatttctcccgtgtcctcagagtgcagtgtggtagaaagaaccattcctgtctgccgagaatcccggagaaagcgcaaaagctacattgttatgtctcctgaaagtcctgtaaagtgtggcacacaaacaagctcaccccaggtattgaattcttcagcttcctactcagaaaatagaaaccaaccagttgactcttccttagcttttccttggacttttccttttggaattgatcgaaggattcagcctgagaaagttaagcaagcagaaaatacccggactttagaattacctggcccatctgagaccggtagaagaatggctgattatgtgacttgtgagagcacaaaaactaccttgcctttaggtaccgaagaagatgtccgggtcaaagtagaaagattaagtgatgaggaggtccatgaggaagtgtcccagcctgtcagtgcatctcagagttcgctgagtgatcagcagacagttccaggaagtgaacaagtccaagaggaccttctgattagtccacagtcttcctctataggctcagtagatgaaggcgtttctgagggcttgcctacacttcaaagcacgtctagcactaatgctcctccggatgatgatgatcgattggaaaatgttcagtatccctaccaactctacattgctccttccaccagcagtacagagcgaccaagtccaaatggtcccgacagaccttttcagtgtccaacctgcggggtgcgattcacccgtattcagaacctaaagcagcacatgctcatccactcaggaattaaaccatttcagtgtgaccgctgtgggaaaaagttcaccagggcttactcgctaaagatgcatcgcctaaagcatgaagtgatttcctacccaactttcttgtacaaagtggttgatatcggtaagcctatccctaaccctctcctcggtctcgattctacgtagtaatgaactagtccgtaacttgaaagtatttcgatttcttggctttatatatcttgtggaaaggacgactctatccaattctcgaactcacc

SEQ ID NO: 3144 - DNA, 3368 bp, Homo sapiens
  source 1..3368: mol_type = genomic DNA
atcgattgatcaacaagtttgtacaaaaaagttggcaccatgtcgaggcgcaagcaggcgaaaccccagcacatcaactcggaggaggaccagggcgagcagcagccgcagcagcagaccccggagtttgcagatgcggccccagcggcgcccgcggcgggggagctgggtgctccagtgaaccacccagggaatgacgaggtggcgagtgaggatgaagccacagtaaagcggcttcgtcgggaggagacgcacgtctgtgagaaatgctgtgcggagttcttcagcatctctgagttcctggaacataagaaaaattgcactaaaaatccacctgtcctcatcatgaatgacagcgaggggcctgtgccttcagaagacttctccggagctgtactgagccaccagcccaccagtcccggcagtaaggactgtcacagggagaatggcggcagctcagaggacatgaaggagaagccggatgcggagtctgtggtgtacctaaagacagagacagccctgccacccaccccccaggacataagctatttagccaaaggcaaagtggccaacactaacgtgaccttgcaggcactacggggcaccaaggtggcggtgaatcagcggagcgcggatgcactccctgcccccgtgcctggtgccaacagcatcccgtgggtcctcgagcagatcttgtgtctgcagcagcagcagctacagcagatccagctcaccgagcagatccgcatccaggtgaacatgtgggcctcccacgccctccactcaagcggggcaggggccgacactctgaagaccttgggcagccacatgtctcagcaggtttctgcagctgtggctttgctcagccagaaagctggaagccaaggtctgtctctggatgccttgaaacaagccaagctacctcacgccaacatcccttctgccaccagctccctgtccccagggctggcacccttcactctgaagccggatgggacccgggtgctcccgaacgtcatgtcccgcctcccgagcgctttgcttcctcaggccccgggctcggtgctcttccagagccctttctccactgtggcactagacacatccaagaaagggaaggggaagccaccgaacatctccgcggtggatgtcaaacccaaagacgaggcggccctctacaagcacaagtgtaagtactgtagcaaggtttttgggactgatagctccttgcagatccacctccgctcccacactggagagagacccttcgtgtgctctgtctgtggtcatcgcttcaccaccaagggcaacctcaaggtgcactttcaccgacatccccaggtgaaggcaaacccccagctgtttgccgagttccaggacaaagtggcggccggcaatggcatcccctatgcactctctgtacctgaccccatagatgaaccgagtctttctttagacagcaaacctgtccttgtaaccacctctgtagggctacctcagaatctttcttcggggactaatcccaaggacctcacgggtggctccttgcccggtgacctgcagcctgggccttctccagaaagtgagggtggacccacactccctggggtgggaccaaactataattccccaagggctggtggcttccaagggagtgggacccctgagccagggtcagagaccctgaaattgcagcagttggtggagaacattgacaaggccaccactgatcccaacgaatgtctcatttgccaccgagtcttaagctgtcagagctccctcaagatgcattatcgcacccacaccggggagagaccgttccagtgtaagatctgtggccgagccttttctaccaaaggtaacctgaagacacaccttggggttcaccgaaccaacacatccattaagacgcagcattcgtgccccatctgccagaagaagttcactaatgccgtgatgctgcagcaacatattcggatgcacatgggcggtcagattcccaacacgcccctgccagagaatccctgtgactttacgggttctgagccaatgaccgtgggtgagaacggcagcaccggcgctatctgccatgatgatgtcatcgaaagcatcgatgtagaggaagtcagctcccaggaggctcccagcagctcctccaaggtccccacgcctcttcccagcatccactcggcatcacccacgctagggtttgccatgatggcttccttagatgccccagggaaagtgggtcctgccccttttaacctgcagcgccagggcagcagagaaaacggttccgtggagagcgatggcttgaccaacgactcatcctcgctgatgggagaccaggagtatcagagccgaagcccagatatcctggaaaccacatccttccaggcactctccccggccaatagtcaagccgaaagcatcaagtcaaagtctcccgatgctgggagcaaagcagagagctccgagaacagccgcactgagatggaaggtcggagcagtctcccttccacgtttatccgagccccgccgacctatgtcaaggttgaagttcctggcacatttgtgggaccctcgacattgtccccagggatgacccctttgttagcagcccagccacgccgacaggccaagcaacatggctgcacacggtgtgggaagaacttctcctctgctagcgctcttcagatccacgagcggactcacactggagagaagccttttgtgtgcaacatttgtgggcgagcttttaccaccaaaggcaacttaaaggttcactacatgacacacggggcgaacaataactcagcccgccgtggaaggaagttggccatcgagaacaccatggctctgttaggtacggacggaaaaagagtctcagaaatctttcccaaggaaatcctggccccttcagtgaatgtggaccctgttgtgtggaaccagtacaccagcatgctcaatggcggtctggccgtgaagaccaatgagatctctgtgatccagagtgggggggttcctaccctcccggtttccttgggggccacctccgttgtgaataacgccactgtctccaagatggatggctcccagtcgggtatcagtgcagatgtggaaaaaccaagtgctactgacggcgttcccaaacaccagtttcctcacttcctggaagaaaacaagattgcggtcagcttgccaactttcttgtacaaagtggttgatatcggtaagcctatccctaaccctctcctcggtctcgattctacgtagtaatgaactagtccgtaacttgaaagtatttcgatttcttggctttatatatcttgtggaaaggacgacggaccgacacgagcacacataat

SEQ ID NO: 3145 - DNA, 1592 bp, Homo sapiens
  source 1..1592: mol_type = genomic DNA
atcgattgatcaacaagtttgtacaaaaaagttggcaccatgactcccaacagtatgacagaaaatggccttacagcctgggacaaaccgaagcactgtccagaccgagaacacgactggaagctagtaggaatgtctgaagcctgcctacataggaagagccattcagagaggcgcagcacgttgaaaaatgaacagtcgtcgccacatctcatccagaccacttggactagctcaatattccatctggaccatgatgatgtgaacgaccagagtgtctcaagtgcccagaccttccaaacggaggagaagaaatgtaaagggtacatccccagttacttagacaaggacgagctctgtgtagtgtgtggtgacaaagccaccgggtatcactaccgctgtatcacgtgtgaaggctgcaagggtttctttagaagaaccattcagaaaaatctccatccatcctattcctgtaaatatgaaggaaaatgtgtcatagacaaagtcacgcgaaatcagtgccaggaatgtcgctttaagaaatgcatctatgttggcatggcaacagatttggtgctggatgacagcaagaggctggccaagaggaagctgatagaggagaaccgggagaaaagacggcgggaagagctgcagaagtccatcgggcacaagccagagcccacagacgaggaatgggagctcatcaaaactgtcaccgaagcccatgtggcgaccaacgcccaaggcagccactggaagcaaaaacggaaattcctgccagaagacattggacaagcaccaatagtcaatgccccagaaggtggaaaggttgacttggaagccttcagccattttacaaaaatcatcacaccagcaattaccagagtggtggattttgccaaaaagttgcctatgttttgtgagctgccatgtgaagaccagatcatcctcctcaaaggctgctgcatggagatcatgtcccttcgcgctgctgtgcgctatgacccagaaagtgagactttaaccttgaatggggaaatggcagtgacacggggccagctgaaaaatgggggtcttggggtggtgtcagacgccatctttgacctgggcatgtctctgtcttctttcaacctggatgacactgaagtagccctccttcaggccgtcctgctgatgtcttcagatcgcccggggcttgcctgtgttgagagaatagaaaagtaccaagatagtttcctgctggcctttgaacactatatcaattaccgaaaacaccacgtgacacacttttggccaaaactcctgatgaaggtgacagatctgcggatgataggagcctgccatgccagccgcttcctgcacatgaaggtggaatgccccacagaactcttcccccctttgttcttggaagtgttcgaggatttgccaactttcttgtacaaagtggttgatatcggtaagcctatccctaaccctctcctcggtctcgattctacgtagtaatgaactagtccgtaacttgaaagtatttcgatttcttggctttatatatcttgtggaaaggacgactgaccgctgttcataggtgcccc

SEQ ID NO: 3146 - DNA, 1595 bp, Homo sapiens
  source 1..1595: mol_type = genomic DNA
atcgattgatcaacaagtttgtacaaaaaagcaggcaccatgactcccaacagtatgacagaaaatggccttacagcctgggacaaaccgaagcactgtccagaccgagaacacgactggaagctagtaggaatgtctgaagcctgcctacataggaagagccattcagagaggcgcagcacgttgaaaaatgaacagtcgtcgccacatctcatccagaccacttggactagctcaatattccatctggaccatgatgatgtgaacgaccagagtgtctcaagtgcccagaccttccaaacggaggagaagaaatgtaaagggtacatccccagttacttagacaaggacgagctctgtgtagtgtgtggtgacaaagccaccgggtatcactaccgctgtatcacgtgtgaaggctgcaagggtttctttagaagaaccattcagaaaaatctccatccatcctattcctgtaaatatgaaggaaaatgtgtcatagacaaagtcacgcgaaatcagtgccaggaatgtcgctttaagaaatgcatctatgttggcatggcaacagatttggtgctggatgacagcaagaggctggccaagaggaagctgatagaggagaaccgggagaaaagacggcgggaagagctgcagaagtccatcgggcacaagccagagcccacagacgaggaatgggagctcatcaaaactgtcaccgaagcccatgtggcgaccaacgcccaaggcagccactggaagcaaaaacggaaattcctgccagaagacattggacaagcaccaatagtcaatgccccagaaggtggaaaggttgacttggaagccttcagccattttacaaaaatcatcacaccagcaattaccagagtggtggattttgccaaaaagttgcctatgttttgtgagctgccatgtgaagaccagatcatcctcctcaaaggctgctgcatggagatcatgtcccttcgcgctgctgtgcgctatgacccagaaagtgagactttaaccttgaatggggaaatggcagtgacacggggccagctgaaaaatgggggtcttggggtggtgtcagacgccatctttgacctgggcatgtctctgtcttctttcaacctggatgacactgaagtagccctccttcaggccgtcctgctgatgtcttcagatcgcccggggcttgcctgtgttgagagaatagaaaagtaccaagatagtttcctgctggcctttgaacactatatcaattaccgaaaacaccacgtgacacacttttggccaaaactcctgatgaaggtgacagatctgcggatgataggagcctgccatgccagccgcttcctgcacatgaaggtggaatgccccacagaactcttcccccctttgttcttggaagtgttcgaggattagaacccagctttcttgtacaaagtggttgatatcggtaagcctatccctaaccctctcctcggtctcgattctacgtagtaatgaactagtccgtaacttgaaagtatttcgatttcttggctttatatatcttgtggaaaggacgatcattgcctcaagcttgcctcaac

SEQ ID NO: 3147 - DNA, 818 bp, Homo sapiens
  source 1..818: mol_type = genomic DNA
atcgattgatcaacaagtttgtacaaaaaagttggcatgggagacaagaagagccccaccaggccgaagcggcagccgaagccgtcctcggatgagggttactgggactgtagcgtctgcaccttccggaacagcgccgaggccttcaagtgcatgatgtgcgatgtgcggaagggcacctccacccgatccacattgtttgaagttattgtgagtgcctcgaggaccaaggaaccgttgaaatttccaatttcaggaaggaaacctcgacctgtctcccagttggttgcacagcaggttactcagcagtttgtgcctcctacacagtcaaagaaagagaaaaaagataaagtagaaaaagaaaaaagtgaaaaggaaacaactagcaaaaagaatagccataagaaaaccaggccaagattgaaaaatgtggatcggagtagtgctcagcatttggaagttactgttggagatctgacagtcattattacagactttaaggagaaaacaaagtcaccgcctgcatctagtgctgcctctgcagatcaacacagtcaaagcggctctagctctgataacacagagagaggaatgtccaggtcatcttcacccagaggagaagcctcatcattgaatggagaatctcattacccaactttcttgtacaaagtggttgatatcggtaagcctatccctaaccctctcctcggtctcgattctacgtagtaatgaactagtccgtaacttgaaagtatttcgatttcttggctttatatatcttgtggaaaggacgacggtattactatgagtgcgcaacc

SEQ ID NO: 3148 - DNA, 1877 bp, Homo sapiens
  source 1..1877: mol_type = genomic DNA
accgccaccatgtttgggattcaggaaagcatccaacggagtggaagcagcatgaaggaagagccgctgggcagcggcatgaacgcggtgcggacgtggatgcagggcgccggggtgctggacgccaacacggcggcgcagagcggggtgggtctggcccgggctcactttgagaagcagccgccttccaatctgcggaaatccaacttcttccacttcgtcctggccctctacgacagacagggccagcccgtggagatcgagaggacagcgtttgtggggttcgtggagaaggaaaaagaagccaacagcgaaaagaccaataacggaattcactaccggcttcagcttctctacagcaatgggataaggacggagcaggatttctacgtgcgcctcattgactccatgacaaaacaagccatagtgtatgaaggccaagacaagaacccagaaatgtgccgagtcttgctcacacatgagatcatgtgcagccgctgttgtgacaagaaaagctgtggcaaccgaaatgagactccctcagatccagtgataattgacaggttcttcttgaaatttttcctcaaatgtaaccaaaattgcctaaagaatgcgggaaacccacgtgacatgcggagattccaggtcgtggtgtctacgacagtcaatgtggatggccatgtcctggcagtctctgataacatgtttgtccataataattccaagcatgggcggagggctcggaggcttgacccctcggaaggtacgccctcttatctggaacatgctactccctgtatcaaagccatcagcccgagtgaaggatggacgacgggaggtgcgactgtgatcatcataggggacaatttctttgatgggttacaggtcatattcggtaccatgctggtctggagtgagttgatcactcctcatgccatccgtgtgcagacccctcctcggcacatccctggtgttgtggaagtcacactgtcctacaaatctaagcagttctgcaaaggaacaccaggcagattcatttatacagcgctcaacgaacccaccatcgattatggtttccagaggttacagaaggtcattcctcggcaccctggtgaccctgagcgtttgccaaaggaagtaatactcaaaagggctgcggatctggtagaagcactgtatgggatgccacacaacaaccaggaaatcattctgaagagagcggccgacattgccgaggccctgtacagtgttccccgcaaccacaaccaactcccggcccttgctaacacctcggtccacgcagggatgatgggcgtgaattcgttcagtggacaactggccgtgaatgtctccgaggcatcacaagccaccaatcagggtttcacccgcaactcaagcagcgtatcaccacacgggtacgtgccgagcaccactccccagcagaccaactataactccgtcaccacgagcatgaacggatacggctctgccgcaatgtccaatttgggcggctcccccaccttcctcaacggctcagctgccaactccccctatgccatagtgccatccagccccaccatggcctcctccacaagcctcccctccaactgcagcagctcctcgggcatcttctccttctcaccagccaacatggtctcagccgtgaaacagaagagtgctttcgcaccagtcgtcagaccccagacctccccacctcccacctgcaccagcaccaacgggaacagcctgcaagcgatatctggcatgattgttcctcctatgtagtaatgaactagtccgtaacttgaaagtatttcgatttcttggctttatatatcttgtggaaaggacgaccgtcataagggacactgtaaaag

SEQ ID NO: 3149 - DNA, 1019 bp, Homo sapiens
  source 1..1019: mol_type = genomic DNA
atcgattgatcaacaagtttgtacaaaaaagttggcatgttccgagacttcggggaacccggcccgagctccgggaacggcggcgggtacggcggccccgcgcagcccccggccgcagcgcaggcagcccagcagaagttccacctggtgccaagcatcaacaccatgagtggcagtcaggagctgcagtggatggtacagcctcatttcctggggcccagcagttaccccaggcctctgacctaccctcagtacagccccccacaaccccggccaggagtcatccgggccctggggccgcctccaggggtacgtcgaaggccttgtgaacagatcagcccggaggaagaggagcgccgccgagtaaggcgcgagcggaacaagctggctgcggccaagtgcaggaaccggaggaaggaactgaccgacttcctgcaggcggagactgacaaactggaagatgagaaatctgggctgcagcgagagattgaggagctgcagaagcagaaggagcgcctagagctggtgctggaagcccaccgacccatctgcaaaatcccggaaggagccaaggagggggacacaggcagtaccagtggcaccagcagcccaccagccccctgccgccctgtaccttgtatctccctttccccagggcctgtgcttgaacctgaggcactgcacacccccacactcatgaccacaccctccctaactcctttcacccccagcctggtcttcacctaccccagcactcctgagccttgtgcctcagctcatcgcaagagtagcagcagcagcggagacccatcctctgacccccttggctctccaaccctcctcgctttgtgcccaactttcttgtacaaagtggttgatatcggtaagcctatccctaaccctctcctcggtctcgattctacgtagtaatgaactagtccgtaacttgaaagtatttcgatttcttggctttatatatcttgtggaaaggacgacttgtgccgatttaaccgctggct

SEQ ID NO: 3150 - DNA, 2414 bp, Homo sapiens
  source 1..2414: mol_type = genomic DNA
atcgattgatcaacaagtttgtacaaaaaagttggcatgtctctgagtgagaactcggtttttgcctatgaatcttctgtgcatagcaccaatgttttactcagccttaatgaccagcggaagaaagatgtgctgtgcgatgtcaccatctttgtggagggacagcggttccgcgctcaccggtccgtgctggcggcatgcagcagttacttccactcaagaatcgtaggccaggctgatggagagctgaacattactcttccagaagaggtgacagttaaaggatttgaacctttaattcagtttgcctacactgctaaactgattttaagtaaagagaatgtggatgaagtgtgcaaatgtgtggagtttttaagtgtacataatattgaggaatcctgctttcagtttctgaaatttaagtttttggactccactgcagaccagcaagaatgcccaagaaaaaaatgcttttcatcacactgtcagaaaacagaccttaaactttcacttttggaccagagggatctagaaactgatgaagtggaggaatttctggaaaataaaaatgttcagactcctcagtgtaaactccgcaggtatcaaggaaatgcaaaagcctcacctcctctacaagacagtgccagtcagacatatgagtccatgtgcttagagaaggatgctgctctggccttgccttctttatgccccaaatacagaaaattccaaaaagcatttggaactgacagagtccgtactggggaatctagtgtcaaagacattcatgcttctgttcagccaaatgaaaggtctgaaaatgaatgcctgggaggagtcccggagtgtagagatttgcaggtgatgttaaaatgtgacgaaagtaaattagcaatggaacctgaagaaacgaagaaagatcctgcttctcagtgcccaactgaaaaatcagaagtgactcctttcccccacaattcttccatagaccctcatggactttattctttgtctcttttacacacatatgaccaatatggtgacttgaattttgctggtatgcaaaacacaacagtgttaacagaaaagcctttgtcaggtacagacgtccaagaaaaaacatttggtgaaagtcaggatttacctttgaaatccgacttgggcaccagggaagatagtagtgttgcatctagtgataggagtagtgtggagcgagaagtggcagaacacctagcaaaaggcttctggagtgacatttgcagcacggacactccttgccaaatgcagttatcacctgctgtggccaaagatggctcagaacagatctcacagaaacggtctgagtgtccgtggttaggtatcaggattagtgagagcccagaaccaggtcaaaggactttcacaacattaagttctgtcaactgcccttttataagtactctgagtactgaaggctgttcaagcaatttggaaattggaaacgatgattatgtttcagaaccccagcaagaaccttgcccatatgcttgtgtcattagcttgggagacgactctgagacggacaccgaaggagacagtgaatcctgttcagccagagaacaagaatgtgaggtaaaactgccattcaatgcacaacggataatttcactgtctcgaaatgattttcagtccttgttgaaaatgcacaagcttactccagaacagctggattgtatccatgatattcgaagaagaagtaaaaacagaattgctgcacagcgctgtcgcaagagaaaacttgactgtatacagaatcttgaatcagaaattgagaagctgcaaagtgaaaaggagagcttgttgaaggaaagagatcacattttgtcaactctgggtgagacaaagcagaacctaactggactttgccagaaagtttgtaaagaagcagctctgagtcaagaacaaatacagatactcgccaagtactcagctgcagattgcccactttcatttttaatttctgaaaaagataaaagtactcctgatggtgaactggcgttaccatcaattttcagtttatctgaccggcctccagcagtgctgcctccctgtgccagaggaaacagtgagcctggctacgcgcgagggcaggagtcccagcagatgtccacagccacctctgagcaagctgggcctgcggaacagtgtcgtcagagtggtgggatctcagatttctgtcagcagatgactgataaatgtactactgatgagtacccaactttcttgtacaaagtggttgatatcggtaagcctatccctaaccctctcctcggtctcgattctacgtagtaatgaactagtccgtaacttgaaagtatttcgatttcttggctttatatatcttgtggaaaggacgatacacctatataattactgtgagt

SEQ ID NO: 3151 - DNA, 1442 bp, Homo sapiens
  source 1..1442: mol_type = genomic DNA
atcgattgatcaacaagtttgtacaaaaaagttggcaccatggctgaaggaagccgaggtggccctacgtgtagcggggtgggtggcaggcaggacccagtctccggcagtggcggctgcaactttccagagtatgagcttcccgagctaaatacgcgcgctttccatgtgggcgcctttggggagctgtggcggggccgtctgcgcggggccggggacttgtcgctgagggagccgccggcatccgctctgcctgggagccaggcagctgactccgaccgggaggatgccgcggtggccagggatctggactgcagcctggaggcggcggctgagctgagggcggtgtgcggccttgataaactgaaatgccttgaggacggtgaggatccagaagtcattccggagaatactgacctggtgactttgggggttagaaaaaggttcttggaacatcgggaagaaaccattacaatagatcgagcctgcagacaagaaacattcgtttatgagatggagtcacatgccataggaaaaaagcctgaaaattcagcagacatgattgaagaaggggagcttatcctatctgtgaatatcttgtaccctgttatatttcataagcacaaagaacacaaaccataccaaacaatgctggtgttgggcagtcaaaaactcacacaactgagggattcaattcgatgtgtcagtgacctccagattggtggtgaattcagcaacactcctgaccaagcccctgagcacatcagcaaagacctatacaaatcagccttcttttattttgaaggaacattttataatgataaaagatacccagaatgcagagatttgagcagaactatcattgagtggtcagagtcccatgatagaggctatggaaagtttcagactgctagaatggaagatttcaccttcaatgacttgtgtattaaactgggttttccttacttatactgtcatcagggagactgtgaacatgtcattgtcattactgacataaggcttgtgcatcatgatgactgcttggataggacattgtatcccctccttatcaagaagcattggctatggaccagaaaatgttttgtttgtaaaatgtatacagccagatgggtgacgaacaatgacagttttgcaccagaggacccatgcttcttttgtgatgtttgcttccgaatgctgcactatgattcagaaggcaacaaactgggggaattccttgcttatccttatgttgatcctggaacctttaatttgccaactttcttgtacaaagtggttgatatcggtaagcctatccctaaccctctcctcggtctcgattctacgtagtaatgaactagtccgtaacttgaaagtatttcgatttcttggctttatatatcttgtggaaaggacgactatcgtcgtgcaattatatccct

SEQ ID NO: 3152 - DNA, 2024 bp, Homo sapiens
  source 1..2024: mol_type = genomic DNA
accgccaccatggccgaggcagcgctagtgattacgccgcagattcccatggtaacagaagagtttgtgaaaccatcacagggccatgtgacctttgaggatattgctgtgtacttctcccaggaggagtggggcctccttgatgaagctcaaaggtgcctgtatcatgatgtgatgctggagaacttttcgcttatggcctcagtaggttgtttgcatggaatagaggctgaggaggccccttctgagcagactctttctgcgcaaggagtgtcacaggccaggactccaaagctaggtccttccatcccaaatgctcattcttgtgagatgtgtatcctggtcatgaaagacattttgtacctcagtgagcatcaggggacacttccctggcagaaaccttatacgtctgtggccagtgggaaatggttttcatttggttctaacctgcaacagcaccagaaccaggacagtggagagaaacacatcagaaaggaggagagcagtgccttgcttctgaatagctgcaaaattcctctgtcagacaatcttttcccatgcaaagatgttgagaaggattttccaaccatcctgggccttctccaacaccagaccacccacagcagacaagagtatgcacatagaagcagggagacctttcaacaaagacgttacaaatgtgagcaagttttcaatgagaaagttcatgttactgagcatcagagagtccacactggagaaaaagcttataagcgtagggaatatgggaaatccttgaactctaaatacttatttgttgaacaccagagaacccataatgcagaaaagccttatgtgtgcaatatatgtgggaaatcattcctccataaacaaacactcgttgggcaccagcagagaattcacactagagaaaggtcttatgtgtgcatcgaatgtgggaaatccttgagctccaaatactcacttgtggaacaccagagaacccataatggagaaaagccttatgtgtgcaatgtatgtgggaaatcattccgccacaaacaaacatttgttggccatcagcagagaatccacactggagagaggccttatgtgtgtatggaatgtgggaaatcttttattcattcctatgaccgcattcgacaccagagagttcacactggagaaggggcttatcagtgcagtgaatgtgggaaatccttcatatacaaacagtcacttcttgatcaccatagaatccacacgggagaaaggccttatgagtgcaaagaatgtgggaaggccttcattcacaaaaaaagacttcttgagcaccagagaattcatactggagaaaagccttatgtgtgcatcatatgtgggaaatcatttatccgctcgtctgactacatgcgacaccagagaattcacactggagaaagggcttatgaatgcagtgactgtgggaaagccttcatctccaaacaaacacttcttaagcatcacaaaatccacactagagaaaggccttatgaatgcagtgaatgtggaaaaggcttctaccttgaggttaaacttcttcagcaccaaagaatccatactagagaacaactttgtgagtgcaatgaatgtggaaaagtcttcagccaccaaaaaagacttcttgagcaccagaaagttcacactggcgaaaagccctgtgagtgcagtgaatgtgggaaatgctttagacaccgcaccagcctcattcaacaccagaaagttcacagtggagagaggccttataactgcactgcatgtgagaaggcctttatctataaaaacaaacttgttgagcatcagcgaatccacaccggagaaaagccgtatgaatgtggtaaatgtgggaaagccttcaacaaaagatattcccttgtcaggcaccagaaggtacatataacagaagagccctagtaatgaactagtccgtaacttgaaagtatttcgatttcttggctttatatatcttgtggaaaggacgacctgtctgagccgcccccctcttg

SEQ ID NO: 3153 - DNA, 548 bp, Homo sapiens
  source 1..548: mol_type = genomic DNA
atcgattgatcaacaagtttgtacaaaaaagttggcatgatgcaagaatctgggactgagacaaaaagtaacggttcagccatccagaatgggtcgggcggcagcaaccacttactagagtgcggcggtcttcgggaggggcggtccaacggagagacgccggccgtggacatcggggcagctgacctcgcccacgcccagcagcagcagcaacagtggcatctcataaaccatcagccctctaggagtcccagcagttggcttaagagactaatttcaagcccttgggagttggaagtcctgcaggtccccttgtggggagcagttgctgagacgaagatgagtggacctgtgtgtcagcctaacccttccccattttgcccaactttcttgtacaaagtggttgatatcggtaagcctatccctaaccctctcctcggtctcgattctacgtagtaatgaactagtccgtaacttgaaagtatttcgatttcttggctttatatatcttgtggaaaggacgatcaaaacggtccgagtccctaccg

SEQ ID NO: 3154 - DNA, 1463 bp, Homo sapiens
  source 1..1463: mol_type = genomic DNA
atcgattgatcaacaagtttgtacaaaaaagttggcatggcggaggatgtttcctcagcggccccgagcccgcggggctgtgcggatggtagggatgccgaccctactgaggagcagatggcagaaacagagagaaacgacgaggagcagttcgaatgccaggaactgctcgagtgccaggtgcaggtgggggcccccgaggaggaggaggaggaggaggaggacgcgggcctggtggccgaggccgaggccgtggctgccggctggatgctcgatttcctctgcctctctctttgccgagctttccgcgacggccgctccgaggacttccgcaggacccgcaacagcgcagaggctattattcatggactatccagtctaacagcttgccagttgagaacgatatacatatgtcagtttttgacaagaattgcagcaggaaaaacccttgatgcacagtttgaaaatgatgaacgaattacacccttggaatcagccctgatgatttggggttcaattgaaaaggaacatgacaaacttcatgaagaaatacagaatttaattaaaattcaggctatagctgtttgtatggaaaatggcaactttaaagaagcagaagaagtctttgaaagaatatttggtgatccaaattctcatatgcctttcaaaagcaaattgcttatgataatctctcagaaagatacatttcattccttttttcaacacttcagctacaaccacatgatggagaaaattaagagttatgtgaattatgtgctaagtgaaaaatcatcaacctttctaatgaaggcagcggcaaaagtagtagaaagcaaaaggacaagaacaataacttctcaagataaacctagtggtaatgatgttgaaatggaaactgaagctaatttggatacaagaaaaaggtctcacaagaatcttttcttatctaagttgcaacatggaacccagcaacaagaccttaataagaaagaaagaagagtaggaactcctcaaagtacaaaaaagaaaaaagaaagcagaagagccactgaaagcagaatacctgtttcaaagagtcagccggtaactcctgaaaaacatcgagctagaaaaagacaggcatggctttgggaagaagacaagaatttgagatctggcgtgaggaaatatggagagggaaactggtctaaaatactgttgcattataaattcaacaaccggacaagtgtcatgttaaaagacagatggaggaccatgaagaaactaaaactgatttcctcagacagcgaagactgcccaactttcttgtacaaagtggttgatatcggtaagcctatccctaaccctctcctcggtctcgattctacgtagtaatgaactagtccgtaacttgaaagtatttcgatttcttggctttatatatcttgtggaaaggacgaattcaagtctccctctataaatat

SEQ ID NO: 3155 - DNA, 2345 bp, Homo sapiens
  source 1..2345: mol_type = genomic DNA
atcgattgatcaacaagtttgtacaaaaaagttggcatggcaaagcccagccacagcagctatgtccttcagcagctaaacaaccaaagagaatggggttttctctgtgactgctgtattgcaattgatgacatttactttcaagcacacaaggcagttctagctgcctgtagctcctattttagaatgtttttcatgaaccatcagcatagtactgcacaactgaatctcagcaacatgaaaattagtgcagaatgttttgatctcattttgcagtttatgtatttaggaaaaattatgacagctccctccagttttgagcagtttaaagtggcaatgaactacctacagctatacaatgttcctgactgtttagaagacatccaggatgcagattgttctagttcaaaatgttcctcttctgcttccagcaaacagaacagcaaaatgatatttggggtaagaatgtatgaagatactgtggctcgaaatggcaatgaagccaacaggtggtgtgcagagccaagttcaacggtaaatacaccacataatagagaggctgatgaagagtctttacaattaggtaattttcctgagccactatttgatgtatgtaaaaaaagttccgtgtccaaattatctactccaaaagaacgtgtgtcaagacgctttgggcggagttttacctgtgatagctgtggatttggctttagctgtgaaaaattattagatgagcatgtgctaacctgtactaacagacatttataccaaaacacaagatcttaccatagaatagtagatattagagatggaaaagacagtaacatcaaagctgaatttggtgaaaaagattcttccaaaacattttctgcacagacggacaaatacagaggagacacaagccaggctgctgatgattcagcttcaaccactggaagcagaaaaagtagcacagtggagtctgaaatagcaagcgaagagaaaagcagagctgctgagaggaaaaggattattattaagatggagccagaagatattcctacagatgaactgaaagactttaacattattaaagttactgataaagactgtaatgaatccactgacaatgatgaattagaagatgaacctgaagagccattttatagatactatgttgaagaagatgtcagcataaaaaaaagtggtaggaaaactctaaaacctcgaatgtcagtaagtgctgatgaaagaggtggtttagagaatatgaggccccctaacaacagcagtccagtacaagaggatgctgaaaatgcatcttgtgagctgtgtggacttacaataaccgaggaggacctgtcatctcattacttagccaaacacattgaaaatatctgtgcatgtggtaaatgtggacaaatacttgtaaagggtaggcagcttcaggaacatgctcaacgatgtggcgagccccaagatctgaccatgaatgggttaggaaatactgaggagaaaatggacttggaagagaatcctgatgagcagtccgaaataagagatatgtttgttgaaatgctggatgattttagggacaatcattaccagataaacagtatccaaaaaaagcagttatttaaacattctgcctgcccttttcgatgtcctaattgtggccagcgttttgaaactgaaaatctagtggttgaacatatgtctagctgcttagatcaagatatgtttaagagtgccatcatggaagaaaatgaaagagatcacagacgaaagcatttttgtaatctgtgtggaaaaggattttatcagcggtgtcacttaagagaacactatactgttcatactaaggaaaaacagtttgtttgtcaaacatgtggaaagcagtttttaagagagcgtcagttgcgactgcacaatgatatgcacaaaggcatggccaggtatgtctgttccatttgtgatcaaggaaacttcagaaaacatgaccatgtacggcatatgatttctcatttatctgctggtgagactatatgccaggtctgctttcagatattcccaaataatgaacagttggagcagcacatggatgttcatctgtatacatgtggaatatgtggagcaaaatttaatttgaggaaagatatgagatcacattataatgccaagcatttgaaaagaacctgcccaactttcttgtacaaagtggttgatatcggtaagcctatccctaaccctctcctcggtctcgattctacgtagtaatgaactagtccgtaacttgaaagtatttcgatttcttggctttatatatcttgtggaaaggacgacggtaatgcgtgccaatcaatgcg

SEQ ID NO: 3156 - DNA, 2186 bp, Homo sapiens
  source 1..2186: mol_type = genomic DNA
atcgattgatcaacaagtttgtacaaaaaagttggcatggagggagatggttcagacccagagcctccagatgccggggaggacagcaagtccgagaatggggagaatgcgcccatctactgcatctgccgcaaaccggacatcaactgcttcatgatcgggtgtgacaactgcaatgagtggttccatggggactgcatccggatcactgagaagatggccaaggccatccgggagtggtactgtcgggagtgcagagagaaagaccccaagctagagattcgctatcggcacaagaaatcacgggagcgggatggcaatgagcgggacagcagtgagccccgggatgagggtggagggcgcaagaggcctgtccctgatccagacctgcagcgccgggcagggtcagggacaggggttggggccatgcttgctcggggctctgcttcgccccacaaatcctctccgcagcccttggtggccacacccagccagcatcaccagcagcagcagcagcagatcaaacggtcagcccgcatgtgtggtgagtgtgaggcatgtcggcgcactgaggactgtggtcactgtgatttctgtcgggacatgaagaagttcgggggccccaacaagatccggcagaagtgccggctgcgccagtgccagctgcgggcccgggaatcgtacaagtacttcccttcctcgctctcaccagtgacgccctcagagtccctgccaaggccccgccggccactgcccacccaacagcagccacagccatcacagaagttagggcgcatccgtgaagatgagggggcagtggcgtcatcaacagtcaaggagcctcctgaggctacagccacacctgagccactctcagatgaggacctacctctggatcctgacctgtatcaggacttctgtgcaggggcctttgatgaccatggcctgccctggatgagcgacacagaagagtccccattcctggaccccgcgctgcggaagagggcagtgaaagtgaagcatgtgaagcgtcgggagaagaagtctgagaagaaggtgatggagaggaaggaggagcgatacaagcggcatcggcagaagcagaagcacaaggataaatggaaacacccagagagggctgatgccaaggaccctgcgtcactgccccagtgcctggggcccggctgtgtgcgccccgcccagcccagctccaagtattgctcagatgactgtggcatgaagctggcagccaaccgcatctacgagatcctcccccagcgcatccagcagtggcagcagagcccttgcattgctgaagagcacggcaagaagctgctcgaacgcattcgccgagagcagcagagtgcccgcacccgccttcaggaaatggaacgccgattccatgagcttgaggccatcattctacgtgccaagcagcaggctgtgcgcgaggatgaggagagcaacgagggtgacagtgatgacacagacctgcagatcttctgtgtttcctgtgggcaccccatcaacccacgtgttgccttgcgccacatggagcgctgctacgccaagtatgagagccagacgtcctttgggtccatgtaccccacacgcattgaaggggccacacgactcttctgtgatgtgtataatcctcagagcaaaacatactgtaagcggctccaggtgctgtgccccgagcactcacgggaccccaaagtgccagctgacgaggtatgcgggtgcccccttgtacgtgatgtctttgagctcacgggtgacttctgccgcctgcccaagcgccagtgcaatcgccattactgctgggagaagctgcggcgtgcggaagtggacttggagcgcgtgcgtgtgtggtacaagctggacgagctgtttgagcaggagcgcaatgtgcgcacagccatgacaaaccgcgcgggattgctggccctgatgctgcaccagacgatccagcacgatcccctcactaccgacctgcgctccagtgccgaccgctgcccaactttcttgtacaaagtggttgatatcggtaagcctatccctaaccctctcctcggtctcgattctacgtagtaatgaactagtccgtaacttgaaagtatttcgatttcttggctttatatatcttgtggaaaggacgaacattacaacagctgacaacactc

SEQ ID NO: 3157 - DNA, 1931 bp, Homo sapiens
  source 1..1931: mol_type = genomic DNA
atcgattgatcaacaagtttgtacaaaaaagttggcatggaccccgaggacgaaggggtagcgggagtgatgtctgtggggccgccggcggcccggcttcaggaaccagtgaccttccgggatgtggctgtggactttacccaggaggaatgggggcagctggaccctacccagaggatcctctaccgtgacgtgatgctggagacctttggtcacctgctctccataggtcctgagcttccgaagcctgaagtcatctcccagctggagcaagggaccgagctatgggtggctgagagaggaaccacccagggctgccatccagcctgggagcctcgatctgaaagccaagcatcacgcaaggaagagggcctgcctgaagaggagccatcccatgtcacgggaagggaaggattcccgacagatgctccttatcccaccacgttagggaaagacagggagtgtcagagccagagtctggcactcaaggagcagaataacttgaagcagttggaatttggcctcaaggaagcaccagttcaagatcaaggctacaaaactctcagactcagggaaaactgcgtcctgagttcaagcccaaatccattcccagagatctctagaggggagtatttgtatacttacgactcacagattacagactcagaacataactccagcttagtcagtcagcagacaggctccccaggaaaacagcccggtgaaaacagtgactgtcacagagattccagtcaggccattccaattacggaactcacaaaaagccaggtgcaggacaaaccctacaaatgtactgactgtgggaagtcgtttaaccataacgcacacctcaccgtgcacaagaggattcatacgggagaaagaccttatatgtgcaaggagtgtgggaaagccttcagccagaactcctccctcgtccagcatgagcgcatccacactggagacaagccctacaagtgtgccgaatgtgggaagtctttctgccatagtacacaccttaccgtccatcggaggattcacactggggagaagccctatgagtgtcaggactgtgggagggccttcaaccagaactcctccctggggcggcacaagaggacacacactggggagaagccatacacctgcagtgtgtgtgggaaatccttctctcggaccacttgccttttcctgcacctgagaactcacaccgaggagaggccctacgagtgtaaccactgcgggaagggcttcaggcacagctcatccctggcccagcaccagcggaagcacgcgggggagaagccctttgagtgccgccagaggctgatctttgagcagacgccagctctcacaaagcatgaatggacagaagccctgggctgtgacccacctttgagtcaagatgagaggactcaccgaagcgacagacccttcaaatgtaatcagtgtgggaagtgtttcattcagagctctcacctcatccggcaccagataactcacaccagagaggagcagccccatgggcgaagccggcggcgtgaacagtcctcgagcaggaactcacacctggttcagcatcaacacccgaactccagaaagagctctgcaggcggagcaaaggcagggcagccggaaagcagagccctggctttgtttgacatccaaaaaatcatgcaagagaaaaaccctgtgcacgttattggggtggaagagccttctgtgggtgcttccatgttatttgacatcagagaatccacatacccaactttcttgtacaaagtggttgatatcggtaagcctatccctaaccctctcctcggtctcgattctacgtagtaatgaactagtccgtaacttgaaagtatttcgatttcttggctttatatatcttgtggaaaggacgaggactcacaaccgattttttacac

SEQ ID NO: 3158 - DNA, 1931 bp, Homo sapiens
  source 1..1931: mol_type = genomic DNA
atcgattgatcaacaagtttgtacaaaaaagttggcaccatggcttctgacctagagagtagcctcacctccatagactggctcccccagctgaccctccgagctaccattgagaagcttggaagtgcctcccaggctgggcctcccgggagcagccgcaagtgttcaccagggtcacccacagatcctaatgccaccctgagcaaagacgaggcagcagtgcaccaggacggcaagccacgatacagctatgccactctcatcacctatgccatcaactcctctccagccaagaagatgaccctcagcgagatttaccgctggatctgtgataacttcccctattacaagaatgctggcattggttggaagaattcaatacggcacaacctttctctcaacaagtgtttccggaaggtgcccagacctcgggatgaccctgggaagggttcctattggacaattgacacctgccctgacatttcccgaaagagaagacaccctccagatgatgatctgtcccaagactcaccagaacaggaggcaagcaagagcccacggggaggcgttgcagggagtggagaagcctcactgcctcctgaggggaatccgcagatgtcacttcagagccccacatctatagccagctacagccagggcacaggatctgtggatggtggagcagtggcagcaggggcttcaggccgagaaagtgctgagggtccccctcccctctataacaccaaccatgactttaaattctcctactcagagatcaactttcaggatctaagctggtccttccgcaacctctataagtccatgctggagaagtcctcttcctcctctcagcacggcttttcttctctcctgggggacatcccaccctcgaacaactactacatgtatcagcagcagcagccaccgccacctcaacagcagcagcagcagcagcagccgccacagccacctccccagcagtcccagccacagcagcagcaggcacctgcccagggcccctcagctgtagggggtgctcctccactgcacaccccaagcacagatggttgtaccccaccagggggaaagcaagctggggcggaaggctatgggcctccccctgtaatggccatgcatccacccccgctgcagcatggaggctaccaccctcatcagcaccatccccactcccaccctgcccagcagccaccacctccacagccacaggcacaaggccaggctcccatcaacaacactggctttgcctttccttctgactggtgctctaatattgactctttaaaggaaagcttcaagatggtgaatcggctcaattggtccagcattgagcagtcacaattctcagaactgatggagagtctacgacaggcagagcagaagaactggaccctcgaccagcatcacattgccaatctgtgtgactccctcaaccacttccttactcagactggtcacgtgccccctcaagggggtacccaccgcccaccagcccctgcccgtattgctgactcctgtgccctcaccagtggcaaacaggagtcagccatgagccaagtgaactcttatgggcacccacaagctccccacctctaccctggcccatcaccaatgtacccaatccccacccaggactcagcaggatacaatcgcccagcacaccatatggtccctcggccatcagtgccacctcctggtgccaatgaggagatccctgatgacttcgactgggacttgatcactttgccaactttcttgtacaaagtggttgatatcggtaagcctatccctaaccctctcctcggtctcgattctacgtagtaatgaactagtccgtaacttgaaagtatttcgatttcttggctttatatatcttgtggaaaggacgaggtagcaagtgcagtcagctccgg

SEQ ID NO: 3159 - DNA, 1379 bp, Homo sapiens
  source 1..1379: mol_type = genomic DNA
atcgattgatcaacaagtttgtacaaaaaagttggcatggcggctgtggtggagaatgtagtgaagctccttggggagcagtactacaaagatgccatggagcagtgccacaattacaatgctcgcctctgtgctgagcgcagcgtgcgcctgcctttcttggactcacagaccggagtagcccagagcaattgttacatctggatggaaaagcgacaccggggtccaggattggcctccggacagctgtactcctaccctgcccggcgctggcggaaaaagcggcgagcccatccccctgaggatccacgactttccttcccatctattaagccagacacagaccagaccctgaagaaggaggggctgatctctcaggatggcagtagtttagaggctctgttgcgcactgaccccctggagaagcgaggtgccccggatccccgagttgatgatgacagcctgggcgagtttcctgtgaccaacagtcgagcgcgaaagcggatcctagaaccagatgacttcctggatgacctcgatgatgaagactatgaagaagatactcccaagcgtcggggaaaggggaaatccaagggtaagggtgtgggcagtgcccgtaagaagctggatgcttccatcctggaggaccgggataagccctatgcctgtgacatttgtggaaaacgttacaagaaccgaccaggcctcagttaccactatgcccactcccacttggctgaggaggagggcgaggacaaggaagactctcaaccacccactcctgtttcccagaggtctgaggagcagaaatccaaaaagggtcctgatggattggccttgcccaacaactactgtgacttctgcctgggggactcaaagattaacaagaagacgggacaacccgaggagctggtgtcctgttctgactgtggccgctcagggcatccatcttgcctccaatttacccccgtgatgatggcggcagtgaagacataccgctggcagtgcatcgagtgcaaatgttgcaatatctgcggcacctccgagaatgacgaccagttgctcttctgtgatgactgcgatcgtggctaccacatgtactgtctcaccccgtccatgtctgagccccctgaaggaagttggagctgccacctgtgtctggacctgttgaaagagaaagcttccatctaccagaaccagaactcctcttgcccaactttcttgtacaaagtggttgatatcggtaagcctatccctaaccctctcctcggtctcgattctacgtagtaatgaactagtccgtaacttgaaagtatttcgatttcttggctttatatatcttgtggaaaggacgatactagcaccacaaaaacaggagc

SEQ ID NO: 3160 - DNA, 1412 bp, Homo sapiens
  source 1..1412: mol_type = genomic DNA
atcgattgatcaacaagtttgtacaaaaaagttggcatgtacacttcagaagagaaatgtaatcagagaactcaaaaaaggaaaatatataatgtatgccctcggaagggtaaaaagatttttattcatatgcatgagattattcagatagatggtcatatataccagtgccttgaatgcaagcaaaacttctgtgaaaacttagctcttattatgtgtgagagaacccatactggggagaaaccttataaatgtgatatgtgtgagaaaacctttgtccaaagctcagatcttacttcacaccagaggatccacaattacgagaaaccttataaatgtagcaaatgtgagaagagcttttggcatcacttagcgctttcaggacatcagagaacacatgcaggtaaaaaattctatacatgtgacatttgtggcaagaattttggtcagagttctgatctgcttgtccaccagcgaagccatactggcgagaaaccatatctatgtagtgagtgtgacaaatgcttcagtagaagtacaaacctcataaggcatcgaagaactcacacaggtgagaaaccatttaagtgtctcgagtgtgaaaaagcttttagtgggaaatcagatcttattagccaccagagaactcacactggggaaaggccctacaaatgtaataagtgtgagaaaagttaccgacaccgttcagccttcattgtacataaaagagttcatactggggagaagccctataagtgtggtgcctgtgaaaaatgctttggccagaaatcagaccttatcgtgcaccagagagtccacacaggtgagaagccgtataaatgcctggaatgtatgagaagttttactcggagtgccaacctaattaggcaccaggcaactcacactcacacttttaaatgccttgaatatgaaaaaagctttaactgtagctcagatcttattgtacatcagagaattcacatggaagagaaaccacatcagtggtctgcgtgtgagagtggcttcctcctaggaatggactttgttgcccaacagaaaatgagaactcaaacagaggagctacactataaatacactgtatgtgataaaagcttccaccagagttcagcccttcttcaacatcagacagtacacattggtgaaaaaccgtttgtctgtaatgtgagtgaaaaaggtcttgagcttagccctccccatgcgtcagaagcctcacagatgtcttgcccaactttcttgtacaaagtggttgatatcggtaagcctatccctaaccctctcctcggtctcgattctacgtagtaatgaactagtccgtaacttgaaagtatttcgatttcttggctttatatatcttgtggaaaggacgatcacaactcaacttatgccctggt

SEQ ID NO: 3161 - DNA, 2006 bp, Homo sapiens
  source 1..2006: mol_type = genomic DNA
atcgattgatcaacaagtttgtacaaaaaagttggcaccatgctgggcatgtacgtgccggacaggttctccctgaagtcctcccgggttcaggacggcatggggctctacacggcccgcagagtgcgaaagggtgaaaagttcggaccctttgctggagagaagagaatgcctgaagacttggatgaaaatatggattacaggttgatgtgggaggttcgtgggagtaagggagaagttttgtacattttggatgctaccaacccacggcactccaactggcttcgcttcgttcatgaggcaccatctcaggagcagaagaacttggctgccattcaagaaggagaaaacattttctatttggcagttgaagatatagaaacagacacggagcttctgattggctacctggatagtgacatggaggctgaggaggaagaacagcaaattatgacagtcatcaaagaaggggaagttgaaaattctagaagacaatcaacagcgggcagaaaagatcgccttggctgtaaagaggactatgcttgtcctcaatgtgaatcgagttttaccagtgaggatattcttgctgagcatctccagacattgcaccagaaacccacagaggagaaagaatttaagtgcaagaactgtgggaagaaattcccagttaagcaggctttgcaaagacattttgagcagcaccaggagacttgccggggggatgccaggtttgtgtgcaaggctgacagctgtggaaagaggctgaagagcaaggatgccctgaaaagacaccaggaaaatgtccacactggagatcctaagaaaaagcttatatgttcagtgtgcaataaaaagtgttcttcagcatcaagcctacaggaacatagaaagattcatgagatatttgattgtcaagaatgtatgaagaaatttatttcagctaatcagctaaaacgtcatatgatcacccactcagaaaaacgaccctataattgcgagatttgtaataagtctttcaagaggcttgatcaagtgggtgctcacaaagtaatacacagcgaagacaaaccttacaaatgcaaactttgtggaaagggatttgcccacagaaatgtttacaagaatcataagaagacccactctgaggagagaccgttccaatgtgaagaatgtaaagctctgttccggaccccattttctttacagagacacctgctaatacataacagtgagaggactttcaagtgccatcactgcgatgctacctttaagaggaaggatacattaaatgttcatgtccaggtggttcatgaaagacacaagaagtataggtgtgagctatgtaataaggcctttgttacaccttcagtgcttagaagtcataagaaaacacatacaggagaaaaggagaaaatctgtccatattgtggccagaaatttgccagcagtggtacactcagagttcatatccggagccacacaggtgagcgtccctatcaatgtccttactgtgaaaaaggattcagtaaaaatgatggactgaagatgcacattcgtactcacaccagggagaagccgtacaagtgctcagagtgcagcaaggccttcagccagaagcgaggcctggatgagcacaagaggacgcacactggagaaaagccttttcagtgtgatgtttgtgatttggcttttagcctgaagaaaatgctgattcgacacaagatgactcataatcccaatcgtcccctggcagaatgccagttttgccataagaagtttacaaggaatgactacctcaaagtgcacatggacaatatccatggtgtagctgacagcttgccaactttcttgtacaaagtggttgatatcggtaagcctatccctaaccctctcctcggtctcgattctacgtagtaatgaactagtccgtaacttgaaagtatttcgatttcttggctttatatatcttgtggaaaggacgaacgccaggcggagcataaccgtct

SEQ ID NO: 3162 - DNA, 1346 bp, Homo sapiens
  source 1..1346: mol_type = genomic DNA
atcgattgatcaacaagtttgtacaaaaaagttggcatgttggtgataccccccggactgagcgaggaagaggaggctctgcagaagaaattcaacaagctcaagaaaaagaaaaaggcattgctggctctgaagaagcaaagtagcagcagcacaaccagccaaggtggtgtcaaacgctcactatcagagcagcctgtcatggacacagccacagcaacagagcaggcaaagcagctggtgaagtcaggagccatcagtgccatcaaggctgagaccaagaactcaggcttcaagcgttctcgaacccttgaggggaagttaaaggaccccgagaagggaccagtccccactttccagccgttccagaggagcatatctgctgatgatgacctgcaagagtcatccagacgtccccagaggaaatctctgtatgagagctttgtgtcttctagtgatcgacttcgagaactaggaccagatggagaagaggcagagggcccaggggctggtgatggtccccctcgaagctttgactggggctatgaagaacgcagtggtgcccactcctcagcctcccctccccgaagccgcagccgggaccgcagccatgagaggaaccgggacagagaccgagatcgggagcgggatcgagaccgggatcgagacagagacagagagcgggacagggatcgggatcgggatcgagatcgagaccgggaacgggacagggatcgggagcgggatcgagaccgagaccgagagggtcctttccgcaggtcggattcattccctgaacggcgagcccctaggaaagggaatactctctatgtatatggagaagacatgacacccacccttctccgtggggccttctctccttttggaaacatcattgacctctccatggacccacccagaaactgtgccttcgtcacctatgaaaagatggagtcagcagatcaggccgttgctgagctcaacgggacccaggtggagtctgtacagctcaaagtcaacatagcccgaaaacagcccatgctggatgccgctactggcaagtctgtctggggctccctcgctgtccagaacagccctaagggttgccaccgggacaagaggacccagattgtctacagtgatgacgtctacaaggaaaaccttgtggatggcttctacccaactttcttgtacaaagtggttgatatcggtaagcctatccctaaccctctcctcggtctcgattctacgtagtaatgaactagtccgtaacttgaaagtatttcgatttcttggctttatatatcttgtggaaaggacgactcaggtgtcatgtcgttatggga

SEQ ID NO: 3163 - DNA, 680 bp, Homo sapiens
  source 1..680: mol_type = genomic DNA
atcgattgatcaacaagtttgtacaaaaaagttggcatgtcctcggccatcgaaaggaagagcctggacccttcagaggaaccagtggatgaggtgctgcagatccccccatccctgctgacatgcggcggctgccagcagaacatcggggaccgctacttcctgaaggccatcgaccagtactggcacgaggactgcctgagctgcgacctctgtggctgccggctgggtgaggtggggcggcgcctctactacaaactgggccggaagctctgccggagagactatctcaggctttttgggcaagacggtctctgcgcatcctgtgacaagcggattcgtgcctatgagatgacaatgcgggtgaaagacaaagtgtatcacctggaatgtttcaaatgcgccgcctgtcagaagcatttctgtgtaggtgacagatacctcctcatcaactctgacatagtgtgcgaacaggacatctacgagtggactaagatcaatgggatgatatacccaactttcttgtacaaagtggttgatatcggtaagcctatccctaaccctctcctcggtctcgattctacgtagtaatgaactagtccgtaacttgaaagtatttcgatttcttggctttatatatcttgtggaaaggacgacggtctacgagctaaaaataacat

SEQ ID NO: 3164 - DNA, 680 bp, Homo sapiens
  source 1..680: mol_type = genomic DNA
atcgattgatcaacaagtttgtacaaaaaagttggcatgtcctcggccatcgaaaggaagagcctggacccttcagaggaaccagtggatgaggtgctgcagatccccccatccctgctgacatgcggcggctgccagcagaacattggggaccgctacttcctgaaggccatcgaccagtactggcacgaggactgcctgagctgcgacctctgtggctgccggctgggtgaggtggggcggcgcctctactacaaactgggccggaagctctgccggagagactatctcaggctttttgggcaagacggtctctgcgcatcctgtgacaagcggattcgtgcctatgagatgacaatgcgggtgaaagacaaagtgtatcacctggaatgtttcaagtgcgccgcctgtcagaagcatttctgtgtaggtgacagatacctcctcatcaactctgacatagtgtgcgaacaggacatctacgagtggactaagatcaatgggatgatatacccaactttcttgtacaaagtggttgatatcggtaagcctatccctaaccctctcctcggtctcgattctacgtagtaatgaactagtccgtaacttgaaagtatttcgatttcttggctttatatatcttgtggaaaggacgattagaggcccggtttcatattcat

SEQ ID NO: 3165 - DNA, 1613 bp, Homo sapiens
  source 1..1613: mol_type = genomic DNA
atcgattgatcaacaagtttgtacaaaaaagttggcatgaatgatttcggaatcaagaatatggaccaggtagcccctgtggctaacagttacagagggacactcaagcgccagccagcctttgacacctttgatgggtccctgtttgctgtttttccttctctaaatgaagagcaaacactgcaagaagtgccaacaggcttggattccatttctcatgactccgccaactgtgaattgcctttgttaaccccgtgcagcaaggctgtgatgagtcaagccttaaaagctaccttcagtggcttcaaaaaggaacagcggcgcctgggcattccaaagaacccctggctgtggagtgagcaacaggtatgccagtggcttctctgggccaccaatgagttcagtctggtgaacgtgaatctgcagaggttcggcatgaatggccagatgctgtgtaaccttggcaaggaacgctttctggagctggcacctgactttgtgggtgacattctctgggaacatctggagcaaatgatcaaagaaaaccaagaaaagacagaagatcaatatgaagaaaattcacacctcacctccgttcctcattggattaacagcaatacattaggttttggcacagagcaggcgccctatggaatgcagacacagaattaccccaaaggcggcctcctggacagcatgtgtccggcctccacacccagcgtactcagctctgagcaggagtttcagatgttccccaagtctcggctcagctccgtcagcgtcacctactgctctgtcagtcaggacttcccaggcagcaacttgaatttgctcaccaacaattctgggacgcccaaagaccacgactcccctgagaacggtgcggacagcttcgagagctcagactccctcctccagtcctggaacagccagtcgtccttgctggatgtgcaacgggttccttccttcgagagcttcgaagatgactgcagccagtctctctgcctcaataagccaaccatgtctttcaaggattacatccaagagaggagtgacccggtggagcaaggcaaaccagttatacctgcagctgtgctggccggcttcacaggaagtggacctattcagctgtggcagtttctcctggagctgctatcagacaaatcctgccagtcattcatcagctggactggagacggatgggagtttaagctcgccgaccccgatgaggtggcccgccggtggggaaagaggaaaaataagcccaagatgaactacgagaagctgagccggggcttacgctactattacgacaagaacatcatccacaagacgtcggggaagcgctacgtgtaccgcttcgtgtgcgacctccagaacttgctggggttcacgcccgaggaactgcacgccatcctgggcgtccagcccgacacggaggactgcccatctttcttgtacaaagtggttgatatcggtaagcctatccctaaccctctcctcggtctcgattctacgtagtaatgaactagtccgtaacttgaaagtatttcgatttcttggctttatatatcttgtggaaaggacgatggccaactacgctcagccgatga

SEQ ID NO: 3166 - DNA, 533 bp, Homo sapiens
  source 1..533: mol_type = genomic DNA
atcgattgatcaacaagtttgtacaaaaaagttggcatggcatatcagttatacagaaatactactttgggaaacagtcttcaggagagcctagatgagctcatacagtctcaacagatcaccccccaacttgcccttcaagttctacttcagtttgataaggctataaatgcagcactggctcagagggtcaggaacagagtcaatttcaggggctctctaaatacgtacagattctgcgataatgtgtggacttttgtactgaatgatgttgaattcagagaggtgacagaacttattaaagtggataaagtgaaaattgtagcctgtgatggtaaaaatactggctctaatactacagaatgcccaactttcttgtacaaagtggttgatatcggtaagcctatccctaaccctctcctcggtctcgattctacgtagtaatgaactagtccgtaacttgaaagtatttcgatttcttggctttatatatcttgtggaaaggacgagatccgatctacctaattgtctcc

SEQ ID NO: 3167 - DNA, 3059 bp, Homo sapiens
  source 1..3059: mol_type = genomic DNA
atcgattgatcaacaagtttgtacaaaaaagttggcatgactgactccaagtatttcacaaccaataaaaaaggagaaatatttgaactaaaagctgaactcaacaatgaaaagaaagaaaagagaaaggaggctgtgaagaaagtgattgctgctatgaccgtggggaaggatgttagttctctctttccagacgtagtgaactgtatgcagactgacaatctggaactaaagaagcttgtgtatctctacttgatgaactacgccaagagtcagccagacatggccatcatggctgtaaacagctttgtgaaggactgtgaagatcctaatcctttgattcgagccttggcagtcagaaccatggggtgcatccgggtagacaaaattacagaatatctctgtgagccgctccgcaagtgcttgaaggatgaggatccctatgttcggaaaacagcagcagtctgcgtggcaaaactccatgatatcaatgcccaaatggtggaagatcagggatttctggattctctacgggatctcatagcagattcaaatccaatggtggtggctaatgccgtagcggcattatctgaaatcagtgagtctcacccaaacagcaacttacttgatctgaacccacagaacattaataagctgctgacagccctgaatgaatgcactgaatggggccagattttcatcctggactgcctgtctaattacaaccctaaagatgatcgggaggctcagagcatctgtgagcgggtaactccccggctatcccatgccaactcagcagtggtgctttcagcggtaaaagtcctaatgaagtttctagaattgttacctaaggattctgactactacaatatgctgctgaagaagttagcccctccacttgtcactttgctgtctggggagccagaagtgcagtatgtcgccctgaggaacatcaacttaattgtccagaaaaggcctgaaatcttgaagcaggaaatcaaagtcttctttgtgaagtacaatgatcccatctatgttaaactagagaagttggacatcatgattcgtttggcatctcaagccaacattgctcaggttctggcagaactgaaagaatatgctacagaggtggatgttgactttgttcgaaaagctgtgcgggccattggacggtgtgccatcaaggtggagcaatctgcagagcgctgtgtaagcacattgcttgatctaatccagaccaaagtgaattatgtggtccaagaagcaattgttgtcatcagggacatcttccgcaaataccccaacaagtatgaaagtatcatcgccactctgtgtgagaacttagactcgctggatgagccagatgctcgagcagctatgatttggattgtgggagaatatgctgaaagaattgacaatgcagatgagttactagaaagcttcctggagggttttcacgatgaaagcacccaggtgcagctcactctgcttactgccatagtgaagctgtttctcaagaaaccatcagaaacacaggagctagtccagcaggtcttgagtttggcaacacaggattctgataatcctgaccttcgagaccggggctatatttattggcgccttctctcaactgaccctgttacagctaaagaagtagtcttgtctgagaagccactgatctctgaggagacggaccttattgagccaactctgctggatgagctaatctgccacattggttctttggcctctgtgtatcataagcctcccaatgcttttgtggaaggaagtcatggaattcatcgtaaacacttgccaattcatcatgggagcactgatgcaggtgacagccctgttggcactaccactgcaacgaacctggaacagcctcaggttatcccctctcaaggtgatcttctaggggatcttttaaaccttgacctcggtcccccagtcaatgtgccacaggtgtcctccatgcagatgggagcagtggatctcctaggaggaggactagatagtctgcttggcagtgaccttggcgggggcattggaggaagtccggcagtgggacaatccttcatcccatcatcggtccctgcaacctttgctccttcacctacacctgctgtggtcagcagtggactgaatgacctgtttgaactctccacagggataggcatggcacctggtggatatgtggctcctaaggctgtctggctacctgcagtaaaggctaaaggcttggagatttccggaacatttactcaccgccaagggcacatctatatggaaatgaacttcaccaataaagctctgcagcacatgacagattttgcaatccagtttaacaaaaatagctttggtgtcatccccagcactcctctggccatccatacaccactgatgccaaaccagagcattgatgtctccctgcctctcaataccttgggcccagtcatgaagatggaacctctgaataacctccaggtggctgtgaaaaacaatatcgatgtcttctacttcagctgcctcatcccactcaatgtgctttttgtagaagatggcaaaatggagcgccaggtcttccttgcaacatggaaggatattcccaatgaaaatgaacttcagtttcagattaaggaatgtcatttaaatgctgacactgtttccagcaagttgcaaaacaacaatgtttatactattgccaagaggaatgtggaagggcaggacatgctgtaccaatccctgaagctcactaatggcatttggattttggccgaactacgtatccagccaggaaaccccaattacacgctgtcactgaagtgtagagctcctgaagtctctcaatacatctatcaggtctacgacagcattttgaaaaactacccaactttcttgtacaaagtggttgatatcggtaagcctatccctaaccctctcctcggtctcgattctacgtagtaatgaactagtccgtaacttgaaagtatttcgatttcttggctttatatatcttgtggaaaggacgacgagcactcccatagaaccccgcg

SEQ ID NO: 3168 - DNA, 1214 bp, Homo sapiens
  source 1..1214: mol_type = genomic DNA
atcgattgatcaacaagtttgtacaaaaaagttggcatggagagaaaaataagcagaatccaccttgtttctgaacccagtataactcattttctacaagtatcttgggagaaaacactggaatctggttttgttattacacttactgatggtcattcagcatggactgggacagtttctgaatcagagatttcccaagaagctgatgacatggcaatggaaaaagggaaatatgttggtgaactgagaaaagcattgttgtcaggagcaggaccagctgatgtatacacgtttaatttttctaaagagtcttgttatttcttctttgagaaaaacctgaaagatgtctcattcagacttggttccttcaacctagagaaagttgaaaacccagctgaagtcattagagaacttatttgttattgcttggacaccattgcagaaaatcaagccaaaaatgagcacctgcagaaagaaaatgaaaggcttctgagagattggaatgatgttcaaggacgatttgaaaaatgtgtgagtgctaaggaagctttggagactgatctttataagcggtttattctggtgttgaatgagaagaaaacaaaaatcagaagtttgcataataaattattaaatgcagctcaagaacgagaaaaggacatcaaacaagaaggggaaactgcaatctgttctgaaatgactgctgaccgagatccagtctatgatgagagtactgatgaggaaagtgaaaaccaaactgatctctctgggttggcttcagctgctgtaagtaaagatgattccattatttcaagtcttgatgtcactgatattgcaccaagtagaaaaaggagacagcgaatgcaaagaaatcttgggacagaacctaaaatggctcctcaggagaatcagcttcaagaaaaggaaaattctaggcctgattcttcactacctgagacgtctaaaaaggagcacatctcagctgaaaacatgtctttagaaactctgagaaacagcagcccagaagacctctttgatgagatttacccaactttcttgtacaaagtggttgatatcggtaagcctatccctaaccctctcctcggtctcgattctacgtagtaatgaactagtccgtaacttgaaagtatttcgatttcttggctttatatatcttgtggaaaggacgagacgatgtctaactcgctcggatc

SEQ ID NO: 3169 - DNA, 1421 bp, Homo sapiens
  source 1..1421: mol_type = genomic DNA
atcgattgatcaacaagtttgtacaaaaaagttggcaccatgactcacatgataactcacattggagagaaaacttctgaggataatcagagtggaaaagccttaagaaagaactttcctcatagtttttacaagaaaagtcatgctgaggggaaaatgcctaagtgtgttaaacatgaaaaagccttcaaccagtttccaaatcttactaggcagaataaaactcacacacaagagaaattgtgtgaatgcaaagactgttggagaacttttcttaatcagtcatcccttaagttacatataagatctcacaatggagacaaacactatgtatgtaaggaatgtgggaaagccttcagtaattcctcacaccttataggacatggaagaattcacagtggagagaagccctatgtctgtaaagaatgtggtaaagctttcactcaatccacaggacttaaattacacatcagaactcacagtggagaaaaaccatataaatgtaaagagtgtgggaaagccttcacccattcttcataccttactgatcatacaagaatccacagtggaaagaagccctatgtatgtatggaatgtggaaaagccttcactagatccacaggacttattttacacatgcgaattcacactggagaaaagccatatgaatgtaaggagtgtggaaaagcttttattcattcctcataccttacaaaacatgtaaggattcacagtggagagaagctgtatttatgtaaggcatgtgggaaagcttttactcgttcctcaggacttgttttacacatgagaacacatactggagaaaagccctatgaatgtaaagaatgtgggaaagcctttaataattcctcaatgcttagtcaacatgtaaggattcacactggagagaagccatatgaatgcaaagaatgtgggaaagctttcactcaatcctcgggccttagtacccatttaagaactcacactggagaaaaggcctgtgaatgtaaggaatgcggtaaagcatttgctcgttccacaaatcttaatatgcacatgcgaacgcacacaggagaaaagccttatgcatgtaaagaatgtgggaaagccttcaggtattccacataccttaacgttcacacacgaactcacactggagcaaaaccatatgaatgtaagaaatgtgggaaaaacttcactcaatcttcagcacttgctaaacatctaagaactaaggcatgtgaaaaaaccttgccaactttcttgtacaaagtggttgatatcggtaagcctatccctaaccctctcctcggtctcgattctacgtagtaatgaactagtccgtaacttgaaagtatttcgatttcttggctttatatatcttgtggaaaggacgacatacttcgtcttatgcaaggatg

SEQ ID NO: 3170 - DNA, 1631 bp, Homo sapiens
  source 1..1631: mol_type = genomic DNA
atcgattgatcaacaagtttgtacaaaaaagttggcatgtcccgccgcaaggccggcagcgcgccccgccgagtagagcccgcgcccgccgccaacccagacgacgagatggaaatgcaggacctcgtcatcgaactcaagcccgagccagacgcgcagccccaacaggccccaaggctggggcccttctccccgaaggaggtgtcctcggcggggcggttcggcggcgaaccccaccactcccctggccccatgcccgccggggccgccctcctcgccctcggcccgcggaacccgtggaccctgtggacgccgttgaccccgaactatcccgaccgccagccctggaccgacaaacacccagatctgttgacctgcggccgctgcctgcagaccttcccgttggaggccatcactgccttcatggaccacaagaagctgggctgtcagctcttcagaggccccagccgcggccagggctcagaacgagaggagctgaaggccttgagctgcctgcgctgtggcaaacagttcacagtggcctggaagctgctgcgtcacgcccagtgggaccacggactgtccatctaccagacagaatcagaggccccggaggccccgctcctgggcctggccgaggtggctgcagccgtgtcggcagtggtggggccagcagctgaggccaagagcccccgtgcaagtggcagcggcctcacccggcggagccccacctgtcctgtgtgcaagaagaccctcagctccttcagcaacctcaaagtgcacatgcgctcacacacaggcgagcggccctatgcttgcgaccagtgtccctacgcctgcgcccagagcagcaagctcaaccgccacaagaagacccaccggcaggtgccgccccagagccccctcatggccgacaccagccaggagcaggcctctgcagcccctccggagccggctgtccatgctgctgcccccaccagcacccttccatgcagcggtggtgagggggctggagccgccgccacagcaggtgtccaggaacccggggctcctggcagtggggctcaagccggccctggtggagacacttggggagccatcaccacggaacaaagaactgaccctgcaaacagccagaaggcatcacccaaaaagatgcccaagtcagggggcaagagccgcgggcccgggggcagctgtgagttctgcgggaagcattttaccaacagcagcaacctgacggtgcaccggcgctcacacaccggggagcgcccctacacctgtgagttctgcaactacgcctgcgcccagagcagtaagctcaaccgccaccgccgcatgcacggcatgacgcctggcagcacccgcttcgagtgcccccactgccatgtgcccttcggcctgcgagccaccctggacaaacacctgcggcagaagcaccctgaggcggccggcgaggcctgcccaactttcttgtacaaagtggttgatatcggtaagcctatccctaaccctctcctcggtctcgattctacgtagtaatgaactagtccgtaacttgaaagtatttcgatttcttggctttatatatcttgtggaaaggacgacaacgacgcgagccatccgcgaag

SEQ ID NO: 3171 - DNA, 1427 bp, Homo sapiens
  source 1..1427: mol_type = genomic DNA
atcgattgatcaacaagtttgtacaaaaaagttggcatggagagtgcaatcacgctgtggcagttcctgttgcagttgctgctggatcagaaacatgagcatttgatctgctggacctcgaacgatggtgaattcaagctcctcaaagcagaagaagtggccaagctgtggggactccgaaaaaacaaaacaaatatgaactatgataagctgagcagagccctgcgatactattatgacaagaacatcatcaagaaggtgatcgggcagaagtttgtgtacaagtttgtctctttcccggagatcctgaagatggatcctcacgcggtggagatcagccgggagagccttctgctgcaggacagcgactgcaaggcgtctccggagggccgcgaggcccacaaacacggcctggccgccctcagaagcacgagccgcaacgaatacatccactcaggcctgtactcgtccttcaccattaattccctgcagaacccaccagacgccttcaaggccatcaagacggagaagctggaggagccgcccgaagacagcccccccgtggaagaagtcaggactgtgatcaggtttgtgaccaataaaaccgacaagcacgtcaccaggccggtggtgtccctgccttccacgtcagaggctgcggcggcgtccgccttcctggcctcgtccgtctcggccaagatctcctctttaatgttgccaaacgctgccagtatttcatccgcctcacccttctcatctcggtccccgtccctgtcccccaactcacccctcccttctgaacacagaagcctcttcctggaggccgcctgccatgactccgattccctggagcccttgaacctgtcatcgggctccaagaccaagtctccatctcttcccccaaaggccaaaaaacccaaaggcttggaaatctcagcgcccccgctggtgctctccggcaccgacatcggctccatcgccctcaacagcccagccctcccctcgggatccctcaccccagccttcttcaccgcacagacaccaaatggattgcttctgactccgagtccactgctctccagcatacatttctggagcagccttagtccagttgctccgctgagtcctgccaggctgcaagggccaagcacgctgttccagttccccacactgcttaatggccacatgccagtgccaatccccagtctggacagagctgcttctccagtactgctttcttcaaactctcagaaatcctgcccaactttcttgtacaaagtggttgatatcggtaagcctatccctaaccctctcctcggtctcgattctacgtagtaatgaactagtccgtaacttgaaagtatttcgatttcttggctttatatatcttgtggaaaggacgataccaacaaagcgacgggtccgat

SEQ ID NO: 3172 - DNA, 1253 bp, Homo sapiens
  source 1..1253: mol_type = genomic DNA
atcgattgatcaacaagtttgtacaaaaaagttggcaccatgagcgcagcgttcccgccgtcgctgatgatgatgcagcgcccgctggggagtagcaccgccttcagcatagactcgctgatcggcagcccgccgcagcccagccccggccatttcgtctacaccggctaccccatgttcatgccctaccggccggtagtgctgccgccgccgccgccgccgccgcccgcgctgccccaggccgcgctgcagccagcgctgccgcccgcacaccctcaccaccagatccccagcctgcccacaggcttctgctccagcctggcgcagggcatggcgctcacctctacgctcatggccacgctccccggcggcttctccgcgtcgccccagcaccaggaggcggcagcggcccgcaagttcgcgccgcagccgctgcccggcggcggtaacttcgacaaggcggaggcgctgcaggctgacgcggaggacggcaaaggcttcctggccaaagagggctcgctgctcgccttctccgcggccgagacggtgcaggcttcgctcgtcggggctgtccgagggcaagggaaagacgagtcaaaggtggaagacgacccgaagggcaaggaggagagcttctcgctggagagcgatgtggactacagctcggatgacaatctgactggccaggcagctcacaaggaggaagacccgggccacgcgctggaggagaccccgccgagcagcggcgccgcgggcagcaccacgtctacgggcaagaaccggcggcggcggactgccttcaccagcgagcagctgctggagctagagaaggagttccactgcaaaaagtacctctccttgaccgagcgctcgcagatcgcccacgccctcaaactcagcgaggtgcaggtgaaaatctggttccagaaccgacgggccaagtggaaacgggtgaaggcaggcaatgccaattccaagacaggggagccctcccggaaccctaagatcgtcgtccccatccctgtccacgtcagcaggttcgctatcagaagtcagcatcagcagctagaacaggcccggcccttgccaactttcttgtacaaagtggttgatatcggtaagcctatccctaaccctctcctcggtctcgattctacgtagtaatgaactagtccgtaacttgaaagtatttcgatttcttggctttatatatcttgtggaaaggacgaccagtaatgaatttcaataaaatc

SEQ ID NO: 3173 - DNA, 1184 bp, Homo sapiens
  source 1..1184: mol_type = genomic DNA
atcgattgatcaacaagtttgtacaaaaaagttggcatgtaccaggattatcccgggaactttgacacctcgtcccggggcagcagcggctctcctgcgcacgccgagtcctactccagcggcggcggcggccagcagaaattccgggtagatatgcctggctcaggcagtgcattcatccccaccatcaacgccatcacgaccagccaggacctgcagtggatggtgcagcccacagtgatcacctccatgtccaacccataccctcgctcgcacccctacagccccctgccgggcctggcctctgtccctggacacatggccctcccaagacctggcgtgatcaagaccattggcaccaccgtgggccgcaggaggagagatgagcagctgtctcctgaagaggaggagaagcgtcgcatccggcgggagaggaacaagctggctgcagccaagtgccggaaccgacgccgggagctgacagagaagctgcaggcggagacagaggagctggaggaggagaagtcaggcctgcagaaggagattgctgagctgcagaaggagaaggagaagctggagttcatgttggtggctcacggcccagtgtgcaagattagccccgaggagcgccgatcgcccccagcccctgggctgcagcccatgcgcagtgggggtggctcggtgggcgctgtagtggtgaaacaggagcccctggaagaggacagcccctcgtcctcgtcggcggggctggacaaggcccagcgctctgtcatcaagcccatcagcattgctgggggcttctacggtgaggagcccctgcacacccccatcgtggtgacctccacacctgctgtcactccgggcacctcgaacctcgtcttcacctatcctagcgtcctggagcaggagtcacccgcatctccctccgaatcctgctccaaggctcaccgcagaagcagtagcagcggggaccaatcatcagactccttgaactcccccactctgctggctctgtacccaactttcttgtacaaagtggttgatatcggtaagcctatccctaaccctctcctcggtctcgattctacgtagtaatgaactagtccgtaacttgaaagtatttcgatttcttggctttatatatcttgtggaaaggacgattcatcctctcaacctccagtacc

SEQ ID NO: 3174 - DNA, 1220 bp, Homo sapiens
  source 1..1220: mol_type = genomic DNA
atcgattgatcaacaagtttgtacaaaaaagttggcatgaccaccaccctcgtgtctgccaccatcttcgacttgagcgaagttttatgcaagggtaacaagatgctcaactatagtgctcccagtgcagggggttgcctgctggacagaaaggcagtgggcacccctgctggtgggggcttccctcggaggcactcagtcaccctgcccagctccaagttccaccagaaccagctcctcagcagcctcaagggtgagccagcccccgctctgagctcgcgagacagccgcttccgagaccgctccttctcggaagggggcgagcggctgctgcccacccagaagcagcccgggggcggccaggtcaactccagccgctacaagacggagctgtgccgcccctttgaggaaaacggtgcctgtaagtacggggacaagtgccagttcgcacacggcatccacgagctccgcagcctgacccgccaccccaagtacaagacggagctgtgccgcaccttccacaccatcggcttttgcccctacgggccccgctgccacttcatccacaacgctgaagagcgccgtgccctggccggggcccgggacctctccgctgaccgtccccgcctccagcatagctttagctttgctgggtttcccagtgccgctgccaccgccgctgccaccgggctgctggacagccccacgtccatcaccccaccccctattctgagcgccgatgacctcctgggctcacctaccctgcccgatggcaccaataacccttttgccttctccagccaggagctggcaagcctctttgcccctagcatggggctgcccgggggtggctccccgaccaccttcctcttccggcccatgtccgagtcccctcacatgtttgactctccccccagccctcaggattctctctcggaccaggagggctacctgagcagctccagcagcagccacagtggctcagactccccgaccttggacaactcaagacgcctgcccatcttcagcagactttccatctcagatgactacccaactttcttgtacaaagtggttgatatcggtaagcctatccctaaccctctcctcggtctcgattctacgtagtaatgaactagtccgtaacttgaaagtatttcgatttcttggctttatatatcttgtggaaaggacgaacggcactctatacggcctttggt

SEQ ID NO: 3175 - DNA, 1391 bp, Homo sapiens
  source 1..1391: mol_type = genomic DNA
atcgattgatcaacaagtttgtacaaaaaagttggcatgtccctggtagatttgggaaagaagcttttagaagcggcacgagcaggtcaagatgatgaagttcgtattttgatggcaaatggagctccctttactacagactggctgggaacttctccacttcatctagcagcacagtatggtcattattccaccacagaggtactgctgcgagctggtgtgagcagagatgccagaaccaaagtggaccgaacaccattacatatggcagcttctgagggccatgccagcatagtagaggttttacttaagcatggtgctgatgtcaatgcaaaggacatgttaaagatgacagctctccattgggccacagaacacaatcatcaagaggtggtggaacttttaatcaaatatggtgctgatgtacacacgcaaagtaaattttgtaaaactgcatttgatatttcaatagacaatggaaatgaagatttagcagagatattacagattgctatgcagaaccaaatcaacacaaacccagagagtcctgacactgtgacaatacatgctgcaacaccacagtttatcattggacctggaggggtggtgaacctaacaggtctggtatcttcagaaaattcatccaaggcaacagatgaaacgggtgtatctgctgttcagtttggaaactcttctacatcagtattagctacattagctgccttagctgaagcatctgctccattgtccaattcttcagaaactccagtagtggccacagaagaagtagttactgcagaatctgtggatggtgccattcagcaagtagttagttcagggggtcagcaagtcatcacaatagttacagatggaattcagcttggaaatttgcactctattccaaccagtggaattggtcagcccatcattgtgaccatgccagatggacaacaagtattaacagtaccagcaacagacattgctgaagaaactgttataagtgaagaaccaccagctaagagacaatgtatcgaaataattgaaaaccgggtggaatctgcagaaatagaagagagagaagctcttcagaaacagctggatgaagcaaatcgagaagcacaaaaatatcgacagcagctcctaaagaaagaacaggaagcagaggcctacagacagaagttggaagctatgactcgtcttcagactaataaagaagctgtttacccaactttcttgtacaaagtggttgatatcggtaagcctatccctaaccctctcctcggtctcgattctacgtagtaatgaactagtccgtaacttgaaagtatttcgatttcttggctttatatatcttgtggaaaggacgacggaacttggctggccaaaccgat

SEQ ID NO: 3176 - DNA, 2342 bp, Homo sapiens
  source 1..2342: mol_type = genomic DNA
atcgattgatcaacaagtttgtacaaaaaagttggcatgtctcagtggtacgaacttcagcagcttgactcaaaattcctggagcaggttcaccagctttatgatgacagttttcccatggaaatcagacagtacctggcacagtggttagaaaagcaagactgggagcacgctgccaatgatgtttcatttgccaccatccgttttcatgacctcctgtcacagctggatgatcaatatagtcgcttttctttggagaataacttcttgctacagcataacataaggaaaagcaagcgtaatcttcaggataattttcaggaagacccaatccagatgtctatgatcatttacagctgtctgaaggaagaaaggaaaattctggaaaacgcccagagatttaatcaggctcagtcggggaatattcagagcacagtgatgttagacaaacagaaagagcttgacagtaaagtcagaaatgtgaaggacaaggttatgtgtatagagcatgaaatcaagagcctggaagatttacaagatgaatatgacttcaaatgcaaaaccttgcagaacagagaacacgagaccaatggtgtggcaaagagtgatcagaaacaagaacagctgttactcaagaagatgtatttaatgcttgacaataagagaaaggaagtagttcacaaaataatagagttgctgaatgtcactgaacttacccagaatgccctgattaatgatgaactagtggagtggaagcggagacagcagagcgcctgtattggggggccgcccaatgcttgcttggatcagctgcagaactggttcactatagttgcggagagtctgcagcaagttcggcagcagcttaaaaagttggaggaattggaacagaaatacacctacgaacatgaccctatcacaaaaaacaaacaagtgttatgggaccgcaccttcagtcttttccagcagctcattcagagctcgtttgtggtggaaagacagccctgcatgccaacgcaccctcagaggccgctggtcttgaagacaggggtccagttcactgtgaagttgagactgttggtgaaattgcaagagctgaattataatttgaaagtcaaagtcttatttgataaagatgtgaatgagagaaatacagtaaaaggatttaggaagttcaacattttgggcacgcacacaaaagtgatgaacatggaggagtccaccaatggcagtctggcggctgaatttcggcacctgcaattgaaagaacagaaaaatgctggcaccagaacgaatgagggtcctctcatcgttactgaagagcttcactcccttagttttgaaacccaattgtgccagcctggtttggtaattgacctcgagacgacctctctgcccgttgtggtgatctccaacgtcagccagctcccgagcggttgggcctccatcctttggtacaacatgctggtggcggaacccaggaatctgtccttcttcctgactccaccatgtgcacgatgggctcagctttcagaagtgctgagttggcagttttcttctgtcaccaaaagaggtctcaatgtggaccagctgaacatgttgggagagaagcttcttggtcctaacgccagccccgatggtctcattccgtggacgaggttttgtaaggaaaatataaatgataaaaattttcccttctggctttggattgaaagcatcctagaactcattaaaaaacacctgctccctctctggaatgatgggtgcatcatgggcttcatcagcaaggagcgagagcgtgccctgttgaaggaccagcagccggggaccttcctgctgcggttcagtgagagctcccgggaaggggccatcacattcacatgggtggagcggtcccagaacggaggcgaacctgacttccatgcggttgaaccctacacgaagaaagaactttctgctgttactttccctgacatcattcgcaattacaaagtcatggctgctgagaatattcctgagaatcccctgaagtatctgtatccaaatattgacaaagaccatgcctttggaaagtattactccaggccaaaggaagcaccagagccaatggaacttgatggccctaaaggaactggatatatcaagactgagttgatttctgtgtctgaagtgtacccaactttcttgtacaaagtggttgatatcggtaagcctatccctaaccctctcctcggtctcgattctacgtagtaatgaactagtccgtaacttgaaagtatttcgatttcttggctttatatatcttgtggaaaggacgagcacttcaacgcacacgcccattc

SEQ ID NO: 3177 - DNA, 698 bp, Homo sapiens
  source 1..698: mol_type = genomic DNA
atcgattgatcaacaagtttgtacaaaaaagttggcatgtctgtggatcccctatccagcaaagctctaaagatcaagcgagagctgagcgagaacacgccgcacctgtcggacgaggcgctgatggggctgtcggtgcgcgagctgaaccggcatctgcgcgggctctccgccgaggaggtgacacggctcaagcagcggcgccgcacactcaaaaaccgtggctacgccgccagctgccgcgtgaagcgcgtgtgccagaaggaggagctgcagaagcagaagtcggagctggagcgcgaggtggacaagctggcgcgcgagaacgccgccatgcgcctggagctcgacgcgctgcgcggcaagtgcgaggcgctgcagggcttcgcgcgctccgtggccgccgcccgcgggcccgccacgctcgtggcgccggccagcgtcatcaccatcgtcaagtccaccccgggctcggggtctggccccgcccacggcccggaccccgcccacggcccggcctcctgctcctacccaactttcttgtacaaagtggttgatatcggtaagcctatccctaaccctctcctcggtctcgattctacgtagtaatgaactagtccgtaacttgaaagtatttcgatttcttggctttatatatcttgtggaaaggacgaaggtatctctacgggcgacgcctt

SEQ ID NO: 3178 - DNA, 2066 bp, Homo sapiens
  source 1..2066: mol_type = genomic DNA
accgccaccatggagggcgcgatggcagtgcgggtgacggccgctcatacggcagaagcccaggccgaagccgggcgggaagcgggcgagggtgcagttgcggcggtggcggcggccttggcccccagcggcttcctcggcctcccggcgcccttcagcgaggaagatgaggacgatgtgcacagatgcggccgctgccaggcagagttcaccgccttggaggattttgttcagcacaagattcagaaggcctgccagcgggcccctccggaggccctgcctgccacccctgccaccacagcgttgctgggccaggaggtggtgccggcagcaccaggcccagaggagcccatcactgtggcccacatcgtggtggaggcggcctctctggcagcagacatcagccacgcatctgaccttgttggtggtgggcacatcaaagaggtcatcgtggctgctgaggcggagctgggagacggtgagatggccgaggccccgggcagcccccgccagcaggggctggggctcgcaggggagggtgagcaggcccaggtgaagctactggtgaacaaggatggccgctatgtgtgtgcgctgtgccacaagaccttcaagacgggcagcatcctcaaggcccacatggtcactcacagcagccgcaaggaccacgagtgcaagctctgtggggcctccttccgcaccaagggctcactcatccggcaccaccggcggcacacggatgagcgcccctacaagtgctccaagtgtggaaagagcttccgggagtcgggtgcactgacccggcacctcaagtctctcaccccctgcacagagaaaatccgcttcagtgtgagcaaggacgtggttgtcagcaaagaggacgcacgtgcaggttctggagctggagctgccggcttggggacagccacatcatcggtgacaggcgagcctatagagacttcacccgtgattcacctggtgacagatgccaagggcaccgtcatccacgaagtccacgtccagatgcaggagctgtccctgggcatgaaagccctggccccagagccccccgtctcccaggagctcccctgctccagcgagggcagccgtgagaacctgctgcaccaggccatgcagaactccggcatcgtccttgagcgcgctgctggggaggagggtgccctggagccagctcctgctgccgggtccagtccccagcccctggcagtggcagccccgcagctgccggtactggaagtgcagccgctggagacacaggtggccagcgaggcctcagcggtgcccaggacccacccatgtcctcagtgcagtgagaccttcccgacagcagccaccctggaggcccacaagaggggccacaccgggccgaggccgttcgcctgcgcgcagtgtggcaaggccttccccaaggcctacctgctcaagaagcaccaggaggtgcacgtgcgtgagcgccgcttccgctgtggcgactgcgggaagctctacaagaccattgcccatgtgcgtggccaccggcgcgtccactcagacgagcggccctacccttgtcccaagtgtggcaagcgctacaagactaagaacgcacagcaggtgcacttcaggacacacctggaggagaagccgcacgtgtgccagttctgcagccgtggcttccgagagaagggctcactggtgcggcacgtgcgacaccacacaggcgagaagccgttcaagtgctacaagtgcggccgtggcttcgccgagcacggcacgctgaaccggcacctgcgcaccaaagggggctgcctgctggaggtggaggagttgctggtgtctgaggacagccccgcggcagccaccaccgtcctcacggaagacccgcacacagtgccactgcggacgatgcggagaccagtgaggccacggagatcatcgagggcacccagacagaggtggacagccacatcatagtaatgaactagtccgtaacttgaaagtatttcgatttcttggctttatatatcttgtggaaaggacgatcccattaaatccagatatgtcta

SEQ ID NO: 3179 - DNA, 1388 bp, Homo sapiens
  source 1..1388: mol_type = genomic DNA
atcgattgatcaacaagtttgtacaaaaaagttggcatgaatacaaactcaaaggaggttttatccctgggtgttcaagttcccgaggcatgggaagaacttctgacaatgaaagtggaagcaaaaagtcaccttcaatggcaggaatccagactgaaacgcagtaatccactggcaagggaaatcttccgaaggcactttcgacagctgtgctaccaagagacccctggaccaagggaggctcttactcgactccaggaactttgctaccagtggttgaggccacatgtgagcacaaaggagcagattttggatctgctggtgctggagcagtttctatccattctgcccaaggagctccagggctgggtgagggaacactgtccagagagtggagaagaggctgtgattttgctggaggatctggagagagagctcgatgaaccacaacatgagatggtggcccacagacacagacaagaagtcctctgtaaagagatggtgcctctagcagagcagacaccactgacccttcagtcccagcctaaggagccacagctcacatgtgactctgctcagaagtgccattctattggagagacagatgaagtaaccaagactgaggacagagagttggtgctaaggaaagactgtcctaagatagtggaaccacatgggaaaatgtttaatgagcagacctgggaggtatcacagcaggatccctcacatggagaagttggtgaacataaggataggatagagaggcagtggggaaacctcttaggagaggggcaacacaaatgtgatgaatgtgggaagagctttactcagagctcaggtctcattcgacatcaaagaattcatactggagaaagaccttatgaatgtaatgaatgtgggaaagccttcagtcgaagttctggtctttttaatcaccgaggaatccacaatatacagaaacggtaccactgcaaggagtgtgggaaggtcttcagtcagagtgcgggtcttatccagcatcagagaatccacaaaggagaaaagccgtatcagtgcagccagtgcagtaagagctacagtcggcgttcatttctcattgaacatcagagaagccacacaggggagcgacctcaccagtgcattgaatgtgggaaaagctttaatcgacactgcaacctcattcgccatcagaagatccacacagtggctgagctggtctacccaactttcttgtacaaagtggttgatatcggtaagcctatccctaaccctctcctcggtctcgattctacgtagtaatgaactagtccgtaacttgaaagtatttcgatttcttggctttatatatcttgtggaaaggacgactgtgttaggacgtttgtcagcat

SEQ ID NO: 3180 - DNA, 1445 bp, Homo sapiens
  source 1..1445: mol_type = genomic DNA
atcgattgatcaacaagtttgtacaaaaaagttggcaccatgataggcatgttggaaagtcttcagcatgaatcagatctccttcagcatgatcaaattcatactggagagaaaccttatgaatgtaatgaatgtagaaaaacttttagcctgaagcaaaaccttgtagagcataagaaaatgcatactggagagaaatctcatgaatgcactgaatgtggtaaagtgtgctctcgagtctcatctcttactctacaccttagaagtcacacaggaaagaaggcatataaatgtaataaatgtggaaaagccttcagccagaaggaaaacttcctttctcatcagaaacatcacactggagagaaaccttatgaatgtgaaaaagtttctattcagatgccaaccatcatcagacaccagaaaaatcatacaggaaccaaaccctatgcatgtaaggaatgtggcaaagcctttaacggcaaagcatatctcactgagcatgagaaaattcatactggagaaaaaccatttgaatgtaatcagtgtggaagagccttcagccagaagcaatacctcattaaacatcagaacatccatactggaaagaagccctttaaatgtagtgagtgtggaaaagcttttagccagaaggaaaacctcattatacatcagagaatccatactggagagaaaccttatgaatgtaaagggtgtgggaaagctttcattcagaagtcaagcctcattagacaccagagaagtcacacaggagagaaaccttatacgtgtaaggaatgtgggaaagccttcagtggcaagtcaaatctcacagagcatgagaaaattcatattggagagaaaccctacaaatgtaatgaatgtggaacaatcttcaggcagaagcaatacctcattaaacatcacaatattcatacaggagagaaaccctatgaatgtaataaatgtggaaaagccttctctcgaatcacatcacttattgtacatgtgagaattcatacaggtgataagccttatgagtgtaaggtctgtgggaaagccttctgtcaaagctcatctcttactgtgcacatgagaagccatacaggtgagaaaccctatggttgtaatgaatgtgggaaagccttttctcagttctcaacccttgctctgcacatgagaatccatactggtgaaaaaccttatcagtgtagtgaatgtgggaaagctttcagccaaaagtcacatcacattagacaccagagaattcatactcatttgccaactttcttgtacaaagtggttgatatcggtaagcctatccctaaccctctcctcggtctcgattctacgtagtaatgaactagtccgtaacttgaaagtatttcgatttcttggctttatatatcttgtggaaaggacgatgccctaatgtttggacctagttt

SEQ ID NO: 3181 - DNA, 1445 bp, Homo sapiens
  source 1..1445: mol_type = genomic DNA
atcgattgatcaacaagtttgtacaaaaaagttggcaccatgataggcatgttggaaagtcttcagcatgaatcagatctccttcagcatgatcaaattcatactggagagaaaccttatgaatgtaatgaatgtagaaaaacttttagcctgaagcaaaaccttgtagagcataagaaaatgcatactggagagaaatctcatgaatgcactgaatgtggtaaagtgtgctctcgagtctcatctcttactctacaccttagaagtcacacaggaaagaaggcatataaatgtaataaatgtggaaaagccttcagccagaaggaaaacttcctttctcatcagaaacatcacactggagagaaaccttatgaatgtgaaaaagtttctattcagatgccaaccatcatcagacaccagaaaaatcatacaggaaccaaaccctatgcatgtaaggaatgtggcaaagcctttaacggcaaagcatatctcactgagcatgagaaaattcatactggagaaaaaccatttgaatgtaatcagtgtggaagagccttcagccagaagcaatacctcattaaacatcagaacatccatactggaaagaagccctttaaatgtagtgagtgtggaaaagcttttagccagaaggaaaacctcattatacatcagagaatccatactggagagaaaccttatgaatgtaaagggtgtgggaaagctttcattcagaagtcaagcctcattagacaccagagaagtcacacaggagagaaaccttatacgtgtaaggaatgtgggaaagccttcagtggcaagtcaaatctcacagagcatgagaaaattcatattggagagaaaccctacaaatgtaatgaatgtggaacaatcttcaggcagaagcaatacctcattaaacatcacaatattcatacaggagagaaaccctatgaatgtaataaatgtggaaaagccttctctcgaatcacatcacttattgtacatgtgagaattcatacaggtgataagccttatgagtgtaaggtctgtgggaaagccttctgtcaaagctcatctcttactgtgcatatgagaagccatacaggtgagaaaccctatggttgtaatgaatgtgggaaagccttttctcagttctcaacccttgctctgcacatgagaatccatactggtgaaaaaccttatcagtgtagtgaatgtgggaaagctttcagccaaaagtcgcatcacattagacaccagagaattcatacccatttgccaactttcttgtacaaagtggttgatatcggtaagcctatccctaaccctctcctcggtctcgattctacgtagtaatgaactagtccgtaacttgaaagtatttcgatttcttggctttatatatcttgtggaaaggacgaaaagaccttgcattataacttttc

SEQ ID NO: 3182 - DNA, 1976 bp, Homo sapiens
  source 1..1976: mol_type = genomic DNA
atcgattgatcaacaagtttgtacaaaaaagttggcatggcggccccctatcccggcagtggcggcggaagcgaggtcaaatgcgtgggaggccgcggcgccagcgtcccctgggactttctacccgggctgatggtcaaggcgccgtccggaccgtgcctgcaggcgcagcgcaaggagaagtcccggaacgcggcgcgctcgcggcgcgggaaggagaacctggagttcttcgagctggccaagcttctcccgctgcccggcgccatctccagccagctggacaaggcttccatcgtgcgcctcagcgtcacctacctccgcctgcgccggttcgccgctctgggggcgccgccctgggggctgagagccgcggggccgccagctggcctcgccccaggccgccgcggccccgcagcgctggtctccgaagtcttcgagcagcacctgggaggtcacatcttgcagtccctggatggctttgtgttcgccttgaaccaggaaggaaaattcctctacatctcagagacagtctccatctatctgggtctctcacaggtggagatgacgggcagcagcgtcttcgactacattcaccctggggaccactcagaggtgctggagcaactggggctgcggacgccgacgcccggccccccaaccccgccctccgtctcctcttcctcctcctcttcctcttcgcttgcagatacccccgagatcgaggccagcctcaccaaggtgcccccctcctccctggtccaggagcgctccttctttgtccgcatgaaatccacgctcaccaagagggggctgcacgtcaaggcctcagggtacaaggtcatccacgtgactgggcgccttcgggcccacgccctgggccttgtggccctcgggcacacgttgcccccggcccccctggctgagctgccactccatggacacatgatcgtcttccgtctcagcctgggtctcaccatccttgcttgtgagagcagagtcagcgaccacatggacctggggccctcagagctggtgggccgcagctgctaccagtttgtccacggacaggacgccacgaggatccgccagagccacgtggacttgctggacaagggtcaggtgatgactggttactaccgttggctgcagcgtgccgggggcttcgtgtggctgcagtctgtggccacagtggctgggagcgggaagagccccggggagcaccatgtgctttgggtcagccacgtgctcagccaagccgagggtggccaaactcctttggatgccttccagcttccagccagcgtggcctgtgaggaggcatccagcccggggccagagcccacagagccggagcctccgacggaagggaagcaggctgccccagcggagaacgaggccccccagacccagggcaaacgcatcaaagtggagcccggcccgagggaaaccaaaggctccgaggacagtggcgacgaggatccctccagccacccggccacaccgaggcccgagttcacctctgtcatccgggcaggggtcctgaagcaggatccggtgcggccatggggcctggcgcctcccggggaccccccgcccaccctcctgcacgcgggcttcctgccgccggtggtgcggggcctgtgcacacccggcaccatccgctacggccccgcggagctgggcctggtgtacccgcacctgcagaggctgggtccgggccccgcgctcccggaggccttttacccgcccctgggcctgccctacccggggcccgcgggcaccaggctgccgcggaagggggactgcccaactttcttgtacaaagtggttgatatcggtaagcctatccctaaccctctcctcggtctcgattctacgtagtaatgaactagtccgtaacttgaaagtatttcgatttcttggctttatatatcttgtggaaaggacgaatctcgcgccaccctaagaatcaa

SEQ ID NO: 3183 - DNA, 2894 bp, Homo sapiens
  source 1..2894: mol_type = genomic DNA
atcgattgatcaacaagtttgtacaaaaaagttggcatgactgaggaatcagaggagacagtcctgtacattgagcaccgctatgtctgctctgagtgcaaccagctgtatggatcactggaagaggtgcttatgcaccaaaactcccacgtgccccagcagcactttgagctggtgggcgtggctgatcccggagtcactgtggccacagacacagcttcaggcacgggcctctatcagacccttgtgcaggagagccagtaccagtgcctggagtgtggtcaactgctgatgtcacccagccagctcctggagcaccaggagctgcacctgaagatgatggcaccccaggaggcagtgccagctgagccatcacctaaggcaccacccctgagctccagcaccatccactacgagtgtgtggattgcaaggctctctttgccagccaggagctctggctgaaccaccggcagacgcacctccgggccacacccaccaaggctcctgcccctgttgtcctggggtccccagttgttctagggcctcctgtgggccaggcccgagtggctgtggagcactcataccgaaaggcagaagagggtggggaaggggcgactgtcccatctgccgctgccaccaccactgaggtagtgactgaggtggagctgctcctctacaagtgctctgagtgctcccagctcttccagctgccggcggatttcctggagcaccaggccactcacttccctgctcctgtacccgagtctcaggagcctgccttacagcaggaggtgcaggcctcgtcacctgcagaggtgcctgtgtctcagcctgaccccttgccagcttctgaccacagttacgagctgcgcaatggtgaagccattgggcgggatcgccgggggcgcagggcccggaggaacaacagtggagaagcaggcggggcagccacacaggagctcttctgctcagcctgtgaccagctctttctctcaccccaccagctacagcagcacctgcggagtcaccgggagggcgtctttaagtgccccctgtgcagtcgtgtcttccctagcccttccagtctggaccagcaccttggagaccatagcagcgagtcacacttcctgtgtgtagactgtggcctggccttcggcacagaggccctcctcctggcccaccggcgagcccacaccccgaatcctctgcattcatgtccatgtgggaagacctttgtcaaccttaccaagttcctttatcaccggcgtactcatggggtagggggtgtccctctgcccacaacaccagtcccaccagaggaacctgtcattggtttccctgagccagccccagcagagactggagagccagaggcccctgagccccctgtgtctgaggagacctcagcagggcccgctgccccaggcacctaccgctgcctcctgtgcagccgtgaatttggaaaggccttgcagctgacccggcaccaacgttttgtgcatcggctggagcggcgccataaatgcagcatttgtggcaagatgttcaagaagaagtctcacgtgcgtaaccacctgcgcacacacacaggggagcggcccttcccctgccctgactgctccaagcccttcaactcacctgccaacctggcccgccaccggctcacacacacaggagagcggccctaccggtgtggggactgtggcaaggctttcacgcaaagctccacactgaggcagcaccgcttggtgcatgcccagcacttcccctaccgctgccaggaatgtggggtgcgttttcaccgtccttaccgcctgctcatgcaccgctaccatcacacaggtgaatacccctacaagtgtcgcgagtgcccccgctccttcttgctgcgtcggctgctggaggtgcaccagctcgtggtccatgccgggcgccagccccaccgctgcccatcctgtggggctgccttcccctcctcactgcggctccgggagcaccgctgtgcagccgctgctgcccaggccccacggcgctttgagtgtggcacctgtggcaagaaagtgggctcagctgctcgactgcaggcacacgaggcggcccatgcagctgctgggcctggagaggtcctggctaaggagccccctgcccctcgagccccacgggccactcgtgcaccagttgcctctccagcagcccttggaagcactgctacagcatcccctgcggcccctgcccgccgccggggtctagagtgcagcgagtgcaagaagctgttcagcacagagacgtcactgcaggtgcaccggcgcatccacacaggtgagcggccatacccatgtccagactgtggcaaagcgttccgtcagagtacccacctgaaagaccaccggcgcctgcacacaggtgagcggccctttgcctgtgaagtgtgtggcaaggcctttgccatctccatgcgcctggcagaacatcgccgcatccacacaggcgaacgaccctactcctgccctgactgtggcaagagctaccgctccttctccaacctctggaagcaccgcaagacccatcagcagcagcatcaggcagctgtgcggcagcagctggcagaggcggaggctgccgttggcctggccgtcatggagactgctgtggaggcgctacccctggtggaagccattgagatctaccctctggccgaggctgagggggtccagatcagtggctgcccaactttcttgtacaaagtggttgatatcggtaagcctatccctaaccctctcctcggtctcgattctacgtagtaatgaactagtccgtaacttgaaagtatttcgatttcttggctttatatatcttgtggaaaggacgaatacatccctgattttaatcacat

SEQ ID NO: 3184 - DNA, 1790 bp, Homo sapiens
  source 1..1790: mol_type = genomic DNA
atcgattgatcaacaagtttgtacaaaaaagttggcaccatgtaccaaccagaagacgacaacaacagtgacgtgaccagtgacgacgacatgacccggaacagaagagagtcctcaccacctcactcagtccattctttcagtggtgaccgggactgggaccggaggggcagaagcagagacatggagccacgagaccgctggtcccacaccaggaacccaagaagcaggatgcctccgcgggatctttcccttcctgtggtggcgaaaacaagctttgaaatggacagagaggacgacagggactccagggcttatgagtcccgatctcaggatgctgaatcataccaaaatgtggtggacctcgctgaggacaggaaacctcacaacacaatccaggacaacatggaaaactacaggaagctgctctccctcggtttccttgctcaggactctgtccctgcagaaaagaggaacacagagatgttagacaatctgccatctgctgggtcccagttcccggacttcaaacacttaggaacatttctggtgtttgaggagttggtgaccttcgaggatgtgcttgtggacttcagcccagaggaacttagctcccttagtgctgctcagagaaacctctacagggaggtgatgctggagaattaccggaacctggtctccctggggcaccagttctctaaacctgacattatctcacgcctggaagaggaggaatcatatgcaatggagacagacagcagacatacagtgatttgtcaaggagagtctcatgatgatccattggaaccacaccagggcaaccaagagaaacttttgactcctataacaatgaatgaccccaagaccctcactccggaaagaagctatggcagtgatgaatttgagagaagctctaatcttagtaaacaatcaaaggatcctctaggaaaggatccccaggaaggcactgctcctggaatatgtacgagtccccagtcagcatcccaagagaacaaacacaacagatgtgaattttgcaaacgaacctttagtacgcaagtagcccttaggagacacgaacggatccatactgggaagaaaccctatgaatgtaaacagtgtgctgaagccttctatctcatgccacacctcaacagacatcagaagacccattctggtaggaagacttctggctgcaatgaaggtagaaagccttccgtccagtgtgcgaatctctgtgaacgtgtaagaattcacagtcaggaggactactttgaatgttttcagtgcggcaaagcttttctccagaatgtgcatcttcttcaacatctcaaagcccatgaggcagcaagagtccttcctcctgggttgtcccacagcaagacatacttaattcgttatcagcggaaacatgactacgttggagagagagcctgccagtgttgtgactgtggcagagtcttcagtcggaattcatatctcattcagcattatagaactcacactcaagagaggccttaccagtgtcagctatgtgggaaatgtttcggccgaccctcatacctcactcaacattatcaactccattctcaagagaaaactgttgagtgcgatcactgtttgccaactttcttgtacaaagtggttgatatcggtaagcctatccctaaccctctcctcggtctcgattctacgtagtaatgaactagtccgtaacttgaaagtatttcgatttcttggctttatatatcttgtggaaaggacgataggactactaaaccggaaatgat

SEQ ID NO: 3185 - DNA, 1883 bp, Homo sapiens
  source 1..1883: mol_type = genomic DNA
atcgattgatcaacaagtttgtacaaaaaagttggcaccatgcaccgcggcgggcagcctttgaaaaagcggcgcggctcgttcaagatggcggagctcgaccagttgcctgacgagagctcttcagcaaaagcccttgtcagtttaaaagaaggaagcttatctaacacgtggaatgaaaagtacagttctttacagaaaacacctgtttggaaaggcaggaatacaagctctgctgtggaaatgcctttcagaaattcaaaacgaagtcgacttttttctgatgaagatgataggcaaataaatacaaggtcacctaaaagaaaccagagggttgcaatggttccacagaaatttacagcaacaatgtcaacaccagataagaaagcttcacagaagattggttttcgattacgtaatctgctcaagcttcctaaagcacataaatggtgtatatacgagtggttctattcaaatatagataaaccactttttgaaggtgataatgacttctgtgtatgtctaaaggaatcttttcctaatttgaaaacaagaaagttaacaagagtagaatggggaaaaattcggcggcttatgggaaaaccacggagatgttcttctgcattttttgaggaagagagatcagcattaaaacagaaacggcagaaaataaggctcttacaacaaaggaaagttgcagatgtttcacaattcaaagatctcccagatgaaattcctttgcctctggttattggaacgaaagttacagcacgattacgtggtgttcatgatggtttgttcactggacaaatagatgctgtggatactcttaatgctacttatagagtaacttttgataggacagggcttggaacccataccatccctgactatgaagttctcagtaatgaacctcatgagacaatgccaattgctgcctttggacaaaaacagcggccttctcgattttttatgaccccaccacggttacattatactcctcctctccagtcaccaattatagataatgatcctttattaggacagtcgccgtggagaagtaaaatttctggctctgacactgaaacattaggtggttttccagtagaatttcttatccaagtgaccagattatcaaaaattctcatgattaaaaaggaacatatcaagaaattaagggaaatgaacacagaagcagaaaaattgaaatcatattccatgcccatcagcattgaatttcagcggagatatgcaacaattgttctggagcttgaacagctgaacaaggacctaaacaaagttttgcataaagttcaacagtattgctatgagcttgctccagaccaggggctccagcctgcagatcagccaacagatatgagacgcaggtgtgaggaagaagcacaggaaattgttcggcatgcaaattcctcaacaggacagccctgcgttgaaaatgaaaatctgacagacttaatttccaggcttacagctattttgttacaaattaagtgtctagcagaaggaggagacctgaattcctttgaattcaaatcacttacagactcattaaatgatatcaagagtacaatagacgcttctaatatcagttgctttcagaataatgtagaaatccatgttgcacatattcagagtggcctgagccagatgggaaacttacatgcctttgcagcaaataacaccaacagagacttgccaactttcttgtacaaagtggttgatatcggtaagcctatccctaaccctctcctcggtctcgattctacgtagtaatgaactagtccgtaacttgaaagtatttcgatttcttggctttatatatcttgtggaaaggacgaagccgcgagtgttgagatgacaat

SEQ ID NO: 3186 - DNA, 1802 bp, Homo sapiens
  source 1..1802: mol_type = genomic DNA
atcgattgatcaacaagtttgtacaaaaaagttggcaccatggaggctccagcccagaaggctgggcagggaggactccccaaggccgatgcccagggtgcctccggggcccgggagaagaggcccgaggagccgaggcccctcgaagaggaccgagctgggagccgccccactcaaaagggggacctgcgtggagcggcgggcggtaggacgactcccccaggcgggggctcccggggctgcagcctcggggtgagccccggcccggggacccggcacagcgccgggaccagacccctcgtgcgggagccgtgcggccccacctcttctcagaaccctgagctggttatccccgaggggctgcaagcccgggagggcccctgtaggagcccagcgcgtggcggggactgcagcaggaactcctgcctggcgtggcatcgcggggcgcccgctggggagacgccacccgtgtgtgacccctgtccggagcggatccagaaccacccccggactcaactgtgtgaggtccacacggactgttggccgtgccaaccagggactggcgctccgacctgcccgaggaccccaaagccgacctcccgcgggaggaaccccttggtggagcagccccgggcttgcgcgtgcggcgaggcctttgcgtggagggccctgcggatcccccaggagaggctgcaggcgacggaggagccccgtccgtgtgcccggtgcgggaagcgcttccgccccaaccagcagcagcaggcgggcaagagtcccccagtgtgtcctgagtgcggccaaacctcgcgacctcgccctattgtccccgaccccccggcccagcgactgtacgcttgcgacgagtgcggcaaggccttcacgcgcacctccagcctgctgcagcaccagcgcatccacacgggcgagcggccctacgagtgcgccgagtgcggcaaggccttcgtgcgctgctccggcctgtaccgccaccagaagacgcactcggccgagcgccaccggcgtggccccgtcctggcgcggcgcgccttccggctggggtgcccgccctgcggggactacagcgagcggagtccccgacgggggtcgggagccggggagaagccgtacgagtgcgccgactgcgccaaggccttcgggctgttctcgcacctcgtggagcaccggcgcgtgcacaccggcgagaagccctacgcgtgccccgagtgcggcaaggccttcaaccagcgctcgaacctgagccggcaccagcgcactcacagcagcgccaagccctacgcgtgcccactgtgcgaaaaggccttcaagggccgctcgggcctggtgcaacaccagcgcgcgcacaccggcgagcggccctatggctgctccgagtgcggaaagaccttccgcggctgctccgagctgcgccagcacgagcgcctgcactcgggcgagaagccctacatctgccgcgactgcggcaaggccttcgtgcgcaactgcagcctggtgcgccacctgcgcacgcacacgggcgagcggccctacgcgtgcggagattgcggccgcgccttcagccaacgctccaacctcaacgagcaccggaagcggcacgggggccgcgccgcgcctttgccaactttcttgtacaaagtggttgatatcggtaagcctatccctaaccctctcctcggtctcgattctacgtagtaatgaactagtccgtaacttgaaagtatttcgatttcttggctttatatatcttgtggaaaggacgacttccatcaccacagtttacctcc

SEQ ID NO: 3187 - DNA, 1916 bp, Homo sapiens
  source 1..1916: mol_type = genomic DNA
atcgattgatcaacaagtttgtacaaaaaagttggcatggagagcttggggctgcacacggtgacccttagtgatgggacaacagcctacgtccagcaagctgtcaaaggagagaagcttcttgaagggcaggtgatccagctcgaggatgggaccaccgcatacattcaccaggtgacggtacagaaagaagctctctcctttgaggatggtcagcctgtgcagctggaagatggcagcatggcttacatacaccgcacacccagagaaggctatgaccccagcaccctggaagccgtccaactggaagatggctccactgcctacattcaccaccctgtggctgtgccatcggagagcaccatcctggccgtacagacagaggtgggcttggaggacctggcagcagaggatgatgagggcttcagtgcagacgcagtggtggccctggagcagtatgccagcaaggttcttcatgacagccagattccccgtaatggaaaagggcagcaagttggagacagagcattccgctgtggctacaagggctgtgggcgtctctacaccaccgctcatcacttaaaggtgcatgaacgagctcatacaggtgaccgtccatacagatgtgacttccccagctgtggaaaggcctttgccacaggctatggactgaagagccacgttcgtacccacactggtgagaaaccatacaagtgcccagaggagctgtgcagcaaggccttcaagacctcaggagacctgcagaagcatgtccgtacccacactggtgaacgcccgttccagtgcccttttgagggctgtggccgctccttcaccacatctaacatccgcaaggtacatgtgcgcacccacacaggcgagaggccctacacctgcccggagccccactgtggccgcggcttcaccagcgccaccaactataagaatcacgtgcgcatccacacaggggagaagccatacgtttgcacggtgccaggctgcgggaaacgcttcaccgagtactcgagcttgtataagcaccacgtggtgcacacacactgcaagccctacacctgcagcacctgcggcaagacctaccggcagacctccaccttggccatgcacaagcgcagtgcccatggcgagctggaggccacggaggagagtgagcaggccctctatgagcagcagcaacttgaggccgcctctgcagccgaggagagtccgccacccaaacgaccccggatagcttacctttcggaggtgaaggaagagagagatgacatcccagcccaggtggcgatggtgactgaagaagatggggccccccaggtggctctgatcactcaggatggtgcccagcaggtcagcctgtccccggaagacctgcaggccctggggagtgccatcagtatggtcacccagcacggcagcaccaccctcaccatccccagtcctgatgccgacctggccacatctggcacacatacagtcaccatggtcagcgccgatggcacccagacgcagcccgtcacaatcattacctctggggctgtggtggctgaggactcaagtgtagcatctcttcgtcatcaacaggtggcactgttggccacagccaacggaacgcacattgcagtgcagctggaggaacagcagaccttagaggaggccatcaatgtggccactgcggccatgcagcaaggggctgtgaccctggagacaacagtgtcggagagtggctgctgcccaactttcttgtacaaagtggttgatatcggtaagcctatccctaaccctctcctcggtctcgattctacgtagtaatgaactagtccgtaacttgaaagtatttcgatttcttggctttatatatcttgtggaaaggacgaggaatgatgaaactacctcacagc

SEQ ID NO: 3188 - DNA, 1991 bp, Homo sapiens
  source 1..1991: mol_type = genomic DNA
atcgattgatcaacaagtttgtacaaaaaagttggcatgagagagaccttggaggccctcagctccctgggattctctgtgggacagccagagatggccccccaaagtgagcccagggaaggatcccataatgcccaggagcagatgtcctcttctagggaagagagagcactgggggtgtgctcagggcacgaggcccctacaccggaggaaggtgcccacacagaacaagccgaggctccctgcagaggccaggcgtgctcagcacagaaggctcagcctgtgggtacctgcccaggagaggagtggatgattcggaaggtgaaggtggaggacgaagatcaggaggcagaagaggaggtcgaatggccccagcatctatcgttacttcccagcccctttcccgcgcctgacctggggcatctggctgccgcgtacaaactggagccaggggccccgggggcactgagtgggctcgcgctgtctgggtggggtccgatgccggagaagccctacggctgcggggagtgtgagcggcgcttccgggaccagctgacgttgcgactgcaccagcggctgcaccggggcgagggcccctgcgcctgcccggactgcggccgcagcttcacgcagcgcgcccacatgctactgcatcagcgcagccaccgcggcgagcggcctttcccgtgctccgagtgcgacaagcgcttcagcaagaaggcccatctgacccgccacctgcgcacgcacacgggcgagcggccctacccgtgcgcggagtgcggcaagcgcttcagccagaagatccacctgggctcgcaccaaaagacccacaccggcgagcggcccttcccctgcacggaatgcgagaagcgctttcgcaagaagacgcacttgattcggcaccagcgcatccatacgggcgagaggccctaccagtgcgcacagtgcgcacgcagcttcacgcacaagcagcacttggtgcggcaccaaagggtgcaccagacggccggcccggccaggccctctcccgactcgtccgcttctcctcattccactgccccgtccccgaccccatcctttcccgggccaaagcctttcgcgtgctccgactgcggcttgagcttcggctggaaaaagaacctcgccacgcaccagtgtctgcaccgcagcgagggtcgcccctttgggtgcgatgagtgcgcactgggcgccaccgtggatgcccccgccgccaagcccctggccagcgcgcctggcggaccgggctgcggcccaggatccgatcccgtggtgccccagcgcgccccctcgggcgagcggtccttcttctgcccggactgcgggcgcggcttctcccatgggcagcacctggcgcggcacccgcgcgtgcacacgggcgaacggcccttcgcctgcacgcagtgtgaccgccgcttcggctcgcggcctaatctggtcgcccactccagggcccacagcggcgccaggcctttcgcctgcgctcagtgcggccgccgcttcagccgcaagtcgcacctgggccgccaccaggcggtgcacactggcagccgcccccacgcctgcgccgtctgcgcccgcagcttcagctccaaaaccaacctagtccgccaccaggcgatccacacaggctcccgccccttctcctgcccgcagtgcggaaagagcttcagccgcaagacccacctggtgcggcaccagctcattcacggcgaagccgcccacgcggccccggacgccgcccttgcggccccagcctggtccgctccccccgaggtggcgccgcccccgctcttcttctgcccaactttcttgtacaaagtggttgatatcggtaagcctatccctaaccctctcctcggtctcgattctacgtagtaatgaactagtccgtaacttgaaagtatttcgatttcttggctttatatatcttgtggaaaggacgagaggttatgtattctaggagatgg

SEQ ID NO: 3189 - DNA, 2039 bp, Homo sapiens
  source 1..2039: mol_type = genomic DNA
atcgattgatcaacaagtttgtacaaaaaagttggcatgccgcgaaggaagaggaatgcaggcagtagttcagatggaaccgaagattccgatttttctacagatctcgagcacacagacagttcagaaagtgatggcacatcccgacgatctgctcgagtcacccgctcctcagccaggctaagccagagttctcaagattccagtcctgttcgaaatctgcagtcttttggcactgaggagcctgcttactctaccagaagagtgacccgtagtcagcagcagcctaccccagtgacaccgaaaaaataccctcttcggcagactcgttcatctggttcagaaactgagcaagtggttgatttttcagatagagaaactaaaaatacagctgatcatgatgagtcaccgcctcgaactccaactggaaatgcgccttcttctgagtctgacatagacatctccagccccaatgtatctcacgatgagagcattgccaaggacatgtccctgaaggactcaggcagtgatctctctcatcgccccaagcgccgtcgcttccatgaaagctacaacttcaatatgaagtgtcctacaccaggctgtaactctctaggacaccttacaggaaaacatgagagacatttctccatctcaggatgcccactgtatcataacctctcagctgacgaatgcaaggtgagagcacagagccgggataagcagatagaagaaaggatgctgtctcacaggcaagatgacaacaacaggcatgcaaccaggcaccaggcaccaacggagaggcagcttcgatataaggaaaaagtggctgaactcaggaagaaaagaaattctggactgagcaaagaacagaaagagaaatatatggaacacagacagacctatgggaacacacgggaacctcttttagaaaacctgacaagcgagtatgacttggatcttttccgaagagcacaagcccgggcttcagaggatttggagaagttaaggctgcaaggccaaatcacagagggaagcaacatgattaaaacaattgcttttggccgctatgagcttgatacctggtaccattctccatatcctgaagaatatgcacggctgggacgtctctatatgtgtgaattctgtttaaaatatatgaagagccaaacgatactccgccggcacatggccaaatgtgtgtggaaacacccacctggtgatgagatatatcgcaaaggttcaatctctgtgtttgaagtggatggcaagaaaaacaagatctactgccaaaacctgtgcctgttggccaaactttttctggaccacaagacattatattatgatgtggagcccttcctgttctatgttatgacagaggcggacaacactggctgtcacctgattggatatttttctaaggaaaagaattcattcctcaactacaacgtctcctgtatccttactatgcctcagtacatgagacagggctatggcaagatgcttattgatttcagttatttgctttccaaagtcgaagaaaaagttggctccccagaacgtccactctcagatctggggcttataagctatcgcagttactggaaagaagtacttctccgctacctgcataattttcaaggcaaagagatttctatcaaagaaatcagtcaggagacggctgtgaatcctgtggacattgtcagcactctgcaagcccttcagatgctcaaatactggaagggaaaacacctagttttaaagagacaggacctgattgatgagtggatagccaaagaggccaaaaggtccaactccaataaaaccatggatcccagctgcttaaaatggacccctcccaagggcacttacccaactttcttgtacaaagtggttgatatcggtaagcctatccctaaccctctcctcggtctcgattctacgtagtaatgaactagcccgtaacttgaaagtatttcgatttcttggctttatatatcttgtggaaaggacgatatgttgacttccaatgaaaggct

SEQ ID NO: 3190 - DNA, 1691 bp, Homo sapiens
  source 1..1691: mol_type = genomic DNA
atcgattgatcaacaagtttgtacaaaaaagttggcatggcggagtcggcgcctgctcggcacaggagaaaacgacgctccacacctttaacttcttccacacttccttcacaagcaacagagaaaagctcctattttcagaccaccgagatttcactctggacggtggtggccgctattcaggctgtggagaagaagatggagtcccaggctgcccggctacagagcctggaggggcgcacggggacagccgagaagaagctggctgactgcgagaagatggccgtggagttcgggaaccagctggagggcaagtgggccgtgctggggaccctgctgcaggagtatgggctactgcagaggcggctggagaacgtggagaacctgctgcgcaacaggaacttctggatcctgcggctgcccccgggcagcaagggggaggcccccaaggtgtccaggtcactggagaatgatggcgtctgtttcaccgagcaggaatgggagaatctggaggattggcagaaggagctctacagaaacgtgatggagagtaactatgagacactggtctctctgaaggtccttggccagacagagggagaagcggagttgggtacagagatgctgggtgacttggaagaggaaggtcctggtggtgcccacccagcaggtggggtcatgatcaaacaggagctacagtatacacaggaaggccctgcggatcttcctggagagttctcatgcattgctgaagagcaggctttcctgagcccagagcagaccgaactctggggtggtcagggcagttctgtcctcttggaaacaggtcctggggactctactctagaggagcctgttggtagtagagttcctagcagcagcagaactgtgggctgcccgaagcagaaatctcataggcaggtacagctggaccaggaatgtgggcagggcctgaagctgaaaaaggacacttcccgcccctacgaatgttctgagtgtgagatcaccttccgctataagcagcagctggccacacatctgcgcagccactctgggtgggggtcttgtacacctgaggagccagaggagagccttaggcccaggccacggctgaaaccacagaccaaaaaggccaagctgcatcagtgtgatgtgtgcctgaggagcttcagctgcaaggtgagcctggtgacccatcagcgttgccacctgcaggaggggcccagtgccggccagcatgtccaagagaggttctcacccaacagcctggttgccctgcctggccacatcccttggaggaaaagccggagttccctcatctgtggttactgtggcaagagcttcagtcacccatctgacttggtgcggcaccagcgcatccacacgggtgagcggccctacagctgcactgagtgtgagaagagctttgtccagaagcagcacctcctgcagcaccagaagatccaccagcgggagcggggtgggctggccctggagcccggaaggcccaatggcctgctttacccaactttcttgtacaaagtggttgatatcggtaagcctatccctaaccctctcctcggtctcgattctacgtagtaatgaactagtccgtaacttgaaagtatttcgatttcttggctttatatatcttgtggaaaggacgattctatcagtaccgactgtttgtc

SEQ ID NO: 3191 - DNA, 1970 bp, Homo sapiens
  source 1..1970: mol_type = genomic DNA
atcgattgatcaacaagtttgtacaaaaaagttggcatgggaggccttgagaagaagaagtatgaacgaggctcggccaccaactacatcacccggaacaaagcccggaagaagctccagctgagcttggctgactttaggcggctgtgcattctgaagggcatttatccccatgaacccaaacacaagaagaaggttaacaagggttctacagcagcccgaacgttttaccttatcaaagacatcaggtttctcctccacgaacccattgtcaacaagttccgtgaatacaaggtgttcgtccggaagctccggaaggcttatgggaagagcgagtggaacactgtagagcgtttaaaggacaataagcccaactacaaactcgaccacatcatcaaggaacggtatcccacgttcatcgatgccctgcgggacctggacgatgccctctccatgtgcttcctgttttccaccttcccgcggactggcaagtgccacgtgcagaccattcagctgtgccgccggctcactgtggagttcatgcactacattatcgctgcccgtgccctgcgcaaggtcttcctgtccatcaaaggcatttactaccaggccgaggtactggggcagcccatcgtgtggatcactccctatgccttctcccatgaccacccgacagacgtggactacagggtcatggccaccttcaccgagttctacaccacgctgctgggctttgtcaacttccgcctttaccagttgctcaacctccactatcccccgaagctcgagggtcaggcccaagcagaggcaaaggccggtgagggcacctacgcgttggactccgagagttgtatggagaaactggcagccctcagtgccagcctggcccgcgtggtggtgcctgccacagaggaggaggccgaggtggatgagtttcccaccgatggggagatgtcagcgcaggaggaagaccgcaggaaggagctggaggcgcaggagaagcacaagaagctttttgagggcctgaagttcttcctgaaccgagaggtgccccgtgaggccctggccttcatcatcaggagttttggtggggaagtgtcctgggacaaatctttgtgcattggggccacctatgacgtcacagactcccgcatcacccatcagattgtcgaccggcctgggcagcagacctcagtcattggcaggtgctacgtgcagccccagtgggtgtttgactcagtgaacgccaggctccttctccccgtggcagagtacttctctggggtgcagctgcccccacacctttcaccctttgtgaccgagaaggaaggagattacgttccacctgagaagctgaagctgctggctctgcagcggggagaggacccaggaaacctgaatgagtcagaagaggaggaggaagaggacgacaacaacgaaggtgatggtgatgaagagggagaaaatgaggaggaggaggaagatgcagaggctggttcagaaaaggaggaagaggcccggctggcagccctggaagagcagaggatggaggggaagaagcccagggtgatggcaggcaccttgaagctggaggataagcagcggctggcccaggaggaggagagtgaggccaagcgcctggccattatgatgatgaagaagcgggagaagtacctgtaccagaagatcatgtttggcaagaggcgaaaaatccgagaggccaacaagctggcggagaagcggaaagcccacgatgaggcggtgaggtctgagaagaaggccaagaaggcaaggccggagtgcccaactttcttgtacaaagtggttgatatcggtaagcctatccctaaccctctcctcggtctcgattctacgtagtaatgaactagtccgtaacttgaaagtatttcgatttcttggctttatatatcttgtggaaaggacgagctgctaaccaggactggcgtctt

SEQ ID NO: 3192 - DNA, 1706 bp, Homo sapiens
  source 1..1706: mol_type = genomic DNA
atcgattgatcaacaagtttgtacaaaaaagttggcatggcgccaccttcggctccgctccctgcgcagggaccaggaaaggccagacccagtcggaaaaggggcaggaggccgagggctctgaagttcgtggacgtggccgtgtacttctccccggaggagtggggctgcctgcggcccgcgcagagggccctgtaccgggacgtgatgcgggagacctacggtcacctgggcgcgctcgggtgcgcaggtcccaaaccagccctcatctcctggttggaacgaaacaccgatgactgggaaccggctgctctagatccgcaggagtacccgagagggctaacagtccagagaaaaagcagaaccagaaagaagaatggggagaaggaagtattcccgcctaaggaggcaccccgaaaggggaagcgaggccggaggcccagcaaaccccgactgattcctaggcagacgtccgggggccccatctgccctgactgcggctgtaccttccctgatcatcaggccctggagagccacaagtgcgcccagaatctaaaaaagccttacccttgcccagactgtgggcgccgcttttcctatccatccctgctggtcagtcaccggcgggcacactccggcgagtgcccctatgtttgtgaccagtgtggcaaacgtttctcccagcgcaagaacctctcccagcaccaggtcatccatacaggggagaagccctatcactgccctgactgtggtcgctgcttccggaggagccggtccttggccaatcaccggaccacacacacaggtgaaaaaccccaccagtgccctagctgtggacgtcgcttcgcctacccctccctgctagccatccaccagcgtacacacacgggagagaagccctacacttgcctcgagtgcaaccgccgcttccgccagcgcacggccctcgtcatccaccagcgcatccacacgggcgagaagccctacccgtgcccggactgcgagcggcgcttctcctcctcctctcgcctggtcagtcaccggcgtgtgcactctggggagcgtccctatgcctgcgagcactgtgaggcccgcttctcccagcgcagcacgctgctccagcaccagctcttgcacaccggagagaagccctacccctgcccagactgtgggcgtgccttccggcggagcggctccctggccatccatcgcagcacgcacacagaggagaagctgcacgcctgcgacgactgtggtcgccgctttgcctacccctcactgctggccagccaccggcgcgtgcactcgggcgagcggccctatgcctgcgacctttgctccaagcgttttgctcagtggagccacctggcccagcaccagctgctgcacacgggggagaagcctttcccctgcctcgagtgtggccggtgcttccgccagaggtggtctctggctgtccacaagtgtagccccaaggccccaaactgtagccctagatctgctatcgggggctccagtcagaggggcaacgcccattacccaactttcttgtacaaagtggttgatatcggtaagcctatccctaaccctctcctcggtctcgattctacgtagtaatgaactagtccgtaacttgaaagtatttcgatttcttggctttatatatcttgtggaaaggacgatttggcatcccccctgtagtgcgc

SEQ ID NO: 3193 - DNA, 1109 bp, Homo sapiens
  source 1..1109: mol_type = genomic DNA
accgccaccatggacaatgcaagaatgaactccttcctggaataccccatacttagcagtggcgactcggggacctgctcagcccgagcctacccctcggaccataggattacaactttccagtcgtgcgcggtcagcgccaacagttgcggcggcgacgaccgcttcctagtgggcaggggggtgcagatcggttcgccccaccaccaccaccaccaccaccatcgccacccccagccggctacctaccagacttccgggaacctgggggtgtcctactcccactcaagttgtggtccaagctatggctcacagaacttcagtgcgccttacagcccctacgcgttaaatcaggaagcagacgtaagtggtgggtacccccagtgcgctcccgctgtttactctggaaatctctcatctcccatggtccagcatcaccaccaccaccagggttatgctgggggcgcggtgggctcgcctcaatacattcaccactcatatggacaggagcaccagagcctggccctggctacgtataataactccttgtcccctctccacgccagccaccaagaagcctgtcgctcccccgcatcggagacatcttctccagcgcagacttttgactggatgaaagtcaaaagaaaccctcccaaaacagggaaagttggagagtacggctacctgggtcaacccaacgcggtgcgcaccaacttcactaccaagcagctcacggaactggagaaggagttccacttcaacaagtacctgacgcgcgcccgcagggtggagatcgctgcatccctgcagctcaacgagacccaagtgaagatctggttccagaaccgccgaatgaagcaaaagaaacgtgagaaggagggtctcttgcccatctctccggccaccccgccaggaaacgacgagaaggccgaggaatcctcagagaagtccagctcttcgccctgcgttccttccccggggtcttctacctcagacactctgactacctcccactagtaatgaactagtccgtaacttgaaagtatttcgatttcttggctttatatatcttgtggaaaggacgatttttcgatcagaactttagctag

SEQ ID NO: 3194 - DNA, 1178 bp, Homo sapiens
  source 1..1178: mol_type = genomic DNA
atcgattgatcaacaagtttgtacaaaaaagttggcatgttccccagccctgctctcacgcccacgcccttctcagtcaaagacatcctaaacctggaacagcagcagcgcagcctggctgccgccggagagctctctgcccgcctggaggcgaccctggcgccctcctcctgcatgctggccgccttcaagccagaggcctacgctgggcccgaggcggctgcgccgggcctcccagagctgcgcgcagagctgggccgcgcgccttcaccggccaagtgtgcgtctgcctttcccgccgcccccgccttctatccacgtgcctacagcgaccccgacccagccaaggaccctagagccgaaaagaaagagctgtgcgcgctgcagaaggcggtggagctggagaagacagaggcggacaacgcggagcggccccgggcgcgacggcggaggaagccgcgcgtgctcttctcgcaggcgcaggtctatgagctggagcggcgcttcaagcagcagcggtacctgtcggcccccgaacgcgaccagctggccagcgtgctgaaactcacgtccacgcaggtcaagatctggttccagaaccggcgctacaagtgcaagcggcagcggcaggaccagactctggagctggtggggctgcccccgccgccgccgccgcctgcccgcaggatcgcggtgccagtgctggtgcgcgatggcaagccatgcctaggggactcggcgccctacgcgcctgcctacggcgtgggcctcaatccctacggttataacgcctaccccgcctatccgggttacggcggcgcggcctgcagccctggctacagctgcactgccgcttaccccgccgggccttccccagcgcagccggccactgccgccgccaacaacaacttcgtgaacttcggcgtcggggacttgaatgcggttcagagccccgggattccgcagagcaactcgggagtgtccacgctgcatggtatccgagcctggtacccaactttcttgtacaaagtggttgatatcggtaagcctatccctaaccctctcctcggtctcgattctacgtagtaatgaactagtccgtaacttgaaagtatttcgatttcttggctttatatatcttgtggaaaggacgatgcaacactgcacaatgaagacag

SEQ ID NO: 3195 - DNA, 1175 bp, Homo sapiens
  source 1..1175: mol_type = genomic DNA
atcgattgatcaacaagtttgtacaaaaaagttggcatgtaccacaacagtagtcagaagcggcactggaccttctccagcgaggagcagctggcaagactgcgggctgacgccaaccgcaaattcagatgcaaagccgtggccaacgggaaggttcttccgaatgatccagtctttcttgagcctcatgaagaaatgacactctgcaaatactatgagaaaaggttattggaattctgttcggtgtttaagccagcaatgccaagatctgttgtgggtacggcttgtatgtatttcaaacgtttttatcttaataactcagtaatggaatatcaccccaggataataatgctcacttgtgcatttttggcctgcaaagtagatgaattcaatgtatctagtcctcagtttgttggaaacctccgggagagtcctcttggacaggagaaggcacttgaacagatactggaatatgaactacttcttatacagcaacttaatttccaccttattgtccacaatccttacagaccatttgagggcttcctcatcgacttaaagacccgctatcccatattggagaatccagagattttgaggaaaacagctgatgactttcttaatagaattgcattgacggatgcttaccttttatacacgccttcccaaattgccctgactgccattttatctagtgcctccagggctggaattactatggaaagttatttatcagagagtctgatgctgaaagagaacagaacttgcctgtcacagttactagatataatgaaaagcatgagaaacttagtaaagaagtatgaaccacccagatctgaagaagttgctgttctgaaacagaagttggagcgatgtcattctgctgagcttgcacttaacgtaatcacgaagaagaggaaaggctatgaagatgatgattacgtctcaaagaaatccaaacatgaggaggaagagtggactgatgacgacctggtagaatctctctacccaactttcttgtacaaagtggttgatatcggtaagcctatccctaaccctctcctcggtctcgattctacgtagtaatgaactagtccgtaacttgaaagtatttcgatttcttggctttatatatcttgtggaaaggacgaggactcttctttcctccactgtga

SEQ ID NO: 3196 - DNA, 1175 bp, Homo sapiens
  source 1..1175: mol_type = genomic DNA
atcgattgatcaacaagtttgtacaaaaaagttggcatgtaccacaacagtagtcagaagcggcactggaccttctccagcgaggagcagctggcaagactgcgggctgacgccaaccgcaaattcagatgcaaagccgtggccaacgggaaggttcttccgaatgatccagtctttcttgagcctcatgaagaaatgacactctgcaaatactatgagaaaaggttattggaattctgttcggtgtttaagccagcaatgccaagatctgttgtgggtacggcttgtatgtatttcaaacgtttttatcttaataactcagtaatggaatatcaccccaggataataatgctcacttgtgcatttttggcctgcaaagtagatgaattcaatgtatctagtcctcagtttgttggaaacctccgggagagtcctcttggacaggagaaggcacttgaacagatactggaatatgaactacttcttatacagcaacttaatttccaccttattgtccacaatccttacagaccatttgagggcttcctcatcgacttaaagacccgctatcccatattggagaatccagagattttgaggaaaacagctgatgactttcttaatagaattgcattgacggatgcttaccttttatacacaccttcccaaattgccctgactgccattttatctagtgcctccagggctggaattactatggaaagttatttatcagagagtctgatgctgaaagagaacagaacttgcctgtcacagttactagatataatgaaaagcatgagaaacttagtaaagaagtatgaaccacccagatctgaagaagttgctgttctgaaacagaagttggagcgatgtcattctgctgagcttgcacttaacgtaatcacgaagaagaggaaaggctatgaagatgatgattacgtctcaaagaaatccaaacatgaggaggaagaatggactgatgacgacctggtagaatctctctacccaactttcttgtacaaagtggttgatatcggtaagcctatccctaaccctctcctcggtctcgattctacgtagtaatgaactagtccgtaacttgaaagtatttcgatttcttggctttatatatcttgtggaaaggacgataagggggagtcagttccatctca

SEQ ID NO: 3197 - DNA, 1601 bp, Homo sapiens
  source 1..1601: mol_type = genomic DNA
atcgattgatcaacaagtttgtacaaaaaagcaggcttcaccatggccagcaacagcagctcctgcccgacacctgggggcgggcacctcaatgggtacccggtgcctccctacgccttcttcttcccccctatgctgggtggactctccccgccaggcgctctgaccactctccagcaccagcttccagttagtggatatagcacaccatccccagccaccattgagacccagagcagcagttctgaagagatagtgcccagccctccctcgccaccccctctaccccgcatctacaagccttgctttgtctgtcaggacaagtcctcaggctaccactatggggtcagcgcctgtgagggctgcaagggcttcttccgccgcagcatccagaagaacatggtgtacacgtgtcaccgggacaagaactgcatcatcaacaaggtgacccggaaccgctgccagtactgccgactgcagaagtgctttgaagtgggcatgtccaaggagtctgtgagaaacgaccgaaacaagaagaagaaggaggtgcccaagcccgagtgctctgagagctacacgctgacgccggaggtgggggagctcattgagaaggtgcgcaaagcgcaccaggaaaccttccctgccctctgccagctgggcaaatacactacgaacaacagctcagaacaacgtgtctctctggacattgacctctgggacaagttcagtgaactctccaccaagtgcatcattaagactgtggagttcgccaagcagctgcccggcttcaccaccctcaccatcgccgaccagatcaccctcctcaaggctgcctgcctggacatcctgatcctgcggatctgcacgcggtacacgcccgagcaggacaccatgaccttctcggacgggctgaccctgaaccggacccagatgcacaacgctggcttcggccccctcaccgacctggtctttgccttcgccaaccagctgctgcccctggagatggatgatgcggagacggggctgctcagcgccatctgcctcatctgcggagaccgccaggacctggagcagccggaccgggtggacatgctgcaggagccgctgctggaggcgctaaaggtctacgtgcggaagcggaggcccagccgcccccacatgttccccaagatgctaatgaagattactgacctgcgaagcatcagcgccaagggggctgagcgggtgatcacgctgaagatggagatcccgggctccatgccgcctctcatccaggaaatgttggagaactcagagggcctggacactctgagcggacagccggggggtggggggcgggacgggggtggcctggcccccccgccaggcagctgtagccccagcctcagccccagctccaacagaagcagcccggccacccactccccgtgagacccagctttcttgtacaaagtggttgatatcggtaagcctatccctaaccctctcctcggtctcgattctacgtagtaatgaactagtccgtaacttgaaagtatttcgatttcttggctttatatatcttgtggaaaggacgactcttgaccgtccggcaagacccg

SEQ ID NO: 3198 - DNA, 788 bp, Homo sapiens
  source 1..788: mol_type = genomic DNA
atcgattgatcaacaagtttgtacaaaaaagttggcaccatggacggcggcacactgcccaggtccgcgccccctgcgccccccgtccctgtcggctgcgctgcccggcggagacccgcgtccccggaactgttgcgctgcagccggcggcggcgaccggccaccgcagagaccggaggcggcgcagcggccgtagcgcggcgcaatgagcgcgagcgcaaccgcgtgaagctggtgaacttgggcttccaggcgctgcggcagcacgtgccgcacggcggcgccagcaagaagctgagcaaggtggagacgctgcgctcagccgtggagtacatccgcgcgctgcagcgcctgctggccgagcacgacgccgtgcgcaacgcgctggcgggagggctgaggccgcaggccgtgcggccgtctgcgccccgcgggccgccagggaccaccccggtcgccgcctcgccctcccgcgcttcttcgtccccgggccgcgggggcagctcggagcccggctccccgcgttccgcctactcgtcggacgacagcggctgcgaaggcgcgctgagtcctgcggagcgcgagctactcgacttctccagctggttagggggctacttgccaactttcttgtacaaagtggttgatatcggtaagcctatccctaaccctctcctcggtctcgattctacgtagtaatgaactagtccgtaacttgaaagtatttcgatttcttggctttatatatcttgtggaaaggacgaaagacttcggtccgtagtcttgat

SEQ ID NO: 3199 - DNA, 971 bp, Homo sapiens
  source 1..971: mol_type = genomic DNA
atcgattgatcaacaagtttgtacaaaaaagttggcatgttggactcggtgacacacagcaccttcctgcctaatgcatccttctgcgatcccctgatgtcgtggactgatctgttcagcaatgaagagtactaccctgcctttgagcatcagacagcctgtgactcatactggacatcagtccaccctgaatactggactaagcgccatgtgtgggagtggctccagttctgctgcgaccagtacaagttggacaccaattgcatctccttctgcaacttcaacatcagtggcctgcagctgtgcagcatgacacaggaggagttcgtcgaggcagctggcctctgcggcgagtacctgtacttcatcctccagaacatccgcacacaaggttactccttttttaatgacgctgaagaaagcaaggccaccatcaaagactatgctgattccaactgcttgaaaacaagtggcatcaaaagtcaagactgtcacagtcatagtagaacaagcctccaaagttctcatctatgggaatttgtacgagacctgcttctatctcctgaagaaaactgtggcattctggaatgggaagatagggaacaaggaatttttcgggtggttaaatcggaagccctggcaaagatgtggggacaaaggaagaaaaatgacagaatgacatatgaaaagttgagcagagccctgagatactactataaaacaggaattttggagcgggttgaccgaaggttagtgtacaaatttggaaaaaatgcacacgggtggcaggaagacaagctatgcccaactttcttgtacaaagtggttgatatcggtaagcctatccctaaccctctcctcggtctcgattctacgtagtaatgaactagtccgtaacttgaaagtatttcgatttcttggctttatatatcttgtggaaaggacgagcaaaggtcacagatgcctctaat

SEQ ID NO: 3200 - DNA, 764 bp, Homo sapiens
  source 1..764: mol_type = genomic DNA
atcgattgatcaacaagtttgtacaaaaaagttggcaccatggaggccgctgcagacggcccggctgagacccaaagcccggtggaaaaagacagcccggcgaagacccaaagcccagcccaagacacctcaatcatgtcgagaaataacgcagatacaggcagagttcttgccttaccagagcacaagaagaagcgcaagggaaacttgccagccgagtccgttaagatcctccgcgactggatgtataagcatcggtttaaggcctacccttcagaagaagagaagcaaatgctgtcagagaagaccaatttgtctttgttgcggatttctaactggtttatcaatgctcgcagacgcattctcccggatatgcttcaacagcgtagaaacgaccccatcattggccacaaaacgggcaaagatgcccatgccacccacctgcagagcaccgaggcgtctgtgccggccaagtcagggccagtggtccagacaatgtacaaagcctgcccctgtggcccttgccaaagggccagatgtcaagagagaagcaaccagatccggagtcggcccctagccagaagctcaccggaattgccaactttcttgtacaaagtggttgatatcggtaagcctatccctaaccctctcctcggtctcgattctacgtagtaatgaactagtccgtaacttgaaagtatttcgatttcttggctttatatatcttgtggaaaggacgataacagtttgtgtatgtggggtca

SEQ ID NO: 3201 - DNA, 1988 bp, Homo sapiens
  source 1..1988: mol_type = genomic DNA
atcgattgatcaacaagtttgtacaaaaaagttggcatggcggcggccgtgcttagggattcgacttcggttcccgtgactgcagaagctaaacttatgggctttacacagggctgtgtgacctttgaggacgtggccatttacttctcccaggaagaatgggggctccttgatgaggctcagaggctcctgtaccgcgatgtgatgctggagaactttgcacttataactgcgctggtttgttggcatgggatggaggatgaagagacacctgagcaaagtgtttctgtagaaggagtacctcaggtcaggactccagaggccagtccatccacccagaagattcaatcctgtgacatgtgtgtcccattcctgaccgacattttgcacctgaccgatttgcctgggcaggaactatacttgactggggcatgtgcggtctttcaccaggaccagaagcatcatagtgcagagaaacccttggaaagtgacatggacaaggcctcatttgtgcagtgctgcctgttccatgagtcaggaatgcctttcaccagcagtgaggttgggaaggacttcctagccccattgggcattcttcagccgcaagctattgctaactatgagaagccaaacaaaatcagcaaatgtgaggaggcctttcatgttggaataagtcattacaagtggagtcaatgcaggagagagtccagccacaaacacactttttttcaccctagagtctgcactggaaaaaggctttatgaatctagcaaatgtgggaaagcctgctgctgtgagtgctcccttgttcagctgcaaagagtccaccctggagaaaggccttatgagtgcagtgaatgtgggaaatcttttagccaaacctctcatctgaatgatcatcggagaatccacactggagaaaggccttatgtgtgtggtcagtgtgggaaatcatttagccaaagagccaccctcattaaacatcacagagttcacactggagaaaggccttacgagtgtggtgaatgtgggaaatcttttagccaaagttccaaccttattgaacattgcagaattcacactggagaaaggccttatgagtgtgatgaatgtggaaaagcctttgggtccaaatccactcttgttcgacaccagagaactcacacaggagaaaagccatatgagtgtggtgaatgtgggaaattattcagacaaagcttcagccttgttgtacaccagagaattcacactacagcaaggccttatgagtgtggccagtgtgggaaatcatttagcctaaagtgtggcctcattcagcaccagttaattcacagtggagctaggccctttgagtgtgatgagtgcggaaaatcctttagccaaagaaccaccctcaataaacaccacaaagttcacactgcagaaaggccttatgtatgtggggaatgtgggaaagcttttatgttcaaatctaaacttgttaggcaccagagaactcacactggagaaaggccttttgagtgcagtgaatgtgggaaattttttagacaaagctataccctcgttgaacaccagaaaattcacactggattaaggccttacgactgtggacagtgcgggaaatcctttatccaaaagtctagcctcattcaacaccaagtggttcacacaggagaaaggccatatgagtgtggcaaatgtgggaagtcctttacacaacactctggcctcattctccaccgaaaatctcacactgtggagaggcctcgtgacagcagcaaatgtggaaaaccctacagcccaagatctaacattgtttacccaactttcttgtacaaagtggttgatatcggtaagcctatccctaaccctctcctcggtctcgattctacgtagtaatgaactagtccgtaacttgaaagtatttcgatttcttggctttatatatcttgtggaaaggacgatgccttgccgtagtcaaactcacc

SEQ ID NO: 3202 - DNA, 989 bp, Homo sapiens
  source 1..989: mol_type = genomic DNA
atcgattgatcaacaagtttgtacaaaaaagttggcaccatggagcttacccagcctgcagaagacctcatccagacccagcagacccctgcctcagaacttggggaccctgaagaccccggagaggaggctgcagatggctcagacactgtggtcctcagtctctttccctgcacccctgagcctgtgaatcctgaaccggatgccagtgtttcctctccacaggcaggcagctccctgaagcactccaccactctcaccaaccggcagcgagggaacgaggtgtcagctctgccggccaccctagactccctgtccatccaccagctcgcagcacagggggagctggaccagctgaaggagcatttgcggaaaggtgacaacctcgtcaacaagccagacgagcgcggcttcacccccctcatctgggcctccgcctttggagagattgagaccgttcgcttcctgctggagtggggtgccgacccccacatcctggcaaaagagcgagagagcgccctgtcgctggccagcacaggcggctacacagacattgtggggctgctgctggagcgtgacgtggacatcaacatctatgattggaatggagggacgccactgctgtacgctgtgcgcgggaaccacgtgaaatgcgttgaggccttgctggcccgaggcgctgacctcaccaccgaagccgactctggctacaccccgatggaccttgccgtggccctgggataccggaaagtgcaacaggtgatcgagaaccacatcctcaagctcttccagagcaacctggtgcccgctgaccctgagttgccaactttcttgtacaaagtggttgatatcggtaagcctatccctaaccctctcctcggtctcgattctacgtagtaatgaactagtccgtaacttgaaagtatttcgatttcttggctttatatatcttgtggaaaggacgattggcaaccgtcagacacccttta

SEQ ID NO: 3203 - DNA, 923 bp, Homo sapiens
  source 1..923: mol_type = genomic DNA
atcgattgatcaacaagtttgtacaaaaaagttggcaccatggagcttacccagcctgcagaagacctcatccagacccagcagacccctgcctcagaacttggggaccctgaagaccccggagaggaggctgcagatggctcagacactgtggtcctcagtctctttccctgcacccctgagcctgtgaatcctgaaccggatgccagtgtttcctctccacaggcaggcagctccctgaagcactccaccactctcaccaaccggcagcgagggaacgaggtgtcagctctgccggccaccctagactgtgacaacctcgtcaacaagccagacgagcgcggcttcacccccctcatctgggcctccgcctttggagagattgagaccgttcgcttcctgctggagtggggtgccgacccccacatcctggcaaaagagcgagagagcgccctgtcgctggccagcacaggcggctacacagacattgtggggctgctgctggagcgtgacgtggacatcaacatctatgattggaatggagggacgccactgctgtacgctgtgcgcgggaaccacgtgaaatgcgttgaggccttgctggcccgaggcgctgacctcaccaccgaagccgactctggctacaccccgatggaccttgccgtggccctgggataccggaaagtgcaacaggtgatcgagaaccacatcctcaagctcttccagagcaacctggtgcccgctgaccctgagttgccaactttcttgtacaaagtggttgatatcggtaagcctatccctaaccctctcctcggtctcgattctacgtagtaatgaactagtccgtaacttgaaagtatttcgatttcttggctttatatatcttgtggaaaggacgaggtagtagcaaaaacgctcagttt

SEQ ID NO: 3204 - DNA, 776 bp, Homo sapiens
  source 1..776: mol_type = genomic DNA
atcgattgatcaacaagtttgtacaaaaaagttggcaccatgaagaccaagaaccggcccccacggcgccgggccccggtgcaggacacagaggccacccccggggaggggacgcccgacgggtccctgccgaacccggggccagagccggccaagggtctgcggagccggccggcccgggccgcagcaagggctccgggcgagggcaggcgcaggcggccaggaccctccgggcccggtggccgtcgtgacagcagcatccagcggcggctggagagcaacgagagggagcggcagcggatgcacaagctaaataacgccttccaggccctgcgtgaagtcatcccccacgtgcgcgcggacaagaagctctccaagatcgagacgctcacgctggccaagaactacatcaaatcgctgacggccaccatcctgaccatgtccagcagccgcctcccaggcctggaggggccgggccccaagctctaccagcactaccagcagcagcagcaggtggctgggggtgcgttgggggccacggaggcccagccccagggccacctgcagaggtactccacgcagatccacagcttccgagagggcaccttgccaactttcttgtacaaagtggttgatatcggtaagcctatccctaaccctctcctcggtctcgattctacgtagtaatgaactagtccgtaacttgaaagtatttcgatttcttggctttatatatcttgtggaaaggacgatgctaacattaccctggcctgtcc

SEQ ID NO: 3205 - DNA, 977 bp, Homo sapiens
  source 1..977: mol_type = genomic DNA
atcgattgatcaacaagtttgtacaaaaaagttggcatgcccgccagcatgttcagcatcgacaacatcctagccgcccggccgcgctgcaaggactcggtgttgccggtggcgcacagcgcggcggctcccgtcgtcttcccggccctgcacggggactcgctctacggcgccagcggcggcgcctcctcggactatggcgccttctacccgcgccccgtggcccccggcggcgcgggcctcccggccgcggtcagcggctcccgcctcggctacaacaactacttctacgggcagctgcacgtgcaggcggcgcccgtgggcccggcctgctgcggggccgtgccgccgctgggcgcccagcagtgctcctgcgtcccgacgcccccaggctacgagggccccggttcggtgctggtgtccccggtaccgcaccagatgctgccctacatgaacgtgggcacgctgtcgcgcaccgagctgcagcttctcaaccagctgcactgtcggcggaagcggcggcaccgcaccatcttcactgacgagcagctcgaagctctcgagaacctcttccaggagaccaagtacccggacgtgggcacgcgcgagcagctggcccggaaagtgcacctccgcgaggagaaagtggaggtctggtttaagaaccgccgcgccaaatggaggcggcagaagcggtcctcatcagaggagtcggagaacgcggagaagtggaacaagacgtcgtcgtcgaaggcgtcaccggagaagagggaagaggaaggtaaaagcgatttggactcggacagctgcccaactttcttgtacaaagtggttgatatcggtaagcctatccctaaccctctcctcggtctcgattctacgtagtaatgaactagtccgtaacttgaaagtatttcgatttcttggctttatatatcttgtggaaaggacgattgtcgccagtcatctgtatattt

SEQ ID NO: 3206 - DNA, 1088 bp, Homo sapiens
  source 1..1088: mol_type = genomic DNA
accgccaccatgaagcgacccaaggagccgagcggctccgacggggagtccgacggacccatcgacgtgggccaagagggccagctgagccagatggccaggccgctgtccacccccagctcttcgcagatgcaagccaggaagaaacacagagggatcatagagaaacggcgtcgagaccgcatcaacagtagcctttctgaattgcgacgcttggtccccactgcctttgagaaacagggctcttccaagctggagaaagccgaggtcttgcagatgacggtggatcacttgaaaatgctccatgccactggtgggacaggattctttgatgcccgagccctggcagttgacttccggagcattggttttcgggagtgcctcactgaggtcatcaggtacctgggggtccttgaagggcccagcagccgtgcagaccccgtccggattcgccttctctcccacctcaacagctacgcagccgagatggagccttcgcccacgcccactggccctttggccttccctgcctggccctggtctttcttccatagctgtccagggctgccagccctgagcaaccagctcgccatcctgggaagagtgcccagccctgtcctccccggtgtctcctctcctgcttaccccatcccagccctccgaaccgctccccttcgcagagccacaggcatcatcctgccagcccggaggaatgtgctgcccagtcgaggggcatcttccacccggagggcccgccccctagagaggccagcgacccctgtgcctgtcgcccccagcagcagggctgccaggagcagccacatcgctcccctcctgcagtcttcctccccaacaccccctggtcctacagggtcggctgcttacgtggctgttcccacccccaactcatcctccccagggccagctgggaggccagcgggagccatgctctaccactcctgggtctctgaaatcactgaaatcggggctttctagtaatgaactagtccgtaacttgaaagtatttcgatttcttggctttatatatcttgtggaaaggacgaagaccaaatcatttatgagtcccg

SEQ ID NO: 3207 - DNA, 2408 bp, Homo sapiens
  source 1..2408: mol_type = genomic DNA
atcgattgatcaacaagtttgtacaaaaaagttggcatgaggcctgcggtgctgggctccccagaccgagcacccccagaagatgaggggcctgtcatggtgaagctagaggactctgaggaggagggtgaggctgccttatgggacccaggccctgaagctgcacgcctgcgtttccggtgcttccgctatgaggaggccacagggccccaagaggccctggcccagctccgagagctgtgtcgccagtggctgcgtccagaggtacgctccaaggagcagatgctggagctgttggtgctggagcagttcctgggcgcactgccccctgagatccaggcccgtgtgcaggggcagcggccaggcagccccgaggaggctgctgccctagtagatgggctgcgccgggagccgggcggaccccggagatgggtcacagtccaggtgcagggccaggaggtcctatcagagaagatggagccctccagtttccagcccctacctgaaactgagcctccaactccagagcctgggcccaagacacctcctaggactatgcaggaatcaccactgggcctgcaggtgaaagaggagtcagaggttacagaggactcagatttcctggagtctgggcctctagctgccacccaggagtctgtacccaccctcctgcctgaggaggcccagagatgtgggaccgtgctggaccagatctttccccacagcaagactgggcctgagggtccctcatggagggagcaccccagggccctgtggcatgaggaagctgggggcatcttctccccagggttcgcgctgcagctaggcagcatctccgcaggtccaggtagtgtaagccctcacctccacgtcccctgggacctcggcatggctggcctttctggccagatccaatcaccctcccgcgaaggtggctttgcgcatgcgcttctgctccccagcgatctgaggagtgaacaggaccccacggacgaggatccctgccggggtgtgggccctgctctgatcaccacccgctggcgctcccccaggggccggagccggggccgccccagcactgggggcggggtggttaggggcggccgttgcgatgtatgtggcaaggtgttcagccaacgcagcaacctgctgaggcaccagaagatccacacgggtgagcgaccattcgtgtgcagcgagtgcggccgcagcttcagccgcagctcgcacctgctgcgccaccagcttacgcacaccgaggagcggccgttcgtgtgcggcgactgtggccagggcttcgtgcgcagcgcgcgcctggaagagcatcggagagtgcacacgggcgaacagcctttccgttgcgctgagtgcggccagagcttccggcagcgctccaatctgctgcagcaccagcgcatccacggcgatcccccgggccctggcgctaagcccccggcccctcctggtgcgcccgagcctcccggcccctttccgtgcagcgagtgccgcgagagcttcgcgcggcgcgccgtgctgctggagcaccaggcggtacacacgggcgacaagtcctttggctgcgtcgagtgcggcgagcgcttcggccgccgctcagtgctgctgcagcaccggcgcgtgcacagtggcgagcggcccttcgcctgtgccgagtgcggccagagcttccggcagcgctccaacctgacgcagcaccggcgcatccacaccggggagcggcccttcgcctgcgccgagtgtggcaaggccttccgccagcggcctacgctcacgcagcatctccgcgtacacacgggcgagaaaccctttgcctgccccgagtgtggccagcgcttcagccagcgcctcaagctcacgcgtcatcagaggacacacaccggcgaaaagccctaccactgcggtgagtgcggcctgggcttcacgcaggtctcgcggctcaccgagcaccagcgcatccacacgggcgaacggcccttcgcctgccccgagtgcggccagagctttcggcagcacgccaacctcacccagcaccggcgcatccacacgggtgaacggccctacgcatgccctgagtgtggcaaggccttccgccagcggcccacgctcacgcagcatctgcgcacccaccgacgagagaagcccttcgcctgccaggactgtggccgccgcttccaccagagcaccaagctcattcagcaccagcgcgtccacagcgccgagtacccaactttcttgtacaaagtggttgatatcggtaagcctatccctaaccctctcctcggtctcgattctacgtagtaatgaactagtccgtaacttgaaagtatttcgatttcttggctttatatatcttgtggaaaggacgagttcgaaactaatagtcgcccttt

SEQ ID NO: 3208 - DNA, 797 bp, Homo sapiens
  source 1..797: mol_type = genomic DNA
atcgattgatcaacaagtttgtacaaaaaagttggcatgctggtgctgccatccccctgccctcagcctctggcattttcctccgttgagaccatggagggccctccccgtcggacttgccgctccccagaacctggaccttcctcctccatcggatctccccaggcttcatctcctccaaggcccaaccactacctgcttattgacactcagggtgtcccctacacagtgctggtggacgaggagtcacagagggagccaggggccagtggggctccaggccagaaaaagtgctacagctgccccgtgtgctcaagggtcttcgagtacatgtcctaccttcagcgacacagcatcacccactcggaggtaaagcccttcgagtgtgacatctgtgggaaggcattcaagcgcgccagccacttggcacggcaccattccattcacctggcgggtggtgggcggccccacggctgcccgctctgccctcgccgcttccgggatgcgggtgagctggcccagcacagccgggtgcactctggggagcgcccgtttcagtgtccacactgccctcgccgctttatggagcagaacacactgcagaaacacacgcggtggaagcatccatgcccaactttcttgtacaaagtggttgatatcggtaagcctatccctaaccctctcctcggtctcgattctacgtagtaatgaactagtccgtaacttgaaagtatttcgatttcttggctttatatatcttgtggaaaggacgaattatgtttagaactaatatctag

SEQ ID NO: 3209 - DNA, 713 bp, Homo sapiens
  source 1..713: mol_type = genomic DNA
atcgattgatcaacaagtttgtacaaaaaagttggcatggcagctgagtcattgcctttctcctttgggacactgtccagctgggagctggaagcctggtatgaggacctgcaagaggtcctgtcttcagatgaaaatgggggtacctatgtttcacctcctggaaatgaagaggaagaatcaaaaatcttcaccactcttgaccctgcttctctggcttggctgactgaggaggagccagaaccagcagaggtcacaagcacctcccagagccctcactctccagattccagtcagagctccctggctcaggaggaagaggaggaagaccaagggagaaccaggaaacggaaacagagtggtcattccccagcccgggctggaaagcagcgcatgaaggagaaagaacaggagaatgaaaggaaagtggcacagctagctgaagagaatgaacggctcaagcaggaaatcgagcgcctgaccagggaagtagaggcgactcgccgagctctgattgaccgaatggtgaatctgcaccaagcatgcccaactttcttgtacaaagtggttgatatcggtaagcctatccctaaccctctcctcggtctcgattctacgtagtaatgaactagtccgtaacttgaaagtatttcgatttcttggctttatatatcttgtggaaaggacgagactcgagtataagtgcgatactt

SEQ ID NO: 3210 - DNA, 2771 bp, Homo sapiens
  source 1..2771: mol_type = genomic DNA
atcgattgatcaacaagtttgtacaaaaaagttggcaccatggcgcaggcgatctttgaggccctggagggaatggacaatcagaccgttctggctgtccagtcattattggatggccaaggagcagtccctgatccgacaggccagagtgtcaatgcgccccctgctatccagccattggatgacgaggatgtatttctctgcgggaagtgtaagaagcaattcaactcgctgccagcgtttatgacccacaagcgggaacagtgccaggggaatgcccccgccctggccacagtctcactggccaccaacagcatctacccaccttcggcagcacccacagcggtccagcaggccccaactcctgccaatcgccagatctccacatacatcacagtgcccccgtccccactgatccagaccctggtgcaggggaacatcttggtgagcgatgatgtgctcatgtctgccatgtcagccttcacatccctggaccagcccatgccccagggccccccacctgtgcagagcagcctgaacatgcattccgtgcccagctacctcacccagcctccacctcctcctccacctcctccaccactgcccccaccgccaccacctcagcctccaccacctccaccccagagcctgggcccccctgggcgtcccaaccctggtgggaacggtgtggtggaggtgtacagtgctgctgcgcccctggctgggagtggaacggtggagatccaggcactggggatgcagccctacccacccctagaggtgccaaaccagtgtgtggagcctccagtatatcccacccccacagtgtacagccctggcaaacagggattcaaacccaaaggaccaaaccccgccgcccccatgaccagcgccaccgggggcacggtggccacctttgactctccagcaacgctgaagacccgacgagctaaaggtgccaggggactcccggaagctgcagggaagccaaaggctcagaaactcaagtgctcatactgtgacaagtcattcaccaaaaactttgacctgcagcagcacatccgaagccacaccggtgagaagcccttccagtgcattgcatgtggccgtgcctttgcccagaagtctaatgttaagaaacacatgcagacccacaaggtgtggcctccaggacacagtggtggcaccgtgtctcgaaactctgtgaccgtacaggtcatggccctgaaccccagcaggcaggaggacgaggaaagcacagggttgggccagcccctgccgggtgcgccacagccccaggccttgtccacagctggtgaggaagagggggacaagccggagtccaagcaggtggtcctcatcgacagctcctacctgtgccaattctgccccagcaaattcagcacctacttccagctcaagtctcacatgacccagcataagaatgagcaggtgtacaagtgtgtggtcaaaagctgtgcccagacgttcccaaagctcgacacatttctggagcacatcaagagccaccaggaggagctgagctaccgctgccacctctgcggcaaggacttcccctcgctgtacgacctgggcgtgcaccagtactcccacagcctcctgccacagcacagccccaagaaggacaatgccgtctacaagtgtgtcaaatgtgtcaacaaatactccacccctgaggccctggagcaccacctgcagaccgccactcacaacttcccctgcccacactgccagaaggtgtttccttgtgaacgctacctgcggcgtcatctgcccacccacggcagcgggggcaggttcaagtgccaagtgtgcaagaagttcttccggcgggagcattatctcaaactgcatgctcacatccactcgggtgagaagccctacaaatgctcagtgtgcgagtctgcgttcaaccgcaaggacaaactgaagagacacatgttgatccacgagcccttcaagaaatacaaatgccctttctcgacgcacacaggctgcagtaaggagttcaaccggccggacaagctgaaggcccacatcctctcccactctggcatgaagctccacaaatgcgccctgtgcagcaagtccttcagccgccgtgcccacctcgccgagcatcagcgcgcccacacgggcaactacaagttccgctgtgctggctgcgccaagggcttttcccgccacaaatacctcaaagatcaccgctgtcgtctcggcccccaaaaggacaaggacctgcaaacccggcggcccccccagaggagggcagccccccgcagttgcggcagtggtgggcgcaaggtgctgacccccttgcctgacccgctggggctggaggagctgaaggacacaggggctgggctggtgcccgaggctgtccccggcaagccgcccttcgcagagccggacgcggtgctgtccatcgttgtgggtggtgcggtgggcgcggaaactgagctggtggtacctggacacgctgaggggctgggctccaacctggctctggcggagctgcaggccggggccgagggcccatgtgccatgctcgctgtgcccgtctacatccaggcctccgagttgccaactttcttgtacaaagtggttgatatcggtaagcctatccctaaccctctcctcggtctcgattctacgtagtaatgaactagtccgtaacttgaaagtatttcgatttcttggctttatatatcttgtggaaaggacgattccaggataggggcgcacgctcc

SEQ ID NO: 3211 - DNA, 2645 bp, Homo sapiens
  source 1..2645: mol_type = genomic DNA
accgccaccatggcgcaggcgatctttgaggccctggagggaatggacaatcagaccgttctggctgtccagtcattattggatggccaaggagcagtccctgatccgacaggccagagtgtcaatgcgccccctgctatccagccattggatgacgaggatgtatttctctgcgggaagtgtaagaagcaattcaactcgctgccagcgtttatgacccacaagcgggaacagtgccaggggaatgcccccgccctggccacagtctcactggccaccaacagcatctacccaccttcggcagcacccacagcggtccagcaggccccaactcctgccaatcgccagatctccacatacatcacagtgcccccgtccccactgatccagaccctggtgcaggggaacatcttggtgagcgatgatgtgctcatgtctgccatgtcagccttcacatccctggaccagcccatgccccagggccccccacctgtgcagagcagcctgaacatgcattccgtgcccagctacctcacccagcctccacctcctcctccacctcctccaccactgcccccaccgccaccacctcagcctccaccacctccaccccagagcctgggcccccctgggcgtcccaaccctggtgggaacggtgtggtggaggtgtacagtgctgctgcgcccctggctgggagtggaacggtggagatccaggcactggggatgcagccctacccacccctagaggtgccaaaccagtgtgtggagcctccagtatatcccacccccacagtgtacagccctggcaaacagggattcaaacccaaaggaccaaaccccgccgcccccatgaccagcgccaccgggggcacggtggccacctttgactctccagcaacgctgaagacccgacgagctaaagctgcagggaagccaaaggctcagaaactcaagtgctcatactgtgacaagtcattcaccaaaaactttgacctgcagcagcacatccgaagccacaccggtgagaagcccttccagtgcattgcatgtggccgtgcctttgcccagaagtctaatgttaagaaacacatgcagacccacaaggtgtggcctccaggacacagtggtggcaccgtgtctcgaaactctgtgaccgtacaggtcatggccctgaaccccagcaggcaggaggacgaggaaagcacagggttgggccagcccctgccgggtgcgccacagccccaggccttgtccacagctggtgaggaagagggggacaagccggagtccaagcaggtggtcctcatcgacagctcctacctgtgccaattctgccccagcaaattcagcacctacttccagctcaagtctcacatgacccagcataagaatgagcaggtgtacaagtgtgtggtcaaaagctgtgcccagacgttcccaaagctcgacacatttctggagcacatcaagagccaccaggaggagctgagctaccgctgccacctctgcggcaaggacttcccctcgctgtacgacctgggcgtgcaccagtactcccacagcctcctgccacagcacagccccaagaaggacaatgccgtctacaagtgtgtcaaatgtgtcaacaaatactccacccctgaggccctggagcaccacctgcagaccgccactcacaacttcccctgcccacactgccagaaggtgtttccttgtgaacgctacctgcggcgtcatctgcccacccacggcagcgggggcaggttcaagtgccaagtgtgcaagaagttcttccggcgggagcattatctcaaactgcatgctcacatccactcgggtgagaagccctacaaatgctcagtgtgcgagtctgcgttcaaccgcaaggacaaactgaagagacacatgttgatccacgagcccttcaagaaatacaaatgccctttctcgacgcacacaggctgcagtaaggagttcaaccggccggacaagctgaaggcccacatcctctcccactctggcatgaagctccacaaatgcgccctgtgcagcaagtccttcagccgccgtgcccacctcgccgagcatcagcgcgcccacacgggcaactacaagttccgctgtgctggctgcgccaagggcttttcccgccacaaatacctcaaagatcaccgctgtcgtctcggcccccaaaaggacaaggacctgcaaacccggcggcccccccagaggagggcagccccccgcagttgcggcagtggtgggcgcaaggtgctgacccccttgcctgacccgctggggctggaggagctgaaggacacaggggctgggctggtgcccgaggctgtccccggcaagccgcccttcgcagagccggacgcggtgctgtccatcgttgtgggtggtgcggtgggcgcggaaactgagctggtggtacctggacacgctgaggggctgggctccaacctggctctggcggagctgcaggctggggccgagggcccatgtgccatgctcgctgtgcccgtctacatccaggcctccgagtagtaatgaactagtccgtaacttgaaagtatttcgatttcttggctttatatatcttgtggaaaggacgacaacgtcactcacgccatcttttc

SEQ ID NO: 3212 - DNA, 2495 bp, Homo sapiens
  source 1..2495: mol_type = genomic DNA
atcgattgatcaacaagtttgtacaaaaaagttggcatggatcatttgaacgaggcaactcaggggaaagaacattcagaaatgtctaacaatgtgagtgatccgaagggtccaccagccaagattgcccgcctggagcagaacgggagcccgctaggaagaggaaggcttgggagtacaggtgcaaaaatgcagggagtgcctttaaaacactcgggccatctgatgaaaaccaaccttaggaaaggaaccatgctgccagttttctgtgtggtggaacattatgaaaacgccattgaatatgattgcaaggaggagcatgcagaatttgtgctggtgagaaaggatatgcttttcaaccagctgatcgaaatggcattgctgtctctaggttattcacatagctctgctgcccaggccaaagggctaatccaggttggaaagtggaatccagttccactgtcttacgtgacagatgcccctgatgctacagtagcagatatgcttcaagatgtgtatcatgtggtcacattgaaaattcagttacacagttgccccaaactagaagacttgcctcccgaacaatggtcgcacaccacagtgaggaatgctctgaaggacttactgaaagatatgaatcagagttcattggccaaggagtgccccctttcacagagtatgatttcttccattgtgaacagtacttactatgcaaatgtctcagcagcaaaatgtcaagaatttggaaggtggtacaaacatttcaagaagacaaaagatatgatggttgaaatggatagtctttctgagctatcccagcaaggcgccaatcatgtcaattttggccagcaaccagttccagggaacacagccgagcagcctccatcccctgcgcagctctcccatggcagccagccctctgtccggacacctcttccaaacctgcaccctgggctcgtatcaacacctatcagtcctcaattggtcaaccagcagctggtgatggctcagctgctgaaccagcagtatgcagtgaatagacttttagcccagcagtccttaaaccaacaatacttgaaccaccctccccctgtcagtagatctatgaataagcctttggagcaacaggtttcgaccaacacagaggtgtcttccgaaatctaccagtgggtacgcgatgaactgaaacgagcaggaatctcccaggcggtatttgcacgtgtggcttttaacagaactcagggcttgctttcagaaatcctccgaaaggaagaggaccccaagactgcatcccagtctttgctggtaaaccttcgggctatgcagaatttcttgcagttaccggaagctgaaagagaccgaatataccaggacgaaagggaaaggagcttgaatgctgcctcggccatgggtcctgcccccctcatcagcacaccacccagccgtcctccccaggtgaaaacagctactattgccactgaaaggaatgggaaaccagagaacaataccatgaacattaatgcttccatttatgatgagattcagcaggaaatgaagcgtgctaaagtgtctcaagcactgtttgcaaaggttgcagcaaccaaaagccagggatggttgtgcgagctgttacgctggaaagaagatccttctccagaaaacagaaccctgtgggagaacctctccatgatccgaaggttcctcagtcttcctcagccagaacgtgatgccatttatgaacaggagagcaacgcggtgcatcaccatggcgacaggccgccccacattatccatgttccagcagagcagattcagcaacagcagcagcaacagcaacagcagcagcagcagcagcaggcaccgccgcctccacagccacagcagcagccacagacaggccctcggctccccccacggcaacccacggtggcctctccagcagagtcagatgaggaaaaccgacagaagacccggccacgaacaaaaatttcagtggaagccttgggaatcctccagagtttcatacaagacgtgggcctgtaccctgacgaagaggccatccagactctgtctgcccagctcgaccttcccaagtacaccatcatcaagttctttcagaaccagcggtactatctcaagcaccacggcaaactgaaggacaattccggtttagaggtcgatgtggcagaatataaagaagaggagctgctgaaggatttggaagagagtgtccaagataaaaatactaacacccttttttcagtgaaactagaagaagagctgtcagtggaaggaaacacagacattaatactgatttgaaagactgcccaactttcttgtacaaagtggttgatatcggtaagcctatccctaaccctctcctcggtctcgattctacgtagtaatgaactagtccgtaacttgaaagtatttcgatttcttggctttatatatcttgtggaaaggacgaaaaccatctccgacatgaatgtta

SEQ ID NO: 3213 - DNA, 2450 bp, Homo sapiens
  source 1..2450: mol_type = genomic DNA
atcgattgatcaacaagtttgtacaaaaaagttggcatgtctcagtggaatcaagtccaacagttagaaatcaagtttttggagcaggtggatcaattctatgatgacaactttcccatggaaattcggcatctgttggcccaatggattgaaaatcaagactgggaggcagcttctaacaatgaaaccatggcaacgattcttcttcaaaacttgttaatacaactggatgaacagttaggtcgtgtttccaaagagaaaaacctactcttgatacacaatctaaaaagaattaggaaggtccttcagggaaaatttcatggaaatccaatgcatgtagctgtggttatttcaaactgtttaagggaagagaggagaatattggctgcagccaacatgcctgtccaggggcctctagagaaatccttacaaagttcttcagtttcagaaagacagaggaatgtggagcacaaagtggctgccattaaaaacagtgtgcagatgacagaacaagataccaaatacttagaagatctgcaagacgaatttgactacaggtataaaacaattcagacaatggatcagagtgacaagaatagtgccatggtgaatcaggaagttttgacactgcaggaaatgcttaacagcctcgatttcaagagaaaggaggctctcagtaaaatgacccaaatcatccatgagacagacctgttaatgaacaccatgctcatagaagagctgcaagactggaagcggcggcagcaaatcgcctgcatcgggggtccactccacaatgggctcgaccagcttcagaactgctttacactattggcagaaagtcttttccaactgagaaggcaattggagaaactagaggagcaatctaccaaaatgacatatgaaggtgatcccattccaatgcaaagaactcacatgctagaaagagtcaccttcttgatctacaaccttttcaagaactcatttgtggttgagcgacagccatgtatgccaacccaccctcagaggccgttggtacttaaaaccctaattcagttcactgtaaaactaaggctactaataaaattgccagaactaaactatcaggtaaaggttaaggcatcaattgacaagaatgtttcaactctaagcaaccgaagatttgtactttgtggaactaatgtcaaagccatgtctattgaagaatcttccaatgggagtctctcagtagaatttcgacatttgcaaccaaaggaaatgaagtccagtgctggaggtaaaggaaatgagggctgtcacatggtgactgaagaacttcattccataacgtttgaaacacagatctgcctctatggcctgaccatagatttggagaccagctcattgcctgtggtgatgatttccaatgtcagtcagttacctaatgcttgggcatccatcatttggtacaacgtgtcaaccaacgattcccagaacttggttttctttaataatcctccacctgccacattgagtcaactactggaggtgatgagctggcagttttcatcgtacgttggtcgtggtcttaactcagatcaactccatatgctggcagagaagcttacagtccaatctagctacagtgatggtcacctcacctgggccaagttctgcaaggaacatttacctggtaaatcatttaccttttggacatggcttgaagcaatattggatctaattaagaaacacattcttcccctttggattgatgggtatgtcatgggctttgttagcaaagagaaggaacggctgttgctaaaggataaaatgcctggcacctttttattaagattcagtgaaagccatctcggaggaataactttcacctgggtggaccattctgaaagtggggaagtgagattccactctgtagaaccctacaataaaggccggttgtctgctctgccattcgctgacatcctgcgagactacaaagttattatggctgaaaacattcctgaaaaccctctgaagtacctatatcctgacattcccaaagacaaagccttcggtaaacactacagctctcagccttgcgaagtttcaagaccaacagaaaggggtgacaaaggttatgttccttctgtttttatccccatctcaacaatccgaagtgattcaacagagccacattctccatcagaccttcttcccatgtctccaagtgtgtatgcggtgttgagagaaaacctgagtcccacaacaattgaaactgcaatgaagtctccttattctgctgaatgcccaactttcttgtacaaagtggttgatatcggtaagcctatccctaaccctctcctcggtctcgattctacgtagtaatgaactagtccgtaacttgaaagtatttcgatttcttggctttatatatcttgtggaaaggacgaagatcctcagttgcccggatggtt

SEQ ID NO: 3214 - DNA, 1481 bp, Homo sapiens
  source 1..1481: mol_type = genomic DNA
atcgattgatcaacaagtttgtacaaaaaagttggcatgtcgtccatcctgcctttcactcccccgatcgtgaagcgcctgctgggctggaagaagggcgagcagaacgggcaggaggagaaatggtgcgagaaggcggtcaagagcctggtcaagaaactcaagaagacggggcagctggacgagctggagaaggccatcaccacgcagaacgtcaacaccaagtgcatcaccatccccaggtccctggatggccggttgcaggtgtcccatcggaaggggctccctcatgtcatctactgccgcctgtggcgatggccagacctgcacagccaccacgagctgcgggccatggagctgtgtgagttcgccttcaatatgaagaaggacgaggtctgcgtgaatccctaccactaccagagagtagagacaccagttctacctcctgtgttggtgccacgccacacagagatcccggccgagttccccccactggacgactacagccattccatccccgaaaacactaacttccccgcaggcatcgagccccagagcaatattccagagaccccaccccctggctacctgagtgaagatggagaaaccagtgaccaccagatgaaccacagcatggacgcaggttctccaaacctatccccgaatccgatgtccccagcacataataacttggacctgcagccagttacctactgcgagccggccttctggtgctccatctcctactacgagctgaaccagcgcgtcggggagacattccacgcctcgcagccatccatgactgtggatggcttcaccgacccctccaattcggagcgcttctgcctagggctgctctccaatgtcaacaggaatgcagcagtggagctgacacggagacacatcggaagaggcgtgcggctctactacatcggaggggaggtcttcgcagagtgcctcagtgacagcgctatttttgtccagtctcccaactgtaaccagcgctatggctggcacccggccaccgtctgcaagatcccaccaggatgcaacctgaagatcttcaacaaccaggagttcgctgccctcctggcccagtcggtcaaccagggctttgaggctgtctaccagttgacccgaatgtgcaccatccgcatgagcttcgtcaaaggctggggagcggagtacaggagacagactgtgaccagtaccccctgctggattgagctgcacctgaatgggcctttgcagtggcttgacaaggtcctcacccagatgggctccccaagcatccgctgttccagtgtgtcttacccaactttcttgtacaaagtggttgatatcggtaagcctatccctaaccctctcctcggtctcgattctacgtagtaatgaactagtccgtaacttgaaagtatttcgatttcttggctttatatatcttgtggaaaggacgacaaacttggttggcatgcaaagat

SEQ ID NO: 3215 - DNA, 2021 bp, Homo sapiens
  source 1..2021: mol_type = genomic DNA
atcgattgatcaacaagtttgtacaaaaaagttggcaccatgatgaagtcccaggggttagtatcattcaaggatgtggctgtggatttcacccaggaggagtggcagcaacttgacccttctcagaggaccctgtacagggatgtgatgctggagaactacagccacctggtctcaatggggtatccagtttccaaaccagatgtcatctccaagttggaacaaggagaagagccatggatcataaagggagacatatcaaattggatctatccagatgaatatcaggcagatgggagacaagacaggaagagtaaccttcacaactcccagtcatgtattttggggacagtttccttccatcataagatactgaaaggagtcacaagggatggttcattgtgctccattttaaaagtctgtcaaggtgatggtcagctgcagagatttctagagaatcaagacaaactcttcaggcaggtcacatttgttaacagcaaaacagtgactgaggcatcagggcataaatataatccactggggaaaatatttcaagagtgcatagaaacagatatatcaatacagagattccataaatatgatgcttttaaaaagaacttaaaaccaaatattgacctaccgagttgttataagagcaattcaagaaaaaaacctgatcagagttttggaggtggaaaatcatctagccagagtgagcccaattctaatcttgagaagattcacaatggagtaataccttttgatgataatcagtgtggaaacgtttttagaaatacacaatcccttattcaatatcagaatgtggaaactaaagagaaaagctgtgtatgtgttacatgtggaaaagcctttgctaagaagtcacaactcattgtacatcaaagaattcatactggaaagaaaccatatgattgtggtgcatgcggaaaagccttcagtgagaagtttcatcttgttgtacatcagagaactcatactggggagaaaccttatgattgttctgaatgtggaaaagccttctctcagaaatcgtcccttattatacatcagagagttcacactggggaaaaaccctatgaatgtagtgaatgcgggaaagccttctcccagaaatcacccctcattatacatcagagaatacatactggggaaaaaccctatgaatgtagagagtgtgggaaggccttttcccagaagtcacagctgattatacaccacagagctcatactggagagaagccgtatgagtgtaccgaatgtgggaaagccttctgtgagaagtcccacctcattatacataaaagaattcacactggtgagaaaccctacaaatgtgctcaatgtgaggaagccttcagcaggaagacagaactcattacacatcagttagttcatactggggaaaaaccttatgaatgtactgaatgtggaaagacattctcccgcaagtcacagctcatcatacatcagagaacacatactggagaaaaaccctataaatgtagtgaatgtggcaaagccttctgccagaagtcacatctcattggacatcagagaattcacacaggagaaaaaccttatatatgtactgaatgtgggaaagccttctctcagaagtcccaccttccgggacaccagcgaattcatacaggagagaaaccttacatatgtgctgaatgtggaaaggccttttctcagaagtcagaccttgttttacatcagaggattcatactggggaaagaccctatcaatgtgctatatgtgggaaggccttcatccagaagtcacaactaactgtacaccagagaattcacacagtggtaaaatcattgccaactttcttgtacaaagtggttgatatcggtaagcctatccctaaccctctcctcggtctcgattctacgtagtaatgaactagtccgtaacttgaaagtatttcgatttcttggctttatatatcttgtggaaaggacgaaagaggatgtggtagccattttcc

SEQ ID NO: 3216 - DNA, 1733 bp, Homo sapiens
  source 1..1733: mol_type = genomic DNA
atcgattgatcaacaagtttgtacaaaaaagttggcatggaagatatacaaacaaatgcggaactgaaaagcactcaggagcagtctgtgcccgcagaaagtgcagcggttttgaatgactacagtttaaccaaatctcatgaaatggaaaatgtggacagtggagaaggcccagccaatgaagatgaagacataggagatgattcaatgaaagtgaaagatgaatacagtgaaagagatgagaatgttttaaagtcagaacccatgggaaatgcagaagagcctgaaatcccttacagctattcaagagaatataatgaatatgaaaacattaagttggagagacatgttgtctcattcgatagtagcaggccaaccagtggaaagatgaactgcgatgtgtgtggattatcctgcatcagcttcaatgtcttaatggttcataagcgaagccatactggtgaacgcccattccagtgtaatcagtgtggggcatcttttactcagaaaggtaacctcctccgccacattaaactgcacacaggggaaaaaccttttaagtgtcacctctgcaactatgcatgccaaagaagagatgcgctcacggggcatcttaggacacattctgtggagaaaccctacaaatgtgagttttgtggaaggagttacaagcagagaagttcccttgaggagcacaaggagcgctgccgtacatttcttcagagcactgacccaggggacactgcaagtgcggaggcaagacacatcaaagcagagatgggaagtgaaagagctctcgtactggacagattagcaagcaatgtggcaaaacgaaaaagctcaatgcctcagaaattcattggtgagaagcgccactgctttgatgtcaactataattcaagttacatgtatgagaaagagagtgagctcatacagacccgcatgatggaccaagccatcaataacgccatcagctatcttggcgccgaagccctgcgccccttggtccagacaccgcctgctcccacctcggagatggttccagttatcagcagcatgtatcccatagccctcacccgggctgagatgtcaaacggtgcccctcaagagctggaaaagaaaagcatccaccttccagagaagagcgtgccttctgagagaggcctctctcccaacaatagtggccacgactccacggacactgacagcaaccatgaagaacgccagaatcacatctatcagcaaaatcacatggtcctgtctcgggcccgcaatgggatgccacttctgaaggaggttccccgctcttacgaactcctcaagcccccgcccatctgcccaagagactccgtcaaagtgatcaacaaggaaggggaggtgatggatgtgtatcggtgtgaccactgccgcgtcctcttcctggactatgtgatgttcacgattcacatgggctgccacggcttccgtgaccctttcgagtgtaacatgtgtggatatcgaagccatgatcggtatgagttctcgtctcacatagccagaggagaacacagagccctgctgaagtgcccaactttcttgtacaaagtggttgatatcggtaagcctatccctaaccctctcctcggtctcgattctacgtagtaatgaactagtccgtaacttgaaagtatttcgatttcttggctttatatatcttgtggaaaggacgaggatacatcctataatgtgcatta

SEQ ID NO: 3217 - DNA, 1592 bp, Homo sapiens
  source 1..1592: mol_type = genomic DNA
atcgattgatcaacaagtttgtacaaaaaagttggcatgcagctgagaaaaatgcagaccgtcaaaaaggagcaggcgtctcttgatgccagtagcaatgtggacaagatgatggtccttaattctgctttaacggaagtgtcagaagactccacaacaggtgaggagctgcttctcagtgaaggaagtgtggggaagaacaaatcttctgcatgtcggaggaaacgggaattcattcctgatgaaaagaaagatgctatgtattgggaaaaaaggcggaaaaataatgaagctgccaaaagatctcgtgagaagcgtcgactgaatgacctggttttagagaacaaactaattgcactgggagaagaaaacgccactttaaaagctgagctgctttcactaaaattaaagtttggtttaattagctccacagcatatgctcaagagattcagaaactcagtaattctacagctgtgtactttcaagattaccagacttccaaatccaatgtgagttcatttgtggacgagcacgaaccctcgatggtgtcaagtagttgtatttctgtcattaaacactctccacaaagctcgctgtccgatgtttcagaagtgtcctcagtagaacacacgcaggagagctctgtgcagggaagctgcagaagtcctgaaaacaagttccagattatcaagcaagagccgatggaattagagagctacacaagggagccaagagatgaccgaggctcttacacagcgtccatctatcaaaactatatggggaattctttctctgggtactcacactctcccccactactgcaagtcaaccgatcctccagcaactccccgagaacgtcggaaactgatgatggtgtggtaggaaagtcatctgatggagaagacgagcaacaggtccccaagggccccatccattctccagttgaactcaagcatgtgcatgcaactgtggttaaagttccagaagtgaattcctctgccttgccacacaagctccggatcaaagccaaagccatgcagatcaaagtagaagcctttgataatgaatttgaggccacgcaaaaactttcctcacctattgacatgacatctaaaagacatttcgaactcgaaaagcatagtgccccaagtatggtacattcttctcttactcctttctcagtgcaagtgactaacattcaagattggtctctcaaatcggagcactggcatcaaaaagaactgagtggcaaaactcagaatagtttcaaaactggagttgttgaaatgaaagacagtggctacaaagtttctgacccagagaacttgtatttgaagcaggggatagcaaacttatctgcagaggttgtctcactcaagagacttatagccacacaaccaatctctgcttcagactctgggtacccaactttcttgtacaaagtggttgatatcggtaagcctatccctaaccctctcctcggtctcgattctacgtagtaatgaactagtccgtaacttgaaagtatttcgatttcttggctttatatatcttgtggaaaggacgagccagcgaggaggccttgcgtata

SEQ ID NO: 3218 - DNA, 1700 bp, Homo sapiens
  source 1..1700: mol_type = genomic DNA
atcgattgatcaacaagtttgtacaaaaaagttggcatgaaccagtccatcccagtggctcccaccccaccccgccgcgtgcggctgaagccctggctggtggcccaggtgaacagctgccagtacccagggcttcaatgggtcaacggggaaaagaaattattctgcatcccctggaggcatgccacaaggcatggtcccagccaggacggagataacaccatcttcaaggcctgggccaaggagacagggaaatacaccgaaggcgtggatgaagccgatccggccaagtggaaggccaacctgcgctgtgcccttaacaagagccgggacttccgcctcatctacgacgggccccgggacatgccacctcagccctacaagatctacgaggtctgctccaatggccctgctcccacagactcccagccccctgaggattactcttttggtgcaggagaggaggaggaagaagaggaagagctgcagaggatgttgccaagcctgagcctcacagaggatgtcaagtggccgcccactctgcagccgcccactctgcggccgcctactctgcagccgcccactctgcagccgcccgtggtgctgggtccccctgctccagaccccagccccctggctcctccccctggcaaccctgctggcttcagggagcttctctctgaggtcctggagcctgggcccctgcctgccagcctgccccctgcaggcgaacagctcctgccagacctgctgatcagcccccacatgctgcctctgaccgacctggagatcaagtttcagtaccgggggcggccaccccgggccctcaccatcagcaacccccatggctgccggctcttctacagccagctggaggccacccaggagcaggtggaactcttcggccccataagcctggagcaagtgcgcttccccagccctgaggacatccccagtgacaagcagcgcttctacacgaaccagctgctggatgtcctggaccgcgggctcatcctccagctacagggccaggacctttatgccatccgcctgtgtcagtgcaaggtgttctggagcgggccttgtgcctcagcccatgactcatgccccaaccccatccagcgggaggtcaagaccaagcttttcagcctggagcattttctcaatgagctcatcctgttccaaaagggccagaccaacaccccaccacccttcgagatcttcttctgctttggggaagaatggcctgaccgcaaaccccgagagaagaagctcattactgtacaggtggtgcctgtagcagctcgactgctgctggagatgttctcaggggagctatcttggtcagctgatagtatccggctacagatctcaaacccagacctcaaagaccgcatggtggagcaattcaaggagctccatcacatctggcagtcccagcagcggttgcagcctgtggcccaggcccctcctggagcaggccttggtgttggccaggggccctggcctatgcacccagctggcatgcaatacccaactttcttgtacaaagtggttgatatcggtaagcctatccctaaccctctcctcggtctcgattctacgtagtaatgaactagtccgtaacttgaaagtatttcgatttcttggctttatatatcttgtggaaaggacgaaacctgcagtacttaagacttagg

SEQ ID NO: 3219 - DNA, 1487 bp, Homo sapiens
  source 1..1487: mol_type = genomic DNA
atcgattgatcaacaagtttgtacaaaaaagttggcaccatgttcaggaccaaacgatctgcgctcgtccggcgtctctggaggagccgtgcgcccggcggcgaggacgaggaggagggcgcagggggaggtggaggaggaggcgagctgcggggagaaggggcgacggacagccgagcgcatggggccggtggcggcggcccgggcagggctggatgctgcctgggcaaggcggtgcgaggtgccaaaggtcaccaccatccccacccgccagccgcgggcgccggcgcggccgggggcgccgaggcggatctgaaggcgctcacgcactcggtgctcaagaaactgaaggagcggcagctggagctgctgctccaggccgtggagtcccgcggcgggacgcgcaccgcgtgcctcctgctgcccggccgcctggactgcaggctgggcccgggggcgcccgccggcgcgcagcctgcgcagccgccctcgtcctactcgctccccctcctgctgtgcaaagtgttcaggtggccggatctcaggcattcctcggaagtcaagaggctgtgttgctgtgaatcttacgggaagatcaaccccgagctggtgtgctgcaacccccatcaccttagccgactctgcgaactagagtctcccccccctccttactccagatacccgatggattttctcaaaccaactgcagactgtccagatgctgtgccttcctccgctgaaacagggggaacgaattatctggcccctggggggctttcagattcccaacttcttctggagcctggggatcggtcacactggtgcgtggtggcatactgggaggagaagacgagagtggggaggctctactgtgtccaggagccctctctggatatcttctatgatctacctcaggggaatggcttttgcctcggacagctcaattcggacaacaagagtcagctggtgcagaaggtgcggagcaaaatcggctgcggcatccagctgacgcgggaggtggatggtgtgtgggtgtacaaccgcagcagttaccccatcttcatcaagtccgccacactggacaacccggactccaggacgctgttggtacacaaggtgttccccggtttctccatcaaggctttcgactacgagaaggcgtacagcctgcagcggcccaatgaccacgagtttatgcagcagccgtggacgggctttaccgtgcagatcagctttgtgaagggctggggccagtgctacacccgccagttcatcagcagctgcccgtgctggctagaggtcatcttcaacagccggttgccaactttcttgtacaaagtggttgatatcggtaagcctatccctaaccctctcctcggtctcgattctacgtagtaatgaactagtccgtaacttgaaagtatttcgatttcttggctttatatatcttgtggaaaggacgatcagattctgttacagaagtaaaa

SEQ ID NO: 3220 - DNA, 1487 bp, Homo sapiens
  source 1..1487: mol_type = genomic DNA
atcgattgatcaacaagtttgtacaaaaaagttggcaccatgtgtgaccggaatggtggtcggcggcttcgacagtggctgatcgagcagattgacagtagcatgtatccaggactgatttgggagaatgaggagaagagcatgttccggatcccttggaaacacgctggcaagcaagattataatcaggaagtggatgcctccatttttaaggcctgggcagtttttaaagggaagtttaaagaaggggacaaagctgaaccagccacttggaagacgaggttacgctgtgctttgaataagagcccagattttgaggaagtgacggaccggtcccaactggacatttccgagccatacaaagtttaccgaattgttcctgaggaagagcaaaaatgcaaactaggcgtggcaactgctggctgcgtgaatgaagttacagagatggagtgcggtcgctctgaaatcgacgagctgatcaaggagccttctgtggacgattacatggggatgatcaaaaggagcccttccccgccggaggcctgtcggagtcagctccttccagactggtgggcgcagcagcccagcacaggcgtgccgctggtgacggggtacaccacctacgacgcgcaccattcagcattctcccagatggtgatcagcttctactatgggggcaagctggtgggccaggccaccaccacctgccccgagggctgccgcctgtccctgagccagcctgggctgcccggcaccaagctgtatgggcccgagggcctggagctggtgcgcttcccgccggccgacgccatccccagcgagcgacagaggcaggtgacgcggaagctgttcgggcacctggagcgcggggtgctgctgcacagcagccggcagggcgtgttcgtcaagcggctgtgccagggccgcgtgttctgcagcggcaacgccgtggtgtgcaaaggcaggcccaacaagctggagcgtgatgaggtggtccaggtcttcgacaccagccagttcttccgagagctgcagcagttctataacagccagggccggcttcctgacggcagggtggtgctgtgctttggggaagagtttccggatatggcccccttgcgctccaaactcattctcgtgcagattgagcagctgtatgtccggcaactggcagaagaggctgggaagagctgtggagccggctctgtgatgcaggcccccgaggagccgccgccagaccaggtcttccggatgtttccagatatttgtgcctcacaccagagatcatttttcagagaaaaccaacagatcaccgtcttgccaactttcttgtacaaagtggttgatatcggtaagcctatccctaaccctctcctcggtctcgattctacgtagtaatgaactagtccgtaacttgaaagtatttcgatttcttggctttatatatcttgtggaaaggacgacagcttataaaagtattgatgttg

SEQ ID NO: 3221 - DNA, 1694 bp, Homo sapiens
  source 1..1694: mol_type = genomic DNA
atcgattgatcaacaagtttgtacaaaaaagttggcaccatgtcttctaattcagatactggggatttacaagagtctttaaagcacggacttacacctattgtgtctcaatttaaaatggtgaattactcctatgatgaagatctggaagagctttgtcccgtgtgtggagataaagtgtctgggtaccattatgggctcctcacctgtgaaagctgcaagggattttttaagcgaacagtccaaaataataaaaggtacacatgtatagaaaaccagaactgccaaattgacaaaacacagagaaagcgttgtccttactgtcgttttcaaaaatgtctaagtgttggaatgaagctagaagctgtaagggccgaccgaatgcgtggaggaaggaataagtttgggccaatgtacaagagagacagggccctgaagcaacagaaaaaagccctcatccgagccaatggacttaagctagaagccatgtctcaggtgatccaagctatgccctctgacctgaccatttcctctgcaattcaaaacatccactctgcctccaaaggcctacctctgaaccatgctgccttgcctcctacagactatgacagaagtccctttgtaacatcccccattagcatgacaatgccccctcacggcagcctgcaaggttaccaaacatatggccactttcctagccgggccatcaagtctgagtacccagacccctataccagctcacccgagtccataatgggctattcatatatggatagttaccagacgagctctccagcaagcatcccacatctgatactggaacttttgaagtgtgagccagatgagcctcaagtccaggctaaaatcatggcctatttgcagcaagagcaggctaaccgaagcaagcacgaaaagctgagcacctttgggcttatgtgcaaaatggcagatcaaactctcttctccattgtcgagtgggccaggagtagtatcttcttcagagaacttaaggttgatgaccaaatgaagctgcttcagaactgctggagtgagctcttaatcctcgaccacatttaccgacaagtggtacatggaaaggaaggatccatcttcctggttactgggcaacaagtggactattccataatagcatcacaagccggagccaccctcaacaacctcatgagtcatgcacaggagttagtggcaaaacttcgttctctccagtttgatcaacgagagttcgtatgtctgaaattcttggtgctctttagtttagatgtcaaaaaccttgaaaacttccagctggtagaaggtgtccaggaacaagtcaatgccgccctgctggactacacaatgtgtaactacccgcagcagacagagaaatttggacagctacttcttcgactacccgaaatccgggccatcagtatgcaggctgaagaatacctctactacaagcacctgaacggggatgtgccctataataaccttctcattgaaatgttgcatgccaaaagagcattgccaactttcttgtacaaagtggttgatatcggtaagcctatccctaaccctctcctcggtctcgattctacgtagtaatgaactagtccgtaacttgaaagtatttcgatttcttggctttatatatcttgtggaaaggacgatccagctcacagaaaagcgccccc

SEQ ID NO: 3222 - DNA, 1802 bp, Homo sapiens
  source 1..1802: mol_type = genomic DNA
atcgattgatcaacaagtttgtacaaaaaagcaggcaccatggatataaaaaactcaccatctagccttaattctccttcctcctacaactgcagtcaatccatcttacccctggagcacggctccatatacataccttcctcctatgtagacagccaccatgaatatccagccatgacattctatagccctgctgtgatgaattacagcattcccagcaatgtcactaacttggaaggtgggcctggtcggcagaccacaagcccaaatgtgttgtggccaacacctgggcacctttctcctttagtggtccatcgccagttatcacatctgtatgcggaacctcaaaagagtccctggtgtgaagcaagatcgctagaacacaccttacctgtaaacagagagacactgaaaaggaaggttagtgggaaccgttgcgccagccctgttactggtccaggttcaaagagggatgctcacttctgcgctgtctgcagcgattacgcatcgggatatcactatggagtctggtcgtgtgaaggatgtaaggccttttttaaaagaagcattcaaggacataatgattatatttgtccagctacaaatcagtgtacaatcgataaaaaccggcgcaagagctgccaggcctgccgacttcggaagtgttacgaagtgggaatggtgaagtgtggctcccggagagagagatgtgggtaccgccttgtgcggagacagagaagtgccgacgagcagctgcactgtgccggcaaggccaagagaagtggcggccacgcgccccgagtgcgggagctgctgctggacgccctgagccccgagcagctagtgctcaccctcctggaggctgagccgccccatgtgctgatcagccgccccagtgcgcccttcaccgaggcctccatgatgatgtccctgaccaagttggccgacaaggagttggtacacatgatcagctgggccaagaagattcccggctttgtggagctcagcctgttcgaccaagtgcggctcttggagagctgttggatggaggtgttaatgatggggctgatgtggcgctcaattgaccaccccggcaagctcatctttgctccagatcttgttctggacagggatgaggggaaatgcgtagaaggaattctggaaatctttgacatgctcctggcaactacttcaaggtttcgagagttaaaactccaacacaaagaatatctctgtgtcaaggccatgatcctgctcaattccagtatgtaccctctggtcacagcgacccaggatgctgacagcagccggaagctggctcacttgctgaacgccgtgaccgatgctttggtttgggtgattgccaagagcggcatctcctcccagcagcaatccatgcgcctggctaacctcctgatgctcctgtcccacgtcaggcatgcgagtaacaagggcatggaacatctgctcaacatgaagtgcaaaaatgtggtcccagtgtatgacctgctgctggagatgctgaatgcccacgtgcttcgcgggtgcaagtcctccatcacggggtccgagtgcagcccggcagaggacagtaaaagcaaagagggctcccagaacccacagtctcagtgagacccagctttcttgtacaaagtggttgatatcggtaagcctatccctaaccctctcctcggtctcgattctacgtagtaatgaactagtccgtaacttgaaagtatttcgatttcttggctttatatatcttgtggaaaggacgatatgatcccccgggcgtatttagc

SEQ ID NO: 3223 - DNA, 1364 bp, Homo sapiens
  source 1..1364: mol_type = genomic DNA
atcgattgatcaacaagtttgtacaaaaaagcaggcaccatgccgcagctggactccggcgggggcggcgcgggcggcggcgacgacctcggcgcgccggacgagctgctggccttccaggatgaaggcgaggagcaggacgacaagagccgcgacagcgccgccggtcccgagcgcgacctggccgagctcaagtcgtcgctcgtgaacgagtccgagggcgcggccggcggcgcagggatcccgggggtcccgggggccggcgccggggcccgcggcgaggccgaggctctcgggcgggaacacgctgcgcagagactcttcccggacaaacttccagagcccctggaggacggcctgaaggccccggagtgcaccagcggcatgtacaaagagaccgtctactccgccttcaatctgctcatgcattacccacccccctcgggagcagggcagcacccccagccgcagcccccgctgcacaaggccaatcagcccccccacggtgtcccccaactctctctctacgaacatttcaacagcccacatcccacccctgcacctgcggacatcagccagaagcaagttcacaggcctctgcagacccctgacctctctggcttctactccctgacctcaggcagcatggggcagctcccccacactgtgagctggttcacccacccatccttgatgctaggttctggtgtacctggtcacccagcagccatcccccacccggccattgtgcccccctcagggaagcaggagctgcagcccttcgaccgcaacctgaagacacaagcagagtccaaggcagagaaggaggccaagaagccaaccatcaagaagcccctcaatgccttcatgctgtacatgaaggagatgagagccaaggtcattgcagagtgcacacttaaggagagcgctgccatcaaccagatcctgggccgcaggtggcacgcgctgtcgcgagaagagcaggccaagtactatgagctggcccgcaaggagaggcagctgcacatgcagctatacccaggctggtcagcgcgggacaactacgggaagaagaagaggcggtcgagggaaaagcaccaagaatccaccacaggaggaaaaagaaatgcattcggtacttacccggagaaggccgctgccccagccccgttccttccgatgacagtgctctagaacccagctttcttgtacaaagtggttgatatcggtaagcctatccctaaccctctcctcggtctcgattctacgtagtaatgaactagtccgtaacttgaaagtatttcgatttcttggctttatatatcttgtggaaaggacgatttgaatatcgggttttttccaat

SEQ ID NO: 3224 - DNA, 1937 bp, Homo sapiens
  source 1..1937: mol_type = genomic DNA
atcgattgatcaacaagtttgtacaaaaaagcaggcaccatgtctcatgcggccgaaccagctcgggatggcgtagaggccagcgcggagggccctcgagccgtgttcgtgctgttggaggagcgcaggccggccgactcggctcagctgctcagcctgaactctttgcttccggaatccgggattgttgctgacatagaattagaaaacgtccttgatcctgacagcttctacgagctcaaaagccaacccttaccccttcgctcaagcctcccaatatcactgcaggccacaccagccaccccagctacactctctgcatcgtcttctgcagggggctccaggacccctgccatgtcgtcatcttcttcatcgagggtcttgctgcggcagcagctaatgcgggcccaggcgcaggagcaggagaggcgtgagcgtcgggaacaggccgccgcggctcccttccccagtcctgcacctgcctctcctgccatctctgtggttggcgtctctgctgggggccacacattgagccgtccaccccctgctcaggtgcccagggaggtgctcaaggtgcagacccatctggagaacccaacgcgctaccacctgcagcaggcgcgccggcagcaggtgaaacagtacctgtccaccacactcgggcccaagctggcttcccaggccctcaccccaccgccggggcccgcaagtgcccagccactgcctgcccctgaggctgcccacactaccggccccacaggcagtgcgcccaacagccccatggcgctgctcaccatcgggtccagctcagagaaggagattgatgatgtcattgatgagatcatcagcctggagtccagttacaatgatgaaatgctcagctatctgcccggaggcaccacaggactgcagctccccagcacgctgcctgtgtcagggaatctgcttgatgtgtacagtagtcaaggcgtggccacaccagccatcactgtcagcaactcctgcccagctgagctgcccaacatcaaacgggagatctctgagaccgaggcaaaggcccttttgaaggaacggcagaagaaagacaatcacaacctaattgagcgtcgcaggcgattcaacattaacgacaggatcaaggaactgggcactctcatccctaagtccagtgacccggagatgcgctggaacaagggcaccatcctgaaggcctctgtggattatatccgcaagctgcagaaggagcagcagcgctccaaagacctggagagccggcagcgatccctggagcaggccaaccgcagcctgcagctccgaattcaggaactagaactgcaggcccagatccatggcctgccagtgcctcccactccagggctgctttccttggccacgacttcggcttctgacagcctcaagccagagcagctggacattgaggaggagggcaggccaggcgcagcaacgttccatgtaggggggggacctgcccagaatgctccccatcagcagccccctgcaccgccctcagatgcccttctggacctgcactttcccagcgaccacctgggggacctgggagaccccttccacctggggctggaggacattctgatggaggaggaggagggggtggtgggaggactgtcggggggtgccctgtccccactgcgggctgcctccgatcccctgctctcttcagtgtcccctgctgtctccaaggccagcagccgccgcagcagcttcagcatggaagaggagtcctagaacccagctttcttgtacaaagtggttgatatcggtaagcctatccctaaccctctcctcggtctcgattctacgtagtaatgaactagtccgtaacttgaaagtatttcgatttcttggctttatatatcttgtggaaaggacgaaataatatcatatcaacgccattc

SEQ ID NO: 3225 - DNA, 7625 bp, Homo sapiens
  source 1..7625: mol_type = genomic DNA
atcgattgatcaacaagtttgtacaaaaaagcaggcaccatgcccgccctgcgccccgctctgctgtgggcgctgctggcgctctggctgtgctgcgcggcccccgcgcatgcattgcagtgtcgagatggctatgaaccctgtgtaaatgaaggaatgtgtgttacctaccacaatggcacaggatactgcaaatgtccagaaggcttcttgggggaatattgtcaacatcgagacccctgtgagaagaaccgctgccagaatggtgggacttgtgtggcccaggccatgctggggaaagccacgtgccgatgtgcctcagggtttacaggagaggactgccagtactcaacatctcatccatgctttgtgtctcgaccctgcctgaatggcggcacatgccatatgctcagccgggatacctatgagtgcacctgtcaagtcgggtttacaggtaaggagtgccaatggacggatgcctgcctgtctcatccctgtgcaaatggaagtacctgtaccactgtggccaaccagttctcctgcaaatgcctcacaggcttcacagggcagaaatgtgagactgatgtcaatgagtgtgacattccaggacactgccagcatggtggcacctgcctcaacctgcctggttcctaccagtgccagtgccctcagggcttcacaggccagtactgtgacagcctgtatgtgccctgtgcaccctcaccttgtgtcaatggaggcacctgtcggcagactggtgacttcacttttgagtgcaactgccttccaggttttgaagggagcacctgtgagaggaatattgatgactgccctaaccacaggtgtcagaatggaggggtttgtgtggatggggtcaacacttacaactgccgctgtcccccacaatggacaggacagttctgcacagaggatgtggatgaatgcctgctgcagcccaatgcctgtcaaaatgggggcacctgtgccaaccgcaatggaggctatggctgtgtatgtgtcaacggctggagtggagatgactgcagtgagaacattgatgattgtgccttcgcctcctgtactccaggctccacctgcatcgaccgtgtggcctccttctcttgcatgtgcccagaggggaaggcaggtctcctgtgtcatctggatgatgcatgcatcagcaatccttgccacaagggggcactgtgtgacaccaaccccctaaatgggcaatatatttgcacctgcccacaaggctacaaaggggctgactgcacagaagatgtggatgaatgtgccatggccaatagcaatccttgtgagcatgcaggaaaatgtgtgaacacggatggcgccttccactgtgagtgtctgaagggttatgcaggacctcgttgtgagatggacatcaatgagtgccattcagacccctgccagaatgatgctacctgtctggataagattggaggcttcacatgtctgtgcatgccaggtttcaaaggtgtgcattgtgaattagaaataaatgaatgtcagagcaacccttgtgtgaacaatgggcagtgtgtggataaagtcaatcgtttccagtgcctgtgtcctcctggtttcactgggccagtttgccagattgatattgatgactgttccagtactccgtgtctgaatggggcaaagtgtatcgatcacccgaatggctatgaatgccagtgtgccacaggtttcactggtgtgttgtgtgaggagaacattgacaactgtgaccccgatccttgccaccatggtcagtgtcaggatggtattgattcctacacctgcatctgcaatcccgggtacatgggcgccatctgcagtgaccagattgatgaatgttacagcagcccttgcctgaacgatggtcgctgcattgacctggtcaatggctaccagtgcaactgccagccaggcacgtcaggggttaattgtgaaattaattttgatgactgtgcaagtaacccttgtatccatggaatctgtatggatggcattaatcgctacagttgtgtctgctcaccaggattcacagggcagagatgtaacattgacattgatgagtgtgcctccaatccctgtcgcaagggtgcaacatgtatcaacggtgtgaatggtttccgctgtatatgccccgagggaccccatcaccccagctgctactcacaggtgaacgaatgcctgagcaatccctgcatccatggaaactgtactggaggtctcagtggatataagtgtctctgtgatgcaggctgggttggcatcaactgtgaagtggacaaaaatgaatgcctttcgaatccatgccagaatggaggaacttgtgacaatctggtgaatggatacaggtgtacttgcaagaagggctttaaaggctataactgccaggtgaatattgatgaatgtgcctcaaatccatgcctgaaccaaggaacctgctttgatgacataagtggctacacttgccactgtgtgctgccatacacaggcaagaattgtcagacagtattggctccctgttccccaaacccttgtgagaatgctgctgtttgcaaagagtcaccaaattttgagagttatacttgcttgtgtgctcctggctggcaaggtcagcggtgtaccattgacattgacgagtgtatctccaagccctgcatgaaccatggtctctgccataacacccagggcagctacatgtgtgaatgtccaccaggcttcagtggtatggactgtgaggaggacattgatgactgccttgccaatccttgccagaatggaggttcctgtatggatggagtgaatactttctcctgcctctgccttccgggtttcactggggataagtgccagacagacatgaatgagtgtctgagtgaaccctgtaagaatggagggacctgctctgactacgtcaacagttacacttgcaagtgccaggcaggatttgatggagtccattgtgagaacaacatcaatgagtgcactgagagctcctgtttcaatggtggcacatgtgttgatgggattaactccttctcttgcttgtgccctgtgggtttcactggatccttctgcctccatgagatcaatgaatgcagctctcatccatgcctgaatgagggaacgtgtgttgatggcctgggtacctaccgctgcagctgccccctgggctacactgggaaaaactgtcagaccctggtgaatctctgcagtcggtctccatgtaaaaacaaaggtacttgcgttcagaaaaaagcagagtcccagtgcctatgtccatctggatgggctggtgcctattgtgacgtgcccaatgtctcttgtgacatagcagcctccaggagaggtgtgcttgttgaacacttgtgccagcactcaggtgtctgcatcaatgctggcaacacgcattactgtcagtgccccctgggctatactgggagctactgtgaggagcaactcgatgagtgtgcgtccaacccctgccagcacggggcaacatgcagtgacttcattggtggatacagatgcgagtgtgtcccaggctatcagggtgtcaactgtgagtatgaagtggatgagtgccagaatcagccctgccagaatggaggcacctgtattgaccttgtgaaccatttcaagtgctcttgcccaccaggcactcggggcctactctgtgaagagaacattgatgactgtgcccggggtccccattgccttaatggtggtcagtgcatggataggattggaggctacagttgtcgctgcttgcctggctttgctggggagcgttgtgagggagacatcaacgagtgcctctccaacccctgcagctctgagggcagcctggactgtatacagctcaccaatgactacctgtgtgtttgccgtagtgcctttactggccggcactgtgaaaccttcgtcgatgtgtgtccccagatgccctgcctgaatggagggacttgtgctgtggccagtaacatgcctgatggtttcatttgccgttgtcccccgggattttccggggcaaggtgccagagcagctgtggacaagtgaaatgtaggaagggggagcagtgtgtgcacaccgcctctggaccccgctgcttctgccccagtccccgggactgcgagtcaggctgtgccagtagcccctgccagcacgggggcagctgccaccctcagcgccagcctccttattactcctgccagtgtgccccaccattctcgggtagccgctgtgaactctacacggcaccccccagcacccctcctgccacctgtctgagccagtattgtgccgacaaagctcgggatggcgtctgtgatgaggcctgcaacagccatgcctgccagtgggatgggggtgactgttctctcaccatggagaacccctgggccaactgctcctccccacttccctgctgggattatatcaacaaccagtgtgatgagctgtgcaacacggtcgagtgcctgtttgacaactttgaatgccaggggaacagcaagacatgcaagtatgacaaatactgtgcagaccacttcaaagacaaccactgtgaccaggggtgcaacagtgaggagtgtggttgggatgggctggactgtgctgctgaccaacctgagaacctggcagaaggtaccctggttattgtggtattgatgccacctgaacaactgctccaggatgctcgcagcttcttgcgggcactgggtaccctgctccacaccaacctgcgcattaagcgggactcccagggggaactcatggtgtacccctattatggtgagaagtcagctgctatgaagaaacagaggatgacacgcagatcccttcctggtgaacaagaacaggaggtggctggctctaaagtctttctggaaattgacaaccgccagtgtgttcaagactcagaccactgcttcaagaacacggatgcagcagcagctctcctggcctctcacgccatacaggggaccctgtcataccctcttgtgtctgtcgtcagtgaatccctgactccagaacgcactcagctcctctatctccttgctgttgctgttgtcatcattctgtttattattctgctgggggtaatcatggcaaaacgaaagcgtaagcatggctctctctggctgcctgaaggtttcactcttcgccgagatgcaagcaatcacaagcgtcgtgagccagtgggacaggatgctgtggggctgaaaaatctctcagtgcaagtctcagaagctaacctaattggtactggaacaagtgaacactgggtcgatgatgaagggccccagccaaagaaagtaaaggctgaagatgaggccttactctcagaagaagatgaccccattgatcgacggccatggacacagcagcaccttgaagctgcagacatccgtaggacaccatcgctggctctcacccctcctcaggcagagcaggaggtggatgtgttagatgtgaatgtccgtggcccagatggctgcaccccattgatgttggcttctctccgaggaggcagctcagatttgagtgatgaagatgaagatgcagaggactcttctgctaacatcatcacagacttggtctaccagggtgccagcctccaggcccagacagaccggactggtgagatggccctgcaccttgcagcccgctactcacgggctgatgctgccaagcgtctcctggatgcaggtgcagatgccaatgcccaggacaacatgggccgctgtccactccatgctgcagtggcagctgatgcccaaggtgtcttccagattctgattcgcaaccgagtaactgatctagatgccaggatgaatgatggtactacacccctgatcctggctgcccgcctggctgtggagggaatggtggcagaactgatcaactgccaagcggatgtgaatgcagtggatgaccatggaaaatctgctcttcactgggcagctgctgtcaataatgtggaggcaactcttttgttgttgaaaaatggggccaaccgagacatgcaggacaacaaggaagagacacctctgtttcttgctgcccgggaggggagctatgaagcagccaagatcctgttagaccattttgccaatcgagacatcacagaccatatggatcgtcttccccgggatgtggctcgggatcgcatgcaccatgacattgtgcgccttctggatgaatacaatgtgaccccaagccctccaggcaccgtgttgacttctgctctctcacctgtcatctgtgggcccaacagatctttcctcagcctgaagcacaccccaatgggcaagaagtctagacggcccagtgccaagagtaccatgcctactagcctccctaaccttgccaaggaggcaaaggatgccaagggtagtaggaggaagaagtctctgagtgagaaggtccaactgtctgagagttcagtaactttatcccctgttgattccctagaatctcctcacacgtatgtttccgacaccacatcctctccaatgattacatcccctgggatcttacaggcctcacccaaccctatgttggccactgccgcccctcctgccccagtccatgcccagcatgcactatctttttctaaccttcatgaaatgcagcctttggcacatggggccagcactgtgcttccctcagtgagccagttgctatcccaccaccacattgtgtctccaggcagtggcagtgctggaagcttgagtaggctccatccagtcccagtcccagcagattggatgaaccgcatggaggtgaatgagacccagtacaatgagatgtttggtatggtcctggctccagctgagggcacccatcctggcatagctccccagagcaggccacctgaagggaagcacataaccacccctcgggagcccttgccccccattgtgactttccagctcatccctaaaggcagtattgcccaaccagcgggggctccccagcctcagtccacctgccctccagctgttgcgggccccctgcccaccatgtaccagattccagaaatggcccgtttgcccagtgtggctttccccactgccatgatgccccagcaggacgggcaggtagctcagaccattctcccagcctatcatcctttcccagcctctgtgggcaagtaccccacacccccttcacagcacagttatgcttcctcaaatgctgctgagcgaacacccagtcacagtggtcacctccagggtgagcatccctacctgacaccatccccagagtctcctgaccagtggtcaagttcatcaccccactctgcttctgactggtcagatgtgaccaccagccctacccctgggggtgctggaggaggtcagcggggacctgggacacacatgtctgagccaccacacaacaacatgcaggtttatgcgtgagacccagctttcttgtacaaagtggttgatatcggtaagcctatccctaaccctctcctcggtctcgattctacgtagtaatgaactagtccgtaacttgaaagtatttcgatttcttggctttatatatcttgtggaaaggacgagttctataacagggcaccaccctg

SEQ ID NO: 3226 - DNA, 1118 bp, Homo sapiens
  source 1..1118: mol_type = genomic DNA
atcgattgatcaacaagtttgtacaaaaaagttggcatgaagcgagctcaccccgagtacagctcctcggacagcgagctggacgagaccatcgaggtggagaaggagagtgcggacgagaatggaaacttgagttcggctctaggttccatgtccccaactacatcttcccagattttggccagaaaaagacggagaggaataattgagaagcgccgacgagaccggatcaataacagtttgtctgagctgagaaggctggtacccagtgcttttgagaagcagggatctgctaagctagaaaaagccgagatcctgcagatgaccgtggatcacctgaaaatgctgcatacggcaggagggaaaggttactttgacgcgcacgcccttgctatggactatcggagtttgggatttcgggaatgcctggcagaagttgcgcgttatctgagcatcattgaaggactagatgcctctgacccgcttcgagttcgactggtttcgcatctcaacaactacgcttcccagcgggaagccgcgagcggcgcccacgcgggcctcggacacattccctgggggaccgtcttcggacatcacccgcacatcgcgcacccgctgttgctgccccagaacggccacgggaacgcgggcaccacggcctcacccacggaaccgcaccaccagggcaggctgggctcggcacatccggaggcgcctgctttgcgagcgccccctagcggcagcctcggaccggtgctccctgtggtcacctccgcctccaaactgtcgccgcctctgctctcctcagtggcctccctgtcggccttccccttctctttcggctccttccacttactgtctcccaatgcactgagcccttcagcacccacgcaggctgcaaaccttggcaagccctatagaccttgggggacggagatcggagctttttacccaactttcttgtacaaagtggttgatatcggtaagcctatccctaaccctctcctcggtctcgattctacgtagtaatgaactagtccgtaacttgaaagtatttcgatttcttggctttatatatcttgtggaaaggacgaaccccgtgcaggggatgctaggtg

SEQ ID NO: 3227 - DNA, 1136 bp, Homo sapiens
  source 1..1136: mol_type = genomic DNA
atcgattgatcaacaagtttgtacaaaaaagcaggcaccatgaagcgagctcaccccgagtacagctcctcggacagcgagctggacgagaccatcgaggtggagaaggagagtgcggacgagaatggaaacttgagttcggctctaggttccatgtccccaactacatcttcccagattttggccagaaaaagacggagaggaataattgagaagcgccgacgagaccggatcaataacagtttgtctgagctgagaaggctggtacccagtgcttttgagaagcaggtaatggagcaaggatctgctaagctagaaaaagccgagatcctgcagatgaccgtggatcacctgaaaatgctgcatacggcaggagggaaaggttactttgacgcgcacgcccttgctatggactatcggagtttgggatttcgggaatgcctggcagaagttgcgcgttatctgagcatcattgaaggactagatgcctctgacccgcttcgagttcgactggtttcgcatctcaacaactacgcttcccagcgggaagccgcgagcggcgcccacgcgggcctcggacacattccctgggggaccgtcttcggacatcacccgcacatcgcgcacccgctgttgctgccccagaacggccacgggaacgcgggcaccacggcctcacccacggaaccgcaccaccagggcaggctgggctcggcacatccggaggcgcctgctttgcgagcgccccctagcggcagcctcggaccggtgctccctgtggtcacctccgcctccaaactgtcgccgcctctgctctcctcagtggcctccctgtcggccttccccttctctttcggctccttccacttactgtctcccaatgcactgagcccttcagcacccacgcaggctgcaaaccttggcaagccctatagaccttgggggacggagatcggagctttttaagacccagctttcttgtacaaagtggttgatatcggtaagcctatccctaaccctctcctcggtctcgattctacgtagtaatgaactagtccgtaacttgaaagtatttcgatttcttggctttatatatcttgtggaaaggacgaccatctacgcctgccgggcgggcg

SEQ ID NO: 3228 - DNA, 1637 bp, Homo sapiens
  source 1..1637: mol_type = genomic DNA
atcgattgatcaacaagtttgtacaaaaaagttggcatgaccatggttgacacagagatgccattctggcccaccaactttgggatcagctccgtggatctctccgtaatggaagaccactcccactcctttgatatcaagcccttcactactgttgacttctccagcatttctactccacattacgaagacattccattcacaagaacagatccagtggttgcagattacaagtatgacctgaaacttcaagagtaccaaagtgcaatcaaagtggagcctgcatctccaccttattattctgagaagactcagctctacaataagcctcatgaagagccttccaactccctcatggcaattgaatgtcgtgtctgtggagataaagcttctggatttcactatggagttcatgcttgtgaaggatgcaagggtttcttccggagaacaatcagattgaagcttatctatgacagatgtgatcttaactgtcggatccacaaaaaaagtagaaataaatgtcagtactgtcggtttcagaaatgccttgcagtggggatgtctcataatgccatcaggtttgggcggatgccacaggccgagaaggagaagctgttggcggagatctccagtgatatcgaccagctgaatccagagtccgctgacctccgggccctggcaaaacatttgtatgactcatacataaagtccttcccgctgaccaaagcaaaggcgagggcgatcttgacaggaaagacaacagacaaatcaccattcgttatctatgacatgaattccttaatgatgggagaagataaaatcaagttcaaacacatcacccccctgcaggagcagagcaaagaggtggccatccgcatctttcagggctgccagtttcgctccgtggaggctgtgcaggagatcacagagtatgccaaaagcattcctggttttgtaaatcttgacttgaacgaccaagtaactctcctcaaatatggagtccacgagatcatttacacaatgctggcctccttgatgaataaagatggggttctcatatccgagggccaaggcttcatgacaagggagtttctaaagagcctgcgaaagccttttggtgactttatggagcccaagtttgagtttgctgtgaagttcaatgcactggaattagatgacagcgacttggcaatatttattgctgtcattattctcagtggagaccgcccaggtttgctgaatgtgaagcccattgaagacattcaagacaacctgctacaagccctggagctccagctgaagctgaaccaccctgagtcctcacagctgtttgccaagctgctccagaaaatgacagacctcagacagattgtcacggaacacgtgcagctactgcaggtgatcaagaagacggagacagacatgagtcttcacccgctcctgcaggagatctacaaggacttgtactacccaactttcttgtacaaagtggttgatatcggtaagcctatccctaaccctctcctcggtctcgattctacgtagtaatgaactagtccgtaacttgaaagtatttcgatttcttggctttatatatcttgtggaaaggacgagtataacgccggagatccacgaca

SEQ ID NO: 3229 - DNA, 1727 bp, Homo sapiens
  source 1..1727: mol_type = genomic DNA
atcgattgatcaacaagtttgtacaaaaaagcaggcaccatgggtgaaactctgggagattctcctattgacccagaaagcgattccttcactgatacactgtctgcaaacatatcacaagaaatgaccatggttgacacagagatgccattctggcccaccaactttgggatcagctccgtggatctctccgtaatggaagaccactcccactcctttgatatcaagcccttcactactgttgacttctccagcatttctactccacattacgaagacattccattcacaagaacagatccagtggttgcagattacaagtatgacctgaaacttcaagagtaccaaagtgcaatcaaagtggagcctgcatctccaccttattattctgagaagactcagctctacaataagcctcatgaagagccttccaactccctcatggcaattgaatgtcgtgtctgtggagataaagcttctggatttcactatggagttcatgcttgtgaaggatgcaagggtttcttccggagaacaatcagattgaagcttatctatgacagatgtgatcttaactgtcggatccacaaaaaaagtagaaataaatgtcagtactgtcggtttcagaaatgccttgcagtggggatgtctcataatgccatcaggtttgggcggatgccacaggccgagaaggagaagctgttggcggagatctccagtgatatcgaccagctgaatccagagtccgctgacctccgggccctggcaaaacatttgtatgactcatacataaagtccttcccgctgaccaaagcaaaggcgagggcgatcttgacaggaaagacaacagacaaatcaccattcgttatctatgacatgaattccttaatgatgggagaagataaaatcaagttcaaacacatcacccccctgcaggagcagagcaaagaggtggccatccgcatctttcagggctgccagtttcgctccgtggaggctgtgcaggagatcacagagtatgccaaaagcattcctggttttgtaaatcttgacttgaacgaccaagtaactctcctcaaatatggagtccacgagatcatttacacaatgctggcctccttgatgaataaagatggggttctcatatccgagggccaaggcttcatgacaagggagtttctaaagagcctgcgaaagccttttggtgactttatggagcccaagtttgagtttgctgtgaagttcaatgcactggaattagatgacagcgacttggcaatatttattgctgtcattattctcagtggagaccgcccaggtttgctgaatgtgaagcccattgaagacattcaagacaacctgctacaagccctggagctccagctgaagctgaaccaccctgagtcctcacagctgtttgccaagctgctccagaaaatgacagacctcagacagattgtcacggaacatgtgcagctactgcaggtgatcaagaagacggagacagacatgagtcttcacccgctcctgcaggagatctacaaggacttgtactagaacccagctttcttgtacaaagtggttgatatcggtaagcctatccctaaccctctcctcggtctcgattctacgtagtaatgaactagtccgtaacttgaaagtatttcgatttcttggctttatatatcttgtggaaaggacgagcaatggcgctctcagacgtagtc

SEQ ID NO: 3230 - DNA, 1643 bp, Homo sapiens
  source 1..1643: mol_type = genomic DNA
atcgattgatcaacaagtttgtacaaaaaagttggcaccatggaactcttaacattcaaggatgtggccatagaattctctccagaagagtggaaatgtctggacacttcccagcagaatttatatagagatgtgatgttggagaactacagaaacctggtctccctgggtgttagtatctctaacccagacctggtcaccagtctggagcaaagaaaagagccctacaatttgaagatacatgaaacagcagccagacccccagctgtgtgttctcatttcacccaaaacctttggacagtgcagggcatagaagattcattccacaaacttataccaaaaggacatgagaaacgtggacatgagaatttaagaaaaacttgtaaaagtataaatgagtgtaaggtgcagaaaggtggttataatagaattaaccaatgcttattaactacccagaaaaaaacaattcaatctaatatatgtgtcaaagtttttcataaattttcaaattcaaacaaagataagataagatatactggagataaaacctttaaatgtaaagaatgtggcaaatcatttcacgtgctctcacgcctaactcaacacaaaagaattcatactggagagaacccctacacatgtgaagaatgtggcaaagcctttaattggtcctcaattcttactaaacataagagaattcatgccagagagaaattctacaagtgtgaagaatgtggtaaaggctttactcggtcctcacaccttactaaacataagagaattcatactggagagaaaccctacatatgtgaaaaatgtggtaaagcttttaaccaatcctcaacccttaatttacataagagaattcattctgcacaaaaatactacaaatgtgaagaatgtggtaaagcctttaagtggtcctcatcccttaatgaacataagagaattcatgctggagagaaacccttctcatgcgaagaatgtggcaatgtctttaccacatcctcagactttgctaaacataagagaattcatacaggagagaaaccctacaaatgtgaagaatgtggaaaatcctttaataggtccacaactcttacgacacataagagaatccatactggagagaaaccctacacatgtgaagaatgtggaaaagcctttaattggtcctcaacccttaatgtacacaagagaattcactctggaaaaaatccctacaaatgtgaagattgtggcaaagcctttaaagtgtttgcaaacctgcataatcataagaaaattcatactggagagaaaccctacatatgtaaacaatgtggcaaagcctttaaacagtcctcacacttgaataaacataagaaaattcacactgtagataaaccctacaaatgtaaagaatgcgggaaagcttttaagcagtactccaaccttcctcaacataagagaactcatactggaggaaaatttttgccaactttcttgtacaaagtggttgatatcggtaagcctatccctaaccctctcctcggtctcgattctacgtagtaatgaactagtccgtaacttgaaagtatttcgatttcttggctttatatatcttgtggaaaggacgagcaaggcctcgtttgtgtgcggag

SEQ ID NO: 3231 - DNA, 1238 bp, Homo sapiens
  source 1..1238: mol_type = genomic DNA
atcgattgatcaacaagtttgtacaaaaaagttggcaccatggaccccgagcactgcgcgcctttccgcgtggggcctgcacccggcccctatgtggcctcgggggacgagcctccgggcccgcagggaacccccgccgctgcgcctcacctgcaccccgcgccgccccgcggcccgcggctgacccgctttccggcctgcgggcccctggagccctacctcccagagccggccaagccgcccgccaagtacctgcaggacctcgggcccggcccggccctcaacggcggccacttctacgagggccccgcggaagctgaggagaagacctccaaagctgccagcttcccccagctgcccttggactgccgagggggccccagagacgggccctctaacttgcaaggctccccaggcccctgcctggccagcctgcatcttcctctttccccgggactccctgactccatggagttggccaagaacaagagcaagaagcgtcgtaaccgcacgaccttcagcacattccagctggaggagctggagaaggtcttccagaaaacccactatcctgatgtgtatgcccgggagcagctggccctgcgcacagacctgactgaggcccgggtacaggtctggttccagaaccgcagagccaagtggcggaagcgcgagcgttatgggaagatccaggaggggcggaaccccttcacggctgcctatgacatctctgtgctgccccgtactgacagccaccctcagctgcagaactccctgtgggccagtccaggatctgggagccctggaggcccctgccttgtgtctccagagggcatcccctccccatgcatgtctccatattcccacccccatgggagtgtggctggcttcatgggggtgccagccccttctgcggctcaccctggcatctactccatccatggctttccccccaccctggggggccacagctttgagccttcctcagatggtgactataagtctccaagcctcgtctcgctcagggtaaagcccaaggagccacccggccttctgaactggaccacgttgccaactttcttgtacaaagtggttgatatcggtaagcctatccctaaccctctcctcggtctcgattctacgtagtaatgaactagcccgtaacttgaaagtatttcgatttcttggctttatatatcttgtggaaaggacgacaatgcgggaatgaagttatcggt

SEQ ID NO: 3232 - DNA, 1061 bp, Homo sapiens
  source 1..1061: mol_type = genomic DNA
atcgattgatcaacaagtttgtacaaaaaagttggcaccatgtacggaagctgtcttttggagaaagaagcaggcatgtacccgggcactctcatgagccctgggggcgacggcacagctgggacaggcggcacagggggcggtgggagtccgatgccagcctccaatttcgctgcggcaccggctttctcgcactatatggggtatcctcatatgcccagcatggatcctcactggccgtctctgggagtctggggctcaccctacagtcccccgcgagaagactggagcgtgtatcctgggccgtctagtacaatgggcacagtgccggtgaacgacgtgacctctagccccgccgctttctgctcgaccgactacagcaacttgggccctgtgggcggtggaactagcggcagcagcctaccaggccaggctggcgggtcgcttgtcccgacggacgcaggcgccgccaaggccagttcccccagcaggagccgccacagcccctatgcatggatgcgcaagacggtgcaggtgacggggaaaaccaggacaaaagaaaagtatcgtgtagtttacactgatcatcaaagattggagctggaaaaggaattccattgcaatagatatatcaccatccagagaaaatcagagctggcagttaacctgggcctttccgagagacaggtgaaaatctggtttcagaatcgcagagccaaggagagaaagatgatcaaaaagaaaatctcccagtttgagaatagtggaggctcggtgcaaagtgactctgactccatcagccctggggaactacctaacacttttttcaccacaccatctgctgttcgtggatttcaacctattgagatacagcaggttatagtctccgaattgccaactttcttgtacaaagtggttgatatcggtaagcctatccctaaccctctcctcggtctcgattctacgtagtaatgaactagtccgtaacttgaaagtatttcgatttcttggctttatatatcttgtggaaaggacgatgttgaatcggtaacgatgacctg

SEQ ID NO: 3233 - DNA, 1493 bp, Homo sapiens
  source 1..1493: mol_type = genomic DNA
atcgattgatcaacaagtttgtacaaaaaagttggcatgtcaggcgtccgacctccgatcatgaacgggcccctgcacccgcggcccctggtggcattgctggatggccgggactgcacagtggagatgcccatcctgaaggacgtggccactgtggccttctgcgacgcgcagtccacgcaggagatccatgagaaggtcctgaacgaggctgtgggggccctgatgtaccacaccatcactctcaccagggaggacctggagaagttcaaagccctccgcatcatcgtccggattggcagtggttttgacaacatcgacatcaagtcggccggggatttaggcattgccgtctgcaacgtgcccgcggcgtctgtggaggagacggccgactcgacgctgtgccacatcctgaacctgtaccggcgggccacctggctgcaccaggcgctgcgggagggcacacgagtccagagcgtcgagcagatccgcgaggtggcgtccggcgctgccaggatccgcggggagaccttgggcatcatcggacttggtcgcgtggggcaggcagtggcgctgcgggccaaggccttcggcttcaacgtgctcttctacgacccttacttgtcggatggcgtggagcgggcgctggggctgcagcgtgtcagcaccctgcaggacctgctcttccacagcgactgcgtgaccctgcactgcggcctcaacgagcacaaccaccacctcatcaacgacttcaccgtcaagcagatgagacaaggggccttcctggtgaacacagcccggggtggcctggtggatgagaaggcgctggcccaggccctgaaggagggccggatccgcggcgcggccctggatgtgcacgagtcggaacccttcagctttagccagggccctctgaaggatgcacccaacctcatctgcaccccccatgctgcatggtacagcgagcaggcatccatcgagatgcgagaggaggcggcacgggagatccgcagagccatcacaggccggatcccagacagcctgaagaactgtgtcaacaaggaccatctgacagccgccacccactgggccagcatggaccccgccgtcgtgcaccctgagctcaatggggctgcctataggtaccctccgggcgtggtgggcgtggcccccactggcatcccagctgctgtggaaggtatcgtccccagcgccatgtccctgtcccacggcctgccccctgtggcccacccgccccacgccccttctcctggccaaaccgtcaagcccgaggcggatagagaccacgccagtgaccagttgtacccaactttcttgtacaaagtggttgatatcggtaagcctatccctaaccctctcctcggtctcgattctacgtagtaatgaactagtccgtaacttgaaagtatttcgatttcttggctttatatatcttgtggaaaggacgacgcgtgttgcttgacggcctaacc

SEQ ID NO: 3234 - DNA, 1733 bp, Homo sapiens
  source 1..1733: mol_type = genomic DNA
atcgattgatcaacaagtttgtacaaaaaagttggcatgggctctggagaccatcagttcaacctcgcagagatcctgtcacagaactacagtgttaggggggagtgcgaggaggcctcgaggtgcccagacaagcccaaggaggagctggagaaggacttcatctcccagagcaacgacatgccctttgatgagctgcttgcgctctatggctacgaggcgtcagaccccatttcagaccgggagagtgagggtggtgacgtggccccgaacctcccagacatgaccctggacaaagaacaaatagcgaaggatttgctttcaggggaagaagaggaagagacgcaatcatctgctgacgacctcaccccgtccgtgacctcccacgaggcctccgacctcttccctaaccggagtggatctcgtttcctggctgatgaagacagagagcctggctcttctgcctcctccgacaccgaggaggactctcttcctgccaacaaatgtaagaaggagatcatggtgggacctcagttccaagctgacctcagcaacctgcacttgaaccggcactgtgagaagatctacgagaacgaagaccagctgctctgggaccccagcgtcctccctgagagggaggtggaggagttcctgtacagggcggtgaagcggcgttggcacgagatggccgggcctcagctcccagagggagaagccgtgaaagacagtgagcaggcgctgtacgagttggtgaaatgcaacttcaatgtggaggaggccctgcgaaggctgcggttcaacgtgaaggtgatccgagatgggctctgtgcttggagtgaagaggagtgcaggaactttgagcacggcttccgtgtgcatggaaagaactttcacctgatccaggccaacaaggtgcgcacacggtcagtgggcgagtgtgtcgagtactactacctgtggaagaagtcggagcgctacgactacttcgcccagcagacgcggctgggccggaggaagtacgtcccgtccggaaccacggacgcagaccaggacctggatggcagcgaccccgatggccccggccgtccgcgcccggagcaagacaccctgactgggatgcgcacagatccactgagcgtggatggcacggccggtggtctcgatgagcccggagtggcctctgatggactcccgtcctcggagccagggccgtgttccttccagcagctggatgagtcccccgctgtacccctgtcccatcggcccccagccctggccgacccagcctcataccagccagctgtcactgctccggagccagacgccagcccaaggctggccgtggacttcgccctgcccaaggagctgcccctcatctccagccatgtggacctcagcggggatccggaggagactgtggccccagcacaggtggctttgtcggtcaccgagtttggactcatcggcattggggacgtgaaccccttcctggccgcccaccccacgtgcccggcccccgggctacactcggagcccctgtcacactgtaacgtgatgacctgctgcccaactttcttgtacaaagtggttgatatcggtaagcctatccctaaccctctcctcggtctcgattctacgtagtaatgaactagtccgtaacttgaaagtatttcgatttcttggctttatatatcttgtggaaaggacgatctacgtccggctgctcgtatcta

SEQ ID NO: 3235 - DNA, 1202 bp, Homo sapiens
  source 1..1202: mol_type = genomic DNA
atcgattgatcaacaagtttgtacaaaaaagttggcaccatgaggagaaagacaagaaatttcaaacataagacagttaaagacaataaagtactcacagaagggagtgaccaagaatctgaaaaagacaatagtcagtgctgtgaccctgcaacaaatgagagagttcaggctgaaaagagacagtatgtatgtactgagtgtgggaaagcctttagtcagagtgcaaacctcacagtacatgagcgaatccacacgggagagaaaccctataagtgtaaggagtgtggaaaagctttcagtcatagctctaaccttgttgttcatcggagaatccacactggactgaagccctatacatgcagtgaatgtgggaaatctttcagtggaaagtcacatcttattcggcaccagggaatccacagtggggagaaaacttatgaatgtaaagagtgtgggaaagcctttagtcggagttcgggccttatatcacatcacagagttcacaccggagagaagccctattcttgtattgagtgtgggaaagcctttagccgtagttcaaaccttactcaacatcagcgaatgcacagaggaaaaaaagtttacaaatgtaaggagtgtgggaaaacatgtggttctaatacaaagattatggaccatcagagaattcacactggagagaagccttatgaatgtgatgagtgtggaaaaactttcatcttaaggaaaactcttaatgaacaccagagacttcatcgtagagagaaaccttacaaatgtaatgagtgtgggaaggcttttacttctaatcgaaaccttgttgatcatcagagagttcacactggagagaaaccctataaatgtaatgaatgtgggaaaaccttcaggcagacttctcaagttattctacacttgagaacccacactaaggagaaaccctataaatgtagtgagtgtgggaaagcctatcggtatagttcacagcttattcaacaccagaggaaacataatgaggagaaagaaacctcattgccaactttcttgtacaaagtggttgatatcggtaagcctatccctaaccctctcctcggtctcgattctacgtagtaatgaactagtccgtaacttgaaagtatttcgatttcttggctttatatatcttgtggaaaggacgatccaccttatgcaccgacgttcca

SEQ ID NO: 3236 - DNA, 1793 bp, Homo sapiens
  source 1..1793: mol_type = genomic DNA
atcgattgatcaacaagtttgtacaaaaaagttggcatggatctgcccgtgggccccggcgcggcggggcccagcaacgtcccggccttcctgaccaagctgtggaccctcgtgagcgacccggacaccgacgcgctcatctgctggagcccgagcgggaacagcttccacgtgttcgaccagggccagtttgccaaggaggtgctgcccaagtacttcaagcacaacaacatggccagcttcgtgcggcagctcaacatgtatggcttccggaaagtggtccacatcgagcagggcggcctggtcaagccagagagagacgacacggagttccagcacccatgcttcctgcgtggccaggagcagctccttgagaacatcaagaggaaagtgaccagtgtgtccaccctgaagagtgaagacataaagatccgccaggacagcgtcaccaagctgctgacggacgtgcagctgatgaaggggaagcaggagtgcatggactccaagctcctggccatgaagcatgagaatgaggctctgtggcgggaggtggccagccttcggcagaagcatgcccagcaacagaaagtcgtcaacaagctcattcagttcctgatctcactggtgcagtcaaaccggatcctgggggtgaagagaaagatccccctgatgctgaacgacagtggctcagcacattccatgcccaagtatagccggcagttctccctggagcacgtccacggctcgggcccctactcggccccctccccagcctacagcagctccagcctctacgcccctgatgctgtggccagctctggacccatcatctccgacatcaccgagctggctcctgccagccccatggcctcccccggcgggagcatagacgagaggcccctatccagcagccccctggtgcgtgtcaaggaggagccccccagcccgcctcagagcccccgggtagaggaggcgagtcccgggcgcccatcttccgtggacaccctcttgtccccgaccgccctcattgactccatcctgcgggagagtgaacctgcccccgcctccgtcacagccctcacggacgccaggggccacacggacaccgagggccggcctccctcccccccgcccacctccacccctgaaaagtgcctcagcgtagcctgcctggacaagaatgagctcagtgaccacttggatgctatggactccaacctggataacctgcagaccatgctgagcagccacggcttcagcgtggacaccagtgccctgctggacctgttcagcccctcggtgaccgtgcccgacatgagcctgcctgaccttgacagcagcctggccagtatccaagagctcctgtctccccaggagccccccaggcctcccgaggcagagaacagcagcccggattcagggaagcagctggtgcactacacagcgcagccgctgttcctgctggaccccggctccgtggacaccgggagcaacgacctgccggtgctgtttgagctgggagagggctcctacttctccgaaggggacggcttcgccgaggaccccaccatctccctgctgacaggctcggagcctcccaaagccaaggaccccactgtctcctacccaactttcttgtacaaagtggttgatatcggtaagcctatccctaaccctctcctcggtctcgattctacgtagtaatgaactagtccgtaacttgaaagtatttcgatttcttggctttatatatcttgtggaaaggacgatgggtaataactgtgagcggggtt

SEQ ID NO: 3237 - DNA, 1607 bp, Homo sapiens
  source 1..1607: mol_type = genomic DNA
atcgattgatcaacaagtttgtacaaaaaagttggcatggagcctggaacaaactcttttcgggtagaatttcctgatttttccagcaccattctacagaaactgaaccagcagcgccagcaaggacaattatgtgacgtctccattgttgtccaaggccacattttccgggcacacaaagccgttcttgctgccagttcaccctacttttgtgaccaggtactcctgaaaaacagcaggagaattgttttgcctgatgtgatgaacccaagagtgtttgagaacattctcctatctagttatacaggacgtctagtaatgcccgctccagaaattgttagttacttgacagcggcaagcttcctccagatgtggcatgtggtagacaaatgcactgaagttttagagggaaaccctacagtcctttgtcagaagctaaatcatggcagtgaccaccagtcaccaagcagcagtagttataatggcctggtagagagctttgagctgggctctgggggtcatactgattttcccaaagcccaagaactgagagatggtgaaaatgaagaggagagcaccaaagacgagctgtcatcccagctcaccgagcacgaatacctgcccagcaactcgtccacagagcatgaccgcctgagcacggaaatggcaagccaggatggggaggagggcgccagcgacagcgccgagttccactacacccggcccatgtacagcaagcccagcatcatggctcacaaacgctggatccacgtgaagcccgagcgcttagaacaggcttgcgagggcatggatgtgcacgcgacctacgacgagcaccaggtcacagagtccatcaacaccgtgcagacagagcacacggtgcagccttcgggagtggaggaggacttccacatcggggagaagaaagtggaagctgagtttgatgaacaggctgatgaaagcaattatgatgagcaggtggatttctatggctcttccatggaagagttttccggagagaggtcagatgggaatctaattgggcacagacaggaggctgccctcgcagcaggttacagtgagaatattgaaatggtaacagggattaaagaagaagcttcccacttaggattctcagccaccgacaagctgtatccttgtcagtgtgggaaaagtttcactcacaagagtcagagagatcggcacatgagcatgcacctcggtcttcggccttacggctgtggggtctgcggtaagaaattcaaaatgaagcaccatctcgtgggccacatgaaaattcacacaggcataaagccgtatgagtgtaatatctgtgcaaagaggtttatgtggagggacagtttccaccggcatgtgacttcttgtactaagtcctacgaagctgcaaaggctgagcagaatacaactgaggctaactacccaactttcttgtacaaagtggttgatatcggtaagcctatccctaaccctctcctcggtctcgattctacgtagtaatgaactagtccgtaacttgaaagtatttcgatttcttggctttatatatcttgtggaaaggacgaaacgcataccccttgtggatttaa

SEQ ID NO: 3238 - DNA, 1325 bp, Homo sapiens
  source 1..1325: mol_type = genomic DNA
atcgattgatcaacaagtttgtacaaaaaagttggcatgtccccgtgtcctccccagcagagcaggaacagggtgatacagctgtccacttcagagctaggagagatggaactgacttggcaggagatcatgtccatcaccgagctgcagggtctgaatgctccaagtgagccatcatttgagccccaagccccagctccataccttggacctccaccacccacaacttactgcccctgctcaatccacccagattctggcttcccacttcctccaccaccttatgagctcccagcatccacatcccatgtcccagatcccccatactcctatggcaacatggccataccagtctccaagccactgagcctctcaggcctgctcagtgagccgctccaagaccccttagccctcctggacattgggctgccagcagggccacctaagccccaagaagacccagaatccgactcaggattatccctcaactatagcgatgctgaatctcttgagctggaggggacagaggctggtcggcggcgcagcgaatatgtagagatgtacccagtggagtacccctactcactcatgcccaactccttggcccactccaactataccttgccagctgctgagacccccttggccttagagccctcctcaggccctgtgcgggctaagcccactgcacggggggaggcagggagtcgggatgaacgtcgggccttggccatgaagattccttttcctacggacaagattgtcaacttgccggtagatgactttaatgagctattggcaaggtacccgctgacagagagccagctagcgctagtccgggacatccgacgacggggcaaaaacaaggtggcagcccagaactgccgcaagaggaagctggaaaccattgtgcagctggagcgggagctggagcggctgaccaatgaacgggagcggcttctcagggcccgcggggaggcagaccggaccctggaggtcatgcgccaacagctgacagagctgtaccgtgacattttccagcaccttcgggatgaatcaggcaacagctactctcctgaagagtacgcgctgcaacaggctgccgatgggaccatcttccttgtgccccgggggaccaagatggaggccacagactgcccaactttcttgtacaaagtggttgatatcggtaagcctatccctaaccctctcctcggtctcgattctacgtagtaatgaactagtccgtaacttgaaagtatttcgatttcttggctttatatatcttgtggaaaggacgacatacccctgggacacatcattga

SEQ ID NO: 3239 - DNA, 479 bp, Homo sapiens
  source 1..479: mol_type = genomic DNA
atcgattgatcaacaagtttgtacaaaaaagttggcatgccaggaccccctagaagcctagaaatgggactgttgacatttagggatgtggccatagaattctctctggaggagtggcaacacctggacattgcacagcagaatttatatagaaatgtgatgttagagaactacagaaacctggccttcctgggtattgctgtctctaagccagacctgatcacctgtctggaacaagggaaagagccctggaatatgaagcgacatgagatggtggatgaacccccaggattggatttttcattactgtgcccaactttcttgtacaaagtggttgatatcggtaagcctatccctaaccctctcctcggtctcgattctacgtagtaatgaactagtccgtaacttgaaagtatttcgatttcttggctttatatatcttgtggaaaggacgatacatacagacctacacgtagacc

SEQ ID NO: 3240 - DNA, 2186 bp, Homo sapiens
  source 1..2186: mol_type = genomic DNA
atcgattgatcaacaagtttgtacaaaaaagttggcaccatgccaggaccccctagaagcctagaaatgggactgttgacatttagggatgtggccatagaattctctctggaggagtggcaacacctggacattgcacagcagaatttatatagaaatgtgatgttagagaactacagaaacctggccttcctgggtattgctgtctctaagccagacctgatcacctgtctggaacaagggaaagagccctggaatatgaagcgacatgagatggtggatgaacccccaggtatgtgtcctcattttgctcaagacctttggccagagcagggcatggaagattcttttcaaaaagcaatactgagaagatatggaaaatatggacatgagaatttacagttaagaaaaggctgtaaaagtgtggatgagtataaggtgaacaaagaaggttataatggacttaaccagtgtttcacaactgcccagagcaaagtatttcaatgtgataaatatttgaaagtcttctataaatttttaaattcaaacagacctaagataagacatactgaaaagaaatctttcaaatgtaaaaaacgtgtcaaattattttgcatgctttcacataaaacccaacacaaaagcatttatcatagagagaagtcctacaaatgtaaagaatgtggaaaaacctttaattggtcctcaacccttactaatcataggaaaatttatactgaagagaaaccttacaaatgtgaagaatataacaaatctcctaagcaactctcaacccttactacacatgaaataattcatgctggagagaaactctacaaatgtgaagaatgtggtgaagcttttaatcgatcctcaaatcttactacacataagataattcatactggagagaaaccttacaagtgtgaagaatgtggcaaagcatttatctggtcctcaacccttactgagcataagaaaattcatactagaaagaaaccctacaagtgtgaagaatgtggcaaagcatttatatggtcctcaacactaactagacataagaggatgcacactggagagaaaccctacaaatgtgaagaatgtggcaaagcttttagccagtcctcaacccttactacacataagataattcatactggagagaaacgctacaaatgcttagaatgtggcaaagcttttaagcaactctcaactcttactacacataaaataattcatgttggagagaaactctacaaatgtgaagaatgcggcaaaggttttaatcgatcttcaaatcttactacacataagataattcatactggagagaaaccttacaagtgtgaagaatgtggcaaagcatttatctggtcctcaacccttactaaacataagagaattcatactagagagaaaccctacaaatgtgaagaatgtggcaaggcatttatatggtcctcaaccctaactagacataagaggatgcacactggagagaaaccctacaaatgtgaagaatgtggcaaatcttttagccaatcctcaacccttactacacataagataattcatactggagagaaaccctacaaatgtgaagaatgtggcaaagcctttaactggtcctcaactcttactaaacataagataattcatactgaagagaaaccctacaaatgtgaaaaatgtggcaaagcctttaagcagtcttcaatccttactaaccataagagaattcatactggagagaaaccctataaatgtgaagaatgtggcaaatcttttaaccggtcttcaacttttactaaacataaggtaattcatactggagtaaaaccctacaaatgtgaagaatgtggcaaagcatttttctggtcctcaaccctaactaaacataagagaattcatactggagagcaaccctacaaatgggaaaaatttggcaaagcctttaatcggtcctcgcacctcaccacagataagataactcattggagagaaatcttacaagtattgccaactttcttgtacaaagtggttgatatcggtaagcctatccctaaccctctcctcggtctcgattctacgtagtaatgaactagtccgtaacttgaaagtatttcgatttcttggctttatatatcttgtggaaaggacgatccgtgttggtcaagcgacgcgcc

SEQ ID NO: 3241 - DNA, 1631 bp, Homo sapiens
  source 1..1631: mol_type = genomic DNA
atcgattgatcaacaagtttgtacaaaaaagttggcaccatgaccacattcaaggaggcagtgaccttcaaggatgtggctgtgttcttcactgaggaggaactggggctactggaccctgcccagaggaagctgtaccaagacgtgatgcttgagaacttcacgaacctgctgtcagtggggcatcaaccattccaccctttccacttcctaagggaagaaaagttttggatgatggagacagcaacccaaagagaaggaaattcaggcggcaagactattgcggaagcaggaccacatgaagactgcccttgccagcaaatctgggaacaaactgcaagtgacttaacccagtctcaagactccatcataaataattctcacttctttgaacaaggtgatgtcccctcccaggttgaggcaggactatctataattcatacaggacagaaaccttcacagaatgggaagtgtaaacagtccttcagtgatgttgccatctttgatcctcctcagcagttccactcaggagagaagtctcatacatgcaatgagtgtggaaaaagcttctgttacatctcagctcttcgtattcaccagagagttcacttgagagagaaactctctaagtgtgacatgcgtggtaaggaattcagtcagagctcatgtctgcaaactcgtgagagagtccacactggagagaaaccattcaaatgtgagcaatgtgggaaaggcttcagatgtagagcgatacttcaagttcactgcaaattacacacaggagagaaaccttatatttgtgagaaatgtgggagggccttcattcacgatttccagcttcagaaacatcagataattcatactggggagaagccgttcaaatgtgaaatatgtggtaagagcttctgccttaggtcaagtcttaataggcattgcatggtccacacagcagagaaactgtacaaatctgaggagtgtggaaaaggcttcactgatagcctagatttgcataagcatcagataattcacacaggacagaaaccgtacaattgtaaagaatgtgggaagagcttcagatggtcctcatatcttttgatccatcagcgaatccacagtggagaaaaaccatacagatgtgaggagtgtgggaagggctacattagtaagtcaggtcttaacttgcaccagagggtccatactggagagagaccttataattgtaaggaatgtgggaagagctttagccgggcttcaagtattttgaatcataagaaactccactgccggaaaaaacccttcaaatgtgaggattgtggaaagaggcttgtacaccggtctttctgtaaagaccaacaaggagaccacaatggagaaaactcatccaaatgtgaggactgtgggaagcgctacaagaggcgcttgaatctggatataattttatcattatttttaaatgatatgttgccaactttcttgtacaaagtggttgatatcggtaagcctatccctaaccctctcctcggtctcgattctacgtagtaatgaactagtccgtaacttgaaagtatttcgatttcttggctttatatatcttgtggaaaggacgactgcgaagacggcaacatcagata

SEQ ID NO: 3242 - DNA, 1715 bp, Homo sapiens
  source 1..1715: mol_type = genomic DNA
atcgattgatcaacaagtttgtacaaaaaagttggcaccatggggactgagaacaaggaggtgattcccaaggaagaaatttctgaagaatctgagccacatgggtcattattagaaaaatttccaaaagtggtttaccaaggtcatgagtttggagcaggatgtgaagaagacatgttggagggacattcgagagagtccatggaagaggttatagagcagatgtctcctcaggagagagactttccatcagggttgatgatctttaagaaatcaccctcaagtgagaaagaccgggagaataatgagagtgagagaggctgcagtcccagcccaaatctggttacacatcagggagatacaacagagggagttagtgcatttgctacctctggccaaaacttcctagagattttagaatctaacaaaacacagagaagttctgtgggagaaaagcctcatacatgtaaagaatgtgggaaagcctttaatcagaactcacatctcatccagcatatgagagttcatagtggagaaaaaccctttgaatgtaaagaatgtggaaagacatttggaactaattcaagccttcgacggcacctgagaattcatgctggagaaaaaccctttgcttgtaatgaatgtggaaaggccttcattcagagttcacaccttattcaccatcatagaattcatactggagagagaccctataaatgtgaagaatgtggtaaagccttcagtcaaaattcagcccttattctacaccagagaatccatactggagagaaaccatatgaatgtaatgaatgtgggaagacctttagggttagttcacagcttattcagcatcagagaattcatactgaagaaagataccatgaatgcaatgagtgtggcaaagccttcaagcatagctcaggccttattagacaccagaaaattcatactggagaaaaaccatatctgtgtaatgaatgtgggaagggcttcgggcagagttctgagcttatccggcatcagagaattcatacaggggacaaaccctatgaatgtaatgaatgtgggaaaacttttggccagaactcagagattattagacatattagaattcatactggtgagaagccctatgtatgtaaggaatgtgggaaggccttcagggggaactcagaacttcttagacatgagagaattcacactggagagaaaccctatgaatgctttgagtgtggaaaggctttcaggcggacctctcaccttattgtccaccagagaattcatactggagagaaaccccatcaatgtaatgagtgtgcaagaaccttttgggataattctgagctgcttctccaccagaaaattcatattggagagaaaccttatgaatgtagcgagtgtgagaaaacatttagccagcattcccaacttatcatacatcagagaattcacactggagagaagccttatgagtgccaagaatgtcagaagacttttagtcggagctctcacctcctccgacatcaaagtgttcactgtatggagttgccaactttcttgtacaaagtggttgatatcggtaagcctatccctaaccctctcctcggtctcgattctacgtagtaatgaactagtccgtaacttgaaagtatttcgatttcttggctttatatatcttgtggaaaggacgacgtcccaatgcgactttataacta

SEQ ID NO: 3243 - DNA, 1592 bp, Homo sapiens
  source 1..1592: mol_type = genomic DNA
atcgattgatcaacaagtttgtacaaaaaagttggcaccatggaaagggaaggtatctggcattctactctaggggaaacctgggaacctaataattggttagagggacaacaggatagtcatctgagccaagtgggagttacccataaggaaaccttcactgagatgagagtatgtggaggtaatgaatttgaaagatgttccagtcaggattcaatccttgatacacagcaaagcattcctatggtaaaaaggccccataactgtaattcacatggagaagatgccacacaaaattctgagttaattaaaactcaaagaatgtttgtaggaaagaagatctatgaatgtaatcagtgcagcaaaaccttcagtcagagctcatcccttcttaagcaccagaggattcatactggggagaaaccctataagtgtaatgtatgtgggaaacacttcattgaacgatcctcccttactgtacatcaaagaattcatactggagagaaaccctataaatgtaatgaatgtgggaaagcctttagtcagagcatgaatcttactgtccatcaacgaactcacaccggagagaaaccctatcagtgtaaagagtgtggcaaagccttccataagaattcatctcttattcagcatgaaaggattcatactggagagaagccctacaaatgtaatgaatgtggtaaagcttttacccaaagcatgaatttgacagttcatcagagaactcatacaggagaaaaaccctatgaatgtaatgaatgtggaaaagccttcagtcaaagcatgcatcttattgtacatcagagaagccatactggagaaaaaccctatgagtgtagtcagtgtggaaaagcctttagtaagagctcaactcttaccctacatcagcgaaatcacactggagaaaaaccttacaaatgtaacaaatgcgggaaatcctttagccaaagtacatatcttatagaacatcagagacttcattctggagtaaaaccttttgaatgtaacgagtgtggaaaagctttcagtaagaattcatctctaactcaacatcggagaattcacactggagagaaaccttatgagtgtatggtgtgtggaaaacatttcactggacgatcatcccttaccgtgcatcaggtcattcacactggagagaaaccttatgagtgcaatgaatgtggaaaggcattcagccagagtgcttaccttattgaacatcaaagaattcatactggtgagaaaccctatgaatgtgatcagtgtggaaaagccttcattaagaattcatcccttacagtgcatcagagaactcatacaggagagaaaccctatcagtgtaatgaatgcggaaaagccttcagccggagtacaaaccttacacgacatcaaagaactcatacgttgccaactttcttgtacaaagtggttgatatcggtaagcctatccctaaccctctcctcggtctcgattctacgtagtaatgaactagtccgtaacttgaaagtatttcgatttcttggctttatatatcttgtggaaaggacgagcccttagcgcatctcgcccttga

SEQ ID NO: 3244 - DNA, 1592 bp, Homo sapiens
  source 1..1592: mol_type = genomic DNA
atcgattgatcaacaagtttgtacaaaaaagttggcaccatggaaagggaaggtatctggcattctactctaggggaaacctgggaacctaataattggttagagggacaacaggatagtcatctgagccaagtgggagttacccataaggaaaccttcactgagatgagagtatgtggaggtaatgaatttgaaagatgttccagtcaggattcaatccttgatacacagcaaagcattcctatggtaaaaaggccccataactgtaattcacatggagaagatgccacacaaaattctgagttaattaaaactcaaagaatgtttgtaggaaagaagatctatgaatgtaatcagtgcagcaaaaccttcagtcagagctcatcccttcttaagcaccagaggattcatactggggagaaaccctataagtgtaatgtatgtgggaaacacttcattgaacgatcctcccttactgtacatcaaagaattcatactggagagaaaccctataaatgtaatgaatgtgggaaagcctttagtcagagcatgaatcttactgtccatcaacgaactcacaccggagagaaaccctatcagtgtaaagagtgtggcaaagccttccataagaattcatctcttattcagcatgaaaggattcatactggagagaaaccctacaaatgtaatgaatgtggtaaagcttttacccaaagcatgaatttgacagttcatcagagaactcatacaggagaaaaaccctatgaatgtaatgaatgtggaaaagccttcagtcaaagcatgcatcttattgtacatcagagaagccatactggagaaaaaccctatgagtgtagtcagtgtggaaaagcctttagtaagagctcaactcttaccctacatcagcgaaatcacactggagaaaaaccttacaaatgtaacaaatgcgggaaatcctttagccaaagtacatatcttatagaacatcagagacttcattctggagtaaaaccttttgaatgtaacgagtgtggaaaagctttcagtaagaattcatctctaactcaacatcggagaattcacactggagagaaaccttatgagtgtatggtgtgtggaaaacatttcactggacgatcatcccttaccgtgcatcaggtcattcacactggagagaaaccttatgagtgcaatgaatgtggaaaggcattcagccagagtgcttaccttattgaacatcaaagaattcatactggtgagaaaccctatgaatgtgatcagtgtggaaaagccttcattaagaattcatcccttacagtgcatcagagaactcatacaggagagaaaccctatcagtgtaatgaatgcggaaaagccttcagccggagtacaaaccttacacgacatcaaagaactcatacgttgccaactttcttgtacaaagtggttgatatcggtaagcctatccctaaccctctcctcggtctcgattctacgtagtaatgaactagcccgtaacttgaaagtatttcgatttcttggctttatatatcttgtggaaaggacgaccaaatcacgatattttgagtata

SEQ ID NO: 3245 - DNA, 1670 bp, Homo sapiens
  source 1..1670: mol_type = genomic DNA
atcgattgatcaacaagtttgtacaaaaaagttggcatgttcgcagccgggctggctcccttctacgcctccaacttcagcctctggtcggccgcttactgctcctcggccggcccaggcggctgctccttccccttggaccccgccgccgtcaaaaagccctccttctgcatcgcagacattctgcacgccggcgtgggggatctgggggcggccccggagggcctggcaggggcctcggccgccgccctcaccgcgcacttgggctcggttcacccgcacgcctctttccaagcggcggccagatccccgcttcgacccaccccagtggtggcgccctccgaagtcccggctggcttcccgcagcggctgtctccgctctcagccgcctaccaccaccatcacccgcaacaacaacagcagcagcaacagccgcagcagcaacagcctccgcctccgccccgggctggcgccctgcagcccccggcctcggggacgcgagtggttccgaacccccaccacagtggctctgccccggccccctccagcaaagacctcaaatttggaattgaccgcattttatctgcagaatttgacccaaaagtcaaagaaggcaacacgctgagagatctcacttccctgctaaccggtgggcggcccgccggggtgcacctctcaggcctgcagccctcggccggccagttcttcgcatctctagatcccattaacgaggcttctgcaatcctgagtcccttaaactcgaacccaagaaattcagttcagcatcagttccaagacacgtttccaggtccctatgctgtgctcacgaaggacaccatgccgcagacgtacaaaaggaagcgttcatggtcgcgcgctgtgttctccaacctgcagaggaaaggcctggagaaaaggtttgagattcagaagtacgtgaccaagccggaccgaaagcagctggcggcgatgctgggcctcacggacgcacaggtgaaggtgtggttccagaaccggcggatgaagtggcggcactccaaggaggcccaggcccaaaaggacaaggacaaggaggctggcgagaagccatcaggtggagccccggctgcggatggcgagcaggacgagaggagccccagccgttctgaaggcgaggctgagagcgagagcagcgactccgagtccctggacatggcccccagcgacacggagcggactgaggggagtgagcgttctctgcaccaaacaacagttattaaggccccggtcactggcgccctcattaccgccagcagtgctgggagtggtgggagcagcggcggcggcggcaatagtttcagcttcagcagcgccagcagtcttagtagcagcagcaccagtgcgggttgcgccagcagccttggcggcggcggcgcctcggagcttctccctgcaacacagcccacagccagcagcgctcccaaaagccccgagccagcccaaggcgcgcttggctgcttatacccaactttcttgtacaaagtggttgatatcggtaagcctatccctaaccctctcctcggtctcgattctacgtagtaatgaactagtccgtaacttgaaagtatttcgatttcttggctttatatatcttgtggaaaggacgaagtttggagaatactccatggcac

SEQ ID NO: 3246 - DNA, 1736 bp, Homo sapiens
  source 1..1736: mol_type = genomic DNA
atcgattgatcaacaagtttgtacaaaaaagttggcatggacgggttttatgatcagcaagtcccttttatggtcccagggaaatctcgatctgaggaatgcagagggcggcctgtgattgacagaaagaggaagtttttggacacagatctggctcacgattctgaagagctatttcaggatctcagtcaacttcaagaggcttggttagctgaagcacaagttcctgatgatgaacagtttgtcccagattttcagtctgataacctggtgcttcatgccccacctccaaccaagatcaaacgggagctgcacagcccctcctctgagctgtcgtcttgtagccatgagcaggctcttggtgctaactatggagaaaagtgcctctacaactattgtgcctatgataggaagcctccctctgggttcaagccattaacccctcctacaacccccctctcacccacccatcagaatcccctatttcccccacctcaggcaactctgcccacctcagggcatgcccctgcagctggcccagttcaaggtgtgggccccgcccccgccccccattcgcttccagagcctggaccacagcagcaaacatttgcggtcccccgaccaccacatcagcccctgcagatgccaaagatgatgcctgaaaaccagtatccatcagaacagagatttcagagacaactgtctgaaccctgccaccccttccctcctcagccaggagttcctggagataatcgccccagttaccatcggcaaatgtcagaacctattgtccctgcagctcccccgccccctcagggattcaaacaagaataccatgacccactctatgaacatggggtcccgggcatgccagggcccccagcacacgggttccagtcaccaatgggaatcaagcaggagcctcgggattactgcgtcgattcagaagtgcctaactgccagtcatcctacatgagagggggttatttctccagcagccatgaaggtttttcatatgaaaaagatccccgattatactttgacgacacttgtgttgtgcctgagagactggaaggcaaagtcaaacaggagcctaccatgtatcgagaggggcccccttaccagaggcgaggttcccttcagctgtggcagttcctggtcacccttcttgatgacccagccaatgcccacttcattgcctggacaggtcgaggcatggagttcaagctgatagaaccggaagaggttgctcggcgctggggcatccagaagaaccggccagccatgaactatgacaagctgagccgctctctccgctattactatgaaaagggcatcatgcagaaggtggctggagagcgatacgtctacaaatttgtctgtgacccagatgccctcttctccatggctttcccggataaccagcgtccgttcctgaaggcagagtccgagtgccacctcagcgaggaggacaccctgccgctgacccactttgaagacagccccgcttacctcctggacatggaccgctgcagcagcctcccctatgccgaaggctttgcttactacccaactttcttgtacaaagtggttgatatcggtaagcctatccctaaccctctcctcggtctcgattctacgtagtaatgaactagtccgtaacttgaaagtatttcgatttcttggctttatatatcttgtggaaaggacgattcgagcctgtggtcagaatcact

SEQ ID NO: 3247 - DNA, 1751 bp, Homo sapiens
  source 1..1751: mol_type = genomic DNA
atcgattgatcaacaagtttgtacaaaaaagttggcatggcggcccgggcgggtttccagtctgtggctccaagcggcggcgccggagcctcaggaggggcgggcgcggctgctgccttgggcccgggcggaactccggggcctcctgtgcgaatgggcccggctccgggtcaagggctgtaccgctccccgatgcccggagcggcctatccgagaccaggtatgttgccaggcagccgaatgacacctcagggaccttccatgggaccccctggctatggggggaacccttcagtccgacctggcctggcccagtcagggatggatcagtcccgcaagagacctgcccctcagcagatccagcaggtccagcagcaggcggtccaaaatcgaaaccacaatgcaaagaaaaagaagatggctgacaaaattctacctcaaaggattcgtgaactggtaccagaatcccaggcctatatggatctcttggcttttgaaaggaaactggaccagactatcatgaggaaacggctagatatccaagaggccttgaaacgtcccatcaagcaaaaacggaagctgcgaattttcatttctaacactttcaatccggctaagtcagatgccgaggatggggaagggacggtggcttcctgggagcttcgggtagaaggacggctcctggaggattcagccttgtccaaatatgatgccactaaacaaaagaggaagttctcttccttttttaagtccttggtgattgaactggacaaagacctgtatgggccagacaaccatctggtagaatggcacaggaccgccactacccaggagaccgatggctttcaggtgaagcggccgggagacgtgaatgtacggtgtactgtcctactgatgctggattaccagcctccccagtttaaattagacccccgcctagctcgactcctgggcatccatacccagactcgtccagtgatcatccaagcactgtggcaatatattaagacacataagctccaggaccctcacgagcgggagtttgtcatctgtgacaagtacctgcagcagatctttgagtctcaacgtatgaagttttcagagatccctcagcggctccatgccttgcttatgccaccagaacctatcatcattaatcatgtcatcagtgttgacccgaatgatcagaaaaagacagcttgttatgacattgatgttgaagtggatgacaccttgaagacccagatgaattcttttctgctgtccactgccagccaacaggagattgctactctagacaacaagatccatgagacaatagaaaccatcaaccagctgaagactcagcgggagttcatgctgagctttgccagagaccctcagggtttcatcaatgactggcttcagtcccagtgcagggacctcaagacaatgactgatgtggtgggtaacccagaggaggagcgccgagctgagttctacttccagccctgggctcaggaggctgtgtgccgatacttctactccaaggtgcagcagagacgacaagaattagagcaagccctgggaatccggaatacatacccaactttcttgtacaaagtggttgatatcggtaagcctatccctaaccctctcctcggtctcgattctacgtagtaatgaactagtccgtaacttgaaagtatttcgatttcttggctttatatatcttgtggaaaggacgaaagatacactgctcctttagttca

SEQ ID NO: 3248 - DNA, 1337 bp, Homo sapiens
  source 1..1337: mol_type = genomic DNA
atcgattgatcaacaagtttgtacaaaaaagttggcaccatgatgatgatggcgctgagcaagaccttcgggcagaagcccgtgaagttccagctggaggacgacggcgagttctacatgatcggctccgaggtgggaaactacctccgtatgttccgaggttctctgtacaagagatacccctcactctggaggcgactagccactgtggaagagaggaagaaaatagttgcatcgtcacatgatcacggatacacgactctagccaccagtgtgaccctgttaaaagcctcggaagtggaagagattctggatggcaacgatgagaagtacaaggctgtgtccatcagcacagagccccccacctacctcagggaacagaaggccaagaggaacagccagtgggtacccaccctgcccaacagctcccaccacttagatgccgtgccatgctccacaaccatcaacaggaaccgcatgggccgagacaagaagagaaccttccccctttgctttgatgaccatgacccagctgtgatccatgagaacgcatctcagcccgaggtgctggtccccatccggctggacatggagatcgatgggcagaagctgcgagacgccttcacctggaacatgaatgagaagttgatgacgcctgagatgttttcagaaatcctctgtgacgatctggatttgaacccgctgacgtttgtgccagccatcgcctctgccatcagacagcagatcgagtcctaccccacggacagcatcctggaggaccagtcagaccagcgcgtcatcatcaagctgaacatccatgtgggaaacatttccctggtggaccagtttgagtgggacatgtcagagaaggagaactcaccagagaagtttgccctgaagctgtgctcggagctggggttgggcggggagtttgtcaccaccatcgcatacagcatccggggacagctgagctggcatcagaagacctacgccttcagcgagaaccctctgcccacagtggagattgccatccggaacacgggcgatgcggaccagtggtgcccactgctggagactctgacagacgctgagatggagaagaagatccgcgaccaggacaggaacacgaggcggatgaggcgtcttgccaacacggccccggcctggttgccaactttcttgtacaaagtggttgatatcggtaagcctatccctaaccctctcctcggtctcgattctacgtagtaatgaactagtccgtaacttgaaagtatttcgatttcttggctttatatatcttgtggaaaggacgaccattatggactactatatccctt

SEQ ID NO: 3249 - DNA, 1607 bp, Homo sapiens
  source 1..1607: mol_type = genomic DNA
atcgattgatcaacaagtttgtacaaaaaagttggcatgtcgtccatcttgccattcacgccgccagttgtgaagagactgctgggatggaagaagtcagctggtgggtctggaggagcaggcggaggagagcagaatgggcaggaagaaaagtggtgtgagaaagcagtgaaaagtctggtgaagaagctaaagaaaacaggacgattagatgagcttgagaaagccatcaccactcaaaactgtaatactaaatgtgttaccataccaagcacttgctctgaaatttggggactgagtacaccaaatacgatagatcagtgggatacaacaggcctttacagcttctctgaacaaaccaggtctcttgatggtcgtctccaggtatcccatcgaaaaggattgccacatgttatatattgccgattatggcgctggcctgatcttcacagtcatcatgaactcaaggcaattgaaaactgcgaatatgcttttaatcttaaaaaggatgaagtatgtgtaaacccttaccactatcagagagttgagacaccagttttgcctccagtattagtgccccgacacaccgagatcctaacagaacttccgcctctggatgactatactcactccattccagaaaacactaacttcccagcaggaattgagccacagagtaattatattccagaaacgccacctcctggatatatcagtgaagatggagaaacaagtgaccaacagttgaatcaaagtatggacacaggctctccagcagaactatctcctactactctttcccctgttaatcatagcttggatttacagccagttacttactcagaacctgcattttggtgttcgatagcatattatgaattaaatcagagggttggagaaaccttccatgcatcacagccctcactcactgtagatggctttacagacccatcaaattcagagaggttctgcttaggtttactctccaatgttaaccgaaatgccacggtagaaatgacaagaaggcatataggaagaggagtgcgcttatactacataggtggggaagtttttgctgagtgcctaagtgatagtgcaatctttgtgcagagccccaattgtaatcagagatatggctggcaccctgcaacagtgtgtaaaattccaccaggctgtaatctgaagatcttcaacaaccaggaatttgctgctcttctggctcagtctgttaatcagggttttgaagccgtctatcagctaactagaatgtgcaccataagaatgagttttgtgaaagggtggggagcagaataccgaaggcagacggtaacaagtactccttgctggattgaacttcatctgaatggacctctacagtggttggacaaagtattaactcagatgggatccccttcagtgcgttgctcaagcatgtcatacccaactttcttgtacaaagtggttgatatcggtaagcctatccctaaccctctcctcggtctcgattctacgtagtaatgaactagtccgtaacttgaaagtatttcgatttcttggctttatatatcttgtggaaaggacgatttcggtcgaacatagacgaccgg

SEQ ID NO: 3250 - DNA, 1085 bp, Homo sapiens
  source 1..1085: mol_type = genomic DNA
atcgattgatcaacaagtttgtacaaaaaagttggcaccatgccgcgctccttcctggtgaaaacgcactccagccacagggtccccaactaccggcggctggagacgcagagagaaatcaatggtgcctgctctgcctgtggggggctggtggtgcccctcctcccccgagacaaggaggccccttctgtgcccggtgaccttccccagccctgggaccgctcctcggccgtcgcctgcatctccctgcccctcctgccacggatcgaggaagctctgggggcctctgggctggacgccttggaagtcagcgaggtcgaccctcgggccagccgggccgccattgtacccctcaaagacagcctgaaccacctcaacctgcccccactgctggtgctgcccacacggtggtccccgaccttgggcccagaccggcacggggctccggaaaaactgcttggggctgagcggatgccccgagccccgggcggctttgagtgcttccactgccacaaaccctaccacacgctggccgggctggccaggcaccggcagctgcactgccacctgcaggtggggcgtgtcttcacctgcaagtactgcgacaaggagtacaccagcctgggtgccctcaagatgcacatccgcactcacacgctgccctgcacctgcaagatctgtggcaaggccttctccaggccctggttactgcagggccatgtccgcacccacacaggggagaagccctatgcctgctcgcactgcagcagggcctttgccgaccgctccaaccttcgggcccatctgcaaacgcactcagacgccaagaagtaccggtgccggcgctgcaccaagaccttctcccgcatgtccctcctggcgcggcatgaggagtctggctgctgcccgggccccttgccaactttcttgtacaaagtggttgatatcggtaagcctatccctaaccctctcctcggtctcgattctacgtagtaatgaactagtccgtaacttgaaagtatttcgatttcttggctttatatatcttgtggaaaggacgaacttggcagctgttagttgccttt

SEQ ID NO: 3251 - DNA, 2120 bp, Homo sapiens
  source 1..2120: mol_type = genomic DNA
atcgattgatcaacaagtttgtacaaaaaagttggcatgcaagaaaccttcaggaacctggcctctatagggaaaaaatggaaaccccagaacatatatgtagagtacgaaaatctaaggagaaacctaagaattgtgggagagagactctttgaaagtaaagaaggtcatcagcatggagaaattttgacccaggttccagatgacatgctgaagaaaacaactactggagtaaaatcatgcgaaagcagtgtgtatggagaagtaggcagtgctcattcatctcttaataggcacatcagagatgacactggacacaaggcatatgagtatcaagaatatggacagaaaccatataaatgtaaatactgtaaaaaacctttcaactgtctctcctctgttcagacacatgaaagggctcatagtggaaggaaactctatgtttgtgaggaatgcggaaaaacatttatttcccattcaaaccttcaaagacacaggataatgcaccgtggagatggaccttataagtgtaaattttgtgggaaagccttgatgtttctcagtttgtatcttatccacaaacgaactcacactggagagaaaccatatcaatgtaaacagtgtggtaaagcctttagtcattctagtagccttcgaatacatgaaagaactcacactggggagaagccttataaatgtaatgaatgtgggaaagcattccatagttccacatgccttcatgctcataaaagaactcacactggggagaagccatatgaatgtaaacagtgtgggaaagccttcagctcttcccattcctttcaaatacatgaaagaactcacacgggggagaagccatatgaatgtaaggaatgtggaaaagcattcaagtgtcccagttctgttcgcagacatgaaagaacccactctaggaaaaaaccctatgaatgtaaacattgtgggaaagtattatcttatcttaccagctttcaaaaccacttgggaatgcacactggagagatatctcataaatgtaagatatgtgggaaagccttttattctcccagttcacttcaaacacatgaaaaaactcacactggagagaaaccctataaatgcaaccaatgtggtaaagcctttaattcttccagttccttccgatatcatgaaagaactcacactggagagaaaccttacgagtgtaagcaatgtgggaaagccttcagatctgcctcactccttcaaacacatggtaggactcacacgggagagaaaccctatgcatgtaaggaatgtggaaaaccatttagtaatttctctttctttcaaatacatgaaaggatgcacagagaagagaagccgtatgaatgtaagggttatgggaaaacattcagtttgcccagtttatttcatagacatgaaaggactcacactggaggaaaaacctatgaatgcaagcagtgtggcagatccttcaactgttcgagctcctttcgatatcatggaaggactcacactggagagaaaccctatgaatgcaagcaatgtggaaaagccttcagatctgcctcacagcttcaaattcatggaaggactcacactggagagaaaccttatgaatgtaagcagtgtgggaaagcctttggatctgcctcacaccttcaaatgcatggaaggactcacactggagagaaaccctatgaatgtaagcagtgtgggaagtcttttggatgtgcctcgcgacttcaaatgcatggaaggactcacactggagagaaaccgtataaatgtaagcaatgtgggaaagcttttggatgtccctcaaaccttcgaaggcatggaaggactcacactggagagaaaccctataaatgtaaccaatgtggtaaagtctttagatgttcttcacaacttcaagtgcatggaagggctcactgcatagacaccccatacccaactttcttgtacaaagtggttgatatcggtaagcctatccctaaccctctcctcggtctcgattctacgtagtaatgaactagtccgtaacttgaaagtatttcgatttcttggctttatatatcttgtggaaaggacgaagatgagacaggccttgccatgga

SEQ ID NO: 3252 - DNA, 1475 bp, Homo sapiens
  source 1..1475: mol_type = genomic DNA
atcgattgatcaacaagtttgtacaaaaaagttggcatgagttctcattttgcccaagacctttggccagagaacatacaaaattctttccaaatagggatgctgagaagatatgaagaatgcagacatgacaatttacagttaaaaaaaggctgtaaaagcgtgggtgagcataaggtgcacaaaggaggttataatggacttaaccaatgtttgacaactacccagaaagaaatatttcaatgtgataaatatggaaaagtctttcataagttttcaaattcaaacacatataagacaagacatactggaataaatcttttcaaatgtataatatgtggcaaagcttttaaacggtcctcaacccttactacacataagaaaattcatactggagagaaaccttacagatgtgaagaatgtggcaaagcttttaaccaatctgcaaaccttactacacataagagaattcataccggagagaaaccctacagatgtgaagaatgtggcaaagcctttaagcagtcctcaaaccttactacacataagaaaattcatactggagagaaaccctacaaatgtgaagaatgtggcaaagccttcaaccgatccacagaccttactacacataagatagttcatactggagagaaaccctacaaatgtgaagaatgtggcaaagcctttaagcacccctcacacgttaccacacataagaaaattcatactagagggaaaccctacaactgtgaagaatgtggcaaatcctttaagcactgctctaaccttactatacataagagaattcatacaggagagaaaccctacaaatgtgaagaatgtggcaaagcctttcacctatcctcacaccttactacacataagatacttcatactggagagaaaccctacagatgtagagaatgtggcaaagcttttaaccattccacaacccttttttcacatgagaaaattcatactggagagaaaccctacaaatgtgatgaatgtggcaaaacctttacctggccctcaatcctctccaaacataaaagaactcatactggagagaaaccctacaaatgtgaagaatgtggcaaatcctttactgcatcctcaactctaactacacataagagaattcatactggagagaaaccttacaaatgtgaagaatgtggcaaagcttttaactggtcctcagaccttaataaacataagaaaattcatattgaacgaaaaccctacatagtgaagaatgtgacagatcttttaaatgttcctccacttttaattagcataagatacccaactttcttgtacaaagtggttgatatcggtaagcctatccctaaccctctcctcggtctcgattctacgtagtaatgaactagtccgtaacttgaaagtatttcgatttcttggctttatatatcttgtggaaaggacgacaaatctctgttgaccagacggtg

SEQ ID NO: 3253 - DNA, 3479 bp, Homo sapiens
  source 1..3479: mol_type = genomic DNA
atcgattgatcaacaagtttgtacaaaaaagttggcaccatgatgccgatgatattaactgttttcttgagcaacaatgaacagattttaacagaagttcctataacaccggaaacaacctgtcgagatgttgtagaattttgcaaggaacctggagaaggcagctgccatttagctgaagtgtggaggggaaatgaacgtcccataccctttgatcatatgatgtacgaacatcttcagaaatggggtccacggagggaagaagtgaaatttttccttcgacacgaggactccccaactgagaacagtgaacaaggtggccgtcagacccaagagcaacgaactcagagaaatgtaataaatgtacctggagaaaaacgtactgaaaatggggttgggaatccacgtgttgaacttaccctctcagagctccaagatatggcagctaggcaacagcagcagattgaaaatcagcagcagatgttggttgccaaggaacagcgtttacattttctaaagcaacaggagcgccgtcagcagcagtctatttctgaaaatgaaaagcttcagaaattgaaagaacgagttgaagcccaggagaacaagctgaagaaaattcgtgcaatgagaggacaagtcgactacagcaaaatcatgaacggcaatctgtctgctgaaatagaaaggttcagtgccatgttccaggaaaagaagcaggaagtacagactgcaattttaagggttgatcagcttagtcagcaattggaagatttaaagaaaggaaaactgaatgggttccagtcttacaatggcaaattgacgggaccagcggcggtggagttaaaaagactgtaccaagaactacagattcgtaaccaacttaaccaggaacaaaattcaaaacttcagcagcagaaggaactcttaaataagcgcaacatggaggtggccatgatggacaagcgaatcagtgaactgcgtgaacgtctctatgggaaaaaaattcagctgaaccgtgtgaatggcacgtcatcaccacagtcccctctgagcacatcgggcagggtcgctgctgtggggccttatatccaggttcccagtgccggaagctttcctgtgctgggggaccctataaagccccagtctctcagtattgcctcaaatgctgctcatggaagatccaaatccgctaatgatggaaactggccaacattaaaacagaattctagctcttccgtgaaaccagtgcaggtggccggtgcagactggaaggatccgagcgtggaggggtctgtcaagcagggcactgtctccagccagcctgtgcccttctcagcactgggacccacggagaagccgggcatcgagattggtaaagtgccacctcccatcccgggtgtaggcaagcagctgcctccaagctatgggacatacccaagtcctacacctctgggtcctgggtcgacaagctccctggaaaggaggaaggaaggcagcttgcccaggcccagtgcaggcctgccaagtcgacagaggcccaccctgctgcccgccacaggcagcaccccccagccaggctcctcacaacagattcagcagaggatttccgtaccgccaagtcccacgtacccgccagcgggaccacctgcatttccagctggggacagcaagcctgaactcccactgacagtggccattaggcctttcctggctgataaagggtcaaggccacagtctcccaggaaaggaccccagacagtgaattcaagttccatatactccatgtacctccagcaagccacaccacctaagaattaccagccggcagcacacagcgccttaaataagtcagttaaagcagtgtatggtaagcccgttttaccttcgggttcaacctctccatcgccgctgccgtttcttcacgggtcactgtccacgggcacaccacagcctcagccaccttcagaaagtactgagaaagagcctgagcaggatggccccgccgcccccgcagatggcagcaccgtggagagcctgccacggccactcagccccaccaagctcacgcccatcgtgcattcgccactgcgctaccagagtgatgcagacctggaggccctccgcaggaagctggccaacgcgccccggcccctgaaaaagcgcagctccatcacagagcccgagggccccggcgggcccaacatccagaagctgctgtaccagcgcttcaacaccctggccggtggcatggagggcacccctttctaccagcccagcccctcccaggacttcatgggcaccttggccgatgtggacaatggaaacaccaatgccaatggaaacctggaagagctcccccctgcccagcccacagccccactccccgctgagcctgccccgtcatcagatgccaatgataatgagttaccttcccccgaaccagaggagctcatctgtccccaaaccacccaccaaactgccgagccggcagaggacaataacaacaacgtggccacggtccccaccacggagcagatcccgagtcctgtggctgaggccccatctccaggggaagagcaggtccctccagcacctcttccccctgccagccaccctcctgccacctccacgaacaagcggaccaacttgaagaagcccaactcggagcggacggggcacgggctgagagtccggtttaaccccctggcactgctcctagacgcgtctctggaaggagagttcgatctggtgcagaggatcatctatgaggtggaagatcccagcaagcccaacgacgaagggatcaccccactgcacaacgccgtctgcgccggccaccatcacatcgtgaagttcctgctggattttggtgtcaacgtgaatgctgctgatagtgatggatggacgccgctgcactgcgctgcctcttgtaacagcgttcacctctgcaaacagctggtggagagtggtgccgccatttttgcctcaaccataagcgacattgaaactgctgcagacaagtgtgaggagatggaggaaggctacatccagtgctcccagtttctatatggggtgcaggaaaagctgggtgtgatgaacaaaggtgtggcgtatgctctgtgggactacgaggcccagaacagtgacgagctgtccttccacgaaggggacgccctcaccatcctgaggcgcaaggacgaaagcgagactgagtggtggtgggctcgccttggagaccgggagggctatgtgcccaaaaacctgctggggctgtatccacggatcaaaccccgacagcgaacactcgccttgccaactttcttgtacaaagtggttgatatcggtaagcctatccctaaccctctcctcggtctcgattctacgtagtaatgaactagtccgtaacttgaaagtatttcgatttcttggctttatatatcttgtggaaaggacgaactgccactgataaactaccgcgt

SEQ ID NO: 3254 - DNA, 1573 bp, Homo sapiens
  source 1..1573: mol_type = genomic DNA
atcgattgatcaacaagtttgtacaaaaaagttggcatgaagattgaggaggtgaagagcactacgaagacgcagcgcatcgcctcccacagccacgtgaaagggctggggctggacgagagcggcttggccaagcaggcggcctcagggcttgtgggccaggagaacgcgcgagaggcatgtggcgtcatagtagaattaatcaaaagcaagaaaatggctggaagagctgtcttgttggcaggacctcctggaactggcaagacagctctggctctggctattgctcaggagctgggtagtaaggtccccttctgcccaatggtggggagtgaagtttactcaactgagatcaagaagacagaggtgctgatggagaacttccgcagggccattgggctgcgaataaaggagaccaaggaagtttatgaaggtgaagtcacagagctaactccgtgtgagacagagaatcccatgggaggatatggcaaaaccattagccatgtgatcataggactcaaaacagccaaaggaaccaaacagttgaaactggaccccagcatttttgaaagtttgcagaaagagcgagtagaagctggagatgtgatttacattgaagccaacagtggggccgtgaagaggcagggcaggtgtgatacctatgccacagaattcgaccttgaagctgaagagtatgtccccttgccaaaaggggatgtgcacaaaaagaaagaaatcatccaagatgtgaccttgcatgacttggatgtggctaatgcgcggccccaggggggacaagatatcctgtccatgatgggccagctaatgaagccaaagaagacagaaatcacagacaaacttcgaggggagattaataaggtggtgaacaagtacatcgaccagggcattgctgagctggtcccgggtgtgctgtttgttgatgaggtccacatgctggacattgagtgcttcacctacctgcaccgcgccctggagtcttctatcgctcccatcgtcatctttgcatccaaccgaggcaactgtgtcatcagaggcactgaggacatcacatcccctcacggcatccctcttgaccttctggaccgagtgatgataatccggaccatgctgtatactccacaggaaatgaaacagatcattaaaatccgtgcccagacggaaggaatcaacatcagtgaggaggcactgaaccacctgggggagattggcaccaagaccacactgaggtactcagtgcagctgctgaccccggccaacttgcttgctaaaatcaacgggaaggacagcattgagaaagagcatgtcgaagagatcagtgaacttttctatgatgccaagtcctccgccaaaatcctggctgaccagcaggataagtacatgaagtgcccaactttcttgtacaaagtggttgatatcggtaagcctatccctaaccctctcctcggtctcgattctacgtagtaatgaactagtccgtaattgaaagtatttcgatttcttggctttatatatcttgtggaaaggacgatcagagcaatatcccataatcagt

SEQ ID NO: 3255 - DNA, 2711 bp, Homo sapiens
  source 1..2711: mol_type = genomic DNA
atcgattgatcaacaagtttgtacaaaaaagttggcatggcggcctccgcggcggcagcctcggcagcagcggcctcggccgcctctggcagcccgggcccgggcgagggctccgctggcggcgaaaagcgctccaccgccccttcggccgcagcctcggcctctgcctcagccgcggcgtcgtcgcccgcggggggcggcgccgaggcgctggagctgctggagcactgcggcgtgtgcagagagcgcctgcgacccgagagggagccccgcctgctgccctgtttgcactcggcctgtagtgcctgcttagggcccgcggcccccgccgccgccaacagctcgggggacggcggggcggcgggcgacggcaccgtggtggactgtcccgtgtgcaagcaacagtgcttctccaaagacatcgtggagaattatttcatgcgtgatagtggcagcaaggctgccaccgacgcccaggatgcgaaccagtgctgcactagctgtgaggataatgccccagccaccagctactgtgtggagtgctcggagcctctgtgtgagacctgtgtagaggcgcaccagcgggtgaagtacaccaaggaccatactgtgcgctctactgggccagccaagtctcgggatggtgaacgtactgtctattgcaacgtacacaagcatgaaccccttgtgctgttttgtgagagctgtgatactctcacctgccgagactgccagctcaatgcccacaaggaccaccagtaccagttcttagaggatgcagtgaggaaccagcgcaagctcctggcctcactggtgaagcgccttggggacaaacatgcaacattgcagaagagcaccaaggaggttcgcagctcaatccgccaggtgtctgacgtacagaagcgtgtgcaagtggatgtcaagatggccatcctgcagatcatgaaggagctgaataagcggggccgtgtgctggtcaatgatgcccagaaggtgactgaggggcagcaggagcgcctggagcggcagcactggaccatgaccaagatccagaagcaccaggagcacattctgcgctttgcctcttgggctctggagagtgacaacaacacagcccttttgctttctaagaagttgatctacttccagctgcaccgggccctcaagatgattgtggatcccgtggagccacatggcgagatgaagtttcagtgggacctcaatgcctggaccaagagtgccgaggcctttggcaagattgtggcagagcgtcctggcactaactcaacaggccctgcacccatggcccctccaagagccccagggcccctgagcaagcagggctctggcagcagccagcccatggaggtgcaggaaggctatggctttgggtcaggagatgatccctactcaagtgcagagccccatgtgtcaggtgtgaaacggtcccgctcaggtgagggcgaggtgagcggccttatgcgcaaggtgccacgagtgagccttgaacgcctggacctggacctcacagctgacagccagccacccgtcttcaaggtcttcccaggcagtaccactgaggactacaaccttattgttattgaacgtggcgctgccgctgcagctaccggccagccagggactgcgcctgcaggaacccctggtgccccacccctggctggcatggccattgtcaaggaggaggagacggaggctgccattggagcccctcctactgccactgagggccctgagaccaaacctgtgcttatggctcttgcggagggtcctggtgctgagggtccccgcctggcctcacctagtggcagcaccagctcagggctggaggtggtggctcctgagggtacctcagccccaggtggtggcccgggaaccctggatgacagtgccaccatttgccgtgtctgccagaagccaggcgatctggttatgtgcaaccagtgtgagttttgtttccacctggactgtcacctgccggccctgcaggatgtaccaggggaggagtggagctgctcactctgccatgtgctccctgacctgaaggaggaggatggcagcctcagcctggatggtgcagacagcactggcgtggtggccaagctctcaccagccaaccagcggaaatgtgagcgtgtactgctggccctattctgtcacgaaccctgccgccccctgcatcagctggctaccgactccaccttctccctggaccagcccggtggcaccctggatctgaccctgatccgtgcccgcctccaggagaagttgtcacctccctacagctccccacaggagtttgcccaggatgtgggccgcatgttcaagcaattcaacaagttaactgaggacaaggcagacgtgcagtccatcatcggcctgcagcgcttcttcgagacgcgcatgaacgaggccttcggtgacaccaagttctctgctgtgctggtggagcccccgccgatgagcctgcctggtgctggcctgagttcccaggagctgtctggtggccctggtgatggcccctgcccaactttcttgtacaaagtggttgatatcggtaagcctatccctaaccctctcctcggtctcgattctacgtagtaatgaactagtccgtaacttgaaagtatttcgatttcttggctttatatatcttgtggaaaggacgacgaaatgcccatacagctcccccg

SEQ ID NO: 3256 - DNA, 2885 bp, Homo sapiens
  source 1..2885: mol_type = genomic DNA
atcgattgatcaacaagtttgtacaaaaaagttggcaccatgacggatcctttctgcgttggaggccgtcggctcccggggtccagcaagagtggtcccgggaaggatggcagccgaaaggaggtccgacttccaatgctgcatgacccaccgaagatggggatgccggtggtccgtggtggacagacagtgcccggccaggcccctctctgctttgacccgggaagtccagccagtgacaagacagaagggaagaaaaaggggcggccaaaagccgagaaccaggccctccgagacattcctctctccctgatgaacgactggaaggatgagttcaaggcacactcgagggtgaagtgtccaaactcagggtgctggctggagttccccagcatctacgggctcaagtaccattaccagcggtgccaagggggtgccatctcagatcgcctggccttcccctgccccttctgcgaggccgcattcacctctaagacccagctggagaaacaccggatctggaaccacatggaccgacccctgcctgcctccaagcctgggcccatcagcaggccggtcaccatcagccggcctgttggggtcagcaagcccatcggagtgagcaaacctgtcactattggcaaacctgtgggtgtcagcaaacccattggcatcagcaagccagtctcggtcggcagacccatgccagtcaccaaggccatcccggtcactaggcccgtgccagtcaccaaacctgtcacagtcagcaggcccatgcccgtcaccaaggccatgccggtcaccaaacccatcacagtcaccaagtctgtgccggtcaccaaacccgtacctgtcaccaaacccattacggtaacaaagcttgtgacagttacgaaacccgtgccggtcaccaagccagtgacagtcagcaggcccattgtggtcagcaagccggtgacagtcagcaggcccattgctatcagcagacacacaccgccctgcaaaatggtgctgctgaccaggtcggagaacaaagcacctcgtgccacagggaggaacagtggtaagaaaagggctgcggacagcctggacacctgcccaattccacccaagcaggccaggccagagaatggggagtacggcccctcctccatgggccagagctcggccttccagctgagtgcagacaccagcagtggctccttgtcgccaggcagcaggccgtcagggggcatggaggcactgaaggctgcaggccctgcgtccccgcctgaggaggacccggagcgcacaaagcacagaaggaaacagaaaacacccaaaaagtttacaggggagcagccatccatctccgggacctttgggctcaaaggcctggtcaaagctgaggacaaggcccgagttcaccgctccaagaagcaggaggggccaggccctgaggacgcccggaagaaggtgccagctgcccccatcactgtcagcaaggaggcaccggcccctgtggcccacccagctccaggtggccctgaagagcagtggcagagggccatccatgagcgcggggaagccgtctgccccacctgcaacgtggtcacccggaagactctcgtggggcttaagaagcacatggaggtgtgtcagaagcttcaggatgcactcaagtgccagcactgccggaagcagttcaagtccaaagccggcctcaactaccacactatggccgagcacagtgccaagccctctgacgccgaggcctccgaagggggcgagcaggaggagcgcgagaggctgcgcaaggtgctgaagcagatgggacggctgcgctgcccccaggagggttgcggggctgccttctccagcctcatgggctaccagtaccaccagcggcgctgcgggaagccgccctgcgaggtggacagcccctccttcccctgcacccactgtggcaagacgtaccgatccaaggctggccacgactaccacgtgcgctcggagcacacggcccccccccctgaggagcccacagacaagtcccctgaggctgaggacccgctgggtgtggagcggaccccaagcgggcgtgtccgccgcacgtcggcccaggtggcggtgttccacctgcaggagatagcggaggacgagctggcccgcgactggaccaagcggcgcatgaaggatgaccttgtgcccgagaccgcacggctcaactacactcgaccagggctccccacgctgaacccccagctgctagaggcatggaagaatgaagtgaaggagaaaggccacgtcaactgtcccaacgactgctgtgaagccatctactccagcgtgtccggactcaaggctcatctcgccagctgcagtaagggggcccacctggcagggaagtaccgctgtctgctgtgtccgaaggagttcagttctgagagtggcgtcaaataccacatcctgaagacccacgcagagaactggttccgaacatcagcagacccacctcccaaacacaggagccaggactcattggtgcccaagaaggaaaagaagaaaaatctggcaggtggaaagaagcggggccgaaagcccaaggagcggaccccagaggagcctgtggccaagctgcccccgcgccgggacgactggcctccaggatgcagagacaagggggcccggggctccaccggccggaaggtgggagtcagcaaggcgcctgaaaagttgccaactttcttgtacaaagtggttgatatcggtaagcctatccctaaccctctcctcggtctcgattctacgtagtaatgaactagtccgtaacttgaaagtatttcgatttcttggctttatatatcttgtggaaaggacgagctggtgtttccaaggcatacgtt

SEQ ID NO: 3257 - DNA, 2885 bp, Homo sapiens
  source 1..2885: mol_type = genomic DNA
atcgattgatcaacaagtttgtacaaaaaagttggcaccatgacggatcctttctgcgttggaggccgtcggctcccggggtccagcaagagtggtcccgggaaggatggcagccgaaaggaggtccgacttccaatgctgcatgacccaccgaagatggggatgccggtggtccgtggtggacagacagtgcccggccaggcccctctctgctttgacccgggaagtccagccagtgacaagacagaagggaagaaaaaggggcggccaaaagccgagaaccaggccctccgagacattcctctctccctgatgaacgactggaaggatgagttcaaggcacactcgagggtgaagtgtccaaactcagggtgctggctggagttccccagcatctacgggctcaagtaccattaccagcggtgccaagggggtgccatctcagatcgcctggccttcccctgccccttctgcgaggccgcattcacctctaagacccagctggagaaacaccggatctggaaccacatggaccgacccctgcctgcctccaagcctgggcccatcagcaggccggtcaccatcagccggcctgttggggtcagcaagcccatcggagtgagcaaacctgtcactattggcaaacctgtgggtgtcagcaaacccattggcatcagcaagccagtctcggtcggcagaccaatgccagtcaccaaggccatcccggtcactaggcccgtgccagtcaccaaacctgtcacagtcagcaggcccatgcccgtcaccaaggccatgccggtcaccaaacccatcacagtcaccaagtctgtgccggtcaccaaacccgtacctgtcaccaaacccattacggtcacaaagcttgtgacagttacgaaacccgtgccggtcaccaagccagtgacagtcagcaggcccattgtggtcagcaagccggtgacagtcagcaggcccattgctatcagcagacacacaccgccctgcaaaatggtgctgctgaccaggtcggagaacaaagcacctcgtgccacagggaggaacagtggtaagaaaagggctgcggacagcctggacacctgcccaattccacccaagcaggccaggccagagaatggggagtacggcccctcctccatgggccagagctcggccttccagctgagtgcagacaccagcagtggctccttgtcgccaggcagcaggccgtcagggggcatggaggcactgaaggctgcaggccctgcgtccccgcctgaggaggacccggagcgcacaaagcacagaaggaaacagaaaacacccaaaaagtttacaggggagcagccatccatctcagggacctttgggctcaaaggcctggtcaaagctgaggacaaggcccgagttcaccgctccaagaagcaggaggggccaggccctgaggacgcccggaagaaggtgccagctgccccaatcactgtcagcaaggaggcaccggcccctgtggcccacccagctccaggtggccctgaagagcagtggcagagggccatccatgagcgcggggaagccgtctgccccacctgcaacgtggtcacccggaagactctcgtggggctcaagaagcacatggaggtgtgtcagaagcttcaggatgcactcaagtgccagcactgccggaagcagttcaagtccaaagccggcctcaactaccacactatggccgagcacagtgccaagccctctgacgccgaggcctccgaagggggcgagcaggaggagcgcgagaggctgcgcaaggtgctgaagcagatgggacggctgcgctgcccccaggagggttgcggggctgccttctccagcctcatgggctaccagtaccaccagcggcgctgcgggaagccgccctgcgaggtggacagcccctccttcccctgcacccactgtggcaagacgtaccgatccaaggctggccacgactaccacgtgcgctcggagcacacggcccccccccctgaggagcccacagacaagtcccctgaggctgaggacccgctgggtgtggagcggaccccaagcgggcgtgtccgccgcacgtcggcccaggtggcggtgttccacctgcaggagatagcggaggacgagctggcccgcgactggaccaagcggcgcatgaaggatgaccttgtgcccgagaccgcacggctcaactacactcgaccagggctccccacgctgaacccccagctgctagaggcatggaagaatgaagtgaaggagaaaggccacgtcaactgtcccaacgactgctgtgaagccatctactccagcgtgtccggactcaaggctcatctcgccagctgcagtaagggggcccacctggcagggaagtaccgctgtctgctgtgtccgaaggagttcagttctgagagtggcgtcaaataccacatcctgaagacccacgcagagaactggttccgaacatcagcagacccacctcccaaacacaggagccaggactcattggtgcccaagaaggaaaagaagaaaaatctggcaggtggaaagaagcggggccgaaagcccaaggagcggaccccagaggagcctgtggccaagctgcccccgcgccgggacgactggcctccaggatgcagagacaagggggcccggggctccaccggccggaaggtgggagtcagcaaggcgcctgaaaagttgccaactttcttgtacaaagtggttgatatcggtaagcctatccctaaccctctcctcggtctcgattctacgtagtaatgaactagtccgtaacttgaaagtatttcgatttcttggctttatatatcttgtggaaaggacgaatacggcgtccgccccgctacctt

SEQ ID NO: 3258 - DNA, 2495 bp, Homo sapiens
  source 1..2495: mol_type = genomic DNA
atcgattgatcaacaagtttgtacaaaaaagttggcatgaaaactagcccccgtcggccactgattctcaaaagacggaggctgccccttcctgttcaaaatgccccaagtgaaacatcagaggaggaacctaagagatcccctgcccaacaggagtctaatcaagcagaggcctccaaggaagtggcagagtccaactcttgcaagtttccagctgggatcaagattattaaccaccccaccatgcccaacacgcaagtagtggccatccccaacaatgctaatattcacagcatcatcacagcactgactgccaagggaaaagagagtggcagtagtgggcccaacaaattcatcctcatcagctgtgggggagccccaactcagcctccaggactccggcctcaaacccaaaccagctatgatgccaaaaggacagaagtgaccctggagaccttgggaccaaaacctgcagctagggatgtgaatcttcctagaccacctggagccctttgcgagcagaaacgggagacctgtgcagatggtgaggcagcaggctgcactatcaacaatagcctatccaacatccagtggcttcgaaagatgagttctgatggactgggctcccgcagcatcaagcaagagatggaggaaaaggagaattgtcacctggagcagcgacaggttaaggttgaggagccttcgagaccatcagcgtcctggcagaactctgtgtctgagcggccaccctactcttacatggccatgatacaattcgccatcaacagcactgagaggaagcgcatgactttgaaagacatctatacgtggattgaggaccactttccctactttaagcacattgccaagccaggctggaagaactccatccgccacaacctttccctgcacgacatgtttgtccgggagacgtctgccaatggcaaggtctccttctggaccattcaccccagtgccaaccgctacttgacattggaccaggtgtttaagccactggacccagggtctccacaattgcccgagcacttggaatcacagcagaaacgaccgaatccagagctccgccggaacatgaccatcaaaaccgaactccccctgggcgcacggcggaagatgaagccactgctaccacgggtcagctcatacctggtacctatccagttcccggtgaaccagtcactggtgttgcagccctcggtgaaggtgccattgcccctggcggcttccctcatgagctcagagcttgcccgccatagcaagcgagtccgcattgcccccaaggtgctgctagctgaggaggggatagctcctctttcttctgcaggaccagggaaagaggagaaactcctgtttggagaagggttttctcctttgcttccagttcagactatcaaggaggaagaaatccagcctggggaggaaatgccacacttagcgagacccatcaaagtggagagccctcccttggaagagtggccctccccggccccatctttcaaagaggaatcatctcactcctgggaggattcgtcccaatctcccaccccaagacccaagaagtcctacagtgggcttaggtccccaacccggtgtgtctcggaaatgcttgtgattcaacacagggagaggagggagaggagccggtctcggaggaaacagcatctactgcctccctgtgtggatgagccggagctgctcttctcagaggggcccagtacttcccgctgggccgcagagctcccgttcccagcagactcctctgaccctgcctcccagctcagctactcccaggaagtgggaggaccttttaagacacccattaaggaaacgctgcccatctcctccaccccgagcaaatctgtcctccccagaacccctgaatcctggaggctcacgcccccagccaaagtagggggactggatttcagcccagtacaaacctcccagggtgcctctgaccccttgcctgaccccctggggctgatggatctcagcaccactcccttgcaaagtgctcccccccttgaatcaccgcaaaggctcctcagttcagaacccttagacctcatctccgtcccctttggcaactcttctccctcagatatagacgtccccaagccaggctccccggagccacaggtttctggccttgcagccaatcgttctctgacagaaggcctggtcctggacacaatgaatgacagcctcagcaagatcctgctggacatcagctttcctggcctggacgaggacccactgggccctgacaacatcaactggtcccagtttattcctgagctacagtacccaactttcttgtacaaagtggttgatatcggtaagcctatccctaaccctctcctcggtctcgattctacgtagtaatgaactagtccgtaacttgaaagtatttcgatttcttggctttatatatcttgtggaaaggacgacacggcgcgtaggactcgtggcaa

SEQ ID NO: 3259 - DNA, 1028 bp, Homo sapiens
  source 1..1028: mol_type = genomic DNA
atcgattgatcaacaagtttgtacaaaaaagttggcatggcccaagttgcaatgtccaccctccccgttgaagatgaggagtcctcggagagcaggatggtggtgacattcctcatgtcagctctcgagtccatgtgtaaagaactggccaagtccaaagccgaagtggcctgcattgcagtgtatgaaacagacgtgtttgtcgtcggaactgaaagaggacgtgcttttgtcaataccagaaaggattttcaaaaagattttgtaaaatattgtgttgaagaagaagaaaaagctgcagagatgcataaaatgaaatctacaacccaggcaaatcggatgagtgtagatgctgtagaaattgaaacactcagaaaaacagttgaggactatttctgcttttgctatgggaaagctttaggcaaatccacagtggtacctgtaccatatgagaagatgctgcgagaccagtcggctgtggtagtgcaggggcttccggaaggtgttgcctttaaacaccccgagaactatgatcttgcaaccctgaaatggattctggagaacaaagcagggatttcattcatcattaagagaccttttttagagccaaagaagcatgtaggtggtcgtgtgatggtaacagatgctgacaggtcaatactatctccaggtggaagttgtggccccatcaaagtgaaaactgaacccacagaagattctggcatttccctggaaatggcagctgtgacagtaaaggaagaatcagaagatcctgattattatcaatataacattcaaggaagccaccattcttcagagggcaatgaaggcacagaaatggaagtaccagcagaaggttacccaactttcttgtacaaagtggttgatatcggtaagcctatccctaaccctctcctcggtctcgattctacgtagtaatgaactagtccgtaacttgaaagtatttcgatttcttggctttatatatcttgtggaaaggacgacgaataagaggtgccgacgagcca

SEQ ID NO: 3260 - DNA, 2465 bp, Homo sapiens
  source 1..2465: mol_type = genomic DNA
atcgattgatcaacaagtttgtacaaaaaagttggcatggcggacaagcgcaaactccaaggtgagattgatcgctgcctcaagaaggtgtccgagggcgtggagcagtttgaagatatttggcagaagctccacaatgcagccaacgcgaaccagaaagaaaagtatgaggctgacctaaagaaggagattaagaagctacaacggctgagggaccaaatcaagacatgggtagcgtccaacgagatcaaggacaagaggcagcttatagacaaccgcaagctcattgagacgcaaatggaacggttcaaagttgtggaacgagagaccaaaaccaaagcttacagcaaagagggcctgggcctggcccagaaggtagatcctgcccagaaggagaaggaagaggttggccagtggctcacgaataccatcgacacgctcaacatgcaggtggaccagtttgagagtgaagtggagtcactgtcagtgcagacacgcaagaagaagggcgacaaggataagcaggaccggattgagggcttgaagcggcacatcgagaagcaccgctaccacgtgcgcatgctagagaccatcctgcgcatgctggacaatgactccatcctcgttgacgccatccgcaagatcaaggacgacgttgagtactatgttgactcatcccaggaccccgacttcgaggagaacgagtttctctacgatgacctggacctcgaggacattccacaggcgctggtcgccacctccccccccagccacagccacatggaggatgagatcttcaaccagtccagcagcacgcccacctcaaccacctccagctctcccatcccgcccagcccagccaactgtaccacggaaaactctgaagatgataagaagaggggacgttccacagacagtgaagtcagccagtctccagccaaaaacggctccaagcctgtccacagcaaccagcaccctcagtccccagctgtgccgcccacctacccctccggccccccgcctgctgcctctgccttgagcaccactcctggcaacaatggggtccccgcccccgcagcacccccaagtgccctgggccccaaggccagtccagctcccagccacaactcgggcacccctgctccctatgcccaggcggtggccccaccagctcccagtgggcccagcacgacccagccccggccccccagcgtccagcctagcggaggcggaggcggcggcagcggaggcggagggagcagcagcagtagtaacagcagtgccggtggaggggctggcaagcagaatggcgccaccagttacagctcagttgtggcagacagcccggcagaggtggctttgagcagcagtgggggcaacaatgccagcagccaggccttgggccccccttccggcccccacaacccacctcccagcacctcgaaggaacccagtgcggcagccccaacgggggctgggggcgtggccccaggctcagggaacaactcagggggacccagcctcctggtgccactgcctgtgaatcctcccagctccccaacgcccagcttcagtgatgccaaggcagccggtgccctgctcaatgggcctccacagttcagcaccgccccagaaatcaaggcccctgagcctctgagctccttgaagtccatggcggaacgggcagccatcagctctggcattgaggaccctgtgccaacgctgcacctgaccgagcgagacatcatcctgagcagtacatcagcacctccggcctcagcccagccgcccctgcagctgtcagaggtgaacataccgctgtcgctgggtgtctgtccactgggccctgtgcccctcaccaaggagcagctctatcagcaggccatggaagaggccgcctggcaccacatgcctcacccctctgactctgagcgtattcggcagtacctcccccggaacccctgtccgacgcccccctaccaccaccagatgccacccccacactcggacactgtggaattctaccagcgcctgtcgaccgagacactcttcttcatcttctactatctggagggcactaaggcacagtatctggcagccaaggccctaaagaagcagtcatggcgattccacaccaagtacatgatgtggttccagaggcacgaggagcccaagaccatcactgacgagtttgagcagggcacctacatctactttgactacgagaagtggggccagcggaagaaggaaggcttcacctttgagtaccgctacctggaggaccgggacctccagtgcccaactttcttgtacaaagtggttgatatcggtaagcctatccctaaccctctcctcggtctcgattctacgtagtaatgaactagtccgtaacttgaaagtatttcgatttcttggctttatatatcttgtggaaaggacgattcgttgtactggatttcggactc

SEQ ID NO: 3261 - DNA, 896 bp, Homo sapiens
  source 1..896: mol_type = genomic DNA
accgccaccatggaagcgtttttggggtcgcggtccggactttgggcggggggtccggccccaggacagttttaccgcattccgtccactcccgattccttcatggatccggcgtctgcactttacagaggtccaatcacgcggacccagaaccccatggtgaccgggacctcagtcctcggcgttaagttcgagggcggagtggtgattgccgcagacatgctgggatcctacggctccttggctcgtttccgcaacatctctcgcattatgcgagtcaacaacagtaccatgctgggtgcctctggcgactacgctgatttccagtatttgaagcaagttctcggccagatggtgattgatgaggagcttctgggagatggacacagctatagtcctagagctattcattcatggctgaccagggccatgtacagccggcgctcgaagatgaaccctttgtggaacaccatggtcatcggaggctatgctgatggagagagcttcctcggttatgtggacatgcttggtgtagcctatgaagccccttcgctggccactggttatggtgcatacttggctcagcctctgctgcgagaagttctggagaagcagccagtgctaagccagaccgaggcccgcgacttagtagaacgctgcatgcgagtgctgtactaccgagatgcccgttcttacaaccggtttcaaatcgccactgtcaccgaaaaaggtgttgaaatagagggaccattgtctacagagaccaactgggatattgcccacatgatcagtggctttgaatagtaatgaactagtccgtaacttgaaagtatttcgatttcttggctttatatatcttgtggaaaggacgaaatatatcataaagaagtaacaat

SEQ ID NO: 3262 - DNA, 2747 bp, Homo sapiens
  source 1..2747: mol_type = genomic DNA
atcgattgatcaacaagtttgtacaaaaaagttggcatgtctctgtggggtctggtctccaagatgcccccagaaaaagtgcagcggctctatgtcgactttccccaacacctgcggcatcttctgggtgactggctggagagccagccctgggagttcctggtcggctccgacgccttctgctgcaacttggctagtgccctactttcagacactgtccagcaccttcaggcctcggtgggagagcagggggaggggagcaccatcttgcaacacatcagcacccttgagagcatatatcagagggaccccctgaagctggtggccactttcagacaaatacttcaaggagagaaaaaagctgttatggaacagttccgccacttgccaatgcctttccactggaagcaggaagaactcaagtttaagacaggcttgcggaggctgcagcaccgagtaggggagatccaccttctccgagaagccctgcagaagggggctgaggctggccaagtgtctctgcacagcttgatagaaactcctgctaatgggactgggccaagtgaggccctggccatgctactgcaggagaccactggagagctagaggcagccaaagccctagtgctgaagaggatccagatttggaaacggcagcagcagctggcagggaatggcgcaccgtttgaggagagcctggccccactccaggagaggtgtgaaagcctggtggacatttattcccagctacagcaggaggtaggggcggctggtggggagcttgagcccaagacccgggcatcgctgactggccggctggatgaagtcctgagaaccctcgtcaccagttgcttcctggtggagaagcagcccccccaggtactgaagactcagaccaagttccaggctggagttcgattcctgttgggcttgaggttcctgggggccccagccaagcctccgctggtcagggccgacatggtgacagagaagcaggcgcgggagctgagtgtgcctcagggtcctggggctggagcagaaagcactggagaaatcatcaacaacactgtgcccttggagaacagcattcctgggaactgctgctctgccctgttcaagaacctgcttctcaagaagatcaagcggtgtgagcggaagggcactgagtctgtcacagaggagaagtgcgctgtgctcttctctgccagcttcacacttggccccggcaaactccccatccagctccaggccctgtctctgcccctggtggtcatcgtccatggcaaccaagacaacaatgccaaagccactatcctgtgggacaatgccttctctgagatggaccgcgtgccctttgtggtggctgagcgggtgccctgggagaagatgtgtgaaactctgaacctgaagttcatggctgaggtggggaccaaccgggggctgctcccagagcacttcctcttcctggcccagaagatcttcaatgacaacagcctcagtatggaggccttccagcaccgttctgtgtcctggtcgcagttcaacaaggagatcctgctgggccgtggcttcaccttttggcagtggtttgatggtgtcctggacctcaccaaacgctgtctccggagctactggtctgaccggctgatcattggcttcatcagcaaacagtacgttactagccttcttctcaatgagcccgacggaacctttctcctccgcttcagcgactcagagattgggggcatcaccattgcccatgtcatccggggccaggatggctctccacagatagagaacatccagccattctctgccaaagacctgtccattcgctcactgggggaccgaatccgggatcttgctcagctcaaaaatctctatcccaagaagcccaaggatgaggctttccggagccactacaagcctgaacagatgggtaaggatggcaggggttatgtcccagctaccatcaagatgaccgtggaaagggaccaaccacttcctaccccagagctccagatgcctaccatggtgccttcttatgaccttggaatggcccctgattcctccatgagcatgcagcttggcccagatatggtgccccaggtgtacccaccacactctcactccatccccccgtatcaaggcctctccccagaagaatcagtcaacgtgttgtcagccttccaggagcctcacctgcagatgccccccagcctgggccagatgagcctgccctttgaccagcctcacccccagggcctgctgccgtgccagcctcaggagcatgctgtgtccagccctgaccccctgctctgctcagatgtgaccatggtggaagacagctgcctgagccagccagtgacagcgtttcctcagggcacttggattggtgaagacatattccctcctctgctgcctcccactgaacaggacctcactaagcttctcctggaggggcaaggggagtcggggggagggtccttgggggcacagcccctcctgcagccctcccactatgggcaatctgggatctcaatgtcccacatggacctaagggccaaccccagttggtgcccaactttcttgtacaaagtggttgatatcggtaagcctatccctaaccctctcctcggtctcgattctacgtagtaatgaactagtccgtaacttgaaagtatttcgatttcttggctttatatatcttgtggaaaggacgatcttaatttaggttactgtgttaa

SEQ ID NO: 3263 - DNA, 2753 bp, Homo sapiens
  source 1..2753: mol_type = genomic DNA
atcgattgatcaacaagtttgtacaaaaaagcaggcaccatgtctctgtggggtctggtctccaagatgcccccagaaaaagtgcagcggctctatgtcgactttccccaacacctgcggcatcttctgggtgactggctggagagccagccctgggagttcctggtcggctccgacgccttctgctgcaacttggctagtgccctactttcagacactgtccagcaccttcaggcctcggtgggagagcagggggaggggagcaccatcttgcaacacatcagcacccttgagagcatatatcagagggaccccctgaagctggtggccactttcagacaaatacttcaaggagagaaaaaagctgttatggaacagttccgccacttgccaatgcctttccactggaagcaggaagaactcaagtttaagacaggcttgcggaggctgcagcaccgagtaggggagatccaccttctccgagaagccctgcagaagggggctgaggctggccaagtgtctctgcacagcttgatagaaactcctgctaatgggactgggccaagtgaggccctggccatgctactgcaggagaccactggagagctagaggcagccaaagccctagtgctgaagaggatccagatttggaaacggcagcagcagctggcagggaatggcgcaccgtttgaggagagcctggccccactccaggagaggtgtgaaagcctggtggacatttattcccagctacagcaggaggtaggggcggctggtggggagcttgagcccaagacccgggcatcgctgactggccggctggatgaagtcctgagaaccctcgtcaccagttgcttcctggtggagaagcagcccccccaggtactgaagactcagaccaagttccaggctggagttcgattcctgttgggcttgaggttcctgggggccccagccaagcctccgctggtcagggccgacatggtgacagagaagcaggcgcgggagctgagtgtgcctcagggtcctggggctggagcagaaagcactggagaaatcatcaacaacactgtgcccttggagaacagcattcctgggaactgctgctctgccctgttcaagaacctgcttctcaagaagatcaagcggtgtgagcggaagggcactgagtctgtcacagaggagaagtgcgctgtgctcttctctgccagcttcacacttggccccggcaaactccccatccagctccaggccctgtctctgcccctggtggtcatcgtccatggcaaccaagacaacaatgccaaagccactatcctgtgggacaatgccttctctgagatggaccgcgtgccctttgtggtggctgagcgggtgccctgggagaagatgtgtgaaactctgaacctgaagttcatggctgaggtggggaccaaccgggggctgctcccagagcacttcctcttcctggcccagaagatcttcaatgacaacagcctcagtatggaggccttccagcaccgttctgtgtcctggtcgcagttcaacaaggagatcctgctgggccgtggcttcaccttttggcagtggtttgatggtgtcctggacctcaccaaacgctgtctccggagctactggtctgaccggctgatcattggcttcatcagcaaacagtacgttactagccttcttctcaatgagcccgacggaacctttctcctccgcttcagcgactcagagattgggggcatcaccattgcccatgtcatccggggccaggatggctctccacagatagagaacatccagccattctctgccaaagacctgtccattcgctcactgggggaccgaatccgggatcttgctcagctcaaaaatctctatcccaagaagcccaaggatgaggctttccggagccactacaagcctgaacagatgggtaaggatggcaggggttatgtcccagctaccatcaagatgaccgtggaaagggaccaaccacttcctaccccagagctccagatgcctaccatggtgccttcttatgaccttggaatggcccctgattcctccatgagcatgcagcttggcccagatatggtgccccaggtgtacccaccacactctcactccatccccccgtatcaaggcctctccccagaagaatcagtcaacgtgttgtcagccttccaggagcctcacctgcagatgccccccagcctgggccagatgagcctgccctttgaccagcctcacccccagggcctgctgccgtgccagcctcaggagcatgctgtgtccagccctgaccccctgctctgctcagatgtgaccatggtggaagacagctgcctgagccagccagtgacagcgtttcctcagggcacttggattggtgaagacatattccctcctctgctgcctcccactgaacaggacctcactaagcttctcctggaggggcaaggggagtcggggggagggtccttgggggcacagcccctcctgcagccctcccactatgggcaatctgggatctcaatgtcccacatggacctaagggccaaccccagttggtagaacccagctttcttgtacaaagtggttgatatcggtaagcctatccctaaccctctcctcggtctcgattctacgtagtaatgaactagtccgtaacttgaaagtatttcgatttcttggctttatatatcttgtggaaaggacgatagtgacaggccacattactatgt

SEQ ID NO: 3264 - DNA, 1496 bp, Homo sapiens
  source 1..1496: mol_type = genomic DNA
atcgattgatcaacaagtttgtacaaaaaagttggcatggctaaggagaacaggggggatgatggggccaccgagaggccgaagaaggccaaggaggagcggcgcatggaccagatgatgccaggaaagaccaaagcagatgctgctgacccagcaccacttcccagccaggagccccccaggaacagcacagaacagcagggcctggcctctgggtcttctgtgtcctttgtgggtgccagcggctgtcctgaggcctacaagcggctcctatccagcttctactgcaaggggacacacggcatcatgtcaccactggccaaaaagaagctcctggcccaggtgagcaaggtggaggccttgcagtgccaggaggagggctgccgccatggggcagagccccaggcgtccccagctgttcacctcccagagagtccccagagccccaaagggctgactgagaactccaggcaccggctgacccctcaggagggattgcaggccccaggtggcagcctcagagaggaggcgcaggcaggcccctgcccggcagcccccatcttcaagggctgcttctacacccaccccaccgaggtgctgaagcctgtcagccagcaccccagggacttcttctctagacttaaagatggggtgctattggggcctcctggcaaagaggggctgtcagtgaaagagccccagctggtgtggggcggagacgctaaccgcccttctgcgttccataaaggtggctccagaaagggcatcctctaccccaagcccaaagcctgctgggtgtcccccatggccaaggtcccagccgagagccccacgctcccgcccaccttccccagtagcccaggcctgggcagcaagcgcagcctggaggaagagggtgctgcccacagtgggaagagactgcgggccgtgtctccctttcttaaggaggcggatgccaagaagtgtggggccaaacctgcagggtccggcctggtctcctgccttctgggcccagccctggggcctgtgcccccagaggcctacaggggcaccatgctgcactgcccgctgaacttcactggcaccccgggccccttgaagggccaggctgcactccccttcagccccctggtcatcccggccttcccggcccacttcctggccaccgcaggcccctcgcccatggccgctggcctgatgcacttccccccaacgtccttcgacagtgccctccgccacagactttgcccggcctcatctgcctggcacgcaccaccagtcacaacctatgcagcgccccacttcttccacctcaacaccaagctgtacccaactttcttgtacaaagtggttgatatcggtaagcctatccctaaccctctcctcggtctcgattctacgtagtaatgaactagtccgtaacttgaaagtatttcgatttcttggctttatatatcttgtggaaaggacgactgagttacgataagtaagcacac

SEQ ID NO: 3265 - DNA, 2324 bp, Homo sapiens
  source 1..2324: mol_type = genomic DNA
atcgattgatcaacaagtttgtacaaaaaagttggcatgcgtccaatgcgaatttttgtgaatgatgaccgccatgtgatggcaaagcattcttccgtttatccaacacaagaggagctggaggcagtccagaacatggtgtcccacacggagcgggcgctcaaagctgtgtccgactggatagacgagcaggaaaagggtagcagcgagcaggcagagtccgataacatggatgtgcccccagaggacgacagtaaagaaggggctggggaacagaagacggagcacatgaccagaaccctgcggggagtgatgcgggtgggcctggtggcaaagggcctcctactcaagggggacttggatctggagctggtgctgctgtgtaaggagaagcccacaaccgccctcctggacaaggtggccgacaacctggccatccagcttgctgctgtaacagaagacaagtacgaaatactgcaatctgtcgacgatgctgcgattgtgataaaaaacacaaaagagcctccattgtccctgaccatccacctgacatcccctgttgtcagagaagaaatggagaaagtattagctggagaaacgctatcagtcaacgaccccccggacgttctggacaggcagaaatgccttgctgccttggcgtccctccgacacgccaagtggttccaggccagagccaacgggctgaagtcttgtgtcattgtgatccgggtcttgagggacctgtgcactcgcgtgcccacctggggtcccctccgaggctggcctctcgagctcctgtgtgagaaatccattggcacggccaacagaccgatgggtgctggcgaggccctgcggagagtgctggagtgcctggcgtcgggcatcgtgatgccagatggttctggcatttatgacccttgtgaaaaagaagccactgatgctattgggcatctagacagacagcaacgggaagatatcacacagagtgcgcagcacgcactgcggctcgctgccttcggccagctccataaagtcctaggcatggaccctctgccttccaagatgcccaagaaaccaaagaatgaaaacccagtggactacaccgttcagatcccaccaagcaccacctatgccattacgcccatgaaacgcccaatggaggaggacggggaggagaagtcgcccagcaaaaagaagaagaagattcagaagaaagaggagaaggcagagcccccccaggctatgaatgccctgatgcggttgaaccagctgaagccagggctgcagtacaagctggtgtcccagactgggcccgtccatgcccccatctttaccatgtctgtggaggttgatggcaattcattcgaggcctctgggccctccaaaaagacggccaagctgcacgtggccgttaaggtgttacaggacatgggcttgccgacgggtgctgaaggcagggactcgagcaagggggaggactcggctgaggagaccgaggcgaagccagcagtggtggcccctgccccagtggtagaagctgtctccacccctagtgcggcctttccctcagatgccactgccgagaacgtaaaacagcaggggccgatcctgacaaagcacggcaagaacccagtcatggagctgaacgagaagaggcgtgggctcaagtacgagctcatctccgagaccgggggcagccacgacaagcgcttcgtcatggaggtcgaagtggatggacagaagttccaaggtgctggttccaacaaaaaggtggcgaaggcctacgctgctcttgctgccctagaaaagcttttccctgacacccctctcgcccttgatgccaacaaaaagaagagagccccagtacccgtcagagggggaccgaaatttgctgctaagccacataaccctggcttcggcatgggaggccccatgcacaacgaagtgcccccaccccccaaccttcgagggcggggaagaggcgggagcatccggggacgagggcgcgggcgaggatttggtggcgccaaccatggaggctacatgaatgccggtgctgggtatggaagctatgggtacggaggcaactctgcgacagcaggctacagtgactttttcacagactgctacggctatcatgattttgggtcttcctacccaactttcttgtacaaagtggttgatatcggtaagcctatccctaaccctctcctcggtctcgattctacgtagtaatgaactagtccgtaacttgaaagtatttcgatttcttggctttatatatcttgtggaaaggacgatatgagtattctccaccacagttg

SEQ ID NO: 3266 - DNA, 2351 bp, Homo sapiens
  source 1..2351: mol_type = genomic DNA
atcgattgatcaacaagtttgtacaaaaaagttggcatggaagcacgttctatgctggttccaccccaggcatctgtgtgcttcgaggatgtggctatggcattcacacaggaggagtgggaacagctggacctggcccagaggacactgtaccgagaggtgacactggagacctgggagcatattgtctccctggggcttttcctttccaaatctgatgtgatctctcagctggagcaagaagaggacctgtgcagggcagagcaggaggccccccgagactggaaagctacccttgaggagaataggttgaattctgaaaaagatcgagctagggaagaactatcccaccacgtggaagtgtacaggagtggaccggaggagccaccctctttggtattaggaaaagtgcaagatcagagcaaccagttaagggaacaccaggagaactccttgaggttcatggtactcacctcagagagactgtttgctcaaagggaacattgtgagcttgaacttgggggaggttattctctaccttctactttaagccttctacctacaacattacctacaagtacaggtttccctaagcccaactcacaagttaaagagttgaaacaaaattcagctttcattaatcatgagaaaaatggagcagatgggaagcactgtgagagtcatcagtgtgctagagctttctgtcagagtatttacttgagtaaacttggaaacgttgaaacaggaaagaaaaacccttatgaatatattgtcagtggtgactctctcaactatggttcctccctttgttttcatggtagaactttttcagtgaagaaaagtgatgactgtaaggattatggaaacctcttcagtcacagtgtgtctctgaatgaacagaagccagtgcattttgggaaaagtcagtatgagtgtgatgagtgcagggaaacctgttctgagagtctgtgccttgtacaaacagaaagaagtggccctggagagacccccttcagatgtgaggaacgctgtgctgccttccccatggcctcatctttttctgactgtaacatcattcagactacagagaagccatctgtgtgtaatcagtgtggaaaatctttcagctgttgtaagctcatacaccagagaacacacactggagaaaagcccttcgaatgtactcagtgtgggaaatcttttagccagagctatgaccttgtcatacatcagaggacacacactggagagaagccctatgagtgtgacctgtgtgggaaatccttcacccagagatccaaacttattacacatcagcgaattcacactggagaaaaaccgtatcagtgtattgaatgcagaaaatccttcaggtggaactctaacctcattgtacatcagagaattcatactggagagaaaccgtatgagtgcactcactgtggaaagtccttcagccaaagctatgagttagttacacataaaagaacgcacactggagaaaaacccttcaaatgtactcagtgtgggaaatctttcagccagaagtatgaccttgttgtacatcagaggacacacactggagagaagccctatgagtgcaacctgtgtgggaaatccttctcccagagttccaaacttattacgcatcagcgaattcacactggagaaaaaccgtatcagtgtattgaatgtgggaaatccttcagatggaactctaacctcgtcatacatcagagaattcatactggagagaaaccgtacgattgcactcactgtggaaagtccttcagccaaagctatcagttagttgcacataaaagaactcacactggagaaaagccctatgaatgtaacgagtgtggaaaagccttcaatcgaagcactcagctcatcaggcatctgcaaattcacactggggagaagccgtacaaatgcaatcagtgcaataaagcctttgcaaggagctcctaccttgtgatgcatcagagaactcacactggtgagaaaccttttgagtgtagtcagtgtgggaaagccttttcagggagctctaaccttctttcccatcacagaattcattctggagagaaaccctatgaatgtagtgactgtgggaaatccttccggcagcaatctcaacttgtagtgcatcggcggacacatactggagagaaaccttacccaactttcttgtacaaagtggttgatatcggtaagcctatccctaaccctctcctcggtctcgattctacgtagtaatgaactagtccgtaacttgaaagtatttcgatttcttggctttatatatcttgtggaaaggacgacgctcaccagcagtccttaggctt

SEQ ID NO: 3267 - DNA, 1949 bp, Homo sapiens
  source 1..1949: mol_type = genomic DNA
atcgattgatcaacaagtttgtacaaaaaagcaggcaccatggaggtgaatgcaggaggtgtgattgcctatatcagttcttccagctcagcctcaagccctgcctcttgtcacagtgagggttctgagaatagtttccagtcctcctcctcttctgttccatcttctccaaatagctctaattctgataccaatggtaatcccaagaatggtgatctcgccaatattgaaggcatcttgaagaatgatcgaatagattgttctatgaaaacaagcaaatcgagtgcacctgggatgacaaaaagtcatagtggtgtgacaaaatttagtggcatggttctactgtgtaaagtctgtggggatgtggcgtcaggattccactatggagttcatgcttgcgaaggctgtaagggtttctttcggagaagtattcaacaaaacatccagtacaagaagtgcctgaagaatgaaaactgttctataatgagaatgaataggaacagatgtcagcaatgtcgcttcaaaaagtgtctgtctgttggaatgtcaagagatgctgttcggtttggtcgtattcctaagcgtgaaaaacagaggatgctaattgaaatgcaaagtgcaatgaagaccatgatgaacagccagttcagtggtcacttgcaaaatgacacattagtagaacatcatgaacagacagccttgccagcccaggaacagctgcgacccaagccccaactggagcaagaaaacatcaaaagctcttctcctccatcttctgattttgcaaaggaagaagtgattggcatggtgaccagagctcacaaggatacctttatgtataatcaagagcagcaagaaaactcagctgagagcatgcagccccagagaggagaacggattcccaagaacatggagcaatataatttaaatcatgatcattgcggcaatgggcttagcagccattttccctgtagtgagagccagcagcatctcaatggacagttcaaagggaggaatataatgcattacccaaatggtcatgccatttgtattgcaaatggacattgtatgaacttctccaatgcttatactcaaagagtatgtgatagagttccgatagatggattttctcagaatgagaacaagaatagttacctgtgcaacactggaggaagaatgcatctggtttgtccaatgagtaagtctccatatgtggaccctcataaatcaggacatgaaatctgggaagaattttcgatgagcttcactccagcagtgaaagaagtggtggaatttgcaaagcgtattcctgggttcagagatctctctcagcatgaccaggtcaaccttttaaaggctgggacttttgaggttttaatggtacggttcgcatcattatttgatgcaaaggaacgtactgtcacctttttaagtggaaagaaatatagtgtggatgatttacactcaatgggagcaggggatctgctaaactctatgtttgaatttagtgagaagctaaatgccctccaacttagtgatgaagagatgagtttgtttacagctgttgtcctggtatctgcagatcgatctggaatagaaaacgtcaactctgtggaggctttgcaggaaactctcattcgtgcactaaggaccttaataatgaaaaaccatccaaatgaggcctctatttttacaaaactgcttctaaagttgccagatcttcgatctttaaacaacatgcactctgaggagctcttggcctttaaagttcacccttaagacccagctttcttgtacaaagtggttgatatcggtaagcctatccctaaccctctcctcggtctcgattctacgtagtaatgaactagtccgtaacttgaaagtatttcgatttcttggctttatatatcttgtggaaaggacgagacgttcagtggaatcgctatccc

SEQ ID NO: 3268 - DNA, 1364 bp, Homo sapiens
  source 1..1364: mol_type = genomic DNA
atcgattgatcaacaagtttgtacaaaaaagttggcatgattataagcacaccacagagactaaccagttcaggaagtgttctgattgggagtccatatacccctgcaccagcaatggttactcagacacacatagcagaagctactggctgggtccctggtgatagaaaacgggctagaaaatttatagactctgatttttcagaaagtaaacgaagcaaaaaaggagataaaaatgggaaaggcttgagacacttttcaatgaaagtgtgtgagaaagttcaacgaaaaggtacaacatcgtacaatgaagtcgctgatgagctggtgtcagagttcaccaattcaaataaccatttggctgctgattcgcaggcttatgatcagaagaacattaggcgaagagtttatgatgctttaaatgtgctaatggcaatgaacataatttcaaaggaaaaaaaagaaatcaagtggattggcctgcctaccaattctgctcaggaatgtcagaatctggagatagagaagcagaggcggatagaacggataaagcagaagcgggcccagctgcaagaacttctcctacagcaaatcgctttcaaaaacctggtacagagaaatcgacaaaatgagcagcaaaaccagggcccgccggctctgaactctaccattcagctgccattcataatcatcaatacaagcagaaaaacagtcatagattgcagcatctccagtgacaagtttgagtatcttttcaattttgacaacacctttgagatccatgatgacatagaagtactaaagcggatgggaatgtcgtttggcctggagtcaggcaaatgctctctggaggatctgaaacttgcgaaatccctggtgccaaaggctttagaaggttatatcacagatatctccacaggaccttcttggttaaatcagggactacttctgaactctacccaatcagtttcaaatttagacctgaccactggtgccaccttaccccagtcaagtgtaaaccaagggttatgcttggatgcagaagtggccttagcaactgggcagttcctggccccaaacagtcaccagtccagcagtgcggcctctcactgctccgagtcccgaggcgagaccccctgttcgttcaatgatgaagatgaggaagatgatgaggaggattcctcctccccagaatacccaactttcttgtacaaagtggttgatatcggtaagcctatccctaaccctctcctcggtctcgattctacgtagtaatgaactagtccgtaacttgaaagtatttcgatttcttggctttatatatcttgtggaaaggacgaatcacggcatttaaggagtggggt

SEQ ID NO: 3269 - DNA, 1400 bp, Homo sapiens
  source 1..1400: mol_type = genomic DNA
atcgattgatcaacaagtttgtacaaaaaagttggcaccatggaaatagtggggtgccgagcagaagacaactcgtgtcctttccgccccccagccatgctctttcacgggatctccggaggccacatccaaggcatcatggaggagatggagcgcagatccaagactgaggcccgtctggccaaaggcgcccagctcaacggccgcgacgcgggcatgcccccgctcagcccggagaagcccgccctgtgcgccggctgcgggggcaagatctcggacaggtactatctgctggctgtggacaaacagtggcatctgagatgcctgaagtgctgtgaatgtaagctggccctcgagtccgagctcacctgctttgccaaggacggtagcatttactgcaaggaggattactacagaaggttctctgtgcagagatgtgcccgctgccaccttggcatttccgcctcggagatggtcatgcgcgcccgagactctgtctaccacctgagctgcttcacctgctccacttgcaacaagactctgaccacgggcgaccatttcggcatgaaggacagcctggtgtactgccgcgcccacttcgagaccctcttgcaaggagagtatccaccgcagctgagctacacggagctggcggccaagagcggcggcctggccctgccttacttcaacggtacgggcaccgtgcagaaagggcggccccggaagcggaagagcccagcgctgggagtggacatcgtcaattacaactcaggttgtaatgagaatgaggcagaccacttggaccgggaccagcagccttatccaccctcgcagaagaccaagcgcatgcgaacctctttcaagcatcaccagctccggaccatgaaatcctactttgccatcaaccacaacccggatgccaaggacctcaagcagcttgcccagaaaacaggtctgaccaaaagagttttgcaggtttggttccaaaacgcacgagccaaattcagaaggaaccttttgcggcaggagaatgggggtgttgataaagctgacggcacgtcgcttccggccccgccctcagcagacagcggagctctcactccacccggcactgcgaccactttaacagacctgaccaatcccactatcactgtagtgacatccgtgacctctaacatggacagccacgaatccggaagcccctcacaaactaccttaacaaaccttttcttgccaactttcttgtacaaagtggttgatatcggtaagcctatccctaaccctctcctcggtctcgattctacgtagtaatgaactagtccgtaacttgaaagtatttcgatttcttggctttatatatcttgtggaaaggacgataccggacatgctcactgtgcgaa

SEQ ID NO: 3270 - DNA, 1466 bp, Homo sapiens
  source 1..1466: mol_type = genomic DNA
accgccaccatggccaccaataaggagcgactctttgcggctggtgccctggggcctggatctggctacccaggggcaggtttccccttcgccttcccaggggcactcagggggtctccgcctttcgagatgctgagccctagcttccggggcctgggccagcctgacctccccaaggagatggcctctctgtcggtggagacacagagcaccagctcagaggagatggtgcccagctcgccctcgccccctccgcctcctcgggtctacaagccatgcttcgtgtgcaatgacaagtcctctggctaccactatggggtcagctcttgtgaaggctgcaagggcttctttcgccgaagcatccagaagaacatggtgtacacgtgtcaccgcgacaaaaactgtatcatcaacaaggtgaccaggaatcgctgccagtactgccggctacagaagtgcttcgaagtgggcatgtccaaggaagctgtgcgaaatgaccggaacaagaagaagaaagaggtgaaggaagaagggtcacctgacagctatgagctgagccctcagttagaagagctcatcaccaaggtcagcaaagcccatcaggagactttcccctcgctctgccagctgggcaagtataccacgaactccagtgcagaccaccgcgtgcagctggatctggggctgtgggacaagttcagtgagctggctaccaagtgcatcatcaagatcgtggagtttgccaagcggttgcctggctttacagggctcagcattgctgaccagatcactctgctcaaagctgcctgcctagatatcctgatgctgcgtatctgcacaaggtacaccccagagcaggacaccatgaccttctccgacgggctgaccctgaaccggacccagatgcacaatgccggcttcgggcccctcacagaccttgtctttgcctttgctgggcagctcctgcccctggagatggatgacaccgagacagggctgctcagcgccatctgcctcatctgcggagaccgcatggacctggaggagcccgaaaaagtggacaagctgcaggagccactgctggaagccctgaggctgtacgcccggcgccggcggcccagccagccctacatgttcccaaggatgctaatgaaaatcaccgacctccggggcatcagcactaagggagctgaaagggccattactctgaagatggagattccaggcccgatgcctcccttaatccgagagatgctggagaaccctgaaatgtttgaggatgactcctcgcagcctggtccccaccccaatgcctctagcgaggatgaggttcctgggggccagggcaaagggggcctgaagtccccagcctagtaatgaactagtccgtaacttgaaagtatttcgatttcttggctttatatatcttgtggaaaggacgaaaatcgctcgatatgcaaccgaca

SEQ ID NO: 3271 - DNA, 1817 bp, Homo sapiens
  source 1..1817: mol_type = genomic DNA
atcgattgatcaacaagtttgtacaaaaaagttggcatggagcgggtgaacgacgcttcgtgcggcccgtctggctgctacacataccaggtgagcagacacagcacggagatgctgcacaacctgaaccagcagcgcaaaaacggcgggcgcttctgcgacgtactcttgcgggtaggcgacgagagcttcccagcgcaccgcgccgtgctggccgcctgcagcgagtactttgagtcggtgttcagcgcccagttgggcgacggcggagctgcggacgggggtccggctgatgtagggggcgcgacggcagcaccaggcggcggggccgggggcagccgggagctggagatgcacactatcagctccaaggtatttggggacattctggacttcgcctacacttcccgcatcgtggtgcgcttggagagctttcccgaactcatgacggccgccaagttcctgctgatgaggtcggttatcgagatctgccaggaagtcatcaaacagtccaacgtacagatcctggtaccccctgcccgcgccgatataatgctctttcgcccccctgggacctcggacttgggcttccctttggacatgaccaacggggcagccttggcagccaacagcaatggcatcgccggcagcatgcagccagaggaggaggcagctcgggcggctggtgcagccattgcaggccaagcctctttgcctgtgttacctggggtggaccgcttgcccatggtggctggacccctatccccccaactgctgacttccccattccccagtgtggcatccagtgcccctcccctgactggcaagcgaggccggggccgcccaaggaaggccaacctgctggactcaatgtttgggtccccagggggcctgagggaggcaggcatccttccatgcggtctatgtggtaaggtgttcactgatgccaaccggctccggcagcacgaggcccagcacggtgtcaccagcctccagctgggctacatcgaccttcctcctccgaggctgggtgagaatgggctacccatctctgaagaccccgacggcccccgaaagaggagccggaccaggaagcaggtggcttgtgagatctgcggcaagatcttccgtgatgtgtatcatcttaaccggcacaagctgtcccactctggggagaagccctactcctgccctgtgtgtgggttgcggttcaagagaaaagaccgcatgtcctaccatgtgcggtcccatgatgggtccgtgggcaagccttacatctgccagagctgtgggaaaggcttctccaggcctgatcacttgaacggacatatcaagcaggtgcacacttctgagcggcctcacaagtgtcaggtgtgggttgggagcagcagcggcctgccgcccctggaacctcttcctagcgacctgccatcatgggactttgcccagcctgctttgtggaggtcgtcccattcggttcctgacaccgccttttccctttctctaaaaaaatcattcccagcccttgaaaacctgggcccagcacactccagcaacactctcttctgcccagccccgccgggatatctgaggcagggctggaccaccccagagggcagcagggcctttacccagtggcctgttggctacccaactttcttgtacaaagtggttgatatcggtaagcctatccctaaccctctcctcggtctcgattctacgtagtaatgaactagtccgtaacttgaaagtatttcgatttcttggctttatatatcttgtggaaaggacgatgcattagagctaatctacgcgcg

SEQ ID NO: 3272 - DNA, 1841 bp, Homo sapiens
  source 1..1841: mol_type = genomic DNA
atcgattgatcaacaagtttgtacaaaaaagttggcaccatgaccttcgaggatgtggccgtgtacttctcccaggaggagtgggggctcctggacacagcgcagagggccctgtaccgccacgtgatgctggaaaacttcacacttgtgacctcacttggactctctacctcccgacctcgtgtggtcattcaacttgagcgtggcgaggagccctgggttcccagtggaaaggacatgaccctggccaggaacacctacgggaggctcaactctggttcctggagtttgacagaggatagagatgtttctggagaatggccacgagctttcccagataccccacctgggatgactactagcgtcttcccagttgccgatgcctgccacagtgtaaaaagcctgcagcgacaaccgggtgcctccccatctcaggagagaaaacccacgggggtgtcggtgatctactgggagaggctcctgctaggctcgcgcagtgaccaggccagcatcagcctgcgactgacctccccactcaggccccccaagagcagccggcccagggaaaagaccttcacagagtaccgggtgcctgggaggcagcccaggacgcctgagcggcagaagccatgtgcacaggaggtccctgggagagccttcgggaatgcctcggacctgaaggccgccagtggtggcagggatcgcagaatgggcgcagcttggcaggagcctcatagactcctcggtggccaggagccctcgacctgggacgagctgggcgaggctcttcacgctggggagaagtccttcgaatgcagggcgtgcagcaaagtgttcgtgaagagctccgacctcctcaagcacctacgcacccacaccggggagcggccctacgagtgcacccagtgcggcaaggccttcagccagacgtcgcacttgacgcagcaccagcgcatccacagcggcgagacgccctacgcgtgccccgtgtgcggcaaggccttccggcatagctcctcgctggtgcggcaccagcgcatccacacggccgagaagtccttccgctgctccgagtgcggcaaggccttcagccacggctccaacctcagccagcaccgcaagatccacgcgggtgggcgtccttatgcttgcgcacagtgtggccgccgcttctgccgcaactcgcacctgatccagcacgagcgtacgcacacaggcgagaagcccttcgtatgcgcgctctgcggtgctgccttcagccagggctcctcgctctttttgcaccagcgcgtgcacacaggcgagaagcccttcgcctgcgcccagtgcggccgctcctttagccgcagctccaacctcacccagcaccagctcctgcacacgggcgagcggcccttccgctgcgtggactgtggcaagggtttcgccaagggcgccgtgctgctcagccaccggcgcattcacacgggcgagaagcccttcgtgtgcacgcagtgtggccgcgccttccgtgagcgccctgccctcttgcaccaccagaggatccacaccacagagaagaccaatgccgcagcaccagactgcaccccggggccaggtttccttcagggacatcatcggaaggtgcgccggggagggaagccaagcccagtcctgaagccagcgaaggtcttgccaactttcttgtacaaagtggttgatatcggtaagcctatccctaaccctctcctcggtctcgattctacgtagtaatgaactagtccgtaacttgaaagtatttcgatttcttggctttatatatcttgtggaaaggacgacgtcgagcgtctggccgtcccata

SEQ ID NO: 3273 - DNA, 1763 bp, Homo sapiens
  source 1..1763: mol_type = genomic DNA
atcgattgatcaacaagtttgtacaaaaaagttggcatggcttcctccccggcggtggacgtgtcctgcaggcggcgggagaagcggcggcagctggacgcgcgccgcagcaagtgccgcatccgcctgggcggccacatggagcagtggtgcctcctcaaggagcggctgggcttctccctgcactcgcagctcgccaagttcctgttggaccggtacacttcttcaggctgtgtcctctgtgcaggtcctgagcctttgcctccaaaaggtctgcagtatctggtgctcttgtctcatgcccacagccgagagtgcagcctggtgcccgggcttcgggggcctggcggccaagatggggggcttgtgtgggagtgctcagcaggccataccttctcctggggaccctctttgagccctacaccttcagaggcacccaagccagcctcccttccacatactactcggagaagttggtgttccgaggccacgagtgggcaggagcttgcagatttggaatctgagcatgatgagaggactcaagaggccaggttgcccaggagggtgggacccccaccagagaccttcccacctccaggagaggaagagggtgaggaagaagaggacaatgatgaggatgaagaggagatgctcagtgatgccagcttatggacctacagctcctccccagatgatagtgagcctgatgcccccagactactgccttcccctgtcacctgcacacctaaagagggggagacaccaccagcccctgcagcactctccagtcctcttgctgtgccggccttgtcagcatcctcattgagttccagagctcctccacctgcagaagtcagggtgcagccacagctcagcaggacccctcaagcggcccagcagactgaggccctggccagcactgggagtcaggcccagtctgctccaaccccggcctgggatgaggacactgcacaaattggccccaagagaattaggaaagctgccaaaagagagctgatgccttgtgacttccctggctgtggaaggatcttctccaaccggcagtatttgaatcaccacaaaaagtaccagcacatccaccagaagtctttctcctgcccagagccagcctgtgggaagtctttcaactttaagaaacacctgaaggagcacatgaagctgcacagtgacacccgggactacatctgtgagttctgcgcccggtctttccgcactagcagcaaccttgtcatccacagacgtatccacactggagaaaaacccctgcagtgtgagatatgcgggtttacctgccgccagaaggcttccctgaactggcaccagcgcaagcatgcagagacggtggctgccttgcgcttcccctgtgaattctgcggcaagcgctttgagaagccagacagtgttgcagcccaccgtagcaaaagtcacccagccctgcttctagcccctcaagagtcacccagtggtcccctagagccctgtcccagcatctctgcccctgggcctctgggatccagcgaggggtccaggccctctgcatctcctcaggctccaaccctgcttcctcagcaatgcccaactttcttgtacaaagtggttgatatcggtaagcctatccctaaccctctcctcggtctcgattctacgtagtaatgaactagtccgtaacttgaaagtatttcgatttcttggctttatatatcttgtggaaaggacgacgatagcctgcctcaagtcaaatt

SEQ ID NO: 3274 - DNA, 434 bp, Homo sapiens
  source 1..434: mol_type = genomic DNA
atcgattgatcaacaagtttgtacaaaaaagttggcatggccgagactgaccccaagaccgtgcaggacctcacctcggtggtgcagacactcctgcagcagatgcaagataaatttcagaccatgtctgaccagatcattgggagaattgatgatatgagtagtcgcattgatgatctggaaaagaatatcgcggacctcatgacacaggctggggtggaagaactggaaagtgaaaacaagatacctgccacgcaaaagagttgcccaactttcttgtacaaagtggttgatatcggtaagcctatccctaaccctctcctcggtctcgattctacgtagtaatgaactagtccgtaacttgaaagtatttcgatttcttggctttatatatcttgtggaaaggacgatggcgcatcctaaagtgtaagatt

SEQ ID NO: 3275 - DNA, 1598 bp, Homo sapiens
  source 1..1598: mol_type = genomic DNA
atcgattgatcaacaagtttgtacaaaaaagttggcatgagtgacggaaacccagagctcctgtcaaccagccagacctacaacggccagagcgagaacaacgaagactatgagatccccccgataacacctcccaacctcccggagccatccctcctgcacctgggggaccacgaagccagctaccactcgctgtgccacggcctcacccccaacggtctgctccctgcctactcctatcaggccatggacctcccagccatcatggtgtccaacatgctagcacaggacagccacctgctgtcgggccagctgcccacgatccaggagatggtccactcggaagtggctgcctatgactcgggccggcccgggcccctgctgggtcgcccggcaatgctggccagccacatgagtgccctcagccagtcccagctcatctcgcagatgggcatccggagcagcatcgcccacagctccccatcaccgccggggagcaagtcagcgaccccctctccctccagctccactcaggaagaggagtcggaagtgcatttcaagatctcgggagaaaagagaccttcagccgacccaggaaaaaaggccaagaacccgaagaagaagaaaaagaaggaccccaatgagccgcagaagcctgtgtcggcctacgcactcttcttcagagacactcaggccgccatcaagggtcagaaccccagtgccactttcggtgacgtgtccaaaatcgtggcctccatgtgggacagcctgggagaggaacagaagcaggcctacaagaggaagacagaagcagcaaagaaggaatatctgaaggccctggcagcctaccgggctagcctcgtctccaagagctccccagatcaaggtgagaccaagagcactcaggcaaacccaccagccaaaatgctcccacccaagcagcccatgtatgccatgccaggcctggcctccttcctgacgccgtcggacctgcaggccttccgcagtggggcctcccctgccagcctcgcccggacgctgggctccaagtctctgctgccaggcctcagtgcgtccccgccgccgccaccctccttcccgctcagccccacactgcaccagcagctgtcactgccccctcacgcccagggcgccctcctcagtccacctgttagcatgtccccagccccccagccccctgtcctgcccacccccatggcactccaggtgcagctggcgatgagcccctcacctccagggccacaggacttcccgcacatctctgagttccccagcagctcgggatcctgctcacctggcccatccaaccccaccagcagcggggactgggacagcagctaccccagtggggagtgtggcatcagcacctgcagcctgctccccagggacaaatcgctctacctcacctacccaactttcttgtacaaagtggttgatatcggtaagcctatccctaaccctctcctcggtctcgattctacgtagtaatgaactagtccgtaacttgaaagtatttcgatttcttggctttatatatcttgtggaaaggacgaattataaggaatgtctacaaaagg

SEQ ID NO: 3276 - DNA, 1130 bp, Homo sapiens
  source 1..1130: mol_type = genomic DNA
atcgattgatcaacaagtttgtacaaaaaagttggcatggtttcagacgaagatgaattgaatcttctggttattgtagttgatgccaacccaatttggtggggaaagcaagcattaaaggaatctcagttcactttatccaaatgcatagatgccgtgatggtgctgggaaattcgcatttattcatgaatcgttccaacaaacttgctgtgatagcaagtcacattcaagaaagccgattcttatatcctggaaagaatggcagacttggagacttcttcggagaccctggcaaccctcctgaatttaatccctctgggagtaaagatggaaaatacgaacttttaacctcagcaaatgaagttattgttgaagagattaaagatctaatgaccaaaagtgacataaagggtcaacatacagaaactttgctggcaggatccctggccaaagccctttgctacattcatagaatgaacaaggaagttaaagacaatcaggaaatgaaatcaaggatattggtgattaaggctgcagaagacagtgcgttgcagtatatgaacttcatgaatgtcatctttgcagcacagaaacagaatattttgattgatgcctgtgttttagactccgactcagggctcctccaacaggcttgtgacatcacgggaggactgtacctgaaggtgcctcagatgccttctcttctgcagtatttgctgtgggtgtttcttcccgatcaagatcagagatctcagttaatcctcccacccccggttcatgttgactacagggctgcttgcttctgtcatcgaaatctcattgaaattggttatgtctgttctgtgtgtttgtcaatattctgcaatttcagccccatttgtactacgtgcgagacagcctttaaaatttctctgcctccagtgctgaaagccaagaaaaagaaactgaaagtgtctgcctgcccaactttcttgtacaaagtggttgatatcggtaagcctatccctaaccctctcctcggtctcgattctacgtagtaatgaactagtccgtaacttgaaagtatttcgatttcttggctttatatatcttgtggaaaggacgatagccactgagatggggtcgacac

SEQ ID NO: 3277 - DNA, 2099 bp, Homo sapiens
  source 1..2099: mol_type = genomic DNA
atcgattgatcaacaagtttgtacaaaaaagttggcatgttctacgcacattttgttctcagtaaaagagggcctctggccaaaatttggctagcggcccattgggataagaagctaaccaaagcccatgtgttcgagtgtaatttagagagcagcgtggagagtatcatctcaccaaaggtgaaaatggcattacggacatcaggacatctcttactgggagtagttcgaatctatcacaggaaagccaaataccttcttgcagactgtaatgaagcattcattaagataaagatggcttttcggccaggtgtggttgacctgcctgaggaaaatcgggaagcagcttataatgccattactttacctgaagaatttcatgactttgatcagccactgcctgacttagatgacatcgatgtggcccagcagttcagcttgaatcagagtagagtggaagagataaccatgagagaagaagttgggaacatcagtattttacaagaaaatgattttggtgattttggaatggatgatcgtgagataatgagagaaggcagtgcttttgaggatgacgacatgttagtaagcactactacttctaacctcctattagagtctgaacagagcaccagcaatctgaatgagaaaattaaccatttagaatatgaagatcaatataaggatgataattttggagaaggaaatgatggtggaatattagatgacaaacttattagtaataatgatggcggtatctttgatgatccccctgccctctctgaggcaggggtgatgttgccagagcagcctgcacatgacgatatggatgaggatgataatgtatcaatgggtgggcctgatagtcctgattcagtggatcccgttgaaccaatgccaaccatgactgatcaaacaacacttgttccaaatgaggaagaagcatttgcattggagcctattgatataactgttaaagaaacaaaagccaagaggaagaggaagctaattgttgacagtgtcaaagagttggatagcaagacaattagagcccaacttagtgattattcagatattgttactactttggatctggcaccgcccaccaagaaattgatgatgtggaaagagacaggaggagtagaaaaactgttttctttacctgctcagcctttgtggaataacagactactgaagctctttacacgctgtcttacaccgcttgtaccagaagaccttagaaaaaggaggaaaggaggagaggcagataatttggatgaattcctcaaagaatttgaaaatccagaggttcctagagaggaccagcaacagcagcatcagcagcgtgatgttatcgatgagcccattattgaagagccaagccgcctccaggagtcagtgatggaggccagcagaacaaacatagatgagtcagctatgcctccaccaccacctcagggagttaagcgaaaagctggacaaattgacccagagcctgtgatgcctcctcagcaggtagagcagatggaaataccacctgtagagcttcccccagaagaacctccaaatatctgtcagctaataccagagttagaacttctgccagaaaaagagaaggagaaagagaaggaaaaagaagatgatgaagaggaagaggatgaagatgcatcagggggcgatcaagatcaggaagaaagaagatggaacaaaaggactcagcagatgcttcatggtcttcagcgtgctcttgctaaaactggagctgaatctatcagtttgcttgagttatgtcgaaatacgaacagaaaacaagctgccgcaaagttctacagcttcttggttcttaaaaagcagcaagctattgagctgacacaggaagaaccgtacagtgacatcatcgcaacacctggaccaaggttccatattatatacccaactttcttgtacaaagtggttgatatcggtaagcctatccctaaccctctcctcggtctcgattctacgtagtaatgaactagtccgtaacttgaaagtatttcgatttcttggctttatatatcttgtggaaaggacgattcttacacataacaatggacaat

SEQ ID NO: 3278 - DNA, 1889 bp, Homo sapiens
  source 1..1889: mol_type = genomic DNA
atcgattgatcaacaagtttgtacaaaaaagttggcatgaattccagcttgaccgcccagaggcgcggcagtgacgccgagttgggaccctgggtgatggctgcgaggtccaaggacgcggcgccgtcccaacgcgacggacttttgcccgtgaaagtggaggaagactcacccggaagttgggagcccaactatcccgcggcttcgccggaccccgaaacttctcgactgcactttaggcagctgcgttaccaggaggtggctggaccggaagaggcgctgagccggctccgagaactctgtcgtcggtggctgagacccgagctgctctccaaggagcagatcctggagctgctggtgctggagcagttcctcaccatcctgcccgaggagcttcaagcctgggtgcgagagcactgcccagagagcggggaggaggcggtggccgtggtgcgggctctgcagcgagcgctcgatggaacctcatcccaggggatggtgactttcgaggacacggctgtgtctctaacctgggaggagtgggagcgcctggacccagcacggagggacttctgcagagagagtgcgcagaaggattccgggagcacagttccgccgagtttggaaagcagagtggagaacaaagagttgattccaatgcaacaaattttagaagaagcggagccacaggggcaactacaagaagcgttccaggggaagcgccccctgttttctaagtgtggcagtacccatgaggacagggtggaaaagcagtccggagaccccttgcccctgaaacttgaaaattctcctgaagcagaaggactcaacagcatctcagatgtcaataagaatggttccatagaaggggaagactctaaaaataatgaattgcagaacagtgccaggtgttccaaccttgttctatgtcagcacatcccgaaagcagagaggcccactgacagtgaggaacacgggaacaagtgcaagcaaagtttccacatggtgacgtggcacgtgctgaaacctcacaagtctgacagtggagacagtttccatcattccagcctttttgagacccagaggcagctccatgaagaaagaccttataaatgtggtaactgtgggaagagtttcaaacaacgctctgacctctttagacaccagagaatccacacaggtgagaaaccctatggctgccaagaatgtgggaaaagcttcagccagagtgctgccctgaccaagcaccagaggacacacacaggcgagaagccgtacacctgtctgaaatgtggggagcgcttcaggcagaattcacacctaaatcgtcatcaaagtacccacagtagagacaaacattttaaatgtgaggaatgcggggaaacctgtcatatttccaacctttttagacatcagagactacataaaggggaaagaccctataagtgtgaagaatgcgagaagagcttcaaacagcgctctgacctctttaaacaccacagaatccacactggggagaagccctatggatgttccgtctgtgggaaacgcttcaatcagagtgcaaccctcattaaacaccagagaattcacactggggaaaagccttacaaatgtcttgaatgtggggaaagatttagacaaagtacacaccttatccgacaccaaagaattcatcaaaataaagtgctgtcggctgggcgtggtggctcacgcctatacccaactttcttgtacaaagtggttgatatcggtaagcctatccctaaccctctcctcggtctcgattctacgtagtaatgaactagtccgtaacttgaaagtatttcgatttcttggctttatatatcttgtggaaaggacgacgcggcatggcaagagttcatatg

SEQ ID NO: 3279 - DNA, 1412 bp, Homo sapiens
  source 1..1412: mol_type = genomic DNA
atcgattgatcaacaagtttgtacaaaaaagttggcatggcggctgtcatcctgccctcgactgctgctccgtcttccctgttcccagcctctcagcaaaaaggacacacacagggcggagagctggttaatgagctcctgacaagctggctacggggcttggtaaccttcgaggatgtggccgtggagttcacccaggaggagtgggcgttgctggaccctgcccaaaggacactgtacagggatgtgatgctggagaactgcaggaacctggcctcactagggtgtcgtgttaataaacccagtctgatatcccagttggaacaagacaagaaggtggtgacagaggaaagaggaattctaccaagcacctgtccagatttggagactctacttaaagccaaatggttaactcctaagaagaatgttttcagaaaagaacagtctaaaggtgtaaaaacggaaagaagtcatcgtggagtgaaactcaatgaatgtaatcagtgttttaaagtcttcagcacgaaatctaacctaactcagcacaagagaattcatactggagaaaaaccctatgactgtagtcaatgtgggaagtccttcagtagcagatcttaccttactattcataagagaatccataatggggagaaaccctatgaatgcaatcactgtgggaaagcatttagtgatccctcatcccttagactgcatttgagaattcacactggagaaaaaccctatgaatgtaaccagtgttttcacgttttccgcaccagttgtaacctcaaaagccacaagaggattcacacgggggagaatcaccatgaatgtaatcagtgtggaaaagctttcagcacaaggtcctctctcactgggcacaatagcattcatacaggggagaaaccttatgaatgtcacgattgtgggaaaaccttcaggaagagctcctatctgacacagcacgtaagaactcatactggagaaaaaccctatgaatgtaacgagtgtgggaaatccttcagcagtagcttttctcttactgtgcacaagagaatacataccggagagaaaccctacgagtgcagtgactgtggaaaagcctttaataatctctcagctgtgaagaaacacttaagaactcacactggagaaaaaccctatgaatgtaatcattgtgggaaatccttcacaagtaactcctatctttctgtgcacaagagaatacataatagatggatatgcccaactttcttgtacaaagtggttgatatcggtaagcctatccctaaccctctcctcggtctcgattctacgtagtaatgaactagtccgtaacttgaaagtatttcgatttcttggctttatatatcttgtggaaaggacgatatcgtggtacgaggaaacttgat

SEQ ID NO: 3280 - DNA, 1820 bp, Homo sapiens
  source 1..1820: mol_type = genomic DNA
atcgattgatcaacaagtttgtacaaaaaagttggcatggtcacctgcgcccacctgggccggcgcgcgcgactcccggcagctcagccctctgcctgcccaggaacctgcttttcccaagaggagagaatggctgctgggtacctgccccgctggtcccaggaattagtaacctttgaggacgtgtccatggacttctcccaggaggagtgggagttgctggagcctgctcagaagaacctgtacagagaggtgatgctggagaactacaggaacgtggtctccctggaagccttgaagaaccaatgtactgatgtggggattaaagagggtccactttccccagcacaaacctcacaagtcactagtctttcctcatggacggggtatttactttttcaaccagtggcttcttcccacttggagcaaagagaagccctgtggatagaggaaaaaggaactcctcaagcctcctgttcagattggatgactgtactaagaaaccaagactcaacttacaagaaggtggctttgcaggaggaaccagccagtggtataaatatgataaagcttatcagagaagatgggggatggaagcagttagaggacagccatgaagacccccaggggcttttgagccaaaaggcatcccttcacgtagtggccgttcctcaggagaaggctactgcatggcatggatttggggaaaatggtaatctgagcccagcccttgttttatcacagggaagctctaaagggaaccacttgtgtggcagcgagttagatattacaagcttggcatccgattcagtcttaaaccaccatcagctgggatatgcagatcggagaccttgtgaaagtaatgaatgtggaaatgccatccgccagaacagtcactttattcaacacggggggaagatgtttgtgtatttggaaaatgggcagtcattgaaccacggtatggccctgactatccacaacaaaatcaacacggcagagaaaccctttgagtgccaccagtgtgggaaggtgttcaaccggaggcattctttgagcgaacatcaaagaattcacacgggggagaaaccctacgagtgtcaggagtgtgggcgagcctttacgcacagctccaccctcacgcgccatctgagaactcatactggagagaagccctacgggtgcggtgagtgcgggaaagccttcaacaggatctcatcgctgactcagcatcagaggattcacaccggggaaaagccctataaatgtgaagactgtgggaaatccttctgccagagctcttacctgatcttgcacaagaggacacacaccggagagaagccctacgaatgcagtgaatgtggaaaggccttcagtgaccgttcctctctcaaccagcacgagcgaactcacacgggcgagaacccctatgaatgtaagcagtgtgggagagccttcagccagaggtcttcccttgtgaggcacgagagaactcacactggagagaaaccctacaggtgtcaggaatgtgggaaagccttcagccagagctcatcccttgtcacacatcagaaaactcacagcagccagaaaacctataaaatcattgactgcgggaaagcgttctaccagaacagacatcttattggatattacccaactttcttgtacaaagtggttgatatcggtaagcctatccctaaccctctcctcggtctcgattctacgtagtaatgaactagtccgtaacttgaaagtatttcgatttcttggctttatatatcttgtggaaaggacgaccgtcacataacatgtgactcaat

SEQ ID NO: 3281 - DNA, 1616 bp, Homo sapiens
  source 1..1616: mol_type = genomic DNA
atcgattgatcaacaagtttgtacaaaaaagttggcatggcagccaccctgctcatggctgggtcccaggcacctgtgacgtttgaagatatggccatgtatctcacccgggaagaatggagacctctggacgctgcacagagggacctttaccgggatgttatgcaggagaattatggaaatgttgtctcactagattttgagatcaggagtgagaacgaggtaaatcccaagcaagagattagtgaagatgtacaatttgggactacatctgaaagacctgctgagaatgctgaggaaaatcctgaaagtgaagagggctttgaaagcggagataggtcagaaagacaatggggagatttaacagcagaagagtgggtaagctatcctctccaaccagtcactgatctacttgtccacaaagaagtccacacaggcatccgctatcatatatgttctcattgtggaaaggccttcagtcagatctcagaccttaatcgacatcagaagacccacactggagacagaccctataaatgttatgaatgtggaaaaggcttcagtcgcagctcacaccttattcagcatcaaagaacacatactggggagaggccttatgactgtaacgagtgtgggaaaagttttggaagaagttctcacctgattcagcatcagacaatccacactggagagaagcctcacaaatgtaatgagtgtggaaaaagtttctgccgtctctctcacctaatccaacaccaaaggacccacagtggtgagaaaccctatgagtgtgaggagtgtgggaaaagcttcagccggagctctcacctagctcagcaccagaggacccacacgggtgagaaaccttatgaatgtaacgaatgtggccgaggcttcagtgagagatctgatctcatcaaacactatcgagtccacacaggggagaggccctacaagtgtgatgagtgtgggaagaacttcagtcagaactccgaccttgtgcgtcatcgcagagcccacacgggagagaagccataccactgtaacgaatgtggggaaaatttcagccgcatctcacacttggttcagcaccagagaactcacactggagagaagccatatgaatgcaatgcttgtgggaaaagcttcagccggagctctcatctcatcacacaccagaaaattcacactggagagaagccttatgagtgtaatgagtgttggcgaagctttggtgaaaggtcagatctaattaaacatcagagaacccacacaggggagaagccctacgagtgtgtgcagtgtgggaaaggtttcacccagagctccaacctcatcacacatcaaagagttcacacgggagagaaaccttatgaatgtaccgaatgtgagaagagtttcagcaggagctcagctcttattaaacataagagagttcatacggactacccaactttcttgtacaaagtggttgatatcggtaagcctatccctaaccctctcctcggtctcgattctacgtagtaatgaactagtccgtaacttgaaagtatttcgatttcttggctttatatatcttgtggaaaggacgaccagttagtctttgtttatcatat

SEQ ID NO: 3282 - DNA, 1643 bp, Homo sapiens
  source 1..1643: mol_type = genomic DNA
atcgattgatcaacaagtttgtacaaaaaagttggcatggccagcactattaaggaagccttatcagttgtgagtgaggaccagtcgttgtttgagtgtgcctacggaacgccacacctggctaagacagagatgaccgcgtcctcctccagcgactatggacagacttccaagatgagcccacgcgtccctcagcaggattggctgtctcaacccccagccagggtcaccatcaaaatggaatgtaaccctagccaggtgaatggctcaaggaactctcctgatgaatgcagtgtggccaaaggcgggaagatggtgggcagcccagacaccgttgggatgaactacggcagctacatggaggagaagcacatgccacccccaaacatgaccacgaacgagcgcagagttatcgtgccagcagatcctacgctatggagtacagaccatgtgcggcagtggctggagtgggcggtgaaagaatatggccttccagacgtcaacatcttgttattccagaacatcgatgggaaggaactgtgcaagatgaccaaggacgacttccagaggctcacccccagctacaatgccgacatccttctctcacatctccactacctcagagagactcctcttccacatttgacttcagatgatgttgataaagccttacaaaactctccacggttaatgcatgctagaaacacagggggtgcagcttttattttcccaaatacttcagtatatcctgaagctacgcaaagaattacaactaggccagatttaccatatgagccccccaggagatcagcctggaccggtcacggccaccccacgccccagtcgaaagctgctcaaccatctccttccacagtgcccaaaactgaagaccagcgtcctcagttagatccttatcagattcttggaccaacaagtagccgccttgcaaatccaggcagtggccagatccagctttggcagttcctcctggagctcctgtcggacagctccaactccagctgcatcacctgggaaggcaccaacggggagttcaagatgacggatcccgacgaggtggcccggcgctggggagagcggaagagcaaacccaacatgaactacgataagctcagccgcgccctccgttactactatgacaagaacatcatgaccaaggtccatgggaagcgctacgcctacaagttcgacttccacgggatcgcccaggccctccagccccaccccccggagtcatctctgtacaagtacccctcagacctcccgtacatgggctcctatcacgcccacccacagaagatgaactttgtggcgccccaccctccagccctccccgtgacatcttccagtttttttgctgccccaaacccatactggaattcaccaactgggggtatataccccaacactaggctccccaccagccatatgccttctcatctgggcacttactactacccaactttcttgtacaaagtggttgatatcggtaagcctatccctaaccctctcctcggtctcgattctacgtagtaatgaactagtccgtaacttgaaagtatttcgatttcttggctttatatatcttgtggaaaggacgagctaaataaattactaaaggacgc

SEQ ID NO: 3283 - DNA, 1265 bp, Homo sapiens
  source 1..1265: mol_type = genomic DNA
atcgattgatcaacaagtttgtacaaaaaagttggcatgcagtccaagcgggattgtgagctgtggtgtgagagggtgaatccagagaacaaggcggcgctggaggcgtgggtcagggagacaggcatccgcctggtgcaggtgaacgggcagaggaagtatggcgggccacccccaggctgggtgggcagcccgccgccagctgggtcagaggtgttcatcgggcggctgcctcaggacgtgtacgagcaccagcttatcccgctgttccagcgcgtgggccgcctctacgagttccgcctgatgatgaccttcagcggcctgaaccgcggcttcgcctatgcccgctacagctcgaggcgcggcgcgcaggccgccatcgccacgctgcacaaccatccgctgcggccgtcctgcccgctgctcgtgtgccgcagcaccgagaagtgtgagctgagcgttgacggcctgccgccgaatctgacccgcagcgcgctgctgctcgcgctgcagccgctgggtcccggcttgcaggaggcgcggctgctgcccagccccggaccggcgcccgggcagatcgctctgctcaaattcagctcgcaccgggccgctgccatggccaaaaaggccctggtggaagggcagtcacacctctgtggagagcaggtggctgtggagtggctcaagccagacctgaagcagcgacttcgccagcagcttgtgggtcccttcttgcggtccccacagccagagggcagccagttggctttggcaagggacaagttagggttccaaggggctcgggctaccctgcagttgctgtgccaacgaatgaagctgggcagccctgtgttcctcaccaagtgtttgggcataggacctgctggctggcaccgcttctggtaccaggtggtgattcctgggcatccggtgcccttcagcggcctcatctgggttgtgctgaccctagatggccgggatgggcatgaggtggccaaggatgctgtgtctgtacggctgctgcaggcactcagtgagtctggggccaacctcctgtggtctgctggggctgaggcaggtaccatggttaaacagtgcccaactttcttgtacaaagtggttgatatcggtaagcctatccctaaccctctcctcggtctcgattctacgtagtaatgaactagtccgtaacttgaaagtatttcgatttcttggctttatatatcttgtggaaaggacgattgatgcacatagcacgggtacct

SEQ ID NO: 3284 - DNA, 1079 bp, Homo sapiens
  source 1..1079: mol_type = genomic DNA
atcgattgatcaacaagtttgtacaaaaaagttggcatggaggcgcccgccagcgcgcagaccccgcacccgcacgagcccatcagcttcggcatcgaccagatccttaacagcccggaccaggacagcgcacccgccccgcggggccccgacggcgccagctacctgggagggccccccgggggccgtccgggcgccacatacccgtctctgcccgcctcctttgcgggcctcggcgcgcccttcgaggacgcgggatcttacagtgtgaacctgagcctagcgcccgcaggcgtgatccgggtgccggcgcacaggccgctgcccggggccgtgccaccgcctctgccaagcgcgctacccgccatgccctccgtgcccacggtctccagccttggcggtctcaatttcccctggatggagagcagccgccgcttcgtgaaagaccgcttcacagcggcggccgcactcacgcccttcaccgtgacccggcgcatcggccacccctaccagaaccggacgccgcccaagcgtaagaagccgcgcacgtccttttcccgggtgcagatctgcgagctggaaaagcgcttccatcgccagaagtacctggcctctgccgagagggcggcgctcgccaagtccctcaaaatgacggacgcgcaggtcaagacctggttccaaaaccggaggaccaagtggcggcggcagacggcggaggagcgggaggcggagcggcagcaggcgagccggctcatgctgcagctgcaacacgacgccttccaaaagagcctcaacgactccatccagcctgacccgctctgtctgcacaactcgtcactctttgctctgcagaatctgcagccctgggaggaggatagttccaaggttcccgctgtcacctccctggtgtgcccaactttcttgtacaaagtggttgatatcggtaagcctatccctaaccctctcctcggtctcgattctacgtagtaatgaactagtccgtaacttgaaagtatttcgatttcttggctttatatatcttgtggaaaggacgactgagaatcgagcatcctcaccca

SEQ ID NO: 3285 - DNA, 1604 bp, Homo sapiens
  source 1..1604: mol_type = genomic DNA
atcgattgatcaacaagtttgtacaaaaaagttggcaccatgaacgcgcagctgaccatggaagcgatcggcgagctgcacggggtgagccatgagccggtgcccgcccctgccgacctgctgggcggcagcccccacgcgcgcagctccgtggcgcaccgcggcagccacctgccccccgcgcacccgcgctccatgggcatggcgtccctgctggacggcggcagcggcggcggagattaccaccaccaccaccgggcccctgagcacagcctggccggccccctgcatcccaccatgaccatggcctgcgagactcccccaggtatgagcatgcccaccacctacaccaccttgacccctctgcagccgctgcctcccatctccacagtctcggacaagttcccccaccatcaccaccaccaccatcaccaccaccacccgcaccaccaccagcgcctggcgggcaacgtgagcggtagcttcacgctcatgcgggatgagcgcgggctggcctccatgaataacctctataccccctaccacaaggacgtggccggcatgggccagagcctctcgcccctctccagctccggtctgggcagcatccacaactcccagcaagggctcccccactatgcccacccgggggccgccatgcccaccgacaagatgctcacccccaacggcttcgaagcccaccacccggccatgctcggccgccacggggagcagcacctcacgcccacctcggccggcatggtgcccatcaacggccttcctccgcaccatccccacgcccacctgaacgcccagggccacgggcaactcctgggcacagcccgggagcccaacccttcggtgaccggcgcgcaggtcagcaatggaagtaattcagggcagatggaagagatcaataccaaagaggtggcgcagcgtatcaccaccgagctcaagcgctacagcatcccacaggccatcttcgcgcagagggtgctctgccgctcccaggggaccctctcggacctgctgcgcaaccccaaaccctggagcaaactcaaatccggccgggagaccttccggaggatgtggaagtggctgcaggagccggagttccagcgcatgtccgcgctccgcttagcagcatgcaaaaggaaagaacaagaacatgggaaggatagaggcaacacacccaaaaagcccaggttggtcttcacagatgtccagcgtcgaactctacatgcaatattcaaggaaaataagcgtccatccaaagaattgcaaatcaccatttcccagcagctggggttggagctgagcactgtcagcaacttcttcatgaacgcaagaaggaggagtctggacaagtggcaggacgagggcagctccaattcaggcaactcatcttcttcatcaagcacttgtaccaaagcattgccaactttcttgtacaaagtggttgatatcggtaagcctatccctaaccctctcctcggtctcgattctacgtagtaatgaactagtccgtaacttgaaagtatttcgatttcttggctttatatatcttgtggaaaggacgattggtataagcaggcaatccgtta

SEQ ID NO: 3286 - DNA, 1550 bp, Homo sapiens
  source 1..1550: mol_type = genomic DNA
atcgattgatcaacaagtttgtacaaaaaagttggcaccatgctcctggacgccggcccccagtacccagcgatcggcgtgaccacctttggcgcgtcccgccaccactccgcgggcgacgtggccgaacgagacgtgggcctgggcatcaacccgttcgccgacggcatgggcgccttcaagctcaaccccagttcgcacgagctggcttcggccggccagacggccttcacgtcgcaggcgccaggctacgcggctgctgcggccctgggccatcaccatcacccgggccacgtcggctcctattccagcgcagccttcaactccacgcgggactttctgttccgcaaccggggttttggcgacgcggcggcggcagccagcgcacagcacagcctctttgctgcatcggccgggggcttcgggggcccacacggccacacggacgccgcgggccacctcctcttccccgggcttcacgagcaggctgccggccacgcgtcgcctaacgtggtcaacgggcagatgaggctcggcttctcgggggacatgtacccgcgaccggagcagtacggccaggtgaccagcccgcgttcggagcactatgctgcgccgcagctgcacggctacgggcccatgaacgtgaacatggccgcgcatcacggcgccggcgccttcttccgctacatgcgccaacccatcaagcaagagctcatctgcaagtggatcgagcccgagcagctggccaaccccaaaaagtcgtgcaacaaaactttcagcaccatgcacgagctagttacgcacgtcaccgtggagcacgtaggtggcccggagcagagtaatcacatctgcttctgggaggagtgtccgcgcgagggcaagcccttcaaagccaaatacaaactggttaaccacatccgcgtgcacacgggcgagaagccctttccctgccccttccctggctgtggcaaggtcttcgcgcgctccgagaatttaaagatccacaaaaggacgcacacaggggagaagcccttcaagtgcgagtttgagggctgtgaccggcgcttcgctaacagcagcgaccgcaagaagcacatgcacgtgcacacgagcgacaagccctatctttgcaagatgtgcgacaagtcctacacgcatcccagttcgctgcgcaaacacatgaaggtccacgaatcctcctcgcagggctcgcagccttcgccggccgccagctctggctacgaatcctccacgcctcccaccatcgtgtctccctccacagacaacccgaccacaagctccttatcgccctcctcctccgcagtccaccacacagccggccacagtgcgctctcttccaattttaacgaatggtacgttttgccaactttcttgtacaaagtggttgatatcggtaagcctatccctaaccctctcctcggtctcgattctacgtagtaatgaactagtccgtaacttgaaagtatttcgatttcttggctttatatatcttgtggaaaggacgagtttgcaaccaatccccctattga

SEQ ID NO: 3287 - DNA, 2588 bp, Homo sapiens
  source 1..2588: mol_type = genomic DNA
atcgattgatcaacaagtttgtacaaaaaagttggcatggcgggctggatccaggcccagcagctgcagggagacgcgctgcgccagatgcaggtgctgtacggccagcacttccccatcgaggtccggcactacttggcccagtggattgagagccagccatgggatgccattgacttggacaatccccaggacagagcccaagccacccagctcctggagggcctggtgcaggagctgcagaagaaggcggagcaccaggtgggggaagatgggtttttactgaagatcaagctggggcactacgccacgcagctccagaaaacatatgaccgctgccccctggagctggtccgctgcatccggcacattctgtacaatgaacagaggctggtccgagaagccaacaattgcagctctccggctgggatcctggttgacgccatgtcccagaagcaccttcagatcaaccagacatttgaggagctgcgactggtcacgcaggacacagagaatgagctgaagaaactgcagcagactcaggagtacttcatcatccagtaccaggagagcctgaggatccaagctcagtttgcccagctggcccagctgagcccccaggagcgtctgagccgggagacggccctccagcagaagcaggtgtctctggaggcctggttgcagcgtgaggcacagacactgcagcagtaccgcgtggagctggccgagaagcaccagaagaccctgcagctgctgcggaagcagcagaccatcatcctggatgacgagctgatccagtggaagcggcggcagcagctggccgggaacggcgggccccccgagggcagcctggacgtgctacagtcctggtgtgagaagttggccgagatcatctggcagaaccggcagcagatccgcagggctgagcacctctgccagcagctgcccatccccggcccagtggaggagatgctggccgaggtcaacgccaccatcacggacattatctcagccctggtgaccagcacattcatcattgagaagcagcctcctcaggtcctgaagacccagaccaagtttgcagccaccgtacgcctgctggtgggcgggaagctgaacgtgcacatgaatcccccccaggtgaaggccaccatcatcagtgagcagcaggccaagtctctgcttaaaaatgagaacacccgcaacgagtgcagtggtgagatcctgaacaactgctgcgtgatggagtaccaccaagccacgggcaccctcagtgcccacttcaggaacatgtcactgaagaggatcaagcgtgctgaccggcggggtgcagagtccgtgacagaggagaagttcacagtcctgtttgagtctcagttcagtgttggcagcaatgagcttgtgttccaggtgaagactctgtccctacctgtggttgtcatcgtccacggcagccaggaccacaatgccacggctactgtgctgtgggacaatgcctttgctgagccgggcagggtgccatttgccgtgcctgacaaagtgctgtggccgcagctgtgtgaggcgctcaacatgaaattcaaggccgaagtgcagagcaaccggggcctgaccaaggagaacctcgtgttcctggcgcagaaactgttcaacaacagcagcagccacctggaggactacagtggcctgtccgtgtcctggtcccagttcaacagggagaacttgccgggctggaactacaccttctggcagtggtttgacggggtgatggaggtgttgaagaagcaccacaagccccactggaatgatggggccatcctaggttttgtgaataagcaacaggcccacgacctgctcatcaacaagcccgacgggaccttcttgttgcgctttagtgactcagaaatcgggggcatcaccatcgcctggaagtttgattccccggaacgcaacctgtggaacctgaaaccattcaccacgcgggatttctccatcaggtccctggctgaccggctgggggacctgagctatctcatctatgtgtttcctgaccgccccaaggatgaggtcttctccaagtactacactcctgtgctggctaaagctgttgatggatatgtgaaaccacagatcaagcaagtggtccctgagtttgtgaatgcatctgcagatgctgggggcagcagcgccacgtacatggaccaggccccctccccagctgtgtgcccccaggctccctataacatgtacccacagaaccctgaccatgtactcgatcaggatggagaattcgacctggatgagaccatggatgtggccaggcacgtggaggaactcttacgccgaccaatggacagtcttgactcccgcctctcgccccctgccggtcttttcacctctgccagaggctccctctcatgcccaactttcttgtacaaagtggttgatatcggtaagcctatccctaaccctctcctcggtctcgattctacgtagtaatgaactagtccgtaacttgaaagtatttcgatttcttggctttatatatcttgtggaaaggacgagcagctagctcaggactttaaccg

SEQ ID NO: 3288 - DNA, 1031 bp, Homo sapiens
  source 1..1031: mol_type = genomic DNA
atcgattgatcaacaagtttgtacaaaaaagttgacatgcccaaagtcttcctggtgaagaggaggagcctgggggtctcggtccgcagctgggatgagctcccggatgagaaaagggcagacacctacatcccagtgggcctaggccgcctgctccacgacccccccgaggactgccgcagcgacggcggcagcagcagcggcagcggcagcagcagcgcgggggagcctggaggagcagagagcagctcgtccccgcacgcccccgagagcgaaacccccgagcccggcgacgccgagggccccgatggacacctggcgaccaagcagcgcccggtcgccagatcgaaaatcaagttcaccacaggcacgtgcagcgactcggtggttcacagctgtgacctgtgtggcaagggcttccgtctgcagcgcatgctgaaccgtcacctcaagtgccacaaccaggtgaaaagacacctgtgcaccttctgcggcaagggcttcaacgacaccttcgacctgaagaggcacgtccgcacacacacaggcattcgtccctacaaatgcaacgtctgcaataaagccttcacccagcgctgctctctggagtcccacctgaagaaaatccatggggtgcagcagcagtatgcctataagcagcggcgggacaagctctacgtctgcgaggattgcggctacacgggccccacccaggaggacctgtacctgcacgtgaacagtgcccatccgggcagctcgtttctcaaaaagacatctaaaaaactggcagcccttctgcagggcaagctgacatccgcacaccaggagaataccagcctgagtgaggaggaggagaggaagtgctcaactttcttgtacaaagtggttgatatcggtaagcctatccctaaccctctcctcggtctcgattctacgtagtaatgaactagtccgtaacttgaaagtatttcgatttcttggctttatatatcttgtggaaaggacgagcaaggtggtgtttacctgcatca

SEQ ID NO: 3289 - DNA, 2357 bp, Homo sapiens
  source 1..2357: mol_type = genomic DNA
atcgattgatcaacaagtttgtacaaaaaagttggcaccatgccaagcaccagctttccagtcccttccaagtttccacttggccctgcggctgcggtcttcgggagaggagaaactttggggcccgcgccgcgcgccggcggcaccatgaagtcagcggaggaagaacactatggctatgcatcctccaacgtcagccccgccctgccgctccccacggcgcactccaccctgccggccccgtgccacaaccttcagacctccacaccgggcatcatcccgccggcggatcacccctcggggtacggagcagctttggacggtgggcccgcgggctacttcctctcctccggccacaccaggcctgatggggcccctgccctggagagtcctcgcatcgagataacctcgtgcttgggcctgtaccacaacaataaccagtttttccacgatgtggaggtggaagacgtcctccctagctccaaacggtccccctccacggccacgctgagtctgcccagcctggaggcctacagagacccctcgtgcctgagcccggccagcagcctgtcctcccggagctgcaactcagaggcctcctcctacgagtccaactactcgtacccgtacgcgtccccccagacgtcgccatggcagtctccctgcgtgtctcccaagaccacggaccccgaggagggctttccccgcgggctgggggcctgcacactgctgggttccccgcggcactccccctccacctcgccccgcgccagcgtcactgaggagagctggctgggtgcccgctcctccagacccgcgtccccgtgcaacaagaggaagtacagcctcaacggccggcagccgccctactcaccccaccactcgcccacgccgtccccgcacggctccccgcgggtcagcgtgaccgacgactcgtggttgggcaacaccacccagtacaccagctcggccatcgtggccgccatcaacgcgctgaccaccgacagcagcctggacctgggagatggcgtccctgtcaagtcccgcaagaccaccctggagcagccgccctcagtggcgctcaaggtggagcccgtcggggaggacctgggcagccccccgcccccggccgacttcgcgcccgaagactactcctctttccagcacatcaggaagggcggcttctgcgaccagtacctggcggtgccgcagcacccctaccagtgggcgaagcccaagcccctgtcccctacgtcctacatgagcccgaccctgcccgccctggactggcagctgccgtcccactcaggcccgtatgagcttcggattgaggtgcagcccaagtcccaccaccgagcccactacgagacggagggcagccggggggccgtgaaggcgtcggccggaggacaccccatcgtgcagctgcatggctacttggagaatgagccgctgatgctgcagcttttcattgggacggcggacgaccgcctgctgcgcccgcacgccttctaccaggtgcaccgcatcacagggaagaccgtgtccaccaccagccacgaggccatcctctccaacaccaaagtcctggagatcccactcctgccggagaacagcatgcgagccgtcattgactgtgccggaatcctgaaactcagaaactccgacattgaacttcggaaaggagagacggacatcgggaggaagaacacacgggtacggctggtgttccgcgttcacgtcccgcaacccagcggccgcacgctgtccctgcaggtggcctccaaccccatcgaatgctcccagcgctcagctcaggagctgcctctggtggagaagcagagcacggacagctatccggtcgtgggcgggaagaagatggtcctgtctggccacaacttcctgcaggactccaaggtcattttcgtggagaaagccccagatggccaccatgtctgggagatggaagcgaaaactgaccgggacctgtgcaagccgaattctctggtggttgagatcccgccgtttcggaatcagaggataaccagccccgttcacgtcagtttctacgtctgcaacgggaagagaaagcgaagccagtaccagcgtttcacctaccttcccgccaacggtaacgccatctttctaaccgtaagccgtgaacatgagcgcgtggggtgctttttcttgccaactttcttgtacaaagtggttgatatcggtaagcctatccctaaccctctcctcggtctcgattctacgtagtaatgaactagtccgtaacttgaaagtatttcgatttcttggctttatatatcttgtggaaaggacgagccgaaggagtgctttttacagcg

SEQ ID NO: 3290 - DNA, 1493 bp, Homo sapiens
  source 1..1493: mol_type = genomic DNA
atcgattgatcaacaagtttgtacaaaaaagttggcatggcatcgaacagcatcttcgactccttcccgacctactcgccgaccttcatccgcgacccaagcaccagccgccgcttcacacctccctccccggccttcccctgcggcggcggcggcggcaagatgggcgagaacagcggcgcgctgagcgcgcaggcggccgtggggcccggagggcgcgcccggcccgaggtgcgctcgatggtggacgtgctggcggaccacgcaggcgagctcgtgcgcaccgacagccccaacttcctctgctccgtgctgccctcgcactggcgctgcaacaagacgctgcccgtcgccttcaaggtggtggcattgggggacgtgccggatggtacggtggtgactgtgatggcaggcaatgacgagaactactccgctgagctgcgcaatgcctcggccgtcatgaagaaccaggtggccaggttcaacgaccttcgcttcgtgggccgcagtgggcgagggaagagtttcaccctgaccatcactgtgttcaccaaccccacccaagtggcgacctaccaccgagccatcaaggtgaccgtggacggaccccgggagcccagacggcaccggcagaagctggaggaccagaccaagccgttccctgaccgctttggggacctggaacggctgcgcatgcgggtgacaccgagcacacccagcccccgaggctcactcagcaccacaagccacttcagcagccagccccagaccccaatccaaggcacctcggaactgaacccattctccgacccccgccagtttgaccgctccttccccacgctgccaaccctcacggagagccgcttcccagaccccaggatgcattatcccggggccatgtcagctgccttcccctacagcgccacgccctcgggcacgagcatcagcagcctcagcgtggcgggcatgccggccaccagccgcttccaccatacctacctcccgccaccctacccgggggccccgcagaaccagagcgggcccttccaggccaacccgtccccctaccacctctactacgggacatcctctggctcctaccagttctccatggtggccggcagcagcagtgggggcgaccgctcacctacccgcatgctggcctcttgcaccagcagcgctgcctctgtcgccgccggcaacctcatgaaccccagcctgggcggccagagtgatggcgtggaggccgacggcagccacagcaactcacccacggccctgagcacgccaggccgcatggatgaggccgtgtggcggccctactgcccaactttcttgtacaaagtggttgatatcggtaagcctatccctaaccctctcctcggtctcgattctacgtagtaatgaactagtccgtaacttgaaagtatttcgatttcttggctttatatatcttgtggaaaggacgacactgaactggtggtgttcgacgc

SEQ ID NO: 3291 - DNA, 1505 bp, Homo sapiens
  source 1..1505: mol_type = genomic DNA
atcgattgatcaacaagtttgtacaaaaaagttggcaccatgccccattctcctctgatctccattcctcatgtgtggtgtcacccagaagaggaggaaagaatgcatgatgaacttctacaagcagtatccaaggggccggtgatgttcagggatgtttccatagacttctctcaagaggaatgggaatgcctggacgctgatcagatgaatttatacaaagaagtgatgttggagaatttcagcaacctggtttcagtgggactttccaattctaagccagctgtgatctccttattggaacaaggaaaagagccctggatggttgatagagagctgactagaggcctgtgttcagatctggaatcaatgtgtgagaccaaaatattatctctaaagaagagacatttcagtcaagtaataattacccgtgaagacatgtctacttttattcagcccacatttcttattccacctcaaaaaactatgagtgaagagaaaccatgggaatgtaagatatgtggaaagacctttaatcaaaactcacaatttatccaacatcagagaattcattttggtgaaaaacactatgaatctaaggagtatgggaagtcctttagtcgtggctcactcgttactcgacatcagaggattcacactggtaaaaaaccctatgaatgtaaggaatgtggcaaggcttttagttgtagttcatatttttctcaacatcagaggattcacactggtgagaaaccctatgaatgtaaggaatgtggaaaagcctttaagtattgctcaaaccttaatgatcatcagagaattcacactggtgagaaaccctatgaatgtaaagtatgtggaaaagcctttactaaaagttcacaactttttctacatctgagaattcatactggtgagaaaccttatgaatgtaaagaatgtgggaaagcctttactcaacactcaaggcttattcagcatcagagaatgcatactggtgagaaaccttatgaatgtaagcagtgtgggaaggcctttaatagtgcctcaacacttactaaccatcacagaattcatgctggtgagaagctctatgaatgtgaagaatgtagaaaggcctttattcagagctcagaacttattcaacatcagagaatccatacagatgaaaaaccatatgaatgtaatgaatgtgggaaggcctttaataaaggctcaaatcttactcgacatcagagaattcacactggtgagaaaccctatgactgtaaggaatgtggaaaggcttttggtagtcgctctgacctcattcgccatgagggaattcatactggtttgccaactttcttgtacaaagtggttgatatcggtaagcctatccctaaccctctcctcggtctcgattctacgtagtaatgaactagtccgtaacttgaaagtatttcgatttcttggctttatatatcttgtggaaaggacgacctagtttaatctgaaagactgcg

SEQ ID NO: 3292 - DNA, 2162 bp, Homo sapiens
  source 1..2162: mol_type = genomic DNA
atcgattgatcaacaagtttgtacaaaaaagttggcaccatgttacgtgaggaagccaccaagaagagcaaagaaaaggagccagggatggctcttcctcagggacgcttgactttcagggatgtggctatagagttctctttggaggagtggaaatgcctgaaccctgcacagagggctttatacagggctgtgatgttggagaactacaggaacctggagtttgtggatagctctttaaaatccatgatggagttctcatcaaccaggcacagtattacaggagaagtgatccacacagggacgttgcaaagacataaaagtcatcacattggagatttttgcttcccagaaatgaagaaagatattcatcactttgagtttcagtggcaagaagttgaaagaaatggccatgaagcacccatgacaaaaatcaaaaagttgactggtagtacagaccgaagtgatcacaggcatgctggaaacaagcctattaaagatcagcttggattaagctttcattcgcatctgcctgaactccacatgtttcagactaaagggaaaattagtaaccaattggacaagtctatcggtgcttcctcagcttcagaatcccaaagaatttcttgtaggctcaaaactcatatttctaataagtatgggaagaatttcctccattcttcattcacacaaatacaggaaatatgcatgagagaaaaaccttgccaaagtaatgagtgtggcaaagcctttaattatagctcactcttaaggagacaccacataacccattcaagagagagagaatataaatgtgatgtatgtggcaagatctttaatcagaagcaatacattgtatatcatcatagatgtcacactggtgagaaaacttacaagtgtaatgagtgtgggaagaccttcactcagatgtcatcccttgtatgccatcgtagacttcatactggagagaaaccttacaagtgtaatgagtgtggcaagaccttcagtgagaagtcatcccttagatgccatcgtagacttcatactggagagaaaccttacaagtgtaatgagtgtggcaagacttttggtcgaaattcagcccttgtaattcataaggcaattcatactggagagaaaccttacaagtgtaatgagtgtggcaagaccttcagtcagaaatcatcccttcaatgccatcatatacttcacactggagagaaaccttacaaatgtgaagaatgtgacaatgtttacattcgcagatcacaccttgaaagacataggaagattcatactggagagggatcatacaaatgtaaggtttgtgacaaggttttccggagtgattcataccttgcagaacatcagagagttcatactggagagaaaccatacaagtgtaataaatgtggcaggagtttcagtcggaagtcatcccttcaataccatcatacacttcacactggagagaaaccttacacatgtaatgaatgtggcaaggtttttagtcgaagagaaaaccttgcacgtcatcatagacttcatgctggagagaaaccttacaaatgtgaagaatgtgacaaagttttcagtcgcagatcacaccttgaaagacataggagaattcatactggggaaaaaccatacaaatgtaaggtttgtgacaaggctttccggagtgattcatgccttgcaaaccatacgagagttcatactggagagaaaccttacaagtgtaataaatgtgcgaaggtttttaatcaaaaaggaatccttgcacaacatcagagagttcatactggagagaaaccttacaagtgtaatgaatgtggcaaggtttttaatcaaaaagcaagccttgcaaaacatcagagagttcatactgcagagaaaccttacaagtgtaatgagtgtggcaaagcctttactggacagtcaacacttattcaccatcaagcaatccatgggtgtagggaaactttacaaatgttgccaactttcttgtacaaagtggttgatatcggtaagcctatccctaaccctctcctcggtctcgattctacgtagtaatgaactagtccgtaacttgaaagtatttcgatttcttggctttatatatcttgtggaaaggacgacgtgccttgtcgaagccacgttaa

SEQ ID NO: 3293 - DNA, 2216 bp, Homo sapiens
  source 1..2216: mol_type = genomic DNA
atcgattgatcaacaagtttgtacaaaaaagttggcatggcagaggtggtggctgaggtggccgagatgccaacacagatgtcaccaggggcagtggagatgtcaacacctatgtcggcagagatgatggagatgtcaacagaagtgactgagatgacacctggggaggcccttgcctcatccctcttcttccagcatcaccagttcatgtgctctgagtgtggcagcctctataacacactggaggaagtcctctcacaccaggagcagcacatgcttgctgtctcagaggaggaggcactgaccacacagaatgttggcctggagccggagctggtgccgggtgctgaggggcccttccagtgtggtgaatgcagccagctcatcctctcccctggggagctcctggcccaccaggatgcccacctccgagagtctgcaaaccagatccaataccagtgctgggactgccaggagctgttcccctcgcccgagctgtgggtggctcatcgaaaggcccagcacctttctgctacggtagctgagccaccagtgccacctcctttgcctcccccaacaccactgcctccaccttctcccccatccgaagtcaagatggagccctatgagtgtcctgagtgctctaccctctgcgccacccctgaggagttcttggagcatcagggcacccactttgactccctagagaaagaggagcgcaatgggttggaggaggaggaagaggacgatgaggaggatgaagaagatgatgaagagatggaggatgaggaggccatggcagaggtcggtgatgatgctgtgggaggtgacgagtccacagctggctgggctcagggctgcggggactgtccccagcaccagccctcagcaggggctcgccggcaacaccggcggacggctcacagcccggcatctgccacccaccccttccactgcagccagtgtcagcgcagtttcagctccgccaaccggctgcaggctcatgggcgggcccatgttggtggcacacatgagtgtacaacctgctccaaggtcttcaagaaagcagcatcgcttgagcagcacttgcggctgcatcgcggggaagcccgctacctctgtgtagactgtggccgcggctttggcacagaactcacgttggtggctcaccggcgggcccacactgccaacccattgcatcgctgtcgttgcggcaagacgttcagcaacatgaccaagttcctctaccaccggcgcactcacgccggcaaaagcggggcacctcccacaggagcaacagctcccccagctccagcggagcccacccctccaccaccaccccctgccccacctgcccagctgccctgcccacagtgctccaagtcctttgcctcagcttcccggctgtcccggcaccggcgtgcagtacacgggccccctgaacggcgtcaccgctgtggggtttgtggcaagggcttcaagaagctgatccacgtgcgcaaccacctgcggacacacacgggtgagaggcccttccagtgccactcatgtggcaagacctttgcttctttggccaacctcagccgccaccagctgacccatacgggtgcacgtccctaccaatgcctggactgtggcaagcgcttcacacagagctccaacctgcagcagcaccggcggttgcacttgcggccagtcgcctttgcccgcgccccccgcctccccatcactggtctctacaacaagagtccctactactgcgggacttgtggccgctggttccgcgccatggcgggcttgcgactgcatcagcgggtccatgcccgagctcggactttgacgctacagcctcccagatcaccatctcctgccccacccccacctccagagcctcaacagactatcatgtgcacagagctgggggagaccatcgccatcattgagacatcccagccactggcgcttgaggacaccctgcagctgtgccaggctgcactgggggccagtgaagcaggcgggctcttgcagttggacacggccttcgtgtgcccaactttcttgtacaaagtggttgatatcggtaagcctatccctaaccctctcctcggtctcgattctacgtagtaatgaactagtccgtaacttgaaagtatttcgatttcttggctttatatatcttgtggaaaggacgactgaatcaagctcccaccttgacc

SEQ ID NO: 3294 - DNA, 692 bp, Homo sapiens
  source 1..692: mol_type = genomic DNA
atcgattgatcaacaagtttgtacaaaaaagttggcaccatgtcggttccaggaccttaccaggcggccactgggccttcctcagcaccatccgcacctccatcctatgaagagacagtggctgttaacagttattaccccacacctccagctcccatgcctgggccaactacggggcttgtgacggggcctgatgggaagggcatgaatcctccttcgtattatacccagccagcgcccatccccaataacaatccaattaccgtgcagacggtctacgtgcagcaccccatcacctttttggaccgccctatccaaatgtgttgtccttcctgcaacaagatgatcgtgagtcagctgtcctataacgccggtgctctgacctggctgtcctgcgggagcctgtgcctgctggggtgcatagcgggctgctgcttcatccccttctgcgtggatgccctgcaggacgtggaccattactgtcccaactgcagagctctcctgggcacctacaagcgtttgttgccaactttcttgtacaaagtggttgatatcggtaagcctatccctaaccctctcctcggtctcgattctacgtagtaatgaactagtccgtaacttgaaagtatttcgatttcttggctttatatatcttgtggaaaggacgagcgcatacctttcgcattttccag

SEQ ID NO: 3295 - DNA, 2225 bp, Homo sapiens
  source 1..2225: mol_type = genomic DNA
atcgattgatcaacaagtttgtacaaaaaagttggcatggcagaggcaccggcttccccggccccgctctctccgctcgaagtggagctggacccggagttcgagccccagagccgtccgcgatcctgtacgtggcccctgcaaaggccggagctccaagcgagccctgccaagccctcgggggagacggccgccgactccatgatccccgaggaggaggacgatgaagacgacgaggacggcgggggacgggccggctcggccatggcgatcggcggcggcggcgggagcggcacgctgggctccgggctgctccttgaggactcggcccgggtgctggcacccggagggcaagaccccgggtctgggccagccaccgcggcgggcgggctgagcgggggtacacaggcgctgctgcagcctcagcaaccgctgccaccgccgcagccgggggcggctgggggctccgggcagccgaggaaatgttcgtcgcggcggaacgcctggggaaacctgtcctacgcggacctgatcacccgcgccatcgagagctccccggacaaacggctcactctgtcccagatctacgagtggatggtgcgttgcgtgccctacttcaaggataagggcgacagcaacagctctgccggctggaagaactccatccggcacaacctgtcactgcatagtcgattcatgcgggtccagaatgagggaactggcaagagctcttggtggatcatcaaccctgatggggggaagagcggaaaagccccccggcggcgggctgtctccatggacaatagcaacaagtataccaagagccgtggccgcgcagccaagaagaaggcagccctgcagacagcccccgaatcagctgacgacagtccctcccagctctccaagtggcctggcagccccacgtcacgcagcagtgatgagctggatgcgtggacggacttccgttcacgcaccaattctaacgccagcacagtcagtggccgcctgtcgcccatcatggcaagcacagagttggatgaagtccaggacgatgatgcgcctctctcgcccatgctctacagcagctcagccagcctgtcaccttcagtaagcaagccgtgcacggtggaactgccacggctgactgatatggcaggcaccatgaatctgaatgatgggctgactgaaaacctcatggacgacctgctggataacatcacgctcccgccatcccagccatcgcccactgggggactcatgcagcggagctctagcttcccgtataccaccaagggctcgggcctgggctccccaaccagctcctttaacagcacggtgttcggaccttcatctctgaactccctacgccagtctcccatgcagaccatccaagagaacaagccagctaccttctcttccatgtcacactatggtaaccagacactccaggacctgctcacttcggactcacttagccacagcgatgtcatgatgacacagtcggaccccttgatgtctcaggccagcaccgctgtgtctgcccagaattcccgccggaacgtgatgcttcgcaatgatccgatgatgtcctttgctgcccagcctaaccagggaagtttggtcaatcagaacttgctccaccaccagcaccaaacccagggcgctcttggtggcagccgtgccttgtcgaattctgtcagcaacatgggcttgagtgagtccagcagccttgggtcagccaaacaccagcagcagtctcctgtcagccagtctatgcaaaccctctcggactctctctcaggctcctccttgtactcaactagtgcaaacctgcccgtcatgggccatgagaagttccccagcgacttggacctggacatgttcaatgggagcttggaatgtgacatggagtccattatccgtagtgaactcatggatgctgatgggttggattttaactttgattccctcatctccacacagaatgttgttggtttgaacgtggggaacttcactggtgctaagcaggcctcatctcagagctgggtgccaggctgcccaactttcttgtacaaagtggttgatatcggtaagcctatccctaaccctctcctcggtctcgattctacgtagtaatgaactagtccgtaacttgaaagtatttcgatttcttggctttatatatcttgtggaaaggacgattaataagcttctttgctccaata

SEQ ID NO: 3296 - DNA, 2255 bp, Homo sapiens
  source 1..2255: mol_type = genomic DNA
atcgattgatcaacaagtttgtacaaaaaagttggcaccatgcagctggagcactgcctttctccttctatcatgctctccaagaaatttctcaatgtgagcagcagctacccacattcaggcggatccgagcttgtcttgcacgatcatcccattatctcgaccactgacaacctggagagaagttcacctttgaaaaaaattaccagggggatgacgaatcagtcagatacagacaattttcctgactccaaggactcaccaggggacgtccagagaagtaaactctctcctgtcttggacggggtctctgagcttcgtcacagtttcgatggctctgctgcagatcgctacctcctctctcagtccagccagccacagtctgcggccactgctcccagtgccatgttcccgtaccccggccagcacggaccggcgcaccccgccttctccatcggcagccctagccgctacatggcccaccacccggtcatcaccaacggagcctacaacagcctcctgtccaactcctcgccgcagggataccccacggccggctacccctacccacagcagtacggccactcctaccaaggagctccgttctaccagttctcctccacccagccggggctggtgcccggcaaagcacaggtgtacctgtgcaacaggcccctttggctgaaatttcaccggcaccaaacggagatgatcatcaccaaacagggaaggcgcatgtttccttttttaagttttaacatttctggtctcgatcccacggctcattacaatatttttgtggatgtgattttggcggatcccaatcactggaggtttcaaggaggcaaatgggttccttgcggcaaagcggacaccaatgtgcaaggaaatcgggtctatatgcatccggattcccccaacactggggctcactggatgcgccaagaaatctcttttggaaaattaaaacttacgaacaacaaaggagcttcaaataacaatgggcagatggtggttttacagtccttgcacaagtaccagccccgcctgcatgtggtggaagtgaacgaggacggcacggaggacactagccagcccggccgcgtgcagacgttcactttccctgagactcagttcatcgccgtcaccgcctaccagaacacggatattacacaactgaaaatagatcacaacccttttgcaaaaggatttcgggataattatgacacgatctacaccggctgtgacatggaccgcctgaccccctcgcccaacgactcgccgcgctcgcagatcgtgcccggggcccgctacgccatggccggctctttcctgcaggaccagttcgtgagcaactacgccaaggcccgcttccacccgggcgcgggcgcgggccccgggccgggtacggaccgcagcgtgccgcacaccaacgggctgctgtcgccgcagcaggccgaggacccgggcgcgccctcgccgcaacgctggtttgtgacgccggccaacaaccggctggacttcgcggcctcggcctatgacacggccacggacttcgcgggcaacgcggccacgctgctctcttacgcggcggcgggcgtgaaggcgctgccgctgcaggctgcaggctgcactggccgcccgctcggctactacgccgacccgtcgggctggggcgcccgcagtcccccgcagtactgcggcaccaagtcgggctcggtgctgccctgctggcccaacagcgccgcggccgccgcgcgcatggccggcgccaatccctacctgggcgaggaggccgagggcctggccgccgagcgctcgccgctgccgcccggcgccgccgaggacgccaagcccaaggacctgtccgattccagctggatcgagacgccctcctcgatcaagtccatcgactccagcgactcggggatttacgagcaggccaagcggaggcggatctcgccggccgacacgcccgtgtccgagagttcgtccccgctcaagagcgaggtgctggcccagcgggactgcgagaagaactgcgccaaggacattagcggctactatggcttctactcgcacagcttgccaactttcttgtacaaagtggttgatatcggtaagcctatccctaaccctctcctcggtctcgattctacgtagtaatgaactagtccgtaacttgaaagtatttcgatttcttggctttatatatcttgtggaaaggacgacgtaatcctgaaaattagatttta

SEQ ID NO: 3297 - DNA, 476 bp, Homo sapiens
  source 1..476: mol_type = genomic DNA
atcgattgatcaacaagtttgtacaaaaaagttggcatgcccaagagaaaggctgaaggggatgctaagggagataaagcaaaggtgaaggacgaaccacagagaagatccgcgaggttgtctgctaaacctgctcctccaaagccagagcccaagcctaaaaaggcccctgcaaagaagggagagaaggtacccaaagggaaaaagggaaaagctgatgctggcaaggaggggaataaccctgcagaaaatggagatgccaaaacagaccaggcacagaaagctgaaggtgctggagatgccaagtgcccaactttcttgtacaaagtggttgatatcggtaagcctatccctaaccctctcctcggtctcgattctacgtagtaatgaactagtccgtaacttgaaagtatttcgatttcttggctttatatatcttgtggaaaggacgacgtgtagcaccttctggctctcta

SEQ ID NO: 3298 - DNA, 1991 bp, Homo sapiens
  source 1..1991: mol_type = genomic DNA
atcgattgatcaacaagtttgtacaaaaaagttggcatggcagctctgtcccccacatttgccacgtccacccaggattccacctgtctccaggactcagaatttcctgtttcttcaaaagaccattcctgtccccagaatttggacctgttcgtgtgcagtggtctggagcctcacacacccagtgttggttcccaggaatcggtgactttccaagatgtcgctgtggactttaccgagaaggagtggcccttgctggattcttctcagagaaaactgtacaaagatgtaatgctggagaactacagcaacctcacttcactggggtatcaggtcggcaaacccagcctcatctcacacttggagcaggaggaggagccgaggacagaggagaggggcgctcaccagggcgcttgtgcagattgggagactccatctaaaaccaagtggtcacttcttatggaagatatttttgggaaggaaacgcccagtggtgtgacgatggaaagagccggtcttggagagaagtccactgaatacgctcacttgttcgaagtctttggcatggaccctcatctcactcagccaatgggaaggcacgctggcaagaggccctatcaccgccgcgactatggggtagcgttcaagggcaggccgcacctcactcagcacatgagcatgtacgacgggagaaaaatgcatgaatgtcatcagtgccaaaaagccttcaccacgagcgcgtccctcacacggcacaggagaatccacaccggggagaagccttacgagtgcagcgactgcgggaaagccttcaacgacccttcagcccttaggagccacgcaagaactcacctcaaagagaagccctttgactgcagtcagtgtggaaatgcattccggaccctctcggccctgaaaatccacatgcgagttcacactggcgagaggccttacaagtgtgatcagtgcgggaaggcttacggccggagctgccacctcatcgcacacaagagaacgcacaccggagagaggccctacgagtgtcacgactgtgggaaagctttccagcacccctcccacctcaaagagcacgtgaggaatcacacgggggagaagccctacgcgtgcacgcagtgcggcaaagccttccgctggaagtccaactttaatttgcacaagaagaaccacatggtggagaagacctacgaatgtaaagaatgcgggaaatcctttggcgatctcgtgtcccggaggaaacacatgaggattcacatcgtcaagaaacccgtggaatgtcggcagtgcgggaagaccttccgaaaccagtccatccttaagactcacatgaactctcacactggagagaaaccatacgggtgcgatctctgcgggaaagctttcagcgcgagttcaaacctcaccgcacacaggaagatacacacgcaagagagacgctacgaatgcgccgcctgcgggaaagtcttcggtgactatttatcccggcggaggcacatgagcgttcaccttgtaaagaaacgagttgagtgtaggcagtgtggcaaggccttcaggaaccagtcaacgctgaagacgcacatgcgaagccacacgggggagaaaccgtacgaatgcgatcactgtgggaaggccttcagcataggctccaacctgaatgtgcacaggcggatccacaccggggagaagccctacgaatgccttgtctgcgggaaagccttcagcgaccactcatccctcaggagccacgtgaaaactcaccggggagagaagctctttgtgtcatccgtgtggaaaaggctccagtgcccaactttcttgtacaaagtggttgatatcggtaagcctatccctaaccctctcctcggtctcgattctacgtagtaatgaactagtccgtaacttgaaagtatttcgatttcttggctttatatatcttgtggaaaggacgaagtaaaaaacagcttataaacctc

SEQ ID NO: 3299 - DNA, 1625 bp, Homo sapiens
  source 1..1625: mol_type = genomic DNA
atcgattgatcaacaagtttgtacaaaaaagttggcatggaaaccccaacacctttgccgcctgtacccgcctccccgacctgcaacccagccccacggacaatccagatcgagttcccacagcatagctcgtcgctgctggaatctctgaaccgccacaggctagagggaaagttctgtgatgtgtccctcctggtgcagggccgggaacttagggctcataaagcagtgttagctgctgcctctccttacttccatgacaagctgcttctgggggatgcgcctcgtctcactctaccgagtgtcattgaagccgatgccttcgaggggctgctccagctcatttattcagggcgtctccgcctgccactggatgctcttcctgctcatctccttgtggccagtggccttcaaatgtggcaggtagtagatcagtgctcagaaattcttagagaattagaaacttcaggtggtggaatttcagcccgtggaggaaactcctaccatgcccttctttccactacatcctctacaggaggctggtgcattcgctcttcgcctttccagaccccagtacagtcctctgcttctactgaaagccctgcttccactgagagccctgtgggaggggagggaagtgaactgggagaagtgctgcaaattcaggtggaagaagaagaggaggaggaggaagatgatgatgatgaggaccaggggtcagccacactctctcagactcctcagccccagagagtatcaggggtttttccccgtcctcatggaccccacccactgcccatgactgctactccccgaaagcttccagagggtgagagtgcaccacttgagcttcctgcccctcctgcactgccccccaaaatcttctacattaagcaggaacccttcgagcctaaggaggagatatcaggaagcggaactcagcctggaggagcaaaggaggaaaccaaagtgttttctggaggggacactgaagggaatggggagctagggttcttgttgccttcagggccagggccaacatctgggggagggggtccatcctggaaaccagtggatcttcatgggaatgaaatcctgtcagggggtggaggacctgggggagcaggccaggccgtgcatgggcctgtgaagctaggggggacaccccctgcagatggaaaacgctttggttgcctgtgtgggaagcggtttgcagtgaagccaaagcgtgaccggcacatcatgctgaccttcagccttcggccttttggctgtggcatctgcaacaagcgcttcaagctgaagcaccatctgacagagcacatgaagacccatgctggagccctgcatgcctgtccccactgtggccgtcggttccgagtccatgcctgttttctccgccaccgggacctatgcaagggccagggctgggccactgcccactggacttacaagtgcccaactttcttgtacaaagtggttgatatcggtaagcctatccctaaccctctcctcggtctcgattctacgtagtaatgaactagtccgtaacttgaaagtatttcgatttcttggctttatatatcttgtggaaaggacgaatttaatttgtcagttgaacttca

SEQ ID NO: 3300 - DNA, 1292 bp, Homo sapiens
  source 1..1292: mol_type = genomic DNA
atcgattgatcaacaagtttgtacaaaaaagttggcaccatgacggggaaagcaggggaagcgctgagcaagcccaaatccgagacagtggccaagagtacctcggggggcgccccggccaggtgcactgggttcggcatccaggagatcctgggcttgaacaaggagcccccgagctcccacccgcgggcagcgctcgacggcctggcccccgggcacttgctggcggcgcgctcagtgctcagccccgcgggggtgggcggcatggggcttctggggcccggggggctccctggcttctacacgcagcccaccttcctggaagtgctgtccgacccgcagagcgtccacttgcagccattgggcagagcatcggggccgctggacaccagccagacggccagctcggattctgaagatgtttcctccagcgatcgaaaaatgtccaaatctgctttaaaccagaccaagaaacggaagaagcggcgacacaggacaatctttacctcttaccagctagaggagctggagaaggcattcaacgaagcccactacccagacgtctatgcccgggagatgctggccatgaaaacggagctgccggaagacaggatacaggtctggttccagaaccgtcgagccaagtggaggaagcgggagaagtgctggggccggagcagtgtcatggcggagtatgggctctacggggccatggtgcggcactccatccccctgcccgagtccatcctcaagtcagccaaggatggcatcatggactcctgtgccccgtggctactggggatgcacaaaaagtcgctggaggcagcagccgagtcggggaggaagcccgagggggaacgccaggccctgcccaagctcgacaagatggagcaggacgagcggggccccgacgctcaggcggccatctcccaggaggaactgagggagaacagcattgcggtgctccgggccaaagctcaggagcacagcaccaaagtgctggggactgtgtctgggccggacagcctggcccggagtaccgagaagccagaggaggaggaggccatggatgaagacaggccggcggagaggctcagtccaccgcagctggaggacatggctttgccaactttcttgtacaaagtggttgatatcggtaagcctatccctaaccctctcctcggtctcgattctacgtagtaatgaactagtccgtaacttgaaagtatttcgatttcttggctttatatatcttgtggaaaggacgatagtcttagcacctttacgataat

SEQ ID NO: 3301 - DNA, 1193 bp, Homo sapiens
  source 1..1193: mol_type = genomic DNA
atcgattgatcaacaagtttgtacaaaaaagttggcaccatggctgcccacgttggtgcttcccggactccccaagaggtgatggagcattacgtgagcatgtacatccacgggaacctggggaaggcctgcatccccgacaccatccccaaccgcgtgacagaccacacctgtcccagcggaggccccctctcacccagcctcaccaccccgctgcccccgctggacatctctgtggctgagcagcagcagctgggctacatgccgctgcgggatgattacgagatcgagtatgaccaggatgccgagacgctcatcagcgggctctctgtcaactatgatgacgacgacgtggagatcgagctgaagcgcgcccacgtggacatgtacgtgcggaagctgaaagagagacagcggcggaagaacatcgcccgtgactacaatctggtgccagccttcctggggaaggacaagaaggagaaggaaaaggcgctgaagcgcaagatcaccaaggaggagaaggagctgcgcctgaagctgaggccgctgtaccagttcatgtcatgcaaggagtttgatgacctttttgaaaacatgcacaaagaaaaaatgctccgggccaagatccgagaactgcagcggtaccggcgaaacgggatcaccaagatggaagagtcggcagagtacgaggcagcgcggcataaacgggagaagaggaaggagaacaaaaacctagccggctccaaacggggaaaggaggacggcaaagacagcgagttcgccgccattgagaaccttccaggcttcgagctcctgtcagatcgcgagaaggtgctctgcagctctttaaacttgagtccagcccgctacgtgactgtgaagactattataattaaagaccacctccagaagcggcaaggaatcccctccaaaagccgccttcctagctacctggacaaagtcctaaagaaaaggattttgaatttcctcacagaaagcggctggatctccagggacgcgtctttgccaactttcttgtacaaagtggttgatatcggtaagcctatccctaaccctctcctcggtctcgattctacgtagtaatgaactagtccgtaacttgaaagtatttcgatttcttggctttatatatcttgtggaaaggacgatcacgcaagccactcctgctgttc

SEQ ID NO: 3302 - DNA, 1898 bp, Homo sapiens
  source 1..1898: mol_type = genomic DNA
atcgattgatcaacaagtttgtacaaaaaagttggcaccatgatgactgctgaatcacgggaagccacgggtctgtccccacaggctgcacaggagaaggatggtatcgtaatagtgaaggtggaagaggaagatgaggaagaccacatgtgggggcaggattccaccctacaggacacgcctcctccagacccagagatattccgccaacgcttcaggcgcttctgttaccagaacacttttgggccccgagaggctctcagtcggctgaaggaactttgtcatcagtggctgcggccagaaataaacaccaaggaacagatcctggagcttctggtgctagagcagtttctttccatcctgcccaaggagctccaggtctggctgcaggaataccgccccgatagtggagaggaggccgtgacccttctagaagacttggagcttgatttatcaggacaacaggtcccaggtcaagttcatggacctgagatgctcgcaagggggatggtgcctctggatccagttcaggagtcctcgagctttgaccttcatcacgaggccacccagtcccacttcaaacattcgtctcggaaaccccgcctcttacagtcacgagctcttcctgctgcccacattcctgcaccccctcatgagggtagtcccagagaccaggcgatggcatctgcactattcacagcggattcccaggcaatggtgaagatcgaggacatggctgtgtccctcattctggaggaatggggatgtcagaatctggctcggaggaatctcagtagggacaacaggcaggagaattatgggagcgcatttccccagggtggtgaaaacaggaatgagaacgaggagtcaacctcaaaggctgaaacctcggaagattcagcatcacgcggggagacaacaggaagatcccagaaagagtttggagagaaacgtgaccaggagggcaaaacaggagaaagacagcagaaaaaccctgaggagaaaaccaggaaagagaaaagagattcagggccagctataggaaaggacaaaaaaaccatcacaggagagagaggtccaagggagaaggggaaaggattgggaagaagcttcagtctgagctccaacttcaccacccctgaagaagttcccacgggaacaaagtctcacagatgtgatgaatgtggtaaatgcttcacgagaagttcaagccttatccgccataaaataatccacactggagaaaagccctatgaatgtagtgagtgtgggaaagccttcagtcttaactccaaccttgtcctgcatcagaggatccacacaggagagaaacctcatgaatgtaacgagtgtggcaaggccttcagccacagttccaatctcatcctccatcagcgcatccactctggagagaaaccttatgaatgtaatgagtgcgggaaggccttcagccagagctcggacctcaccaagcatcagagaattcacacgggggagaaaccctatgaatgtagtgaatgtggaaaagctttcaaccgaaactcatacctgattttgcatcggagaattcacactcgagaaaagccctacaagtgcactaagtgtggcaaggccttcacccgcagctccaccctcactctgcatcacagaatccatgccagagagagagcctctgagtacagcccagcctcccttgatgcatttggcgcgttcctgaaaagttgtgtgttgccaactttcttgtacaaagtggttgatatcggtaagcctatccctaaccctctcctcggtctcgattctacgtagtaatgaactagtccgtaacttgaaagtatttcgatttcttggctttatatatcttgtggaaaggacgaggctgatacacagaccgactatga

SEQ ID NO: 3303 - DNA, 1796 bp, Homo sapiens
  source 1..1796: mol_type = genomic DNA
atcgattgatcaacaagtttgtacaaaaaagttggcaccatggagcaagaaaaaaaactgttggtctcagattctaacagctttatggagagggagagtttgaaaagccctttcacaggagatacaagtatgaataatttggaaactgttcaccacaataattctaaggcagataaacttaaagagaaaccttcagaatggtctaaaagacatagaccacaacattataagcatgaggatgcaaaagaaatgccactgacatgggttcaagatgagatttggtgtcatgattcctatgagagtgatggcaagtcagagaattggggaaattttatagctaaagaggaggaaaaacccaatcaccaggaatgggactcaggagaacataccaatgcctgtgtccagcagaattcatcctttgtagacagaccctataaatgttccgaatgttggaaaagcttcagtaatagttctcatttgcgtactcaccagaggacccactcaggagaaaagccttataaatgctctgagtgtgcaaaatgtttttgtaacagttctcacctgattcagcatctaagaatgcacacaggagagaagccctaccagtgtggtgaatgtgggaaaagcttcagcaatacctcccatcttattatccatgagagaactcacacgggagagaaaccctacaaatgtcccgagtgtgggaagagattcagcagcagctctcaccttattcagcatcacagatcacatacaggtgaaaaaccatatgaatgttctgtctgcggaaaaggcttcagtcacagctatgtcctaatagaacatcagaggactcacactggagaaaaaccttataagtgccctgattgtgggaagagttttagtcagagttccagcctcattcgccaccagcggacacacacaggtgagaagccctacaaatgtcttgagtgtgaaaaaagctttggttgtaattctactctaataaaacatcagagaatacatacaggagaaaagccttatcaatgtccagaatgtgggaagaattttagtcgtagttcaaaccttattacacaccagaaaatgcacacaggagagaaatcctatgaaagttctgaatatgaggaaagtttgggtcagaactgcaatgtgatagaagaatgcagaatccagttaggagagaaaccatatagatgttgtgaatgtgggaagagttttggccttagctcccatctcattagacatcagagaacacatacaggagaaaaaccttacagatgttctgagtgctggaaaactttcagtcagagttccaccctggtgattcaccaaaggacacatacaggagagaaaccttataaatgtcctgattgtggtgaaagcttcagtcagagctttaaccttatcaggcaccggaggacccacataggggaaaaaccttacaaatgtaccagctgtgagaaatgcttcagcagaagtgcctacctcagtcagcatcggaaaattcacgtagaaaagccttttgagtctcccgacgttggggattttcctcatgaatggacttggaaaaactgttcaggggaaatgcccttcatctcttcattttccgtctcaaattcatcttccttgccaactttcttgtacaaagtggttgatatcggtaagcctatccctaaccctctcctcggtctcgattctacgtagtaatgaactagtccgtaacttgaaagtatttcgatttcttggctttatatatcttgtggaaaggacgaaactatgcaattcactttatttgc

SEQ ID NO: 3304 - DNA, 2765 bp, Homo sapiens
  source 1..2765: mol_type = genomic DNA
atcgattgatcaacaagtttgtacaaaaaagttggcaccatgaccaagtccctggaatcagtgtcattcaaggacgtaactgtagacttcagtagggatgagtggcaacaattagaccttgctcagaaaagcctgtacagagaagtgatgctggaaaactatttcaacttgatctcagtgggatgtcaagttcccaaaccagaagtcatcttcagcttggaacaagaagagccatgtatgttggatggtgagatccccagtcagagccgtccagatggggacattggttttggacctttacaacagaggatgtctgaagaagtttctttccagtctgagattaatattaatctcttcacaagagatgacccatattccattttagaagaattgtggaaagacgatgaacacacaagaaaatgtggagaaaaccagaacaaacctttaagtcgtgttgtcttcattaacaagaaaacactagctaatgacagcatctttgaatataaggacattggggaaatagttcatgtaaacacacacctggtttcctcaagaaaaagaccccataactgtaactcgtgtggaaagaatttggagcctatcataaccttatataatagaaacaatgcaacagaaaattctgataagactattggagatggtgatattttcactcatttgaattctcatacagaagtgactgcttgtgaatgtaaccaatgtgggaaacctctgcatcataagcaagctctcattcaacaacagaaaattcatactagagagagcctctatttgttttctgactacgtaaatgttttctccccgaagtcacatgcctttgcacatgagagtatttgtgctgaagaaaagcagcatgaatgccatgaatgtgaggcagtcttcactcagaagtcccagcttgatggcagtcagagggtttatgcaggaatatgcactgaatatgagaaggatttttccctcaagtcaaaccgtcagaaaactccttatgaggggaattactataaatgcagtgactatggaagagcctttatccagaagtcagatctgttcagatgccagagaattcattctggagaaaaaccttatgagtacagtgaatgtgagaaaaacctccctcagaattcaaaccttaatatacataaaaaaattcatactggagggaaacactttgaatgtactgaatgtggaaaagctttcacaaggaaatcaacactaagtatgcatcagaaaatccatacaggagaaaaaccttatgtatgtactgaatgtgggaaggcctttatccggaagtcacattttatcacacatgaaagaattcatactggagaaaaaccctatgaatgcagtgactgtgggaaatcctttattaaaaaatcacaactccatgtgcatcagcgaattcacacaggagagaatccctttatatgttcagaatgtgggaaggtcttcactcacaagacaaatctcattatacaccagaaaattcatacaggagaaagaccctatatatgtactgtgtgtggtaaggcctttactgacaggtcaaatctcattaagcaccaaaaaattcatactggagagaaaccttataaatgcagcgactgtggaaaatcattcacctggaagtctcggctcaggatacatcagaagtgtcatactggagagagacattatgaatgcagtgaatgtgggaaagcattcattcagaagtcaacattaagtatgcaccagagaattcatagaggggaaaaaccatatgtttgcactgaatgtggtaaggccttcttccacaaatcccattttattacacatgagagaattcatactggagagaaaccctatgaatgcagtatttgtgggaaatccttcactaagaaatcacagctccacgtacatcagcagattcacacaggagagaaaccctataggtgtgctgaatgtggaaaggcttttactgacagatcaaatctctttacacaccagaaaattcacactggagagaaaccttataaatgtagtgactgtgggaaagccttcactaggaagtcaggtctccatatacatcagcaatcccatactggagaaaggcattatgagtgcagtgaatgtgggaaagcctttgcaagaaaatcaacactaattatgcatcagagaattcatacaggagagaaaccctatatttgtaatgaatgtgggaaatccttcatccagaagtcacacttaaatagacacaggagaattcatactggagagaaaccctatgaatgcagtgactgtggcaagtctttcattaagaaatcacaactccatgagcatcatcgaattcacacaggagagaaaccatatatatgtgctgagtgtggaaaggccttcaccatcagatcaaatcttattaaacaccagaaaattcatactaaacagaaaccctataagtgcagtgacttggggaaagccttaaactggaagccacaactcagtatgcctcagaaatctgacaatggggaagtagagtgctccatgccacaattatggtgtggggactcagaaggtgaccaaggccaactttcttctatcttgccaactttcttgtacaaagtggttgatatcggtaagcctatccctaaccctctcctcggtctcgattctacgtagtaatgaactagtccgtaacttgaaagtatttcgatttcttggctttatatatcttgtggaaaggacgagtgcagatcggtctctatcggctt

SEQ ID NO: 3305 - DNA, 1946 bp, Homo sapiens
  source 1..1946: mol_type = genomic DNA
atcgattgatcaacaagtttgtacaaaaaagttggcaccatgaacaaatcccaggaacaagtgtcattcaaggatgtatgtgtggacttcactcaggaagagtggtatctgctggaccctgctcagaagattctatacagagatgtgatcctggaaaattatagcaatcttgtctcagtagggtattgcattactaaaccagaagtgatctttaagatcgagcaaggagaagagccctggatattagaaaaaggattcccaagccagtgccacccagaaaggaaatggaaagttgatgacgtgttagagagcagccaggaaaatgaagatgaccatttttgggagcttctattccacaacaacaaaacagtaagtgtagaaaatggagatagaggaagcaaaactttcaatttgggcacagaccctgtttctttaagaaattatccctataaaatatgtgactcatgtgaaatgaatttgaaaaatatttcgggcttaattattagtaaaaagaactgttccagaaagaagcctgatgagtttaatgtatgtgagaaattgctccttgatattaggcatgagaaaatccctattggagagaagtcttataaatatgatcaaaaaaggaatgccattaattatcaccaggatctcagtcagccaagttttggccaatcttttgagtatagtaaaaatggacaaggcttccatgatgaggcagcattttttacaaataagagatctcagataggagagacagtctgtaaatataacgaatgtggaagaaccttcattgaaagtttaaagctgaatatatctcaaagacctcatttggaaatggagccgtatggatgcagtatttgcgggaagtccttctgcatgaatttaaggtttggacatcagagagctcttacaaaggacaatccttatgaatataatgaatatggggaaatcttctgtgacaattcagctttcattatccatcagggagcttacacaagaaagattctccgtgaatataaagtgagtgacaaaacctgggaaaagtcagctctcttaaaacatcaaatagtacacatggggggaaagtcttatgattacaatgaaaatgggagtaatttcagcaagaagtcacatcttacccagcttcggagagctcacacaggagaaaaaacctttgaatgtggtgaatgtgggaaaaccttctgggagaagtcaaacctcactcaacatcagagaacacacacaggagagaagccctatgaatgtactgaatgtgggaaagccttttgccagaaaccacacctgaccaaccatcagcgaacacatacaggagaaaaaccctatgaatgtaagcaatgtggaaaaacattctgtgtgaagtcaaacctcactgaacatcagagaacacacacaggggagaagccctatgaatgtaatgcatgtgggaaatccttctgccacagatcagccctcactgtgcatcagagaacacacacaggggagaaaccgtttatatgtaatgaatgtggaaaatccttctgtgtgaagtcaaacctcattgtacatcaaagaactcacactggggagaaaccatataagtgtaatgaatgtgggaaaaccttctgtgaaaaatcagctctcactaaacatcagaggactcacacaggggagaagccgtatgagtgtaatgcatgtgggaagacctttagtcagaggtcagtgctcaccaaacatcagagaattcacacaagggtgaaagctctttcaacatccttgccaactttcttgtacaaagtggttgatatcggtaagcctatccctaaccctctcctcggtctcgattctacgtagtaatgaactagtccgtaacttgaaagtatttcgatttcttggctttatatatcttgtggaaaggacgacgtatgccgattttcaccgccaac

SEQ ID NO: 3306 - DNA, 833 bp, Homo sapiens
  source 1..833: mol_type = genomic DNA
atcgattgatcaacaagtttgtacaaaaaagttggcatgaaattcaagttacatgtgaattctgccaggcaatacaaggacctgtggaatatgagtgatgacaaaccctttctatgtactgcgcctggatgtggccagcgttttaccaacgaggatcatttggctgtccataaacataaacatgagatgacactgaaatttggtccagcacgtaatgacagtgtcattgtggctgatcagaccccaacaccaacaagattcttgaaaaactgtgaagaagtgggtttgtttaatgagttggcgagtccatttgagaatgaattcaagaaagcttcagaagatgacattaaaaaaatgcctctagatttatcccctcttgcaacacctatcataagaagcaaaattgaggagccttctgttgtagaaacaactcaccaggatagtcctttacctcacccagagtctactaccagtgatgagaaggaagtaccattggcacaaactgcacagcccacatcagctattgttcgtccagcatcattacaggttcccaatgtgctgcttacaagttctgactcaagtgtaattattcagcaggcagtaccttcaccaacctcaagtactgtaatcacccaggcaccatcctctaacaggccaattgtgtacccaactttcttgtacaaagtggttgatatcggtaagcctatccctaaccctctcctcggtctcgattctacgtagtaatgaactagtccgtaacttgaaagtatttcgatttcttggctttatatatcttgtggaaaggacgacccggtggtgaccgctccggtcga

SEQ ID NO: 3307 - DNA, 2603 bp, Homo sapiens
  source 1..2603: mol_type = genomic DNA
atcgattgatcaacaagtttgtacaaaaaagttggcatgccatctcagaactatgaccttccccagaagaagcaggagaaaatgaccaagtttcaggaggctgtgacattcaaggatgtggctgtggtcttctccagggaggaactgcgactgctcgatcttacccagaggaagctgtaccgagatgtcatggtggagaacttcaagaacctggttgcagtggggcatcttcccttccaaccagatatggtatcccaattggaagcagaagaaaagctttggatgatggaaacagaaacccaaagaagcagcaagcatcaaaataagatggaaacactccaaaaatttgcattaaaatacctttcaaatcaagagctgtcctgctggcaaatctggaaacaggttgcaagtgaattaaccaggtgtcttcaggggaagagttcccagttattacaaggtgactctattcaggtttctgaaaatgagaacaatataatgaaccctaaaggagatagctctatttatattgaaaatcaagagtttccattttggagaacccagcattcttgcgggaatacatatctgagtgagtcacagattcagagtagaggtaagcaaattgatgtgaaaaataacctgcaaatacatgaagacttcatgaagaaatcaccatttcatgagcatattaaaactgacacagaaccaaaaccctgcaaaggtaatgaatatggcaaaatcattagtgatggctccaaccagaaattacccttaggagagaaaccccatccatgtggtgagtgtggaaggggcttcagttatagcccaaggcttccccttcatccgaatgttcacacaggagaaaaatgcttcagtcaaagctcacatctgcgaactcatcagagaattcacccaggagagaaactcaatagatgtcatgaatctggtgattgcttcaataagagctcttttcattcttatcaatctaatcatacaggagagaagtcttatagatgcgacagttgcggcaagggattcagtagcagcacgggtcttatcattcattacagaactcatactggagagaaaccctataaatgcgaggaatgtggtaaatgctttagtcaaagttcaaattttcagtgccatcagagagtccacactgaagaaaaaccatacaaatgcgaagagtgtggtaagggcttcggttggagtgttaatctccgtgttcaccagagggtccacaggggtgagaagccctataaatgtgaggaatgtggtaagggcttcactcaggctgcacattttcacatccatcagagagtccacactggagagaaaccctacaagtgtgatgtgtgtggtaagggcttcagccacaattcaccattaatatgccatcggagagtccacacaggagagaagccatacaagtgtgaggcgtgtgggaaaggctttacccgtaatacagatctgcatattcatttcagagttcacacgggagagaaaccctataaatgtaaggagtgtggtaagggcttcagtcaggcttcaaatcttcaagtccatcagaatgtccacactggggagaaacgattcaagtgtgaaacgtgtgggaagggcttcagtcagtcctcaaagcttcaaacccatcagcgagtccacactggagagaaaccatatagatgtgatgtgtgtggtaaggacttcagttatagttcaaatcttaaactacaccaagtaattcacactggagaaaaaccatataaatgtgaggaatgtgggaagggcttcagttggagatcaaatcttcatgcacatcaaagagttcactcaggagaaaaaccctataaatgtgagcagtgtgataagagcttcagtcaggccatagattttcgggtacatcagagagtccatactggagagaagccatacaaatgtggtgtctgtggtaagggcttcagtcagtcctctggtcttcaatcccatcagagagtccacacgggggaaaagccatacaaatgtgatgtgtgtggaaagggctttagatacagttcgcagtttatataccatcagagaggccacactggagaaaaaccttacaaatgtgaagagtgtgggaaaggctttggtaggagcttgaatcttcgccatcatcagagggtccacacgggagagaaaccccatatatgtgaggagtgtggtaaggccttcagtctcccctcaaatcttcgagtccacctgggtgttcacaccagggaaaaactctttaaatgtgaagagtgtggtaaaggcttcagtcagagtgcacgtcttgaagcccatcagagagtccacactggagaaaaaccatacaaatgtgacatatgtgataaggacttccgtcaccgttcacgtcttacatatcatcagaaagtccatactggtaaaaagctttacccaactttcttgtacaaagtggttgatatcggtaagcctatccctaaccctctcctcggtctcgattctacgtagtaatgaactagtccgtaacttgaaagtatttcgatttcttggctttatatatcttgtggaaaggacgagtgtcaatactacggaaatttaaa

SEQ ID NO: 3308 - DNA, 1610 bp, Homo sapiens
  source 1..1610: mol_type = genomic DNA
atcgattgatcaacaagtttgtacaaaaaagttggcatgggtccagtcatgcctcccagtaagaagccagaaagctcaggaattagtgtctccagtggactgagtcagtgttacgggggcagcggtttctccaaggcccttcaggaagacgatgacctcgacttttctctgcctgacatccgattagaagagggggccatggaagatgaagagctgaccaacctgaactggctgcacgagagcaagaacttgctgaagagctttggggagtcggtcctcaggagtgtcagccccgtccaggacctggacgatgacacccccccatcccctgcccactctgacatgccctacgatgccaggcagaaccccaactgcaaacccccctactccttcagctgcctcatatttatggccatcgaggactctccaaccaagcgcctgccagtgaaggatatctacaactggatcttggaacattttccgtattttgcaaatgcacctactgggtggaaaaactcagtgagacacaatttatcattgaataagtgttttaagaaagtggacaaagagaggagtcagagtattgggaaagggtcgttgtggtgcatagacccagagtatagacaaaatctaattcaggctttgaaaaagacaccttatcacccacacccacacgtgttcaatacacctcccacctgtcctcaggcatatcaaagcacatcaggtccacccatctggccgggcagtaccttcttcaagagaaatggagcccttctccaagttcctccaggagtgatccaaaatggagcgcgggtcctgagccgagggctgtttcctggcgtgcggccgctgccaatcactcccattggggtgacagcggccatgaggaatggcatcaccagctgccggatgcggactgagagtgagccatcttgtggctccccagtggtcagcggagaccccaaggaggatcacaactacagcagtgccaagtcctccaacgcccggagcacctcgcccaccagcgactccatctcctcctcctcctcctcagccgacgaccactatgagtttgccaccaaggggagccaggagggcagcgagggcagcgaggggagcttccggagccacgagagccccagcgacacggaagaggacgacaggaagcacagccagaaggagcccaaggattctctgggggacagcgggtacgcatcccagcacaagaagcgccagcacttcgccaaggccaggaaggtccccagcgacacactgcccctcaaaaagagacgcaccgaaaagccccccgagagcgatgatgaggagatgaaagaagcggcagggtccctcctgcacttagcagggatccggtcctgtttgaataacatcaccaatcggacggcaaaggggcagaaagagcaaaaggaaaccacaaaaaattacccaactttcttgtacaaagtggttgatatcggtaagcctatccctaaccctctcctcggtctcgattctacgtagtaatgaactagtccgtaacttgaaagtatttcgatttcttggctttatatatcttgtggaaaggacgaagggatcatcggatttccatgcct

SEQ ID NO: 3309 - DNA, 1958 bp, Homo sapiens
  source 1..1958: mol_type = genomic DNA
atcgattgatcaacaagtttgtacaaaaaagttggcatggctctttctcagggactgtttacattcaaggatgtggccatagaattctctcaagaggagtgggagtgcctggaccctgcccagagggccttgtacagggacgtgatgttggagaactacaggaacctgctttctctcgatgaggataacatccctccagaagatgatatttctgttggatttacaagcaagggattatcaccaaaggaaaataataaagaggaattataccatctggtgatattagaaagaaaggaaagccatggcatcaacaattttgacctcaaggaagtctgggaaaatatgcctaagtttgacagcctgtgggactatgatgtaaaaaattacaaaggaatgcctttgacctgtaacaaaaatctcactcacagaaaagatcaacaacataataaatcctcaatacatttctctttaaagcagagtgtttctataagagatagtgcacaccagtatttcatccatgacaagccatttataaggaatttgttaaaactgaaaaataacataaggtatgccggaaacaaatacgtgaagtgttttgaaaataaaattggattaagcttacaggcacagctggctgaactacagagatttcaaactggggagaaaatgtatgaatgtaatccagttgagaagtctatcaatagttcctcagtttcaccacttcctccttgtgtcaaaaacatttgtaataaatataggaagattttgaaataccctttattacatacacagtatgggagaacacacattagagaaaaatcatacaagtgtaatgactgtggaaaggcttttagcaaaagttcgaacctcactaatcatcagagaattcactctggacagagaccttacaaatgtaacgagtgtggcaaagcctttaaccagtgttcgaacctcactaggcatcagagagtccatacaggagagaaaccatatcaatgtaatatatgtggcaaggtctgtagtcaaaattcaaatcttgcaagtcatcagaggatgcatactggagagaaaccttacaaatgtaatgaatgtggtaaggcatttatccagcgttcacacctttggggtcatgaaagaattcatactggagagaaaccttacaaatgtaatgaatgtgacaaagcctttgctgaacgttcaagccttacccaacataagagaatccatactggagagaagccttacatatgtaatgagtgtggcaaagcttttaagcagtgctcacatctcactaggcatcagaatatacatcctggagagaaaccacacaaatgtaatgtgtgtggcagggcttttatccaaagttcaagtcttgtggaacatcagagaattcacactggagaaaaaccttacaaatgtaataaatgtgataaagcttttatcaaacgttcacacctttggggtcatcagagaactcatactggagagaaaccttacaaatgtactgaatgtggcaaagcctttactgaacgttcaaatcttactcagcataagaaaatccatactggagagaaaccttacaaatgtactgaatgtggcaaagcttttacccaatttgcaaacctcactagacaccagaaaatacacattgaaaagaaacattgtaaacataatatacatggtaatgctttattccaaagttcaaaccttggagatcatcaaaaaagttataatagagaaaaacatatcaaatataatgagacaaaaattaagtattcaagctgtacctacccaactttcttgtacaaagtggttgatatcggtaagcctatccctaaccctctcctcggtctcgattctacgtagtaatgaactagtccgtaacttgaaagtatttcgatttcttggctttatatatcttgtggaaaggacgaggcatacggctcaggaggtccggt

SEQ ID NO: 3310 - DNA, 1760 bp, Homo sapiens
  source 1..1760: mol_type = genomic DNA
atcgattgatcaacaagtttgtacaaaaaagttggcatggctgtggccctgggttgtgcaatccaggcatccttgaatcaaggctctgtgtttcaagaatatgatactgactgtgaagttttccgtcagcgcttcaggcagttccagtacagagaagcagctgggcctcatgaagcatttaacaaactctgggagctttgctgtcaatggctgaagccaaagatgcgctctaaggaacaaatcctggagctgctagtgttggagcaattcctaactatcctgcccacagagatagagacctgggtgagggagcactgcccagagaatagagaaagagttgtgtcactgatagaagacttacagagagaacttgagataccagagcagcaggttgatatgcatgacatgctcttggaagaactggcaccagtgggaacggcacacataccaccaaccatgcacctagagtcacctgcactccaggtaatgggacctgcccaggaggccccagtagcagaggcatggatcccacaggcagggccaccggagctgaactatggtgctactggagaatgtcagaactttctggaccctggatatccattaccaaaacttgacatgaacttctcattggagaatagagaagagccatgggtgaaggaattacaggattctaaagaaatgaaacaattacttgattccaagataggttttgagatcgggatagaaaatgaagaagatacttcaaaacagaaaaaaatggagactatgtatccatttattgtaactttagaggggaatgctctccagggtcccattttgcaaaaagactatgtacagttagaaaatcaatgggaaacccccccagaggatttacagacagatttagcaaaactggtagatcagcagaaccccactctgggagagacacctgagaactccaacttggaagaacctctcaaccctaaaccccacaagaaaaagagtccaggagagaaacctcaccgatgtcctcagtgtggaaaatgttttgctcggaagtcacaacttactgggcatcagagaattcattcaggagaagaacctcacaaatgccctgaatgtgggaaaagattccttcgtagttcagacctttatagacaccaacgacttcatacaggggagagaccctatgaatgcactgtatgtaaaaagcgattcactcggcggtcacatcttatagggcaccagagaacccattctgaagaagaaacatataaatgtcttgagtgtgggaaaagtttttgtcatggatcaagtcttaaaagacatctgaaaactcatacaggtgaaaaacctcatagatgtcataattgtgggaaaagttttagtcgactgacagctcttactttgcaccagagaacgcatactgaagagagaccttttaaatgtaattattgtgggaaaagttttagacagagaccaagcctcgttattcatttaagaatccacacaggggagaagccatacaagtgtactcattgttctaaaagcttcagacagagagccggccttattatgcaccaggtcactcactttagaggacttatttacccaactttcttgtacaaagtggttgatatcggtaagcctatccctaaccctctcctcggtctcgattctacgtagtaatgaactagtccgtaacttgaaagtatttcgatttcttggctttatatatcttgtggaaaggacgagtaactgggttacgaccgtatgtt

SEQ ID NO: 3311 - DNA, 2279 bp, Homo sapiens
  source 1..2279: mol_type = genomic DNA
atcgattgatcaacaagtttgtacaaaaaagttggcatgatggctgaaaacaatttaaaaatgctaaagattcaacagtgtgtggtagccaacaaactacctagaaacaggccatatgtttgcaatatttgttttaagcactttgaaacaccatcaaaattagctaggcactatctcattcatactggtcaaaagccatttgaatgtgatgtgtgtcataaaacctttagacaactagttcatctggagaggcatcaactaactcatagtctgccttttaaatgtagtatttgtcagcgtcactttaaaaatctgaagacatttgtgaagcaccaacaacttcacaatgaaacctatcagaataatgttaaacaggtcagaagattgctggaggccaagcaagaaaagtcaatgtatggagtgtataatacttttaccacagaggaaagatgggcattacacccgtgctctaagtctgatcccatgtatagcatgaaaagaagaaagaatattcatgcatgtacaatctgtggcaagatgtttccatcacagtcaaaacttgataggcatgtacttattcatactggtcagaggccttttaaatgtgtcttgtgtactaaatcttttcgacagtcaactcacttaaaaatccaccaacttacacattcagaagaaagaccttttcaatgttgtttttgtcaaaaaggatttaagattcaaagcaaacttctgaagcataaacaaatccatactaggaataaggcttttcgggctcttttattaaagaagaggcgtacagaatctcgccccctgcctaataagttaaatgcaaatcagggtggttttgaaaatggtgagattggtgaatctgaggagaataatccacttgatgtccactcaatttatattgtcccttttcaatgtccaaagtgtgaaaagtgttttgaatcagagcagattctcaatgaacacagctgttttgctgctagaagtggcaaaattccaagcaggttcaaaagaagctacaactataaaaccattgttaaaaaaatcttggccaagcttaagcgtgctaggagtaaaaaattagataactttcaatctgagaaaaaagtttttaaaaagagtttcttgagaaattgtgatcttatttctggtgagcagagctctgaacaaacccagagaacatttgtgggttctcttggcaaacatggaacatataaaacaattggcaatagaaagaagaaaacattgactttgccattttcttggcaaaatatgggaaaaaatttgaaaggcatccttacgacagaaaacatattaagcattgataattcagtgaataagaaagacttgtcaatctgtggttcatcaggtgaggaattctttaataactgtgaggtacttcagtgtggtttttcagttccaagggaaaacatacgtactagacataagatatgtccttgtgacaaatgtgagaaggtatttccttctatatccaaactaaaaagacactatttaattcatactggacagaggccctttggctgtaatatttgtgggaaatcttttagacagtcagctcacttaaaaagacatgaacagactcataatgaaaagagtccttatgcatctctttgccaagtagaatttggaaacttcaacaatctttctaatcattcaggtaataatgttaactataatgcttcccaacaatgtcaggctcctggtgttcaaaaatacgaggtctcagagtcagatcaaatgtcaggagttaaggcagagtcacaggattttattcctggtagcaccgggcaaccctgtcttcctaatgtacttttggaatcagagcaaagcaatcctttttgcagttattcagagcatcaggagaaaaatgatgtcttcctgtaccgatgcagtgtttgtgctaaaagtttccgatctccatctaaactggaaagacactacctaattcatgcagggcagaaaccatttgaatgctcagtttgtggcaaaacattcagacaggctcctcactggaagagacatcagcttactcactttaaagaacgaccacaagggaaagtggttgccttagattcggttatgtacccaactttcttgtacaaagtggttgatatcggtaagcctatccctaaccctctcctcggtctcgattctacgtagtaatgaactagtccgtaacttgaaagtatttcgatttcttggctttatatatcttgtggaaaggacgaaaaacccagttatggcctggagac

SEQ ID NO: 3312 - DNA, 1196 bp, Homo sapiens
  source 1..1196: mol_type = genomic DNA
atcgattgatcaacaagtttgtacaaaaaagttggcatgcagcagcagcctctgcccgggcctggcgcccccacaactgagccaaccaagcctccctacagctacatcgcccttattgctatggccatccagagctcaccggggcagcgggccaccctcagtggcatctaccgctacatcatgggccgattcgccttctaccgccacaaccggcccggctggcagaacagcatccgccacaacctgtcactcaacgagtgctttgtcaaggtgccccgcgatgaccgcaagccaggcaagggcagctactggacgctggaccctgactgccacgacatgtttgagcacggcagcttcctacgccgccgccgccgcttcacccggcagacaggtgctgagggcacccggggccccgccaaggcacgccgtggacccctcagggcgaccagccaggacccaggagtccccaacgccacgaccggcaggcagtgctcattcccaccagagctgccagatcccaagggcctaagctttgggggtctggtgggggccatgccagccagtatgtgcccagcaaccactgatggcaggcctcggccacccatggagcccaaagagatttccacgcccaagcctgcatgcccaggggagctccccgtggccacctcatcttcctcatgcccagcgtttggctttcctgccggcttctcagaggctgagagttttaataaggcccctacgcccgtcttgtccccggaatcaggcatcgggagcagctaccagtgtcggctgcaggcactgaatttttgcatgggggctgacccaggccttgagcacctcttggcctcagcagccccctcccctgcaccacccacccctccaggctcactccgggccccactgcccctgccaactgaccacaaggaaccctgggttgcaggtggcttccctgtccagggaggctccggctacccattggggctgaccccctgcctataccggacgccaggcatgttcttctttgagtacccgactttcttgtacaaagtggttgatatcggtaagcctatccctaaccctctcctcggtctcgattctacgtagtaatgaactagtccgtaacttgaaagtatttcgatttcttggctttatatatcttgtggaaaggacgacgaaggaggaagaataattgacta

SEQ ID NO: 3313 - DNA, 2795 bp, Homo sapiens
  source 1..2795: mol_type = genomic DNA
atcgattgatcaacaagtttgtacaaaaaagttggcaccatgaactccatgaaccccatgaaacctgccctgccccctgcgccacacggtgatggttcattcgcatatgagtctgtgccttggcaacaaagcgccactcagccggctggatcgctgtctgtggtcactactgtgtggggagttggcaacgcgacacagagccagtgcctgggacagcaggcgtttgctgaaggcggcgccaacaagggctacgtgcagcaaggcgtgtacagccgcgggggctaccctggggcccccggcttcaccaccgggtatgcaggcggcccggggggcctgggcctcccctcacatgctgcaagaccctccactgacttcacgcaagcggcagctgctgcagctgtggctgctgcggcagccactgccaccgccacagccacagccaccgtggctgctctccaggagaagcagagccaggagctgagccagtatggagcgatgggggccggacagtcttttaacagccagtttctgcagcatggaggtccccgggggcctagtgtccccgctggcatgaaccctactggcataggaggggtaatgggcccctctggcctctcccccttggctatgaaccccacccgggcagcaggaatgacacccttgtatgcagggcagcgtctgccccaacatgggtatcctgggcctccccaggcccagccactgccccgacagggggtcaagagaacctactctgaggtgtatccagggcagcagtatctgcaaggaggccagtatgcacccagcaccgcccagtttgcgcccagccctgggcagccccctgccccctccccttcctaccctgggcacaggctgcccctgcagcagggcatgacccagtccctgtccgtgcctggccccacgggactgcattataagcctacccgttccatcccgggctatcccagttccccactgccagggaaccccacgccacccatgaccccaagcagcagcgtcccttacatgtcaccaaaccaagaggtcaagtctcccttcttgcctgatctcaagcccaacctcaactccttgcactcatcgccctctggaagcgggccttgtgacgagttgcggctgaccttccctgtgcgcgatggggtggtcctggagcccttccgcctgcagcacaacctggctgtaagcaaccatgtcttccagctgcgagactcagtctacaagaccctgataatgaggcctgacctggagctgcaattcaagtgctaccaccacgaggaccggcagatgaacaccaactggccagcctcggtgcaggtcagcgtcaatgccacgccgctcaccatcgagcgtggcgacaacaagacctcgcacaagccactctacctgaagcatgtgtgccagccaggccgcaacaccatccagatcaccgtcaccgcctgctgctgctcccacctcttcgtgctgcagctagtgcaccgcccatccgtccgctcggtgctgcagggcctcctcaaaaagcgcctcctgcctgctgagcactgcatcaccaagataaagcggaacttcagcagcggcaccatccctggcacccctgggcccaacggagaggacggggtggagcagacagctatcaaggtgtccctgaagtgccccatcaccttccgcaggatccagctccctgcccgaggtcatgactgtcgccacatacagtgctttgacctggagtcgtacctgcagctcaactgtgagcgggggacttggaggtgtcctgtgtgcaacaagacagctttgctggagggcctggaggtggaccagtacatgctgggcatcctgatttacattcagaactctgactatgaggagatcaccatcgaccccacgtgcagctggaagccagtgcccgtgaagcctgacatgcacatcaaggaggagccggatgggccagcactgaagcgctgccgcaccgtgagccccgcccacgtgctcatgcccagcgtgatggagatgatcgccgccctgggccccggcgctgccccctttgcccccctgcagcccccctcagtccctgcccccagcgactaccctggccagggttccagcttcctggggcctggaactttccctgagtccttcccacccaccacgcccagcaccccaacccttgctgagttcaccccgggaccaccccccatctcctaccagtctgacattcccagcagcctcctgacttcagagaagtctaccgcctgcctcccaagccagatggcaccagcaggtcacctggaccccactcacaatcctgggacaccaggactacacacctccaaccttggggcccctccaggtccccagctgcaccattcaaaccctcccccagcgtcccggcagtccttgggccaagcgagcttaggacctacgggtgaactggccttcagtcctgccacaggcgtgatggggccccccagcatgtctggagccggggaggccccagaaccagctctggacctgctcccggaactgaccaaccctgatgagctactgtcctacttgggcccacccgacctccctacgaacaacaatgacgacctgctttctctgtttgagaacaacttgccaactttcttgtacaaagtggttgatatcggtaagcctatccctaaccctctcctcggtctcgattctacgtagtaatgaactagtccgtaacttgaaagtatttcgatttcttggctttatatatcttgtggaaaggacgaattattttccttccacatttacat

SEQ ID NO: 3314 - DNA, 749 bp, Homo sapiens
  source 1..749: mol_type = genomic DNA
accgccaccatgggcaaaggagatcctaagaagccgagaggcaaaatgtcatcatatgcattttttgtgcaaacttgtcgggaggagcataagaagaagcacccagatgcttcagtcaacttctcagagttttctaagaagtgctcagagaggtggaagaccatgtctgctaaagagaaaggaaaatttgaagatatggcaaaagcggacaaggcccgttatgaaagagaaatgaaaacctatatccctcccaaaggggagacaaaaaagaagttcaaggatcccaatgcacccaagaggcctccttcggccttcttcctcttctgctctgagtatcgcccaaaaatcaaaggagaacatcctggcctgtccattggtgatgttgcgaagaaactgggagagatgtggaataacactgctgcagatgacaagcagccttatgaaaagaaggctgcgaagctgaaggaaaaatatgaaaaggatattgctgcatatcgagctaaaggaaagcctgatgcagcaaaaaagggagttgtcaaggctgaaaaaagcaagaaaaagaaggaagaggaggaagatgaggaagatgaagaggatgaggaggaggaggaagatgaagaagatgaagatgaagaagaagatgatgatgatgaatagtaatgaactagtccgtaacttgaaagtatttcgatttcttggctttatatatcttgtggaaaggacgatgtaatattaccatgcaattgttg

SEQ ID NO: 3315 - DNA, 1979 bp, Homo sapiens
  source 1..1979: mol_type = genomic DNA
atcgattgatcaacaagtttgtacaaaaaagttggcaccatgattaagttccaggaaagggtgacattcaaggatgtggctgttgtcttcaccaaggaagagctggcactattggataaagcccagataaacctgtaccaagatgtgatgctggaaaacttcaggaacctcatgttagtgagagacgggattaaaaacaacattttgaatcttcaggcaaaggggttaagttacctttcgcaagaagtgcttcattgctggcagatttggaaacaaaggatccgggatttaactgtgagtcaggattatatcgtgaaccttcaagaagagtgttccccacatttagaagatgtttccctcagtgaagagtgggcaggcatttctcttcagatttctgaaaatgaaaactatgtagtaaatgccattatcaaaaatcaagatatcacagcatggcaaagcctgacacaggttcttaccccagaatcgtggaggaaagccaacataatgaccgagccccagaactctcagggaagatataagggaatttacatggaagagaaattgtacagacgtgctcagcatgatgacagcctcagttggacctcatgtgatcatcatgagtcccaagaatgtaaaggagaggaccctggtagacatcccagctgtgggaaaaacttgggtatgaaatcaacggttgaaaaacgtaatgcggcccatgtattaccacagcctttcccatgtaataactgtggggtggcctttgcagatgatacagatcctcatgtccatcacagcactcacctaggagaaaaatcttataaatgtgaccagtatggaaagaactttagtcagagccaagatcttatcgttcattgtaaaactcactctggcaagactccctatgaattccacgaatggcctatgggctgcaaacagagctcagaccttcccagatatcagaaagtctcctcaggagacaaaccctacaaatgtaaagaatgtggcaagggcttcaggcgcagctcttcccttcacaaccatcatcgagtccacacaggggagatgccctacaaatgcgatgaatgtgggaaagggtttggatttaggtcacttctttgtattcatcagggagtacacacagggaaaaagccctataaatgtgaagagtgtgggaagggctttgatcagagctccaaccttcttgtccatcagagagtccacactggagagaagccctacaaatgcagtgagtgtggcaagtgctttagttcaagctccgttcttcaagtccactggaggtttcacacaggggagaaaccatataggtgtggtgagtgtggaaagggcttcagccaatgtacacaccttcacattcaccagagagtccacacaggggagaaaccatacaaatgcaatgtgtgtggaaaggattttgcgtatagctctgttcttcacactcatcagagagttcacactggagaaaaaccatataaatgtgaagtgtgtggaaagtgcttcagttacagttcatattttcacttacatcaaagagatcacatcagagagaaaccatataaatgtgatgagtgtggtaaaggcttcagccggaattcagatcttaatgttcacctcagagtccacacaggagagaggccctataagtgtaaggcatgtggtaagggcttcagtcgtaattcatacctccttgcccatcagagagtgcatatagatgagacacagtacacacactgtgagcgtggaaaggaccttctgactcatcaaagactacatgagcagagagaaacattattgccaactttcttgtacaaagtggttgatatcggtaagcctatccctaaccctctcctcggtctcgattctacgtagtaatgaactagtccgtaacttgaaagtatttcgatttcttggctttatatatcttgtggaaaggacgattgtacggtatttggctgaattat

SEQ ID NO: 3316 - DNA, 926 bp, Homo sapiens
  source 1..926: mol_type = genomic DNA
atcgattgatcaacaagtttgtacaaaaaagttggcaccatgggcctaatctggctgctactgctcagcctgctggagcccggctggcccgcagcgggccctggggcgcggttgcggcgcgatgcgggcggccgtggcggcgtctacgagcaccttggcggggcgccccggcgccgcaagctctactgcgccacgaagtaccacctccagctgcacccgagcggccgcgtcaacggcagcctggagaacagcgcctacagtattttggagataacggcagtggaggtgggcattgtggccatcaggggtctcttctccgggcggtacctggccatgaacaagaggggacgactctatgcttcggagcactacagcgccgagtgcgagtttgtggagcggatccacgagctgggctataatacgtatgcctcccggctgtaccggacggtgtctagtacgcctggggcccgccggcagcccagcgccgagagactgtggtacgtgtctgtgaacggcaagggccggccccgcaggggcttcaagacccgccgcacacagaagtcctccctgttcctgccccgcgtgctggaccacagggaccacgagatggtgcggcagctacagagtgggctgcccagaccccctggtaagggggtccagccccgacggcggcggcagaagcagagcccggataacctggagccctctcacgttcaggcttcgagactgggctcccagctggaggccagtgcgcacttgccaactttcttgtacaaagtggttgatatcggtaagcctatccctaaccctctcctcggtctcgattctacgtagtaatgaactagtccgtaacttgaaagtatttcgatttcttggctttatatatcttgtggaaaggacgactcgtagtgacccagataccactc

SEQ ID NO: 3317 - DNA, 1016 bp, Homo sapiens
  source 1..1016: mol_type = genomic DNA
atcgattgatcaacaagtttgtacaaaaaagttggcatgtggaacagtggattcgaaagctatggcagctcctcatacgggggagccggcggctacacgcagtccccggggggctttggatcgcccgcaccttctcaagccgaaaagaaatcaagagcccgagcccagcacattgtgccctgtactatatctcagctgctttctgccactttggttgatgaagtgttcagaattgggaatgttgagatttcacaggtcactattgtggggatcatcagacatgcagagaaggctccaaccaacattgtttacaaaatagatgacatgacagctgcacccatggacgttcgccagtgggttgacacagatgacaccagcagtgaaaacactgtggttcctccagaaacatatgtgaaagtggcaggccacctgagatcttttcagaacaaaaagagcctggtagcctttaagatcatgcccctggaggatatgaatgagttcaccacacatattctggaagtgatcaatgcacacatggtactaagcaaagccaacagccagccctcagcagggagagcacctatcagcaatccaggaatgagtgaagcagggaactttggtgggaatagcttcatgccagcaaatggcctcactgtggcccaaaaccaggtgttgaatttgattaaggcttgtccaagacctgaagggttgaactttcaggatctcaagaaccagctgaaacacatgtctgtatcctcaatcaagcaagctgtggattttctgagcaatgaggggcacatctattctactgtggatgatgaccattttaaatccacagatgcagaatacccaactttcttgtacaaagtggttgatatcggtaagcctatccctaaccctctcctcggtctcgattctacgtagtaatgaactagtccgtaacttgaaagtatttcgatttcttggctttatatatcttgtggaaaggacgacgtggatgaggtgggcctcaaaat

SEQ ID NO: 3318 - DNA, 686 bp, Homo sapiens
  source 1..686: mol_type = genomic DNA
atcgattgatcaacaagtttgtacaaaaaagttggcatgagcgataacgatgacatcgaggtggagagcgacgaagagcaaccgaggtttcaatctgcggctgacaaacgggctcatcataatgcactggaacgaaaacgtagggaccacatcaaagacagctttcacagtttgcgggactcagtcccatcactccaaggagagaaggcatcccgggcccaaatcctagacaaagccacagaatatatccagtatatgcgaaggaaaaaccacacacaccagcaagatattgacgacctcaagcggcagaatgctcttctggagcagcaagtccgtgcactggagaaggcgaggtcaagtgcccaactgcagaccaactacccctcctcagacaacagcctctacaccaacgccaagggcagcaccatctctgccttcgatgggggctcggactccagctcggagtctgagcctgaagagccccaaagcaggaagaagctccggatggaggccagctacccaactttcttgtacaaagtggttgatatcggtaagcctatccctaaccctctcctcggtctcgattctacgtagtaatgaactagtccgtaacttgaaagtatttcgatttcttggctttatatatcttgtggaaaggacgaccttcttcggggacggaagttaca

SEQ ID NO: 3319 - DNA, 494 bp, Homo sapiens
  source 1..494: mol_type = genomic DNA
atcgattgatcaacaagtttgtacaaaaaagttggcatgagcgataacgatgacatcgaggtggagagcgacgaagagcaaccgaggtttcaatctgcggctgacaaacgggctcatcataatgcactggaacgaaaacgtagggaccacatcaaagacagctttcacagtttgcgggactcagtcccatcactccaaggagagaagctctatttcctcttttggaaattgtgtactcctgtccttcatcgtcaaagtttgatgcagaaatgccacaccttcatttcaagctaccaagtgcacaagaaaaaagaatgcaagatttacccaactttcttgtacaaagtggttgatatcggtaagcctatccctaaccctctcctcggtctcgattctacgtagtaatgaactagtccgtaacttgaaagtatttcgatttcttggctttatatatcttgtggaaaggacgactcatgcccaaaaattgggtaacg

SEQ ID NO: 3320 - DNA, 1469 bp, Homo sapiens
  source 1..1469: mol_type = genomic DNA
atcgattgatcaacaagtttgtacaaaaaagttggcatggcggagagctggctgcgcctctcgggagccgggccggcggaggaggccgggccggagggcggcctggaggagcccgacgccctggatgacagcctgaccagcctgcagtggctgcaggaattctccattctcaacgccaaggcccccgccctgcccccggggggcaccgacccccacggctaccaccaggtgccaggttcagcggcgcccgggtcccccctggcggccgaccccgcctgcctggggcagccacacacgccgggcaagcccacgtcgtcgtgcacgtcgcggagcgcgcccccggggctgcaggccccaccccccgacgacgtggactacgccaccaatccgcacgtgaagcctccctactcgtatgccacgctcatctgcatggccatgcaggccagcaaggccaccaagatcaccctgtcggccatctacaagtggatcacggacaacttctgctacttccgccacgcagatcccacctggcagaattcaatccgccacaacctgtctctgaacaagtgcttcatcaaagtgcctcgggagaaggacgaaccaggcaaggggggcttctggcgcattgacccccagtacgcggagcggctactgagcggcgctttcaagaagcggcgactgccccctgtccacatccacccagcctttgcccgccaggccgcgcaggagcccagcgctgtcccccgggccgggccgctgacggtgaataccgaggcccagcagctgctgcgggagttcgaggaggccaccggggaggcgggctggggtgcaggcgagggcaggctggggcataagcgcaaacagccgctgcccaagcgggtggccaaggtcccgcggccccccagcaccctgctgcccaccccggaggagcagggtgagctggaacccctcaaaggcaactttgactgggaggccatcttcgacgccggcactctgggcggggagctgggtgcactggaggccctggagctgagcccgcctctgagccccgcctcacacgtggacgtggacctcaccatccacggccgccacatcgactgccctgccacctgggggccttcggtggagcaggctgccgacagcctggacttcgatgagaccttcctggccacatccttcctgcagcacccctgggacgagagcggcagtggctgcctgcccccggagcccctctttgaggctggggatgccaccctggcctccgacctgcaggactgggccagcgtgggggccttcttgtacccaactttcttgtacaaagtggttgatatcggtaagcctatccctaaccctctcctcggtctcgattctacgtagtaatgaactagtccgtaacttgaaagtatttcgatttcttggctttatatatcttgtggaaaggacgaaaaatgctcccgtccgttgggcca

SEQ ID NO: 3321 - DNA, 4061 bp, Homo sapiens
  source 1..4061: mol_type = genomic DNA
atcgattgatcaacaagtttgtacaaaaaagttggcaccatgcataagaagagggttgaagagggggaggcctcagacttctcgctggcctgggattcctccgtgacagcagcaggaggcctagaaggagagccagagtgcgatcagaaaaccagccgtgcgctggaagacaggaacagcgtgacaagtcaagaggagagaaatgaggatgatgaagacatggaggatgaatcaatttacacctgcgatcactgtcagcaggacttcgagtctctggcagacctgacggaccaccgggcccaccgctgtcctggagatggtgatgacgacccacaactctcctgggtggcctcgtctccctccagcaaggatgttgcgtcacccacgcagatgatcggagatggttgtgacctcggcctcggcgaggaggaagggggcacgggcctgccatacccttgccagttctgcgacaagtccttcatccgcttgagctacttgaagaggcacgagcagatccacagcgacaagctgccgttcaagtgcacctactgcagccgcctcttcaagcacaagaggagccgcgaccggcacatcaagctgcatacgggcgacaagaagtatcactgccacgagtgcgaggcagccttctcccgcagcgaccacctcaagatccacctgaagacccacagctccagcaagcccttcaagtgcactgtgtgcaagcgcggcttctcctccaccagctcgctgcagagccacatgcaggcccacaaaaagaacaaggagcatctggccaagtcggagaaggaagccaagaaggacgacttcatgtgcgactactgcgaggacaccttcagccagacggaggagctggagaagcacgtgctcacccgccacccgcagctgtccgagaaggcggacctgcagtgcattcactgccctgaggtcttcgtcgacgagaacacactgctcgcccatatccaccaagcccacgccaaccagaaacacaagtgccccatgtgccctgagcagttctcctcagtggaaggtgtctactgccacctggacagccaccggcagcccgactccagcaaccacagtgtcagtcccgaccctgtactgggcagcgtggcctccatgagcagcgccacacccgactccagcgcctctgtggagcgtggctccaccccggactccaccttgaagccgctgcgggggcagaagaagatgcgggatgacgggcagggctggaccaaggtggtctatagctgcccctattgttccaagcgggactttaacagcctggccgtgctggagatccacctgaagaccatccacgcggacaagccccagcagagccacacatgtcagatctgcctggactccatgcccaccctctacaacctcaacgagcacgttcgcaagctgcacaagaaccatgcctaccctgtgatgcagtttggcaacatctctgccttccactgcaactactgccccgagatgttcgccgacatcaatagcctgcaggagcacatccgcgtctcccactgcggccccaacgccaacccctctgacggtaataatgctttcttctgcaaccagtgctccatgggtttccttactgagtcctccctcaccgagcacatccagcaggcccactgcagtgtgggcagtgccaaactagagtctccggtggtgcagcccacgcagtccttcatggaggtctattcctgcccctactgcaccaactcccccatctttggctccatcctgaaactcaccaagcacatcaaggagaaccacaagaacattccactggcccacagcaagaagtccaaggccgagcagagcccagtctcgtccgatgtggaggtgtcttccccgaagcggcagcggctctcagcaagcgccaactccatctccaatggggagtatccttgtaatcaatgcgacctcaagttctccaactttgagagcttccagacccacctgaagctgcacctggagctgctgctgcggaagcaagcgtgcccccagtgcaaagaggactttgactcccaggagtccctcctgcagcacctgacagtgcattacatgaccacgtcgacccactatgtgtgcgagagctgcgacaagcaattttcctcggtggatgacctgcagaagcacctgctggacatgcacacctttgtgttgtaccactgcaccctgtgtcaggaggtcttcgactccaaggtgtccatccaggtgcacctggcggtgaagcacagcaatgagaagaagatgtaccgctgcacggcctgcaactgggacttccgcaaggaggctgacctgcaggtgcacgtcaaacacagccacctgggcaacccggccaaggctcacaagtgcatcttctgtggggagaccttcagcaccgaggtggagctgcagtgccacatcaccacacacagcaagaagtataactgtaagttctgcagcaaggccttccacgccatcatcctgctggagaagcacctgcgggagaagcactgtgtgtttgatgctgcgaccgagaacggcacggccaatggggtacccccaatggccaccaagaaagctgagcctgctgacctgcagggcatgctgcttaagaaccctgaggcacctaacagccatgaggccagcgaggatgacgtggacgcgtcggagcccatgtacggctgtgacatctgcggggcggcctacaccatggaggtgctgctgcagaatcaccggctgcgggaccacaatatccggccgggcgaggatgatggctcacgcaagaaggctgagtttatcaagggcagtcacaagtgcaacgtttgttcacggactttcttctcggagaacgggctacgggagcacctgcagacgcaccggggccctgccaagcactacatgtgtcccatctgtggtgagcgcttcccttcgctgctgacgctcaccgaacacaaggtgacccacagcaagagcctggacacgggcacctgtcgcatctgcaagatgcccctgcagagcgaggaggagtttattgagcactgccagatgcaccctgacctgcgcaactcactcacgggcttccgctgtgtggtctgcatgcagacagtcacttccacgcttgagctcaagatccatggcaccttccacatgcagaagctggcgggcagctcagcggcgtcctcccccaatggccaggggctgcagaagctctacaagtgcgccctgtgcctcaaggagttccgcagcaagcaggacctggtgaagcttgacgtcaatgggctgccctacggcctctgcgccggctgcatggcccgcagcgccaacggacaggtgggtggcctggccccgcccgagcccgccgaccggccctgtgccggcctccgttgccccgagtgcagtgtcaagtttgagagtgccgaagacctggagagccacatgcaggtggaccaccgtgacctcacgccggagaccagtgggccccggaaaggcacccagacatcgccagtgccccggaaaaagacataccagtgcatcaagtgccagatgaccttcgagaacgagagagagatccaaatccacgttgccaaccacatgattgaggaaggcatcaaccacgagtgtaagctgtgcaaccagatgttcgactccccggccaagctcctctgtcacctcattgagcacagcttcgagggcatgggcggcaccttcaaatgccccgtgtgtttcacagtcttcgtccaggccaacaagttgcagcagcacatctttgccgtgcacgggcaggaggacaagatctacgactgctcacagtgccctcagaagttcttcttccagaccgagctgcagaaccacacgatgagccagcacgcacagttgccaactttcttgtacaaagtggttgatatcggtaagcctatccctaaccctctcctcggtctcgattctacgtagtaatgaactagtccgtaacttgaaagtatttcgatttcttggctttatatatcttgtggaaaggacgagcctactcaagcgcaagcgaatgc

SEQ ID NO: 3322 - DNA, 1247 bp, Homo sapiens
  source 1..1247: mol_type = genomic DNA
atcgattgatcaacaagtttgtacaaaaaagttggcatgtgcactaaaatggaacagcccttctaccacgacgactcatacacagctacgggatacggccgggcccctggtggcctctctctacacgactacaaactcctgaaaccgagcctggcggtcaacctggccgacccctaccggagtctcaaagcgcctggggctcgcggacccggcccagagggcggcggtggcggcagctacttttctggtcagggctcggacaccggcgcgtctctcaagctcgcctcttcggagctggaacgcctgattgtccccaacagcaacggcgtgatcacgacgacgcctacacccccgggacagtacttttacccccgcgggggtggcagcggtggaggtgcagggggcgcagggggcggcgtcaccgaggagcaggagggcttcgccgacggctttgtcaaagccctggacgatctgcacaagatgaaccacgtgacaccccccaacgtgtccctgggcgctaccggggggcccccggctgggcccgggggcgtctacgccggcccggagccacctcccgtttacaccaacctcagcagctactccccagcctctgcgtcctcgggaggcgccggggctgccgtcgggaccgggagctcgtacccgacgaccaccatcagctacctcccacacgcgccgcccttcgccggtggccacccggcgcagctgggcttgggccgcggcgcctccaccttcaaggaggaaccgcagaccgtgccggaggcgcgcagccgggacgccacgccgccggtgtcccccatcaacatggaagaccaagagcgcatcaaagtggagcgcaagcggctgcggaaccggctggcggccaccaagtgccggaagcggaagctggagcgcatcgcgcgcctggaggacaaggtgaagacgctcaaggccgagaacgcggggctgtcgagtaccgccggcctcctccgggagcaggtggcccagctcaaacagaaggtcatgacccacgtcagcaacggctgtcagctgctgcttggggtcaagggacacgccttctgcccaactttcttgtacaaagtggttgatatcggtaagcctatccctaaccctctcctcggtctcgattctacgtagtaatgaactagtccgtaacttgaaagtatttcgatttcttggctttatatatcttgtggaaaggacgagactgatggctcgcgagctcgctt

SEQ ID NO: 3323 - DNA, 1247 bp, Homo sapiens
  source 1..1247: mol_type = genomic DNA
atcgattgatcaacaagtttgtacaaaaaagttggcatgtgcactaaaatggaacagcccttctaccacgacgactcatacacagctacgggatacggccgggcccctggtggcctctctctacacgactacaaactcctgaaaccgagcctggcggtcaacctggccgacccctaccggagtctcaaagcgcctggggctcgcggacccggcccagagggcggcggtggcggcagctacttttctggtcagggctcggacaccggcgcgtctctcaagctcgcctcttcggagctggaacgcctgattgtccccaacagcaacggcgtgatcacgacgacgcctacacccccgggacagtacttttacccccgcgggggtggcagcggtggaggtgcagggggcgcagggggcggcgtcaccgaggagcaggagggcttcgccgacggctttgtcaaagccctggacgatctgcacaagatgaaccacgtgacaccccccaacgtgtccctgggcgctaccggggggcccccggctgggcccgggggcgtctacgccggcccggagccacctcccgtttacaccaacctcagcagctactccccagcctctgcgtcctcgggaggcgccggggctgccgtcgggaccgggagctcgtacccgacgaccaccatcagctacctcccacacgcgccgcccttcgccggtggccacccggcgcagctgggcttgggccgcggcgcctccaccttcaaggaggaaccgcagaccgtgccggaggcgcgcagccgggacgccacgccgccggtgtcccccatcaacatggaagaccaagagcgcatcaaagtggagcgcaagcggctgcggaaccggctggcggccaccaagtgccggaagcggaagctggagcgcatcgcgcgcctggaggacaaggtgaagacgctcaaggccgagaacgcggggctgtcgagtaccgccggcctcctccgggagcaggtggcccagctcaaacagaaggtcatgacccacgtcagcaacggctgtcagctgctgcttggggtcaagggacacgccttctgcccaactttcttgtacaaagtggttgatatcggtaagcctatccctaaccctctcctcggtctcgattctacgtagtaatgaactagtccgtaacttgaaagtatttcgatttcttggctttatatatcttgtggaaaggacgaaacgtcatggcgtaaccggcggtc

SEQ ID NO: 3324 - DNA, 1304 bp, Homo sapiens
  source 1..1304: mol_type = genomic DNA
atcgattgatcaacaagtttgtacaaaaaagttggcaccatgaccggccgggactcgctttccgacgggcgcactagcagcagggcgctggtgcctggcggttcccctaggggctcgcgcccccggggcttcgccatcacggacctgctgggcttggaggccgagctgccggcgcccgctggcccaggacagggatctggctgcgagggtccggcagtcgcgccgtgcccgggcccggggcttgacggctccagcctggcgcgtggggccctaccgctgggactcggcctcctctgtggcttcggcacgcagccgccggcggccgctcgagcaccctgcctgctcctagcggacgtgccgttcctgccgcccaggggccccgagcccgctgccccgctggctcccagccgtccgccgcctgcgctcggccgccagaagcgcagcgacagcgtctccacgtccgatgaggacagccagtctgaagacaggaatgacctaaaggcatcccccaccttgggcaagaggaagaagcggcggcacaggacagttttcactgctcaccagctggaagagttggagaaggcattcagcgaggcccactaccctgatgtgtatgcccgagaaatgctggctgtgaaaactgagctccccgaagaccggatacaggtctggtttcaaaaccgcagggccaaatggcgcaagcgggagaagcgctggggcggcagcagcgtgatggccgagtacgggctgtacggggccatggtgcgccactgcatcccgctgccagactccgtgctcaactccgccgagggcggcctgctgggctcctgcgcgccctggctcctggggatgcataaaaaatccatggggatgataaggaagccaggaagtgaagataagttggcaggactctggggctctgaccacttcaaagaaggttctagccagagtgagtcaggatcacagagaggctcagataaagtgagccctgagaatggcttggaagatgtggctattgacctctccagctctgcccggcaggagaccaagaaagtgcaccctggggctggtgctcaaggaggctccaactccacggcactggaggggccccagccagggaaggtgggagccacattgccaactttcttgtacaaagtggttgatatcggtaagcctatccctaaccctctcctcggtctcgattctacgtagtaatgaactagtccgtaacttgaaagtatttcgatttcttggctttatatatcttgtggaaaggacgatggcttttgcaaaactgacttggt

SEQ ID NO: 3325 - DNA, 1736 bp, Homo sapiens
  source 1..1736: mol_type = genomic DNA
atcgattgatcaacaagtttgtacaaaaaagttggcaccatggctctttctcagggtctactgacattcagggatgtggccatagaattctctcaggaggagtggaaatgcctggaccctgctcagaggactctatacagagacgtgatgctggagaattataggaacctggtctccctggatatctcttccaaatgcatgatgaatacattgtcatcaacagggcaaggcaatacagaagtgatccacacagggacattgcagagacaagcaagttatcacattggagcattttgctcccaggaaattgagaaagacattcatgactttgtgtttcagtggcaagaagatgaaacaaatgaccatgaagcacccatgacagaaataaaaaagttgactagtagtacagaccgatatgatcaaaggcatgctggaaacaagcctattaaaggtcagcttgaatcaagatttcatttgcatttgcgaagacataggagaattcatactggagagaaaccttacaaatgtgaagaatgtgagaaagttttcagttgcaaatcacatcttgaaatacataggataattcatactggagagaaaccatacaaatgtaaggtttgcgacaaggcttttaagcatgattcacacctggcaaaacatactagaattcacaggggagacaaacattacacatgtaatgaatgtggcaaggtttttgatcaaaaagcaacccttgcatgtcatcatagaagtcatactggagagaaaccttataagtgtaatgagtgtggcaagacctttagtcagacatcacaccttgtgtaccatcatagactgcatactggagagaaaccttacaaatgtaatgagtgtggcaagaccttcgctcgaaattcagtcctcgtaattcataaggcagttcatactgcagagaaaccctataagtgtaatgaatgtggcaaggtttttaagcaacgagcaactcttgcaggacatcgtagagttcacactggagagaaaccttacagatgtgaagaatgcgacaaagttttcagtcgcaaatcacatcttgaaagacataggaggattcatactggagagaaaccatacaaatgtaaggtttgtgacaaggctttccggagtgattcacgtcttgcagaacatcagagagttcatactggagagagaccttacacatgtaatgaatgtggcaaggtttttagtacaaaagcgtacctcgcatgtcatcaaaaacttcatactggagagaaactttacgaatgtgaagaatgtgacaaagtttacattcgcaaatcacaccttgaaagacataggaggattcatacaggagagaaacctcacaagtgtggtgattgtggtaaagcctttaattcaccttcacaccttattaggcatcagagaatccatactggacagaaatcttacaaatgtcatcagtgtggcaaggtctttagtctgaggtcactccttgcagaacatcagaaaattccttttggagacaattgtttcaagtgcaatgagtatagcaaaccatcaagcattaatttgccaactttcttgtacaaagtggttgatatcggtaagcctatccctaaccctctcctcggtctcgattctacgtagtaatgaactagtccgtaacttgaaagtatttcgatttcttggctttatatatcttgtggaaaggacgacgcggtatgattagcatatccgat

SEQ ID NO: 3326 - DNA, 2810 bp, Homo sapiens
  source 1..2810: mol_type = genomic DNA
atcgattgatcaacaagtttgtacaaaaaagttggcaccatggagaacgaaaaggaaaatctcttttgtgagccacataaaaggggactaatgaaaacacctctgaaagaatccaccacagcaaatatcgtgttggcagagatccagcctgactttggccctttaaccacacctaccaagcccaaggaaggctctcagggagagccgtggacaccgacagccaacctgaaaatgctcatcagtgctgtgagccctgagatccgcaacagagatcagaaaaggggtttgtttgacaacagaagtggattacctgaggccaaagactgtatacacgaacacttatctggagatgaatttgagaaatcccaaccaagtcgaaaagagaaaagtttaggattattgtgtcataagttcttagcacgatatcctaattatcccaaccctgctgtgaataatgacatctgccttgacgaagtggcagaggaacttaatgttgaacgtcgacgcatttacgatatcgtgaacgtcctagagagtttacatatggtgagccgcctcgccaaaaacaggtacacttggcacgggcgacacaatctcaacaaaacccttggcaccttgaagagcatcggggaggagaataagtacgccgagcagattatgatgatcaaaaagaaagaatatgagcaagagtttgactttattaagagttacagtatagaggatcatatcatcaaatcaaacactggcccaaatggacacccagacatgtgttttgtggaactccctggagtggaatttcgggcagcttctgtaaacagccgcaaagacaagtctttaagggtaatgagccagaaatttgtgatgctgtttttggtgtcaacgcctcagatagtaagcctagaagttgctgccaagattttaattggggaggaccatgtggaagatttggataaaagcaagtttaaaacaaaaattaggaggttgtatgatatagctaatgttctgagtagcctggatcttatcaagaaagttcatgttacagaggaaagaggccgaaaaccagctttcaaatggaccggcccagaaatcagtccaaataccagtggctccagcccagtcattcattttactccctctgatttggaggtgagacggtcttcaaaagagaactgtgccaaaaacctcttttccacacgtgggaaaccaaactttactcgacacccatctcttatcaaattggtaaagagtatagaaagtgatcggagaaagataaattctgcgcccagtagccctatcaagaccaacaaagctgagagttctcagaattctgcacccttcccaagtaaaatggctcagctcgcagctatttgtaaaatgcagttagaagagcaatcaagtgaatccagacagaaagtgaaagtacagctggcaagatctggaccctgcaaaccagtagcccctctggaccccccagtgaatgctgagatggagctgacagcaccgtccctcatccagcccctgggaatggttcccctgatccccagccccttgtcatcagcagtgcccctgatcctacctcaggccccttcaggcccatcctatgccatctacctgcagcccactcaagcccaccaaagtgtgaccccaccccaaggcctgagcccaacggtgtgcaccacccactcttctaaagctactggctcaaaagactccacagatgccaccactgagaaggcagccaatgatacctcaaaggccagtgcctctaccaggcctggaagcttgctgccagcaccagagaggcaaggggcaaagagccgaaccagggagccagctggagaaagaggctcaaagagggcaagcatgctcgaggacagtggttccaaaaagaaatttaaagaggacctaaaaggacttgaaaatgtctccgcaaccttgttcccatcaggatacctaatccctctcacgcagtgctcatccctgggggcagagtccattttgtctggtaaagaaaactcaagtgctctttccccaaaccacaggatttacagctccccaattgcaggtgttattccagtgacatcatctgaactcactgctgttaattttccctcttttcatgtaacaccgttgaagctaatggtctcaccaacttccgtggcagccgtacctgtcgggaacagcccggctctcgcttcaagccaccctgttcccatccagaacccaagctcagccattgtaaacttcaccctgcagcacctgggactcatctcacccaatgtgcagttgtctgccagccctgggtctggaatcgttcctgtgtctccaagaatagagtctgttaatgtcgcaccagaaaatgcaggcactcagcaaggaagggccaccaactatgactcaccagtcccaggccagagccagccaaatggacaatcagttgctgtgacaggggcacaacagcctgttcctgtgacacccaaagggtcacaattagtggccgaaagtttcttccgtaccccaggtggacccaccaagccaaccagctcatcctgcatggattttgagggtgctaataaaacctccttaggaactctctttgtcccacagcgaaaactggaagtctcaacagaggatgtccatttgccaactttcttgtacaaagtggttgatatcggtaagcctatccctaaccctctcctcggtctcgattctacgtagtaatgaactagtccgtaacttgaaagtatttcgatttcttggctttatatatcttgtggaaaggacgacgcaaatgtgtgcatcgcacgtct

SEQ ID NO: 3327 - DNA, 1604 bp, Homo sapiens
  source 1..1604: mol_type = genomic DNA
atcgattgatcaacaagtttgtacaaaaaagttggcatggcggaggagcaggacctatcggaggtggagctgagccccgtgggctcggaggagccccgctgcctgtccccggggagcgcgccctcgctagggcccgacggcggcggcggcggatcgggcctgcgagccagcccggggccaggcgagctgggcaaggtcaagaaggagcagcaggacggcgaggcggacgatgacaagttccccgtgtgcatccgcgaggccgtcagccaggtgctcagcggctacgactggacgctggtgcccatgcccgtgcgcgtcaacggcgccagcaaaagcaagccgcacgtcaagcggcccatgaacgccttcatggtgtgggctcaggcagcgcgcaggaagctcgcggaccagtacccgcacctgcacaacgctgagctcagcaagacgctgggcaagctctggaggctgctgaacgaaagtgacaagcgccccttcatcgaggaggctgagcggctccgtatgcagcacaagaaagaccacccggactacaagtaccagcccaggcggcggaagaacgggaaggccgcccagggcgaggcggagtgccccggtggggaggccgagcaaggtgggaccgccgccatccaggcccactacaagagcgcccacttggaccaccggcacccaggagagggctcccccatgtcagatgggaaccccgagcacccctcaggccagagccatggcccacccacccctccaaccaccccgaagacagagctgcagtcgggcaaggcagacccgaagcgggacgggcgctccatgggggagggcgggaagcctcacatcgacttcggcaacgtggacattggtgagatcagccacgaggtaatgtccaacatggagacctttgatgtggctgagttggaccagtacctgccgcccaatgggcacccaggccatgtgagcagctactcagcagccggctatgggctgggcagtgccctggccgtggccagtggacactccgcctggatctccaagccaccaggcgtggctctgcccacggtctcaccacctggtgtggatgccaaagcccaggtgaagacagagaccgcggggccccaggggcccccacactacaccgaccagccatccacctcacagatcgcctacacctccctcagcctgccccactatggctcagccttcccctccatctcccgcccccagtttgactactctgaccatcagccctcaggaccctattatggccactcgggccaggcctctggcctctactcggccttctcctatatggggccctcgcagcggcccctctacacggccatctctgaccccagcccctcagggccccagtcccacagccccacacactgggagcagccagtatatacgacactgtcccggccctacccaactttcttgtacaaagtggttgatatcggtaagcctatccctaaccctctcctcggtctcgattctacgtagtaatgaactagtccgtaacttgaaagtatttcgatttcttggctttatatatcttgtggaaaggacgagacacccttgtaggaatcgcggtg

SEQ ID NO: 3328 - DNA, 1337 bp, Homo sapiens
  source 1..1337: mol_type = genomic DNA
atcgattgatcaacaagtttgtacaaaaaagttggcaccatggcgaactcggcaaatacaaacaccgtgcctaaattatacagatctgtgattgaagatgtcattaatgatgtgagagacatctttctggatgatggagtggatgaacaagtactgatggaactaaaaactttatgggaaaacaaactaatgcagtccagggcagtagatggatttcattcagaagagcagcagcttctactgcaagttcaacagcagcatcaaccccagcagcagcagcatcaccaccatcaccatcatcagcaagctcagcctcagcagacagtacctcagcaagcgcagacccagcaggttcttattcctgcatcacagcaagccacagcaccacaagttattgttccagattctaagttgatacagcatatgaatgcatcaaacatgagtgctgctgctacagctgctaccttagcactccctgcaggtgtgactcctgttcagcagatattaacaaattcaggccagcttcttcaggtggtcagagcagccaatggtgcccaatatatctttcagcctcagcagtcagtggttctacaacaacaggttataccacaaatgcagcctggtggagtacaagctcctgttatacagcaggtgctggctcctcttcctggagggatttcaccacagacaggtgtcatcatccagcctcagcaaatcttatttacaggaaataagactcaagttatacctacgacagtggcagcacctacaccagcccaagcacagataactgcaactggccagcagcaaccgcaggcccagcctgctcaaacacaagctccattggtcttacaagttgatggaactggggatacatcatctgaagaagatgaagatgaagaagaagactatgatgatgatgaggaggaagacaaagagaaagatggagctgaagatgggcaggtggaagaagagcccctcaatagtgaagatgatgtgagtgatgaggaaggacaggaactctttgacacagaaaatgttgttgtatgccaatatgataagatacacagaagtaaaaacaaatggaaatttcatctcaaggatggcattatgaatcttaatggaagagattatatattttccaaagccattggagatgcagaatggttgccaactttcttgtacaaagtggttgatatcggtaagcctatccctaaccctctcctcggtctcgattctacgtagtaatgaactagtccgtaacttgaaagtatttcgatttcttggctttatatatcttgtggaaaggacgaagtcagttctcctaaggaccgctc

SEQ ID NO: 3329 - DNA, 1016 bp, Homo sapiens
  source 1..1016: mol_type = genomic DNA
atcgattgatcaacaagtttgtacaaaaaagttggcaccatgagctcgtactttgtaaactccttctcggggcgttatccaaatggcccggactatcagttgctaaattatggcagtggcagctctctgagcggctcttacagggatcccgctgccatgcacaccggctcttacggctacaattacaatgggatggacctcagcgtcaaccgctcctcggcctcctccagccactttggggcggtgggcgagagctcgcgcgccttccccgcgcccgcccaggagccccgcttcaggcaagcggcttcgagctgctccctgtcctcgcccgagtccctgccctgcaccaacggcgacagccacggcgccaagccctctgcttcgtccccctccgaccaggcgacctcagccagctccagcgccaatttcaccgaaatagacgaggccagcgcgtcctcggagcctgaggaagcggcaagccagctaagcagccccagcctagctcgggcgcagccagagcccatggccacctccacagccgcgcccgaggggcagactccgcaaatattcccctggatgaggaagcttcacatcagccatgatatgaccgggccggacgggaaaagggcccggaccgcgtatacccgctaccagaccctggagctggaaaaggagttccacttcaaccgctacctgacccggcgacggcgcatcgagatcgcccacgcactctgcctgtccgagcgccagatcaagatctggttccagaaccggcgcatgaagtggaagaaggacaacaaattgaaaagtatgagcctggctacagctggcagcgccttccagcccttgccaactttcttgtacaaagtggttgatatcggtaagcctatccctaaccctctcctcggtctcgattctacgtagtaatgaactagtccgtaacttgaaagtatttcgatttcttggctttatatatcttgtggaaaggacgatcccagcggtgccatattcaagaa

SEQ ID NO: 3330 - DNA, 974 bp, Homo sapiens
  source 1..974: mol_type = genomic DNA
atcgattgatcaacaagtttgtacaaaaaagttggcatgctctggcaaaaacccacagctccggagcaagccccagccccggcccggccataccagggcgtccgtgtgaaggagccagtgaaggaactgctgaggaggaagcgaggccacgccagcagtggggcagcacctgcacctacggcggtggtgctgccccatcagcccctggcgacctacaccacagtgggtccttcctgcctggacatggaaggttctgtgtctgcagtgacagaggaggctgccctgtgtgccggctggctctcccagcccaccccggccaccctgcagcccctggccccatggacaccttacaccgagtatgtgccccatgaagctgtcagctgcccctactcagctgacatgtatgtgcagcccgtgtgccccagctacacggtggtggggccctcctcagtgttgacctatgcctctccgccactcatcaccaatgtcacgacaagaagctccgccacgcccgcagtggggcccccgctggagggcccagagcaccaggcacccctcacctatttcccgtggcctcagcccctttccacactacccacctccaccctgcagtaccagcctccggccccagccctacctgggccccagtttgtccagctccccatctctatcccagagccagtccttcaggacatggaagaccccagaagagccgccagctcgttgaccatcgacaagctgcttttggaggaagaggatagcgacgcctatgcgcttaaccacactctctctgtggaaggcttttacccaactttcttgtacaaagtggttgatatcggtaagcctatccctaaccctctcctcggtctcgattctacgtagtaatgaactagtccgtaacttgaaagtatttcgatttcttggctttatatatcttgtggaaaggacgatcaggtgttagatccggctgggtt

SEQ ID NO: 3331 - DNA, 1793 bp, Homo sapiens
  source 1..1793: mol_type = genomic DNA
atcgattgatcaacaagtttgtacaaaaaagttggcatgcgcaggaattccagtctcagtttccagatggagcgacccctcgaggagcaagtccagagcaagtggtcgtctagtcaaggccgcacaggaacaggagggtctgatgtcctccagatgcagaacagtgaacaccatggacaaagcatcaagactcaaactgactccatctcccttgaggatgtggctgtgaacttcaccctggaggagtgggctttgctggatcctggccagaggaatatctacagagatgtgatgcgggcaaccttcaagaacctggcctgtataggggaaaaatggaaagaccaggatattgaagatgaacacaaaaaccagggaagaaatctaagaagtcctatggttgaagcactctgtgaaaataaagaagattgtccatgtggaaaaagcactagccagattcctgatcttaatacgaacctggaaactcctactggattaaaaccatgtgactgcagtgtgtgtggggaagtcttcatgcatcaggtctcccttaataggcacatgagatctcacactgaacagaaaccaaatgagtgtcacgaatatggagagaagccacataaatgcaaagaatgtgggaaaaccttcactcgcagctccagtattcgaacccatgaaagaattcacactggagagaaaccctatgaatgtaaggaatgtggcaaagccttcgcatttctcttttcctttcgaaaccatataagaattcatactggagagacaccctatgaatgtaaggaatgtgggaaggcattcagatatctcactgctcttcggcgccatgaaaaaaatcacactggagagaaaccctacaaatgtaaacagtgtggaaaagcctttatatattaccagccttttctaacccatgaaaggactcacactggagagaaaccttatgaatgtaagcaatgtgggaaagccttcagttgtcccacgtacttacggagtcatgagaaaactcatactggagagaaaccttttgtatgtagggaatgtgggagagccttcttttctcactcaagccttcgaaaacacgtgaaaacccacaccggagttcaaccttatacatgtaagaaatgtggggaagccttcaagtcatctagttcctgtgaagtgcacgaaagaactcattttggagaaaaaccctatgaatgtaaacaatgtggtaaagccttcaattcttcaagttaccttcagttgcacgaaagagttcacactggcgagaaaacttacgaatgtaaagaatgtggtaaagcctttctttattccactcactttcgaatccatgaaagaacccatactagagagaaaccctatgaatgcaaacagtgtggtcgggtcttcatttacttcagtcaccttcgaaggcacgaaagaagtcacactggagtgaaaccatgtgagtgtaagcagtgtggcaaagctttcacttgtttaaattccctgaaagtacacaaaagaattcatactggagaaagaccctttcagtgtagacaatgtggtaaagccttcagttactcaaagtctttgcacgtgcacgaaaggactcatagtagacagaagccctacccaactttcttgtacaaagtggttgatatcggtaagcctatccctaaccctctcctcggtctcgattctacgtagtaatgaactagtccgtaacttgaaagtatttcgatttcttggctttatatatcttgtggaaaggacgacacaccatctctttactgctccga

SEQ ID NO: 3332 - DNA, 1826 bp, Homo sapiens
  source 1..1826: mol_type = genomic DNA
atcgattgatcaacaagtttgtacaaaaaagttggcatggactcggtggcttttgaggatgtagatgtgaacttcacccaggaggagtgggctttgctagatccttcccagaagaatctctacagagatgtgatgtgggaaaccatgaggaatctggcctctatagggaaaaaatggaaggaccagaacattaaagatcactacaaacaccgagggagaaatctaagaagtcatatgttagaaagactctatcaaactaaggatggtagtcagcgtggaggaatttttagccagtttgcaaatcagaatctgagcaagaaaatccctggagtgaaactctgtgaaagcattgtatatggagaagtcagcatgggtcagtcatcccttaatagacacatcaaagatcacagtggacatgaaccaaaggaatatcaggaatatggagagaagccagatacacgtaaccagtgttggaaacccttcagttctcaccactcctttcgaacacatgagataattcacactggagagaaactctatgattgtaaggaatgtggaaaaaccttcttttctctcaaaagaattagaagacacatcatcacacacagtggatatacaccatataaatgtaaggtgtgtgggaaagcttttgattatcccagtagatttcgaacacatgaaagaagtcacactggagagaaaccctatgaatgtcaggaatgtggaaaagccttcacttgtatcacaagtgttcgaagacacatgataaagcacactggagatggaccttataaatgtaaggtatgtgggaaaccctttcattctctgagttcatttcaagtgcatgaaagaattcacactggagaaaaaccctttaaatgtaagcaatgtggtaaagccttcagttgttccccaaccttacgaatacatgaaagaacccatactggagagaaaccttatgaatgcaagcagtgtgggaaggccttcagttatctcccctcccttcgactacatgaaagaattcacactggtgagaaacccttcgtatgtaaacaatgtggtaaagcctttagatctgccagtacctttcaaatacatgaaaggactcacactggagaaaaaccttatgaatgtaaggaatgtggggaagcattcagttgtatcccaagtatgcgaagacacatgataaaacatactggagaaggaccttataaatgtaaggtatgtgggaaaccctttcattctctgagtccatttcgaatacatgaaagaactcacactggagagaaaccttatgtatgtaaacattgtggtaaagctttcgtttcttcaacatcaattcgaatacatgaaagaactcatactggagagaaaccctatgagtgtaagcaatgtgggaaagccttcagttatctcaactcctttcgaacacatgaaatgattcacactggtgagaaaccctttgaatgtaagcgatgtggtaaagcctttagatcttctagttcctttcgactacatgaaaggactcacactggacagaaaccctatcattgcaaggaatgtgggaaagcctattcttgccgtgccagctttcagagacacatgttaacacatgctgaagatggaccaccttataaatgcatgtgggaaagcctttacccaactttcttgtacaaagtggttgatatcggtaagcctatccctaaccctctcctcggtctcgattctacgtagtaatgaactagtccgtaacttgaaagtatttcgatttcttggctttatatatcttgtggaaaggacgactcactgagcggacgcgattacct

SEQ ID NO: 3333 - DNA, 2333 bp, Homo sapiens
  source 1..2333: mol_type = genomic DNA
accgccaccatgggactgttgacattcagggatgtggccgtagaattctctttggaggagtgggaacacctggaaccagctcagaagaatttgtatcaggatgtgatgttagaaaactacagaaacctggtctctctgggtcttgttgtctctaagccggacctgatcacctttttggaacaaaggaaagagccttggaatgtgaagagtgaggagacagtagccatccagccagatgtgttttcgcattataacaaggacctgttgacagagcactgcacagaagcttcattccaaaaagtgatatcgaggagacatgggagctgtgatcttgagaatttacatttaagaaaaaggtggaaaagggaggagtgtgaagggcacaatggatgttatgatgaaaagacttttaaatatgatcaatttgatgaatcctctgttgaaagtttgtttcaccagcaaatactttcttcttgtgccaaaagctataactttgatcaatataggaaggtctttactcattcatcattgcttaatcaacaagaggaaatagatatttggggaaaacatcacatatatgataaaacttcagtgttatttaggcaggtctctactctaaatagttaccgaaatgtttttattggagagaaaaattatcattgcaataattctgaaaaaaccttgaaccaaagctcaagccctaaaaatcatcaggaaaattattttctagaaaaacaatacaaatgtaaagaatttgaggaagtctttcttcagagtatgcatgggcaagagaaacaagaacagtcttacaaatgtaataaatgtgtagaagtttgtacccagtcattaaaacatattcaacatcagaccatccatatcagagaaaactcatatagctataacaaatatgataaagatcttagtcagtcatcaaatcttagaaagcagataatccataatgaagagaaaccatacaaatgtgaaaaatgtggggatagcttaaaccatagtttgcaccttactcaacatcagatcattcctaccgaagagaaaccctgtaaatggaaagaatgtggcaaggtctttaaccttaactgtagtttataccttactaaacagcagcaaattgatactggagaaaacctttacaaatgtaaagcatgtagcaaatcttttactcgttcctccaatcttattgtgcatcagagaattcacactggagagaaaccatacaaatgtaaagaatgtggcaaagcctttcgctgtagttcataccttactaaacataagcgaattcatactggagagaaaccttataaatgtaaagaatgtggaaaagcttttaaccgtagttcatgccttactcaacatcagacaactcatacaggagaaaaactttacaaatgtaaagtatgtagcaaatcttatgctcgttcttcaaatcttattatgcatcagagagttcatactggagagaagccttataaatgtaaagaatgtggcaaagtctttagccgtagttcttgccttactcaacatcggaaaattcatactggagaaaatctttacaaatgcaaagtatgtgctaaaccttttacttgtttctcaaatcttattgtgcatgagagaattcatactggagagaaaccctataaatgtaaagaatgtggcaaagcctttccttatagttcacaccttattcgacatcatcgaattcatactggagaaaaaccatacaaatgtaaagcatgtagcaaatcttttagtgactcctcaggtcttactgtgcatcggcgaactcatactggagagaaaccctatacatgtaaagaatgtggcaaagcctttagttatagttcagatgttattcagcatcggagaattcatactggccagagaccctacaaatgtgaagaatgtggcaaagccttcaactataggtcatacctcactacacatcagagaagtcatactggagagagaccctacaaatgtgaagaatgtggcaaagccttcaactctaggtcatacctcactacacatcggagaagacatactggagagagaccctacaaatgtgatgaatgtggtaaagccttcagctataggtcatacctcactacacatcggagaagtcatagtggagagagaccctacaaatgtgaagaatgtggcaaagcctttaactctaggtcatacctcattgcacatcagagaagtcatactagagaaaaactttagtaatgaactagtccgtaacttgaaagtatttcgatttcttggctttatatatcttgtggaaaggacgatcgaaagcacgctgcggagcgtga

SEQ ID NO: 3334 - DNA, 938 bp, Homo sapiens
  source 1..938: mol_type = genomic DNA
atcgattgatcaacaagtttgtacaaaaaagttggcatgcaagctgtagtgcccttgaacaagatgacagccatctcaccagaacctcaaactctggcctcgactgaacaaaatgaggtcccaagagtggttacttctggggaacaagaagctattttaagaggaaatgctgctgatgcagagtctttcagacagaggtttaggtggttttgttactcagaagtagctggacccaggaaagctctgagtcaactctgggagctctgcaatcagtggctgagaccagacattcacacgaaagaacagattttagagcttctggtgtttgagcagttcctgaccattttgcctggggagatcaggatttgggtaaagtcacaacatcctgagagtagtgaggaagtggtgaccctaatagaagatttgacccagatgcttgaagaaaaagatccagtctctcaagattctactgtttcccaagaggagaactcaaaagaggataaaatggtcactgtttgtcccaatactgagtcctgtgaatctataacattgaaggatgtagctgtgaacttttcaagaggagagtggaagaagctggagccttttcaaaaggagctatataaggaagtgctactggaaaacctcaggaacctagaatttctggactttccagtttcaaaattagagttgatttcccagctaaagtgggttgaattgccatggctgctggaagaagtctcaaaaagctcccgactaggaagtgtgatttgcccaactttcttgtacaaagtggttgatatcggtaagcctatccctaaccctctcctcggtctcgattctacgtagtaatgaactagtccgtaacttgaaagtatttcgatttcttggctttatatatcttgtggaaaggacgaactaatgtcagataccacctcctc

SEQ ID NO: 3335 - DNA, 692 bp, Homo sapiens
  source 1..692: mol_type = genomic DNA
atcgattgatcaacaagtttgtacaaaaaagttggcatgacgacccccaataaaggaaacaaggccttgaaggtgaagcgggagccgggtgagaatggcaccagcctgacggatgaggagctggtgaccatgtcggtgcgggagctgaaccagcacctgcggggcctgtccaaggaggagatcgtccagctgaagcagcgccggcgcacgctcaagaaccgcggctacgctgccagctgccgcgtgaagcgggtgacgcagaaggaggagctggagaagcagaaggcggagctgcagcaggaggtggagaagctggcctcagagaacgccagcatgaagctggagctcgacgcgctgcgctccaagtacgaggcgctgcagaccttcgcccggacggtggcccgcagccccgtggcgccagcccggggcccccttgccgccggcctggggcccctcgtcccaggcaaggtggccgccaccagcgtcatcacaatagtaaagtccaagacggatgcccgatcgtacccaactttcttgtacaaagtggttgatatcggtaagcctatccctaaccctctcctcggtctcgattctacgtagtaatgaactagtccgtaacttgaaagtatttcgatttcttggctttatatatcttgtggaaaggacgatatgatcaaagagggtttgcttcc

SEQ ID NO: 3336 - DNA, 986 bp, Homo sapiens
  source 1..986: mol_type = genomic DNA
atcgattgatcaacaagtttgtacaaaaaagttggcatgtcggcgacggggcccatcagtaactattacgtggactcgctcatctctcacgacaatgaagacctcctagcgtccaggtttccggccaccggggctcatcccgccgccgccagacccagcggtttggtgccggactgtagcgattttccgtcctgtagcttcgcgcccaagccggcagtgttcagcacgtcgtgggcgcccgtgccctctcagtcgtccgtggtatatcacccgtacggcccccagccccacctcggcgccgacacgcgctacatgcggacttggctcgagccgctgtccggcgccgtctccttccccagcttcccggccgggggccgtcactacgccctcaagccggacgcctaccccgggcgccgcgcggactgcggcccaggggagggccgcagctacccggactacatgtacggctcgcccggggagctgcgcgaccgcgccccgcagacactgccctcgcccgaggcggacgcgctcgccggcagcaagcacaaagaggagaaggctgacctggaccccagcaaccccgtggccaactggattcacgcccgctccacgaggaagaagcgctgcccctacaccaagtaccagacgctggaactggagaaggagtttctcttcaatatgtatttaaccagggaccgtcggtatgaggtggcccgggttctcaatctcaccgagcggcaggtcaaaatctggtttcagaatcgaaggatgaagatgaaaaagatgaataaagagaaaaccgacaaggagcagtcctacccaactttcttgtacaaagtggttgatatcggtaagcctatccctaaccctctcctcggtctcgattctacgtagtaatgaactagtccgtaacttgaaagtatttcgatttcttggctttatatatcttgtggaaaggacgacgcggctacgtagctttttcatga

SEQ ID NO: 3337 - DNA, 1403 bp, Homo sapiens
  source 1..1403: mol_type = genomic DNA
atcgattgatcaacaagtttgtacaaaaaagttggcatgccccaactctccggaggaggtggcggcggcgggggggacccggaactctgcgccacggacgagatgatccccttcaaggacgagggcgatcctcagaaggaaaagatcttcgccgagatcagtcatcccgaagaggaaggcgatttagctgacatcaagtcttccttggtgaacgagtctgaaatcatcccggccagcaacggacacgaggtggccagacaagcacaaacctctcaggagccctaccacgacaaggccagagaacaccccgatgacggaaagcatccagatggaggcctctacaacaagggaccctcctactcgagttattccgggtacataatgatgccaaatatgaataacgacccatacatgtcaaatggatctctttctccacccatcccgagaacatcaaataaagtgcccgtggtgcagccatcccatgcggtccatcctctcacccccctcatcacttacagtgacgagcacttttctccaggatcacacccgtcacacatcccatcagatgtcaactccaaacaaggcatgtccagacatcctccagctcctgatatccctactttttatcccttgtctccgggtggtgttggacagatcaccccacctcttggctggcaaggtcagcctgtatatcccatcacgggtggattcaggcaaccctacccatcctcactgtcagtcgacacttccatgtccaggttttcccatcatatgattcccggtcctcctggtccccacacaactggcatccctcatccagctattgtaacacctcaggtcaaacaggaacatccccacactgacagtgacctaatgcacgtgaagcctcagcatgaacagagaaaggagcaggagccaaaaagacctcacattaagaagcctctgaatgcttttatgttatacatgaaagaaatgagagcgaatgtcgttgctgagtgtactctaaaagaaagtgcagctatcaaccagattcttggcagaaggtggcatgccctctcccgtgaagagcaggctaaatattatgaattagcacggaaagaaagacagctacatatgcagctttatccaggctggtctgcaagagacaattatggtaagaaaaagaagaggaagagagagaaactacaggaatctgcatcaggtacaggtccaagaatgacagctgcctacatctgcccaactttcttgtacaaagtggttgatatcggtaagcctatccctaaccctctcctcggtctcgattctacgtagtaatgaactagtccgtaacttgaaagtatttcgatttcttggctttatatatcttgtggaaaggacgaaagtacatccgcgtcaccgtccca

SEQ ID NO: 3338 - DNA, 2207 bp, Homo sapiens
  source 1..2207: mol_type = genomic DNA
atcgattgatcaacaagtttgtacaaaaaagttggcaccatgcaggaggttgtgctgttggatgagagttcaggaccaccaagccagctgctttggacccgccaggatacccagctccctcaggaaagcgctctattacctgctccatatcctgccttcactaaagatggaagccaaggaaacctgccgcaagcagatatcacactaatgagccaggcccaagagtcagtgacatttgaggatgtagctgtgaacttcactaacagggagtggcagtgtctgacctacgctcaaaggcatctctataaggatgtgatgttggaaaattatgggaacatggtatcacttggatttccatttcctaaacctcctttaatctctcatctggagcgagaagtagacccctgtgtgcaggatccacaggacagggagtccctaagctgctcctacccagtgtcagctgacaagatgtggcctgagaatgaaaaggcaagttcacaacaagagatttttgaaaatggagaagcctactggatgaaatttaacagtctcctaaaagttgattcccgggatcctaaggttagagaagtttgtgttcaggatgtcaaattagagaatcaatgggaaacatctataagggagaaactgagagaagagaaagaaggctctgaggaagtgacctgcaaaaaaggaaagaaccagaaagtgcttagtaaaaacttgaatccaaactcaaaacatagtcaatgtaataaagttcttatagcacagaaactccatgaatgtgccaggtgtggcaaaaacttcagttggcactcagatctaattctccatgagcaaattcattctggtgagaaaccccatgtgtgtaatgagtgtgggaaagcattcaagaccagaaatcagctttctatgcaccggataatccacacaggggagaaaccttttaattgcacccagtgtgggaaggctttcaacagtagatcagctctttgccgacataaaaaaacccacagtggggagaagcctcacgagtgcagggactgtgggaaggccttcaagaccaggaaccgtctctgtatgcatcagcttatccacaccggggagaagccttacaaatgtaactgctgtgggaaggccttccagtttaagcattcccttaccatccatggcagaatccacactggggagaagccatatgaatgtgaggagtgcgggaaggccttcagtgggagttcagacctcaccaaacacataagaatccacactggggaacgaccttatgagtgcagcaagtgtggaagggccttcagtcggagctcagacctaagcaaacacaaacgaatccatactcgggagaaacactatgggtgtccccagtgtggaaaagacttcagcatcaaggcagaactcaccaaacacagaaggatccacactgaagagaaacgttacaggtgtgaggagtgtgggaaagcctttcgtcataactgtaagcgcagggctcatgaacgagagcatacaggggagaagccctatcaatgcagggattgtgggaaaaccttccaagataagcactgccttaccatccatcagagaatccacactggagagaaaccttacaaatgtttagagtgtgggaaagctttcagtgggaagtcaaacttgaccaatcatcgaagaattcacactggagagaagcctcacaaatgtgaggtatgtggaatggccttccatcatagttcagtcctgaggcagcacaaaagaatccacactggtgagaagccatacacctgcagtgagtgtggcacgtccttccgtcagggctcagctctgattggacataagcgagttcatactggggagaaaccttatgaatgtgaggaatgtggaaaagcttttagagtgagctcaaatcttactggacataagaaaagaaaacatcaagtatggagtacccatgaacttgatgggagtaggaaatccctctctccagtgactgtttctcagacctcagtagtcagtattttgaccagtgccttgccaactttcttgtacaaagtggttgatatcggtaagcctatccctaaccctctcctcggtctcgattctacgtagtaatgaactagtccgtaacttgaaagtatttcgatttcttggctttatatatcttgtggaaaggacgagtatacaaacaccttcaccacgga

SEQ ID NO: 3339 - DNA, 1922 bp, Homo sapiens
  source 1..1922: mol_type = genomic DNA
atcgattgatcaacaagtttgtacaaaaaagttggcaccatgcctcaggtgacatttaatgatgtggctatagacttcactcatgaagagtggggatggctcagttctgctcagagggacttatacaaggatgtgatggtccagaattatgagaacctggtctctgtagcaggtctttctgtaactaagccatatgtgatcacgttattggaggatggaaaagagccctggatgatggagaaaaaactgtcaaaaggtatgattccagattgggaatcaagatgggaaaacaaggaattatcaacaaagaaggataattatgatgaagattcaccccaaacagtaataatagaaaaagttgtaaaacaaagttatgaattttcaaattctaagaagaatttggaatatatagagaagttggaagggaagcatggaagtcaggtagaccatttcagaccagcaattctcacctctagagaaagccccactgcagacagtgtttacaaatacaatatatttagaagcacctttcattcaaagtctactctttctgaaccacaaaaaatttctgctgaagggaattcacacaaatatgatatattaaagaagaacttaccaaaaaagtcagttataaaaaatgagaaagtcaatggtggaaagaaacttttgaattctaataaaagtggggcagccttcagccagggcaaatctcttacccttccccagacttgtaatagagagaaaatctatacatgcagtgaatgtgggaaagcctttggcaaacagtcaatcctcaatcgccactggagaattcatacaggagagaagccctatgaatgtcgtgaatgtgggaagacttttagccatggctcatcccttacacgacatctgataagccatagtggagagaaaccttacaaatgtattgaatgtgggaaggcctttagccatgtctcatcacttactaaccatcagagcactcacactggagagaaaccatatgaatgtatgaactgtggaaagtcttttagtcgtgtgtcccatcttattgaacatctaagaattcatactcaagaaaaactctatgagtgtcgtatatgtggaaaggccttcattcataggtcatctctcattcaccatcagaaaatccatactggagagaagccttatgaatgtagagaatgtgggaaagctttctgctgtagctcacaccttactcgacatcaaagaattcacactatggagaaacaatatgaatgcaacaaatgtctgaaagtctttagtagcctctcatttcttgttcagcatcagagtattcatactgaagaaaaaccctttgaatgtcagaaatgcaggaaatccttcaaccagcttgaatcactgaatatgcatttgagaaatcacattagattgaaaccctacgaatgcagtatatgtgggaaagcctttagtcataggtcatccctgcttcaacatcacagaattcatactggagagaaaccttatgaatgtattaaatgtgggaagaccttcagctgtagttcaaaccttaccgtacatcagagaattcacactggagaaaagccatataaatgtaatgagtgtgggaaagcttttagcaaaggctcaaatcttactgcccatcaaagagtacataatggagagaaacccaatagtgtggtaagtgtggaaaagcctttagactatatgaatcactatacatgtgagaaatcttacagaagagaaactgtattgccaactttcttgtacaaagtggttgatatcggtaagcctatccctaaccctctcctcggtctcgattctacgtagtaatgaactagtccgtaacttgaaagtatttcgatttcttggctttatatatcttgtggaaaggacgagttaaaaaaattttagatttccgt

SEQ ID NO: 3340 - DNA, 1942 bp, Homo sapiens
  source 1..1942: mol_type = genomic DNA
atcgattgatcaacaagtttgtacaaaaaagttggcaccatggctgaagaatcaagaaagccttcagccccatccccaccagaccagactcctgaagaggatcttgtaatcgtcaaggtagaggaggatcatggttgggaccaggaatctagtctgcatgaaagtaaccctcttggccaagaagtgttccgcctgcgcttcaggcagttacgctaccaggagacactaggaccccgagaagctctgatccaactacgggccctttgccatcagtggctgaggccagatttgaacaccaaggaacagatcctggagctgctggtgctggagcagttcttgaccatcctacctgaggagctccagacactggttaaggaacatcagctagagaacggagaggaggtggtgaccctattagaggatttggaaaggcagattgatatactaggacgaccagtctcagctcgcgtacatggacatagggtactctgggaggaggtagtacattcagcatctgcaccagagcctccaaatactcagctccaatctgaggcaacccaacataaatctccagtgccccaagagtcacaagagagagccatgtctacttcccagagtcctactcgttcccagaaaggaagttctggagaccaggaaatgacagctacacttctcacagcagggttccagactttggagaagattgaagacatggctgtgtcccttattcgagaggagtggcttcttgatccatcacagaaggatctgtgtagagataacaggccagaaaatttcagaaacatgttctccctgggtggtgagaccaggagtgagaacagggaattagcttcaaaacaggtaatatctactggaatccagccacatggagagacagctgccaaatgcaacggggatgttatcaggggtcttgagcatgaagaagcccgagaccttctgggcagattagagaggcagcggggaaatcccacacaagagagacgacataaatgtgatgaatgtgggaaaagctttgctcagagctcaggccttgttcgccactggagaatccacactggggagaaaccctatcagtgtaatgtgtgtggtaaagccttcagttacaggtcagcccttctttcacatcaggatatccacaacaaagtaaaacgctatcactgtaaggagtgtggcaaagccttcagtcagaacacaggcctgattctgcaccagagaatccacactggggagaagccatatcagtgcaatcagtgtgggaaggctttcagtcagagtgcgggccttattctgcaccagagaatccacagtggagagagaccctatgaatgtaatgagtgtgggaaagctttcagtcatagctcacacctcattggacatcagagaatccacactggggagaagccctatgagtgtgatgagtgtgggaaaaccttcaggcggagctcacatcttattggtcatcagaggagccacactggggagaaaccctacaaatgcaatgagtgtgggagggccttcagtcagaagtcaggccttattgaacatcagagaatccacactggagaaagaccctataaatgtaaagaatgtgggaaagctttcaatgggaacactggtctcattcaacacctgagaattcacacaggggagaagccctaccaatgtaatgagtgtgggaaagcctttattcagaggtcaagtctcattcgacatcagagaatccacagtggtgaaaaatctgaatccataagcgttttgccaactttcttgtacaaagtggttgatatcggtaagcctatccctaaccctctcctcggtctcgattctacgtagtaatgaactagtccgtaacttgaaagtatttcgattcttggctttatatatcttgtggaaaggacgacgggctcgaaacttatccgtggac

SEQ ID NO: 3341 - DNA, 668 bp, Homo sapiens
  source 1..668: mol_type = genomic DNA
atcgattgatcaacaagtttgtacaaaaaagttggcatggcgcagtctattaacatcacggagctgaatctgccgcagctagaaatgctcaagaaccagctggaccaggaagtggagttcttgtccacgtccattgctcagctcaaagtggtacagaccaagtatgtggaagccaaggactgtctgaacgtgctgaacaagagcaacgaggggaaagaattactcgtcccactgacgagttctatgtatgtccctgggaagctgcatgatgtggaacacgtgctcatcgatgtgggaactgggtactatgtagagaagacagctgaggatgccaaggacttcttcaagaggaagatagattttctaaccaagcagatggagaaaatccaaccagctcttcaggagaagcacgccatgaaacaggccgtcatggaaatgatgagtcagaagattcagcagctcacagccctgggggcagctcaggctactgctaaggcctgcccaactttcttgtacaaagtggttgatatcggtaagcctatccctaaccctctcctcggtctcgattctacgtagtaatgaactagtccgtaacttgaaagtatttcgatttcttggctttatatatcttgtggaaaggacgaagcatcgatgactcagtgtaaccc

SEQ ID NO: 3342 - DNA, 1841 bp, Homo sapiens
  source 1..1841: mol_type = genomic DNA
atcgattgatcaacaagtttgtacaaaaaagttggcatggactgcgtgatctttgaggaagtggctgtgaacttcaccccagaagagtgggcattgctggatcatgctcagaggagcctctacagagatgtgatgctggagacctgcaggaaccttgcctccttggattgttacatttatgttagaaccagtggatcaagttctcagagggacgtttttgggaatggaatatccaatgatgaagaaattgtaaagttcacaggaagtgattcctggtctatttttggagaaaattggagatttgataacactggagatcagcaccaaatcccacagaggcatctgagaagtcagctggggagactctgtgaaagtaatgaaggtcatcaatgcggagagaccttgagccagactgcgaaccttcttgtgcacaagagttaccctaccgaagctaaaccctctgagtgcactaagtgtggcaaagccttcgagaatcggcagagatctcacactggacagagaccgtgtaaggaatgtgggcaagcctgcagctgcctctcctgccaaagccctcctatgaaaacgcagactgtagagaaaccctgtaattgccaggactcaaggacagcatctgtgacatacgtgaaaagtctcagcagtaaaaagtcttatgaatgtcagaaatgtggaaaagctttcatttgtccctcatctttcaggggacatgtgaatagtcatcatgggcagaaaacccatgcatgtaaagtatgtgggaagacctttatgtattactcctaccttacacggcacgtaagaactcacacaggagagaaaccctatgagtgtaaggagtgtgggaaagccttcagctgtccctcgtactttcgagaacatgtcagaacacacactggagagaaaccgtatgaatgtaagcattgtggaaaatcattcagctgttactcctcctttagagatcacgtgaggacgcacactggagagaaaccctgtcagtgtaaacattgcggaaaagcgttcacttgttactcgtctcttcgagaacatgggagaacgcacagtggagagaaaccctatgaatgtaaggaatgcggcaaagccttcaggtacccctcctctctgcgagcacacatgagaatgcacaccggagagaagccctatgtgtgcaagcagtgtgggaaggccttcggatgtcccacttactttagaagacatgtgaaaacacacagcggggtgaagccctatcaatgtaaagagtgtgggaaagcctacagtttttcctcctcccttcgaatccacgtgaggacgcatactggagagaagccctttgagtgtaagcattgtgggaaagccttcagctgtcactcctcccttcgagagcatgtgcgaacccacagcggagagaaaccgtacgaatgtaatcaatgtgggaaagccttcagccacgctcagtactttcaaaagcatgtgagatcacacagtggggtcaaaccctacgaatgtactgaatgtgggaaagcctacagttgttcctcgtcccttcgtgtgcacgtgagaacgcacactggagagagaccgtatgaatgcaagcagtgtgggaaaaccttcaggtatctcgcatcgcttcaagcacatgtgagaacacatgctggagcgtgcccaactttcttgtacaaagtggttgatatcggtaagcctatccctaaccctctcctcggtctcgattctacgtagtaatgaactagtccgtaacttgaaagtatttcgatttcttggctttatatatcttgtggaaaggacgattagtactatccctgagcctctgc

SEQ ID NO: 3343 - DNA, 1661 bp, Homo sapiens
  source 1..1661: mol_type = genomic DNA
atcgattgatcaacaagtttgtacaaaaaagttggcatggggggctgcaggaaatttggtgagcggcctccacctaaacgacttactagggaagctatgcgaaattatttaaaagagcgaggggatcaaacagtacttattcttcatgcaaaagttgcacagaagtcatatggaaatgaaaaaaggtttttttgcccacctccttgtgtatatcttatgggcagcggatggaagaaaaaaaaagaacaaatggaacgcgatggttgttctgaacaagagtctcaaccgtgtgcatttattgggataggaaatagtgaccaagaaatgcagcagctaaacttggaaggaaagaactattgcacagccaaaacattgtatatatctgactcagacaagcgaaagcacttcatgttgtctgtaaagatgttctatggcaacagtgatgacattggtgtgttcctcagcaagcggataaaagtcatctccaaaccttccaaaaagaagcagtcattgaaaaatgctgacttatgcattgcctcaggaacaaaggtggctctgtttaatcgactacgatcccagacagttagtaccagatacttgcatgtagaaggaggtaattttcatgccagttcacagcagtggggagccttttttattcatctcttggatgatgatgaatcagaaggagaagaattcacagtccgagatggctacatccattatggacaaacagtcaaacttgtgtgctcagttactggcatggcactcccaagattgataattaggaaagttgataagcagaccgcattattggatgcagatgatcctgtgtcacaactccataaatgtgcattttaccttaaggatacagaaagaatgtatttgtgcctttctcaagaaagaataattcaatttcaggccactccatgtccaaaagaaccaaataaagagatgataaatgatggcgcttcctggacaatcattagcacagataaggcagagtatacattttatgagggaatgggccctgtccttgccccagtcactcctgtgcctgtggtagagagccttcagttgaatggcggtggggacgtagcaatgcttgaacttacaggacagaatttcactccaaatttacgagtgtggtttggggatgtagaagctgaaactatgtacaggtgtggagagagtatgctctgtgtcgtcccagacatttctgcattccgagaaggttggagatgggtccggcaaccagtccaggttccagtaactttggtccgaaatgatggaatcatttattccaccagccttacctttacctacacaccagaaccagggccgcggccacattgcagtgcagcaggagcaatccttcgagccaattcaagccaggtgccccctaacgaatcaaacacaaacagcgagggaagttacacaaacgccagcacaaattcaaccagtgtcacatcatctacagccacagtggtatcctacccaactttcttgtacaaagtggttgatatcggtaagcctatccctaaccctctcctcggtctcgattctacgtagtaatgaactagtccgtaacttgaaagtatttcgatttcttggctttatatatcttgtggaaaggacgaccaatagatccttcaagcagaacc

SEQ ID NO: 3344 - DNA, 1460 bp, Homo sapiens
  source 1..1460: mol_type = genomic DNA
accgccaccatgtctgagactcctgctcagtgtagcattaagcaggaacgaatttcatatacacctccagagagcccagtgccgagttacgcttcctcgacgccacttcatgttccagtgcctcgagcgctcaggatggaggaagactcgatccgcctgcctgcgcacctgcgcttgcagccaatttactggagcagggatgacgtagcccagtggctcaagtgggctgaaaatgagttttctttaaggccaattgacagcaacacgtttgaaatgaatggcaaagctctcctgctgctgaccaaagaggactttcgctatcgatctcctcattcaggtgatgtgctctatgaactccttcagcatattctgaagcagaggaaacctcggattcttttttcaccattcttccaccctggaaactctatacacacacagccggaggtcatactgcatcagaaccatgaagaagataactgtgtccagaggacccccaggccatccgtggataatgtgcaccataaccctcccaccattgaactgttgcaccgctccaggtcacctatcacgacaaatcaccggccttctcctgaccccgagcagcggcccctccggtcccccctggacaacatgatccgccgcctctccccggctgagagagctcagggacccaggccgcaccaggagaacaaccaccaggagtcctaccctctgtcagtgtctcccatggagaataatcactgcccagcgtcctccgagtcccacccgaagccatccagcccccggcaggagagcacacgcgtgatccagctgatgcccagccccatcatgcaccctctgatcctgaacccccggcactccgtggatttcaaacagtccaggctctccgaggacgggctgcatagggaagggaagcccatcaacctctctcatcgggaagacctggcttacatgaaccacatcatggtctctgtctccccgcctgaagagcacgccatgcccattgggagaatagcagactgtagactgctttgggattacgtctatcagttgctttctgacagccggtacgaaaacttcatccgatgggaggacaaagaatccaaaatattccggatagtggatcccaacggactggctcgactgtggggaaaccataagaacagaacaaacatgacctatgagaaaatgtccagagccctgcgccactactacaaactaaacattatcaggaaggagccaggacaaaggcttttgttcaggtttatgaaaaccccagatgaaatcatgagtggccgaacagaccgtctggagcacctagagtcccaggagctggatgaacaaatataccaagaagatgaatgctagtaatgaactagtccgtaacttgaaagtatttcgatttcttggctttatatatcttgtggaaaggacgacctccgcacgaccgattcagtgtc

SEQ ID NO: 3345 - DNA, 2339 bp, Homo sapiens
  source 1..2339: mol_type = genomic DNA
atcgattgatcaacaagtttgtacaaaaaagttggcatgcctgctgatgtgaatttatcccagaagcctcaggtcctgggtccagagaagcaggatggatcttgcgaggcatcagtgtcatttgaggacgtgaccgtggacttcagcagggaggagtggcagcaactggaccctgcccagagatgcctgtaccgggatgtgatgctggagctctatagccatctcttcgcagtggggtatcacattcccaacccagaggtcatcttcagaatgctaaaagaaaaggagccgcgtgtggaggaggctgaagtctcacatcagaggtgtcaagaaagggagtttgggcttgaaatcccacaaaaggagatttctaagaaagcttcatttcaaaaggatatggtaggtgagttcacaagagatggttcatggtgttccattttagaagaactgaggctggatgctgaccgcacaaagaaagatgagcaaaatcaaattcaacccatgagtcacagtgctttcttcaacaagaaaacattgaacacagaaagcaattgtgaatataaggaccctgggaaaatgattcgcacgaggccccaccttgcttcttcacagaaacaacctcagaaatgttgcttatttacagaaagtttgaagctgaacctagaagtgaacggtcagaatgaaagcaatgacacagaacagcttgatgacgttgttgggtctggtcagctattcagccatagctcttctgatgcctgcagcaagaatattcatacaggagagacattttgcaaaggtaaccagtgtagaaaagtctgtggccataaacagtcactcaagcaacatcaaattcatactcagaagaaaccagatggatgttctgaatgtggggggagcttcacccagaagtcacacctctttgcccaacagagaattcatagtgtaggaaacctccatgaatgtggcaaatgtggaaaagccttcatgccacaactaaaactcagtgtatatctgacagatcatacaggtgatataccctgtatatgcaaggaatgtgggaaggtctttattcagagatcagaattgcttacgcaccagaaaacacacactagaaagaagccctataaatgccatgactgtggaaaagcctttttccagatgttatctctcttcagacatcagagaactcacagtagagaaaaactctatgaatgcagtgaatgtggcaaaggcttctcccaaaactcaaccctcattatacatcagaaaattcatactggtgagagacagtatgcatgcagtgaatgtgggaaagcctttacccagaagtcaacactcagcttgcaccagagaatccactcagggcagaagtcctatgtgtgtatcgaatgcgggcaggccttcatccagaaggcacacctgattgtccatcaaagaagccacacaggagaaaaaccttatcagtgccacaactgtgggaaatccttcatttccaagtcacagcttgatatacatcatcgaattcatacaggggagaaaccttatgaatgcagtgactgtggaaaaaccttcacccaaaagtcacacctgaatatacaccagaaaattcatactggagaaagacaccatgtatgcagtgaatgcgggaaagccttcaaccagaagtcaatactcagcatgcatcagagaattcacaccggagagaagccttacaaatgcagtgaatgtgggaaagccttcacttctaagtctcaattcaaagagcatcagcgaattcacacgggtgagaaaccctatgtgtgcactgaatgtgggaaggccttcaacggcaggtcaaatttccataaacatcaaataactcacactagagagaggccttttgtctgttacaaatgtgggaaggcttttgtccagaaatcagagttgattacccatcaaagaactcacatgggagagaaaccctatgaatgccttgactgtgggaaatcgttcagtaagaaaccacaactcaaggtgcatcagcgaattcacacgggagaaagaccttatgtgtgttctgaatgtggaaaggccttcaacaacaggtcaaacttcaataaacaccaaacaactcataccagagacaaatcttacaaatgcagttattctgtgaaaggctttaccaagcaatgcccaactttcttgtacaaagtggttgatatcggtaagcctatccctaaccctctcctcggtctcgattctacgtagtaatgaactagtccgtaacttgaaagtatttcgatttcttggctttatatatcttgtggaaaggacgaatcgtggcgggcttcgccccatgt

SEQ ID NO: 3346 - DNA, 2045 bp, Homo sapiens
  source 1..2045: mol_type = genomic DNA
atcgattgatcaacaagtttgtacaaaaaagttggcaccatggcttccccgagccccccgccggagtcgaaggaggagtgggattatctggacccagctcagagaagcctgtataaagatgtcatgatggagaattatggaaacctggtctcactggatgttttgaacagagataaggatgaggagccaactgtaaaacaagagattgaagaaattgaggaagaagtggaaccacagggtgtaatagttacaagaatcaaaagtgaaattgaccaggatcctatgggtagagaaacatttgaacttgttggtaggttagataaacaaagagggatcttcctatgggaaataccaagggaatctttgacccaggaacagagaatgttcagagaaaacactaacattatccgtaaaagaccaaactcagaagagaaatgccataaatgtgaagaatgtggaaagggttttgtccgcaaggcccatttcattcaacatcaaagggtccatactggtgagaaaccttttcagtgcaatgaatgtgggaaaagttttagtcgcagttcatttgttattgaacatcagagaattcacactggggaaaggccctatgagtgtaattactgtggaaaaacctttagtgtgagctcaacccttattagacatcagagaatccacactggagaaagaccctatcagtgtaatcagtgtaaacagagcttcagccagagaaggagccttgttaaacatcaaaggattcatacaggtgagaaaccccataaatgtagtgactgtgggaaagccttcagttggaaatcacaccttattgagcatcaaagaactcacactggtgagaaaccttatcactgtaccaaatgtaagaagagctttagtcgaaattcattgcttgttgagcatcaaagaattcacactggggaaagaccccataaatgtggtgaatgtgggaaagcctttcgattaagcacataccttatacaacaccaaaaaattcacactggcgagaagccttttctttgtattgagtgtggaaaaagtttcagtcggagctcattccttattgaacatcagaggatccatactggtgaaagaccttatcagtgcaaagagtgtgggaaaagtttcagtcagctttgcaaccttactcgtcatcagagaattcacacaggagacaagccccataaatgtgaggaatgtggaaaagcctttagtagaagctcaggtcttattcagcatcagagaattcacaccagggagaagacttatccatacaatgaaactaaggaaagttttgatccaaattgcagtcttgttatacagcaggaagtctaccctaaggagaaatcttataaatgtgatgaatgtgggaaaacttttagtgttagtgctcatcttgtacaacatcaaagaatccacactggtgaaaagccctatctatgtactgtctgtgggaaaagcttcagccggagctcatttcttattgaacatcagagaatccacactggtgagagaccctatctgtgcagacagtgtggaaaaagctttagtcagctttgtaatcttattcgacatcagggtgttcacacaggtaataaaccccataaatgtgatgaatgtggaaaggcctttagccggaactcgggtcttattcagcatcagagaatacacacaggagagaaaccttataagtgtgagaagtgcgacaaaagtttcagtcaacagcgcagtcttgtcaaccatcagaagatccatgcagaggtgaaaacccaagaaacccatgaatgtgacgcttgtggtgaagcctttaattgccgtatttctcttattcagcatcagaaattgcacacagcatggatgcaattgccaactttcttgtacaaagtggttgatatcggtaagcctatccctaaccctctcctcggtctcgattctacgtagtaatgaactagtccgtaacttgaaagtatttcgatttcttggctttatatatcttgtggaaaggacgacgtatggtcagatcagccccaaga

SEQ ID NO: 3347 - DNA, 2201 bp, Homo sapiens
  source 1..2201: mol_type = genomic DNA
atcgattgatcaacaagtttgtacaaaaaagttggcaccatgcctttaagggacaaatactgtcagactgaccaccatcatcacggatgctgtgaaccagtttatatcctggaacctggagatcctcctttgttacagcaaccactacagacatccaaatctggtattcaacaaataattgagtgctttcgatcaggaactaaacaacttaagcatattttattaaaagatgtggacactatttttgaatgtaagttatgccgcagtctcttcagaggattaccaaatttaattacccataaaaaattctactgcccaccaagtctccagatggatgacaaccttcctgatgtaaatgataaacaaagccaagccataaatgatctcctagaagccatatatccaagtgtggacaaacgagaatatattattaagctagaacccatagaaactaatcaaaatgcagtatttcaatatatttcgaggactgataatcctattgaagtcacagagtcaagcagtactcctgaacaaaccgaagttcagatacaggaaactagcactgaacagtcaaaaacagtaccggttacagatacagaggtggaaactgtagagccccctcctgttgagattgttacagatgaagttgcacctacatctgatgaacaacctcaggagtcgcaggctgacttggaaacttctgacaattctgattttggtcaccagttgatatgttgtctttgtagaaaagaattcaattctagacgaggtgttcgccgtcacattcgaaaagtacacaagaaaaagatggaagaactaaaaaagtacattgaaacacgaaagaatccaaaccaatcctctaaaggacgcagtaagaatgttctagttccattaagtaggagttgtccagtatgttgtaaatcatttgctacaaaagcgaatgtaaggaggcattttgatgaagttcatagaggactaaggagggattcaattactcctgatatagcaacaaagcctgggcaacctttgttcctggattctatttctcctaaaaaatcttttaagactcgaaaacaaaagtcttcttcaaaggctgaatacaatttaactgcatgcaaatgcctcctttgcaagaggaaatatagttcacaaataatgcttaaaagacatatgcaaattgtccacaagataactctttctggaacaaactctaaaagagaaaaaggccctaataatactgccaacagttcagaaataaaagttaaagttgaaccagcagattctgtagaatcttcacccccttccattacccattctccacagaatgaattaaagggaacaaatcattcaaatgaaaaaaagaacacaccggcagcacagaaaaataaagttaaacaagactctgaaagccctaaatcaactagtccgtcggctgcaggtggccagcaaaaaaccagaaaaccaaaactttcagctggctttgactttaagcaactttactgtaaactttgtaaacgtcagtttacttccaaacagaacttgactaaacacatcgagttgcacacagatggaaataacatttatgttaaattctacaagtgtcctctttgcacttatgaaactcgtcggaaacgtgatgtgatacgacatataactgtggttcataaaaagtcatctcgttatcttgggaaaataacagccagtttagagatcagagctataaaaaagcctattgattttgttctaaataaagtggcaaaaagaggcccttcgagggatgaagcaaaacatagtgattcaaaacatgatggcacttctaactctcctagtaaaaagtatgaagtagctgacgtcggtattgaagtaaaagtcacaaaaaacttttctcttcacagatgcaataaatgtggaaaggcatttgccaaaaagacttaccttgaacatcataagaaaactcataaggcaaatgcttccaattcacctgaaggaaacaaaaccaaaggccgaagtacaagatctaaggctcttgtcttgccaactttcttgtacaaagtggttgatatcggtaagcctatccctaaccctctcctcggtctcgattctacgtagtaatgaactagtccgtaacttgaaagtatttcgatttcttggctttatatatcttgtggaaaggacgaaactgacaccccattactaccttt

SEQ ID NO: 3348 - DNA, 689 bp, Homo sapiens
  source 1..689: mol_type = genomic DNA
atcgattgatcaacaagtttgtacaaaaaagttggcatgaaccagtttggcccctcagccctaatcaacctctccaatttctcatccataaaaccggaaccagccagcacccctccacaaggctccatggccaatagtactgcagtggtaaagataccaggcactcctggggcaggaggtcgtcttagccctgaaaacaatcaggtattgaccaagaagaaattacaggacttagtaagagaagtggatcctaatgagcagttggatgaagatgtggaggagatgctgctgcagattgctgatgattttatcgagagtgtggtgacagcagcctgtcagcttgcgcggcatcgcaagtctagcaccctggaggtgaaagatgtccagctgcatttagagcgccagtggaacatgtggatcccaggatttggctctgaagaaatccgaccctacaaaaaagcttgcaccacagaagctcacaaacagagaatggcattgatccggaaaacaaccaagaaataccgaactttcttgtacaaagtggttgatatcggtaagcctatccctaaccctctcctcggtctcgattctacgtagtaatgaactagtccgtaacttgaaagtatttcgatttcttggctttatatatcttgtggaaaggacgacaaaaggtttccaagtccactccg

SEQ ID NO: 3349 - DNA, 1667 bp, Homo sapiens
  source 1..1667: mol_type = genomic DNA
accgccaccatggggaggaaaaagattcagatccagcgaatcaccgacgagcggaaccgacaggtgactttcaccaagcggaagtttggcctgatgaagaaggcgtatgagctgagcgtgctatgtgactgcgagatcgcactcatcatcttcaaccactccaacaagctgttccagtacgccagcaccgacatggacaaggtgctgctcaagtacacggagtacaatgagccacacgagagccgcaccaacgccgacatcatcgagaccctgaggaagaagggcttcaacggctgcgacagccccgagcccgacggggaggactcgctggaacagagccccctgctggaggacaagtaccgacgcgccagcgaggagctcgacgggctcttccggcgctatgggtcaactgtcccggcccccaactttgccatgcctgtcacggtgcccgtgtccaatcagagctcactgcagttcagcaatcccagcggctccctggtcaccccttccctggtgacatcatccctcacggacccgcggctcctgtccccccagcagccagcactacagaggaacagtgtgtctcctggcctgccccagcggccagctagtgcgggggccatgctggggggtgacctgaacagtgctaacggagcctgccccagccctgttgggaatggctacgtcagtgctcgggcttcccctggcctcctccctgtggccaatggcaacagcctaaacaaggtcatccctgccaagtctccacccccacctacccacagcacccagcttggagcccccagccgcaagcccgacctgcgagtcatcacttcccaggcaggaaaggggttaatgcatcacttgactgaggaccatttagatctgaacaatgcccagcgccttggggtctcccagtctactcattcgctcaccaccccagtggtttctgtggcaacgccgagtttactcagccagggcctccccttctcttccatgcccactgcctacaacacagattaccagttgaccagtgcagagctctcctccttaccagcctttagttcacctggggggctgtcgctaggcaatgtcactgcctggcaacagccacagcagccccagcagccgcagcagccacagcctccacagcagcagccaccgcagccacagcagccacagccacagcagcctcagcagccgcaacagccacctcagcaacagtcccacctggtccctgtatctctcagcaacctcatcccgggcagccccctgccccacgtgggtgctgccctcacagtcaccacccacccccacatcagcatcaagtcagaaccggtgtccccaagccgtgagcgcagccctgcgcctccccctccagctgtgttcccagctgcccgccctgagcctggcgatggtctcagcagcccagccgggggatcctatgagacgggagaccgggatgacggacggggggacttcgggcccacactgggcctgctgcgcccagccccagagcctgaggctgagggctcagctgtgaagaggatgcggcttgatacctggacattaaagtagtaatgaactagtccgtaacttgaaagtatttcgatttcttggctttatatatcttgtggaaaggacgatctcgtatattatacatcgtacac

SEQ ID NO: 3350 - DNA, 998 bp, Homo sapiens
  source 1..998: mol_type = genomic DNA
atcgattgatcaacaagtttgtacaaaaaagttggcatggacacccccagcccagacccgttgccttcgcctttgcccggggaggaagagaaacctctggccttatctcctcctgttccccggggccgccgaggccgtcgtcctgggggagccacctcctcaaatcggacactcaaggcctccctccctcgcaagcggggccgcccccccaagtcagggcaggagcccccactggtgcaggtgcagggggtgacagccccagtaggcagcagtggcgggagcgacctcctcctgatcgatgatcagggtgtgccctatacggtctctgaaggttcagcggctgggcctgagggctctggccccaggaaggccccacacttctgcccggtgtgcctgcgggccttcccctacctctccgacctggagcgccacagcatctcgcactcagagctgaagccgcaccagtgcaaggtttgcggcaagaccttcaagcgctccagccacctgcggcggcactgcaacatccatgccggcctgcggcccttccgctgcccgctgtgcccccgccgcttccgcgaggcgggcgagctggcgcaccaccaccgcgtgcactcgggggagcgcccgtaccagtgccccatctgccggctgcgctttacagaggccaacacgctccggcgccatgcgaagcgcaagcacccggaggccatgggggtacccctgtgtgcaccagatccagggtctgaaccgccgtgggacgaggagggcatcccggccacagcaggggccgaggaagaggaggagacagaggggaaaggggagccggcctgcccaactttcttgtacaaagtggttgatatcggtaagcctatccctaaccctctcctcggtctcgattctacgtagtaatgaactagtccgtaacttgaaagtatttcgatttcttggctttatatatcttgtggaaaggacgaatactaaagtttccctaccaacat

SEQ ID NO: 3351 - DNA, 1007 bp, Homo sapiens
  source 1..1007: mol_type = genomic DNA
atcgattgatcaacaagtttgtacaaaaaagttggcatgccccgcgcgttcctggtgaagaagccgtgcgtctccacgtgcaagaggaactggagcgagctccccgacgaggagcgcggcgagatctacgtgccagtcagcctgggcttctgcccaccacagccctaccgggagccggaaccctctgtggccgaacccccttcctgcccgctggctttgaacatgagccttcgagactctagctacagcatggcccccgggccctgtgtggtggcccagctgccctctgaagacatgggccacttgacagacccccagagcagagaccatggcttcctgcgcaccaagatgaaggtgacccttggggacagtcccagtggagacctgttcacctgccgtgtctgccagaaggccttcacctaccagcgcatgctgaaccgccacatgaagtgtcacaacgacgtcaagaggcacctctgcacgtactgcgggaagggcttcaatgacaccttcgacctcaagagacacgtccgaactcacactggcgtgcggccctacaagtgcagcctgtgtgacaaggccttcacgcagcgctgctctctggagtctcacctcaagaagatccatggtgtgcagcagaagtacgcgtacaaggagcggcgggccaagctgtacgtgtgtgaggagtgcggctgcacatctgagagccaggagggccacgtcctgcacctgaaggagcaccaccctgacagcccgctgctgcgcaagacctccaagaaggtggccgtggcactacagaacactgtcacttccctgctgcagggcagcccccacctgtgcccaactttcttgtacaaagtggttgatatcggtaagcctatccctaaccctctcctcggtctcgattctacgtagtaatgaactagtccgtaacttgaaagtatttcgatttcttggctttatatatcttgtggaaaggacgacatcaggacgtaaaattgataagt

SEQ ID NO: 3352 - DNA, 1049 bp, Homo sapiens
  source 1..1049: mol_type = genomic DNA
atcgattgatcaacaagtttgtacaaaaaagttggcatgtcccacgggacctactacgagtgtgagccccggggtggccagcagccactcgagttctcagggggccgagctgggcccggggagctaggggacatgtgtgagcatgaggcctccattgacctctccgcctacatcgagtctggggaagagcagcttctctccgatctctttgccgtgaagccagcgcctgaggccagaggcctcaagggccccggaacccctgccttcccccactacttgccgcctgaccctcggccctttgcctaccctccacataccttcggcccagacaggaaggcgctggggcctggcatctacagcagcccagggagctacgaccccagggctgtggcggtgaaggaggagccccgggggccagagggcagccgagctgccagccgaggcagctacaatcccctgcagtaccaagtggcacactgtgggcagacagccatgcacctgcccccaactctggcagcacccggccagcctctgcgcgttctcaaggcccctttggccactgccgcacccccctgcagtcccctcctgaaggcgccctccccggctggccccttacacaagggcaagaaggcagtgaacaaagatagccttgagtaccggctgaggcgggagcgcaacaacatcgccgtgcgcaagagccgagacaaggccaagaggcgcattctggagacgcagcagaaggtgctggagtacatggcagagaacgagcgcctccgcagccgcgtggagcagctcacccaggagctagacaccctccgcaacctcttccgccagattcctgaggcggccaacctcatcaagggcgtggggggttgcagctgcccaactttcttgtacaaagtggttgatatcggtaagcctatccctaaccctctcctcggtctcgattctacgtagtaatgaactagtccgtaacttgaaagtatttcgatttcttggctttatatatcttgtggaaaggacgatccccgttcatgctctgtggcgcc

SEQ ID NO: 3353 - DNA, 1805 bp, Homo sapiens
  source 1..1805: mol_type = genomic DNA
atcgattgatcaacaagtttgtacaaaaaagttggcatggccaccagtttccggacagcttcgtgctggggattattgtcattcaaggatatatctatggagttcacctgggatgaatggcagctactggattctacacagaagtacctgtacagagatgtgatattggaaaactatcataacctgatatcagtggggtatcatggtaccaagcctgacttaatcttcaagttggaacaaggagaagatccatggataataaatgccaaaatttccaggcagagctgtccagatggctgggaagaatggtaccagaacaatcaagatgagcttgagagtattgaaagaagctatgcttgtagtgtgttgggaagacttaatctgagcaaaacccatgattcttcaagacagagactctataacacacgtggaaaaagtttgacacaaaactcagctccaagcagaagttatttaagaaagaatcctgataagtttcatggttatgaagaaccatattttcttaagcatcaaagagctcatagcatagaaaaaaactgtgtgtgtagtgaatgtgggaaagcttttcgttgtaagtcacagctcattgtacatctcagaattcatacaggagagagaccttatgaatgcagtaaatgtgaaagagccttcagtgccaagtcaaaccttaatgctcatcagagagttcatacaggagaaaaaccctactcatgtagtgagtgcgagaaggtcttctctttcaggtcacagctcattgtccatcaggaaattcacacaggagggaaaccctatggctgcagtgaatgtgggaaagcctacagttggaaatcacagcttcttttacaccagagaagtcacacaggagtgaaaccgtatgaatgcagcgaatgtgggaaagcctttagtttgaagtctccattcgttgtacaccagagaactcatacaggagtgaaaccccataaatgcagtgaatgtgggaaagcctttaggagtaagtcctatctccttgttcacatccgaatgcatacaggagaaaaaccctatcaatgcagtgattgtgggaaagccttcaatatgaagacacaactcattgtacatcagggagttcacacaggaaataatccttatcaatgcggcgaatgtgggaaagcctttggtaggaaggaacagctcactgcacatctgagagctcatgcaggagagaagccctatggatgcagtgaatgtgggaaggctttcagcagcaagtcataccttgttatacataggagaacacacaccggagagagaccctatgaatgtagtttgtgtgagagagccttttgtggaaaatcacagctgattatacatcagagaactcattcaactgagaagccctatgaatgcaatgaatgtgaaaaagcctaccctaggaaggcatcacttcagatacaccagaaaactcattcgggagagaaaccttttaaatgcagtgaatgtggaaaagccttcactcagaagtcatctctcagtgaacatcagagagttcacactggagagaaaccatggaaatgctctgaatgtgggaaatccttctgttggaattcagggcttcgtatacatcggaagactcataaatgcccaactttcttgtacaaagtggttgatatcggtaagcctatccctaaccctctcctcggtctcgattctacgtagtaatgaactagtccgtaacttgaaagtatttcgatttcttggctttatatatcttgtggaaaggacgaaaccagtgtgtgtgtcatcaaaca

SEQ ID NO: 3354 - DNA, 2006 bp, Homo sapiens
  source 1..2006: mol_type = genomic DNA
atcgattgatcaacaagtttgtacaaaaaagttggcaccatggcggcggaagaggaggctgcggcgggaggtgaggttgccggtggcgaggcgacggccccaggtaaagtgttgagagaggagaaccagtgcattgctcctgtggtttccagccgcgtgagtccagggacaagaccaacagctatggggtctttcagctcacacatgacagagtttccacgaaaacgcaaaggaagtgattcagacccatcccaagaagctcatagccaaactgaaaagcggaggagagataaaatgaataacctgattgaagaactgtctgcaatgatccctcagtgcaaccccatggcgcgtaaactggacaaacttacagttttaagaatggctgttcaacacttgagatctttaaaaggcttgacaaattcttatgtgggaagtaattatagaccatcatttcttcaggataatgagctcagacatttaatccttaagactgcagaaggcttcttatttgtggttggatgtgaaagaggaaaaattctcttcgtttctaagtcagtctccaaaatacttaattatgatcaggctagtttgactggacaaagcttatttgacttcttacatccaaaagatgttgccaaagtaaaggaacaactttcttcttttgatatttcaccaagagaaaagctaatagatgccaaaactggtttgcaagttcacagtaatctccacgctggaaggacacgtgtgtattctggctcaagacgatcttttttctgtcggataaagagttgtaaaatctctgtcaaagaagagcatggatgcttacccaactcaaagaagaaagagcacagaaaattctatactatccattgcactggttacttgagaagctggcctccaaatattgttggaatggaagaagaaaggaacagtaagaaagacaacagtaattttacctgccttgtggccattggaagattacagccatatattgttccacagaacagtggagagattaatgtgaaaccaactgaatttataacccggtttgcagtgaatggaaaatttgtctatgtagatcaaagggcaacagcgattttaggatatctgcctcaggaacttttgggaacttcttgttatgaatattttcatcaagatgaccacaataatttgactgacaagcacaaagcagttctacagagtaaggagaaaatacttacagattcctacaaattcagagcaaaagatggctcttttgtaactttaaaaagccaatggtttagtttcacaaatccttggacaaaagaactggaatatattgtatctgtcaacactttagttttgggacatagtgagcctggagaagcatcatttttaccttgtagctctcaatcatcagaagaatcctctagacagtcctgtatgagtgtacctggaatgtctactggaacagtacttggtgctggtagtattggaacagatattgcaaatgaaattctggatttacagaggttacagtcttcttcataccttgatgattcgagtccaacaggtttaatgaaagatactcatactgtaaactgcaggagtatgtcaaataaggagttgtttccaccaagtccttctgaaatgggggagctagaggctaccaggcaaaaccagagtactgttgctgtccacagccatgagccactcctcagtgatggtgcacagttggatttcgatgccctatgtgacaatgatgacacagccatggctgcatttatgaattacttagaagcagaggggggcctgggagaccctggggacttcagtgacatccagtggaccctcttgccaactttcttgtacaaagtggttgatatcggtaagcctatccctaaccctctcctcggtctcgattctacgtagtaatgaactagtccgtaacttgaaagtatttcgatttcttggctttatatatcttgtggaaaggacgaacacacgatgtacagataccttat

SEQ ID NO: 3355 - DNA, 1973 bp, Homo sapiens
  source 1..1973: mol_type = genomic DNA
atcgattgatcaacaagtttgtacaaaaaagttggcaccatggcggcggaagaggaggctgcggcgggaggtaaagtgttgagagaggagaaccagtgcattgctcctgtggtttccagccgcgtgagtccagggacaagaccaacagctatggggtctttcagctcacacatgacagagtttccacgaaaacgcaaaggaagtgattcagacccatcccaagaagctcatagccaaactgaaaagcggaggagagataaaatgaataacctgattgaagaactgtctgcaatgatccctcagtgcaaccccatggcgcgtaaactggacaaacttacagttttaagaatggctgttcaacacttgagatctttaaaaggcttgacaaattcttatgtgggaagtaattatagaccatcatttcttcaggataatgagctcagacatttaatccttaagactgcagaaggcttcttatttgtggttggatgtgaaagaggaaaaattctcttcgtttctaagtcagtctccaaaatacttaattatgatcaggctagtttgactggacaaagcttatttgacttcttacatccaaaagatgttgccaaagtaaaggaacaactttcttcttttgatatttcaccaagagaaaagctaatagatgccaaaactggtttgcaagttcacagtaatctccacgctggaaggacacgtgtgtattctggctcaagacgatcttttttctgtcggataaagagttgtaaaatctctgtcaaagaagagcatggatgcttacccaactcaaagaagaaagagcacagaaaattctatactatccattgcactggttacttgagaagctggcctccaaatattgttggaatggaagaagaaaggaacagtaagaaagacaacagtaattttacctgccttgtggccattggaagattacagccatatattgttccacagaacagtggagagattaatgtgaaaccaactgaatttataacccggtttgcagtgaatggaaaatttgtctatgtagatcaaagggcaacagcgattttaggatatctgcctcaggaacttttgggaacttcttgttatgaatattttcatcaagatgaccacaataatttgactgacaagcacaaagcagttctacagagtaaggagaaaatacttacagattcctacaaattcagagcaaaagatggctcttttgtaactttaaaaagccaatggtttagtttcacaaatccttggacaaaagaactggaatatattgtatctgtcaacactttagttttgggacatagtgagcctggagaagcatcatttttaccttgtagctctcaatcatcagaagaatcctctagacagtcctgtatgagtgtacctggaatgtctactggaacagtacttggtgctggtagtattggaacagatattgcaaatgaaattctggatttacagaggttacagtcttcttcataccttgatgattcgagtccaacaggtttaatgaaagatactcatactgtaaactgcaggagtatgtcaaataaggagttgtttccaccaagtccttctgaaatgggggagctagaggctaccaggcaaaaccagagtactgttgctgtccacagccatgagccactcctcagtgatggtgcacagttggatttcgatgccctatgtgacaatgatgacacagccatggctgcatttatgaattacttagaagcagaggggggcctgggagaccctggggacttcagtgacatccagtggaccctcttgccaactttcttgtacaaagtggttgatatcggtaagcctatccctaaccctctcctcggtctcgattctacgtagtaatgaactagtccgtaacttgaaagtatttcgatttcttggctttatatatcttgtggaaaggacgatccggcccacacacagcccctcta

SEQ ID NO: 3356 - DNA, 1583 bp, Homo sapiens
  source 1..1583: mol_type = genomic DNA
atcgattgatcaacaagtttgtacaaaaaagttggcatggcagcccccttggaggcccaggaccaggcccctggggagggagaagggcttctgattgtgaaagtggaagattcctcctgggaacaggaatctgcccagcatgaggatggcagggattccgaagcctgccgccagcgcttccggcaattctgctacggggatgtgcatgggcctcatgaggccttcagccagctctgggagctctgctgccgctggctgcggcccgagctgcgtaccaaggagcagatcctggagctgctggtgctggagcagttcctgacagtgctgccaggggagatccagggctgggtgcgtgagcagcacccgggaagcggtgaggaggctgtcgccttggtggaggacctacagaagcagccagtgaaagcctggcgacaggatgtgccctcggaggaggcggaacccgaggctgcaggccggggatcccaggccacggggcctcccccgacggtgggggcacggaggcggccgtctgttccccaggagcagcacagccatagcgcccagcctcctgctcttcttaaagagggtcgtcccggagagacgacggacacctgctttgtctctggggtccatggacctgtggcattgggagacatcccattctatttctcccgggaagaatggggcaccctggaccctgctcagcgggatctcttctgggacataaagcgggagaactcccggaacaccaccctgggttttgggctcaaaggccaaagtgagaagtccctgctgcaggagatggtgccggtggtgccaggccagacaggcagcgacgtgactgtgtcctggagccccgaggaggctgaggcctgggagagcgagaaccggccgagggcggccctgggcccagtggtgggcgcgcgacgggggcggccacccactcgccggcgccagttccgggacctggcagccgagaagccgcacagctgcgggcagtgtggaaagcgcttccgctggggctcggacctggcgcggcaccagcgcacgcacacgggcgagaagccacacaagtgccctgagtgcgacaagagcttccgcagctcctcggacctggtgcgccaccaaggcgtgcacacgggcgagaagcccttctcctgttccgagtgcggcaagagcttcagccgcagcgcctacctggccgaccaccagcgcatacacacgggcgagaagcctttcggctgcagcgactgcggcaagagcttctcgctgcgctcctacctgctggaccatcggcgtgtgcacaccggtgagcggcccttcggctgcggagagtgcgacaagagcttcaagcagcgcgcgcacctcatcgcgcatcagagcctgcacgccaagatggcccagcccgtggggtgcccaactttcttgtacaaagtggttgatatcggtaagcctatccctaaccctctcctcggtctcgattctacgtagtaatgaactagtccgtaacttgaaagtatttcgatttcttggctttatatatcttgtggaaaggacgacaccaacccgacgaacatgcgata

SEQ ID NO: 3357 - DNA, 1208 bp, Homo sapiens
  source 1..1208: mol_type = genomic DNA
atcgattgatcaacaagtttgtacaaaaaagttggcatgaagccacctcccaggcggcgagcggccccggcgcgctatctgggcgaggtgaccggtcccgcgacctggagcgctcgcgagaagcggcagctagtgcgactcctgcaggcgcggcagggccagccggagccggacgccaccgagctggcccgggagctgcggggccggagcgaggctgagatccgggtcttcctccagcagctcaagggccgcgtagcccgggaggccattcagaaagtgcatccgggtggccttcagggaccaaggcgccgggaggcacagcccccagcccccatagaggtctggacggatctggctgagaagataacagggccactggaagaagccctggcagtggctttctcgcaggtgctcaccatcgcggccacggaaccggtcaccctcctgcactccaagccccccaagcccacgcaggcccgtggaaagcctttgctcctgagcgcccctggaggacaggaagaccccgcccctgaaatacctagctctgcccctgctgcacctagctccgcacccaggactcctgaccctgcccctgagaaaccttctgagtcgtcggctggtccctccactgaagaagactttgctgtggactttgagaagatctacaagtacttgtcctctgtctcccgaagtggccgcagccccgagctctcagcagctgagtccgctgtggtcctcgacctgctcatgtcacttccagaggagctgccactcctgccctgcacagccctggttgagcatatgacggagacgtacctacgcctgacagccccccagcccattcccgctggagggagcctggggcctgcagcagaaggggatggggctggctccaaggcaccagaggagacccccccagccaccgagaaggccgagcacagcgaactgaaatcgccttggcaagcagctgggatctgtcccctgaacccgttcctggtgcccctggagcttctgggtcgggcagccacccctgccaggtgcccaactttcttgtacaaagtggttgatatcggtaagcctatccctaaccctctcctcggtctcgattctacgtagtaatgaactagtccgtaacttgaaagtatttcgatttcttggctttatatatcttgtggaaaggacgaaaactgtacgaacgtctatccggt

SEQ ID NO: 3358 - DNA, 1823 bp, Homo sapiens
  source 1..1823: mol_type = genomic DNA
atcgattgatcaacaagtttgtacaaaaaagttggcatggcggccttgttcctgtctgccccaccccaggccgaggtgaccttcgaggacgtggctgtgtacctctcccgggaggaatggggccgcctgggccctgctcagaggggcctctacagggacgtgatgctggagacctacgggaacctagtctcactgggagtaggacctgcaggccccaagcctggagtgatctcgcagttggagcgaggggatgagccctgggtcctggatgttcagggcacctctgggaaagagcacctgagagtcaacagcccagctcttgggaccagaactgagtacaaggagttgacttcacaggagacatttggtgaggaagatccccagggatctgagccagtagaagcctgtgaccacatcagtaagtcagaggggagcctggaaaagctagtggagcagagaggccccagggcagtcacactgaccaacggggagagcagcagggagtctgggggaaacctcaggttgctgtcaagacctgttcctgatcagagacctcacaaatgtgatatatgtgagcaaagttttgaacagagatcatatctcaacaaccataagcgtgtacacaggtcaaaaaaaacaaatacagttcgtaactctggggaaatcttcagtgcaaacttagttgttaaagaagatcagaaaattcctactgggaaaaaattgcattattgcagttactgtgggaaaacattcaggtacagtgccaaccttgtcaagcatcagcggcttcacactgaagagaagccctacaaatgtgatgagtgtgggaaagccttcagccagagctgcgagttcatcaatcaccgaaggatgcactcaggagagattccctaccggtgtgacgagtgtgggaagacattcacccggaggcccaacctcatgaagcaccagaggattcacactggggagaaaccctacaagtgtggggagtgtgggaagcactttagcgcctactcttccctgatttatcaccagagaatccacaccggagagaaaccctataaatgtaatgactgcgggaaagccttcagtgatggctcaatccttatccgacatcgtcggactcacaccggagagaagccatttgagtgcaaggaatgtggcaaaggctttacacaaagttctaaccttatccaacatcagagaattcacactggagagaaaccctataaatgtaatgaatgtgagaaagctttcattcaaaaaaccaaactcgtggaacatcagagaagccacactggagagaagccctatgaatgcaatgactgtggcaaagttttcagccaaagcacacacctcatccagcaccagagaatccacacaggagagaagccctacaagtgcagcgagtgtgggaaggccttccacaacagttccagactcatccaccaccagaggctgcaccacggagagaaaccctacagatgcagcgattgcaagaaagccttcagccagagcacgtacttgattcagcaccggaggatccacaccggggagaagccctacaagtgcagcgagtgtgggaaggccttccggcacagttccaacatgtgtcagcatcagcggattcacctccgggaggacttctccatgtacccaactttcttgtacaaagtggttgatatcggtaagcctatccctaaccctctcctcggtctcgattctacgtagtaatgaactagtccgtaacttgaaagtatttcgatttcttggctttatatatcttgtggaaaggacgataggtattagaatagcctcggatt

SEQ ID NO: 3359 - DNA, 2447 bp, Homo sapiens
  source 1..2447: mol_type = genomic DNA
atcgattgatcaacaagtttgtacaaaaaagttggcatggaaataccaaatccccctacctccaaatgtatcacttactggaaaagaaaagtgaaatctgaatacatgcgacttcgacaacttaaacggcttcaggcaaatatgggtgcaaaggctttgtatgtggcaaattttgcaaaggttcaagaaaaaacccagatcctcaatgaagaatggaagaagcttcgtgtccaacctgttcagtcaatgaagcctgtgagtggacacccttttctcaaaaagtgtaccatagagagcattttcccgggatttgcaagccaacatatgttaatgaggtcactgaacacagttgcattggttcccatcatgtattcctggtcccctctccaacagaactttatggtagaagatgagacggttttgtgcaatattccctacatgggagatgaagtgaaagaagaagatgagacttttattgaggagctgatcaataactatgatgggaaagtccatggtgaagaagagatgatccctggatccgttctgattagtgatgctgtttttctggagttggtcgatgccctgaatcagtactcagatgaggaggaggaagggcacaatgacacctcagatggaaagcaggatgacagcaaagaagatctgccagtaacaagaaagagaaagcgacatgctattgaaggcaacaaaaagagttccaagaaacagttcccaaatgacatgatcttcagtgcaattgcctcaatgttccctgagaatggtgtcccagatgacatgaaggagaggtatcgagaactaacagagatgtcagaccccaatgcacttccccctcagtgcacacccaacatcgatggccccaatgccaagtctgtgcagcgggagcaatctctgcactccttccacacacttttttgccggcgctgctttaaatacgactgcttccttcacccttttcatgccacccctaatgtatataaacgcaagaataaagaaatcaagattgaaccagaaccatgtggcacagactgcttccttttgctggaaggagcaaaggagtatgccatgctccacaacccccgctccaagtgctctggtcgtcgccggagaaggcaccacatagtcagtgcttcctgctccaatgcctcagcctctgctgtggctgagactaaagaaggagacagtgacagggacacaggcaatgactgggcctccagttcttcagaggctaactctcgctgtcagactcccacaaaacagaaggctagtccagccccacctcaactctgcgtagtggaagcaccctcggagcctgtggaatggactggggctgaagaatctctttttcgagtcttccatggcacctacttcaacaacttctgttcaatagccaggcttctggggaccaagacgtgcaagcaggtctttcagtttgcagtcaaagaatcacttatcctgaagctgccaacagatgagctcatgaacccctcacagaagaagaaaagaaagcacagattgtgggctgcacactgcaggaagattcagctgaagaaagataactcttccacacaagtgtacaactaccaaccctgcgaccacccagaccgcccctgtgacagcacctgcccctgcatcatgactcagaatttctgtgagaagttctgccagtgcaacccagactgtcagaatcgtttccctggctgtcgctgtaagacccagtgcaataccaagcaatgtccttgctatctggcagtgcgagaatgtgaccctgacctgtgtctcacctgtggggcctcagagcactgggactgcaaggtggtttcctgtaaaaactgcagcatccagcgtggacttaagaagcacctgctgctggccccctctgatgtggccggatggggcaccttcataaaggagtctgtgcagaagaacgaattcatttctgaatactgtggtgagctcatctctcaggatgaggctgatcgacgcggaaaggtctatgacaaatacatgtccagcttcctcttcaacctcaataatgattttgtagtggatgctactcggaaaggaaacaaaattcgatttgcaaatcattcagtgaatcccaactgttatgccaaagtggtcatggtgaatggagaccatcggattgggatctttgccaagagggcaattcaagctggcgaagagctcttctttgattacaggtacagccaagctgatgctctcaagtacgtggggatcgagagggagaccgacgtcctttacccaactttcttgtacaaagtggttgatatcggtaagcctatccctaaccctctcctcggtctcgattctacgtagtaatgaactagtccgtaacttgaaagtatttcgatttcttggctttatatatcttgtggaaaggacgaccaagatcctggatcatttgatta

SEQ ID NO: 3360 - DNA, 725 bp, Homo sapiens
  source 1..725: mol_type = genomic DNA
atcgattgatcaacaagtttgtacaaaaaagttggcaccatgcataaattttcaaattcaaatagacacaagataagacatactgaaaataaacatttcagatgtaaagaatgtgacaaatcactttgcatgctttcacgcctaactcaacataaaaaaattcatactagagagaatttctacaaatgtgaagagtgtggaaaaacctttaactggtccacaaacctttctaaacctaagaaaattcatactggagaaaaaccctacaaatgtgaagtatgtggaaaagcctttcaccaatcctcaatccttactaaacataagataattcgtactggagaaaaaccctataaatgtgcacactgtggcaaagcctttaaacagtcctcacaccttactagacataagataattcatactgaagagaaaccctacaaatgtgaacaatgtggcaaggtctttaagcagtccccaacccttactaaacatcagataatttatactggagaggaaccatacaaatgtgaggaatgtggcaaagcttttaacctatctttgccaactttcttgtacaaagtggttgatatcggtaagcctatccctaaccctctcctcggtctcgattctacgtagtaatgaactagtccgtaacttgaaagtatttcgatttcttggctttatatatcttgtggaaaggacgatttatcaaaggaatccccaatttt

SEQ ID NO: 3361 - DNA, 1862 bp, Homo sapiens
  source 1..1862: mol_type = genomic DNA
atcgattgatcaacaagtttgtacaaaaaagttggcaccatgtttgggattcaggagaatattccgcgcggggggacgaccatgaaggaggagccgctgggcagcggcatgaacccggtgcgctcgtggatgcacacggcgggcgtggtggacgccaacacggccgcccagagcggcgtggggctggcgcgggcgcacttcgagaagcagccgccttccaacctccggaaatccaatttcttccacttcgtgctggcgctctacgataggcaggggcagccggtggagattgaaaggaccgcttttgtggactttgtggagaaagagaaagagccaaacaacgagaaaaccaacaacggcatccactataaactccagttattgtacagcaacggagtcagaacagagcaagatctgtatgttcgcctcatagattcaatgaccaaacaggccatcgtctacgagggccaggacaagaacccggagatgtgccgtgtgctgctgacccacgagatcatgtgcagccggtgctgtgacaagaaaagttgtggcaatagaaacgaaacgccctcagaccctgtaatcattgacagattctttctaaagtttttcctcaagtgcaatcagaactgtttgaagaatgcaggcaaccctcgagatatgcggagattccaggttgttgtatcgacaacagtcaacgtggacggccacgtgctggccgtgtcagacaacatgtttgtgcacaacaattccaaacacgggaggcgggcccgccgcctagacccgtcagaagccactccgtgcatcaaggccatcagtcccagtgaaggctggaccacggggggtgccaccgtcatcataattggcgacaacttctttgacgggctgcaagttgtattcggaactatgttggtgtggagcgagctgataactccccatgccatccgagtccagaccccgccgaggcacattcctggcgtcgtcgaagtgaccctctcctacaaatccaagcagttctgcaaaggtgctcctgggcgctttgtctacaccgcccttaatgaaccaaccatagattacggctttcagaggttgcagaaagtgatcccaagacatccgggtgatcccgaaaggttacccaaggaggtgttactgaagcgggcggcggacctggtggaagccttatacggaatgcctcacaacaaccaggagatcatcttgaagcgagcggcggacatcgccgaggcgctgtacagcgttccccgcaatcacaaccagatccccaccctgggcaacaaccctgcacacacgggcatgatgggcgtcaactccttcagcagccagctagccgtcaacgtgtcagagacgtcacaagccaacgaccaagtcggctacagtcgcaatacaagcagcgtgtccccgcgaggctacgtccccagcagtactccccagcagtccaattacaacacagtcagcactagcatgaatggatatggaagtggcgccatggccagtctaggggtccctggctcgcctggatttcttaatggctcctccgctaactctccctacggcatgaaacagaagagcgccttcgcgcccgtggtccggccccaagcctctcctcctccttcctgcaccagcgccaacgggaatggactgcaagctatgtctgggctggtagtcccgccaatgttgccaactctcttgtacaaagtggttgatatcggtaagcctatccctaaccctctcctcggtctcgattctacgtagtaatgaactagtccgtaacttgaaagtatttcgatttcttggctttatatatcttgtggaaaggacgatggaccggggcacacatatattgc

SEQ ID NO: 3362 - DNA, 2609 bp, Homo sapiens
  source 1..2609: mol_type = genomic DNA
atcgattgatcaacaagtttgtacaaaaaagttggcatgcatcacaggatgaatgaaatgaacctgagtccagtggggatggagcagctgacttcatcctctgtgagcaatgccttgccagtctcaggaagtcacctgggattggctgcctcacccactcacagtgccatccctgccccaggcctcccagtggcaattccaaacctgggtccctccctgagctctctgccttctgctctgtctttaatgctaccaatgggtattggggatcgaggggtgatgtgtgggttacctgaaagaaactacaccctacctccaccaccttaccctcacctggagagcagttatttcagaaccattctacctggcattttatcttatttagctgacagaccacctccacagtacatccaccctaactctataaatgttgatggtaatacagcattatctatcaccaataacccttcagcactagatccctatcagtccaatggaaatgttggattagaaccaggcattgtttcaatagactctcgctctgtgaacacacatggtgcccaaagtcttcatcccagtgatggccatgaggtggccttggacacagcaatcactatggagaacgtttctagggttaccagcccaatttcgacagatggaatggcagaggagcttacgatggacggtgttgcaggcgagcattcccaaatcccaaatggctccagaagtcatgaacctctgtctgtggattctgtgagcaacaaccttgcagcagacgctgtaggacatggtggtgtgatacccatgcatgggaatggcctggagctccctgtggtcatggagacagaccacattgcaagtcgggtcaatggcatgtctgacagtgccctcagtgactccattcacactgtggccatgagcaccaactctgtaagcgtggcactctctacctcacacaaccttgcctccctagaatctgtttccctccatgaagttggcctcagcctagaacctgtggctgtctcctccatcacccaggaggttgctatggggacaggtcatgtagatgtatcttcagacagtctttcttttgtatcaccttcactgcaaatggaagactccaattcaaacaaggagaacatggcaaccttgtttacaatttggtgtactctgtgtgaccgcgcctatccctcggactgtcccgaacatggaccagtgacttttgttcctgacactccaatagagagcagagcaaggctttctctcccaaagcagcttgttctccgtcagtcaattgtgggagcagaagttggtgtatggactggagaaaccattcctgtgcggacttgctttggacctctaattggccagcagagtcactccatggaagtagcagaatggacagacaaggcagttaaccatatctggaagatataccacaatggtgtcctagaattctgcatcattacaactgatgaaaatgaatgtaattggatgatgtttgtgcgcaaagccaggaaccgggaagagcagaatttggtggcttatcctcatgatggaaaaatctttttctgcacctcacaagatatccctcctgaaaatgaactgcttttttattatagccgagattatgctcaacagattggtgttcctgaacacccagatgtgcatctctgtaactgtggcaaggagtgcaattcttacacagagttcaaagcccatctgaccagccacatccataaccatcttcctacccagggacatagcggcagccatgggccaagtcacagcaaagaaaggaagtggaagtgctcaatgtgcccccaagcttttatctctccttccaaacttcatgtccactttatgggtcacatgggtatgaagccccacaagtgtgatttctgtagcaaggcttttagtgatcccagcaacctgcggacccacctcaagatacatacaggtcagaagaactacaggtgtaccttgtgtgacaagtctttcacccagaaggctcacctggagtcccacatggttatccacactggggagaagaatcttaagtgtgattactgtgacaagttgtttatgcggaggcaggacctcaagcagcacgtgctcatccacactcaagaacgccagatcaagtgtcccaagtgtgataagctgttcttgagaacaaatcacttaaagaagcatctcaattctcatgaaggaaaacgggattatgtctgtgaaaaatgtacaaaggcttatctaaccaaataccatctcacccgccacctgaaaacctgcaaagggcccacctccagttcgtcagcaccagaggaggaagaagaggatgactcagaagaggaagatctagcagactctgtggggacagaagactgtaggattaacagtgctgtgtattcagcggatgagtctctttctgcacataaatacccaactttcttgtacaaagtggttgatatcggtaagcctatccctaaccctctcctcggtctcgattctacgtagtaatgaactagtccgtaacttgaaagtatttcgatttcttggctttatatatcttgtggaaaggacgaagagattgcctagcgatctagtac

SEQ ID NO: 3363 - DNA, 2093 bp, Homo sapiens
  source 1..2093: mol_type = genomic DNA
atcgattgatcaacaagtttgtacaaaaaagttggcaccatgaaaggcagtaatagaaataaggatcattcagcagaaggagaaggggttggaaaacgaccaaaacgaaagtgtcttcagtggcatccattgctagcaaagaaacttcttgatttttcagaagaggaagaagaggaagacgaagaggaggatattgataaggttcaacttcttggggccgatggcctagagcaagatgttggtgaaactgaagatgatgaatcaccagagcagcgagcccggagaccaatgaatgcatttcttttattttgcaaacgccatcgctctcttgtacgtcaggaacaccccaggcttgataaccgaggtgctaccaagatactagctgattggtgggctgttcttgatccaaaggaaaagcagaaatacacagacatggccaaggagtataaggatgcatttatgaaagcaaatcctggctacaaatggtgtcctaccacaaacaagcctgtgaaatccccaacacccactgtcaatccacgaaagaaactttgggccttcccatctgactcttcaagagacttgccaagccccaagaaagcaaagactgaagaaatgcctcagcttaactttggaatggctgatcctactcaaatgggaggcctgagtatgctgctgttagctggagaacatgctcttggcacaccagaggtatcctctggcacatgcaggcctgatgtttcagaatctcctgaattacgtcagaagtcaccattgtttcagtttgccgagatatcttcaagtacgtcccactctgatgcttctacaaagcagtgtcaaacatctgccttgtttcagtttgcagagatttcttcaaacacttcgcagttgggtggtgctgagcctgtaaaacgctgtggaaagtctgcactctttcaactggcagaggaaaacgaagctcaggaaaaggaaactcctctgatcatgaagggtgttggaatgaagaaagctggacatttagtcagagtgggaccagtgggagcaagaagttcaagaagacaaagccaaaagaagactgtctccttggctccgcaaagctggatgaagaatttgaaaaaaaattcaacagcctccctcaatatagtcctgttacatttgaccggaaatgtgtacctgtcccaagaaaaaagaagaagactggaaatgtgtcctcagaaccgactaaaaccagcaaaggtcctttccagtctcagaaaaagaacttattccacaaaattgtcagcaaatataagcacaaaaaggagaagcccaatgttccggaaaaaggaagtggggataaatggtcaaacaagcaactcttcttggatgccattcaccctacagaagccatattttcagaagacagaaacaccatggagcctgttcataaggttaaaaatatcccatccattttcaacactccagagccaacaacaacgcaagaacctttggtgggcagccaaaagagaaaagcaaggaaaaccaagattacacaccttgtcaggacagcagatggccgggtatcaccagcaggaggtactttggatgacaaaccaaaggaacaactgcagaggagtctccctaaagcaactgagacagactgcaatgacaaatgctcacacaacaccgaggtcggggagacgcggagcagtactccagaaatgcctgccgtgtctgcgttctttagcctcgctgcgctggctgaagtggcagccatggaaaatgtgcacagaggtcagaggtcaactccgctcacccatgatggacagccaaaagaaatgccgcaggctcctgtacttatttcctgcgctgaccagtgaagcgccctttcattgtaaaacattgtgctttacctactaccctagccttgtctttaccgagggatgcttgccaactttcttgtacaaagtggttgatatcggtaagcctatccctaaccctctcctcggtctcgattctacgtagtaatgaactagtccgtaacttgaaagtatttcgatttcttggctttatatatcttgtggaaaggacgagaactgatcatagagggaggctga

SEQ ID NO: 3364 - DNA, 527 bp, Homo sapiens
  source 1..527: mol_type = genomic DNA
atcgattgatcaacaagtttgtacaaaaaagttggcatgagtgagtcgagctcgaagtccagccagcccttggcctccaagcaggaaaaggacggcactgagaagcggggccggggcaggccgcgcaagcagcctccggtgagtcccgggacagcgctggtagggagtcagaaggagcccagcgaagtgccaacacctaagagacctcggggccgaccaaagggaagcaaaaacaagggtgctgccaagacccggaaaaccaccacaactccaggaaggaaaccaaggggcagacccaaaaaactggagaaggaggaagaggagggcatctcgcaggagtcctcggaggaggagcagtgcccaactttcttgtacaaagtggttgatatcggtaagcctatccctaaccctctcctcggtctcgattctacgtagtaatgaactagtccgtaacttgaaagtatttcgatttcttggctttatatatcttgtggaaaggacgagacaacgtctggaagttccatggt

SEQ ID NO: 3365 - DNA, 494 bp, Homo sapiens
  source 1..494: mol_type = genomic DNA
atcgattgatcaacaagtttgtacaaaaaagttggcatgagtgagtcgagctcgaagtccagccagcccttggcctccaagcaggaaaaggacggcactgagaagcggggccggggcaggccgcgcaagcagcctccgaaggagcccagcgaagtgccaacacctaagagacctcggggccgaccaaagggaagcaaaaacaagggtgctgccaagacccggaaaaccaccacaactccaggaaggaaaccaaggggcagacccaaaaaactggagaaggaggaagaggagggcatctcgcaggagtcctcggaggaggagcagtgcccaactttcttgtacaaagtggttgatatcggtaagcctatccctaaccctctcctcggtctcgattctacgtagtaatgaactagtccgtaacttgaaagtatttcgatttcttggctttatatatcttgtggaaaggacgatttataaaccatcactacacgcga

SEQ ID NO: 3366 - DNA, 1556 bp, Homo sapiens
  source 1..1556: mol_type = genomic DNA
atcgattgatcaacaagtttgtacaaaaaagttggcaccatggagtttttcatcagtatgtctgaaaccattaaatataatgacgatgatcataaaactctgtttctgaaaacactaaatgaacaacgcctggaaggagaattttgtgatattgctattgtggttgaggatgtgaaattcagagcacacagatgtgttcttgctgcctgcagcacctactttaaaaagcttttcaagaagcttgaggttgatagttcttcggtcatagaaatagattttcttcgttctgatatatttgaagaggtcctgaactacatgtacacagcaaagatttccgtgaaaaaagaagatgttaacttaatgatgtcatcgggtcagattcttggtatccgatttttggataaactgtgttctcagaagcgtgatgtgtccagtcccgatgaaaacaatggtcagtccaaaagtaagtattgccttaaaataaatcgccccattggagatgctgctgacacccaggatgatgatgtagaggaaatcggggatcaggatgacagtccttctgatgacacagtagaaggcacacccccgagtcaggaggacggcaagtcgcccaccacaacgctcagggttcaggaagcgatcctgaaagagctggggagtgaggaagttcggaaggtcaattgctacggccaggaagtagaatccatggagaccccagaatcaaaagacttggggtcccagacccctcaagccttaacatttaatgatgggatgagtgaagtgaaagatgaacagacaccaggctggacaacagccgccagtgacatgaagtttgagtatttgctttatggtcaccatcgggagcagattgcctgccaggcgtgtgggaagacgttttctgatgaaggcagattgaggaagcatgagaaactccacacggcggacaggccatttgtttgtgaaatgtgcacaaaaggtttcaccacacaggcccacctgaaagaacacctaaaaatccacacaggatataagccctatagctgtgaggtgtgtggaaaatcatttatccgtgccccagacttaaagaagcatgagagagttcacagtaatgaaagaccgtttgcgtgccacatgtgtgacaaagccttcaaacacaagtctcacctcaaggatcatgaaagaagacacagaggggaaaagccttttgtgtgtggctcctgcaccaaggcatttgccaaggcatctgatctgaaaaggcacgagaacaatatgcacagtgaaaggaagcaggttacccccagtgccatccagagcgagacagaacagttgcaggcggcagcgatggctgcggaagcagaacagcagctggagacgatagcctgtagcttgccaactttcttgtacaaagtggttgatatcggtaagcctatccctaaccctctcctcggtctcgattctacgtagtaatgaactagtccgtaacttgaaagtatttcgatttcttggctttatatatcttgtggaaaggacgaagcccgcaatcggtgtaatccgaa

SEQ ID NO: 3367 - DNA, 3068 bp, Homo sapiens
  source 1..3068: mol_type = genomic DNA
atcgattgatcaacaagtttgtacaaaaaagttggcaccatgactttgatatctcaaaggaataatatgcttcaaacaatggattatgagaaaagtgtatcttctttgtcagcaacatcagaattggttacagcatcagtgaatttgaccacaaaatttgaaacaagagataatgttgacttctggggaaatcatctcactcagagtcaccccgaggtattaggtaccaccattaaaagtccagataaagtcaactgtgttgccaaaccaaatgcatacaacagtggagatatgcataattattgcattaattatggcaactgtgagttacctgttgaatcctccaaccaaggatcattaccttttcataattactcaaaagtgaataattctaataaacgtcgtaggttttcaggaacagcagtgtatgaaaaccctcaaagagaatcttcatccagcaaaacagttgtccaacaaccaattagtgaatcatttttatcactagtgaggcaggagagctcaaaaccagatagcctattagcatctattagccttttaaatgataaagatggaactttaaaagcaaaatctgaaattgaagaacagtatgttttagaaaaaggacaaaacattgatggacaaaacctgtacagtaatgaaaatcaaaatttagagtgtgcgactgaaaaatctaaatgggaagacttttctaatgtcgattcacctatgatgcctagaatcacatctgttttctctctccagagccaacaggcatcagaatttctgccacctgaagtaaaccaattgcttcaggatgtattgaaaataaaacctgatgtaaaacaagactctagtaacactccaaataaaggcttgccacttcattgtgaccagtcatttcaaaaacacgagagagaaggcaaaattgttgaatcttcgaaagatttcaaagtgcaaggcatcttcccagttccacctggcagtgtgggtattaatgtgcctacaaatgatttgaatttgaaatttggaaaagaaaaacaagtgtcatcaataccacaagatgtgagagattcagagaagatgcctagaatttcaggttttggcacattacttaagactcagtcagatgcgataataacacagcagcttgtaaaagacaaactacgagccaccacacaaaatttaggttctttttatatgcagagtccacttttaaattcagaacaaaaaaaaactataattgttcagacttcaaaaggattcttaataccattgaacattactaacaagcctgggctaccagttattcctggaaatgcacttccattggttaattcacaaggtatccctgcttctctttttgtaaacaagaaacctgggatggttttaacacttaataatgggaaacttgaaggtgtttccgctgtcaaaaccgagggtgccccagctcgtggaactgtgactaaggagccttgcaaaacacctattttgaaggtagaaccaaacaataattgtcttacacctggactttgttccagcattggcagttgtttgagcatgaaaagtagctcagaaaatactttgccattaaaaggcccttacattttgaaaccaacgagttctgtgaaagctgttcttattcctaacatgctatctgagcaacagagcactaagttgaatatctccgattcagtaaaacagcagaatgagatttttccaaaaccacctctttataccttcttgcctgatggcaaacaagctgtttttttaaagtgtgtgatgccaaataaaactgagctgcttaagcccaaattagtccaaaatagtacttatcaaaatatacagccaaagaaacctgaaggaacaccacaaagaatattgctgaaaatttttaaccctgttttaaatgtgactgctgctaataatctgtcagtaagcaactctgcatcctcattgcaaaaagacaacgtaccatctaatcagattataggaggagagcagaaagagccagaatctagagatgccttacccttcttactagatgacttaatgccagcaaatgaaattgtgataacttctactgcaacatgcccagaatcttctgaggaaccaatatgtgtcagtgactgttcagagtccagggtattaaggtgtaaaacaaattgtagaattgagaggaacttcaatagaaaaaagacttccaaaaaaattttttcaaaaacaaaaactcatggaagtaaagactctgaaactgcctttgtatctagaaacagaaactgtaaacgaaagtgtagggatagttaccaagaacctccaagaagaaaagcaacattgcatagaaagtgtaaagaaaaggcaaaacctgaagatgtccgtgaaacatttggatttagcagacctaggctttcaaaagattccatcagaactttgcggcttttcccttttagttctaaacagcttgtgaaatgtcctaggagaaaccaaccagttgtagttttgaatcatcctgacgcagatgcaccagaagtagtaagtgtaatgaaaactattgctaaatttaatggacatgtacttaaggtttcattgtcaaaaagaactataaatgctttactgaaaccagtttgttataaccctcctaaaacaacttatgatgatttttccaagaggcacaaaacatttaaacctgttagttctgtgaaagaaagatttgtgctaaaattaacactcaaaaagacaagcaaaaacaattaccagattgtgaagactacctctgaaaatattttgaaggctaaatttaactgttggttttgtggtagagtatttgacaatcaggatacttgggctggtcatgggcagagacatttaatggaagctactcgggattggaacatgttagaattgccaactttcttgtacaaagtggttgatatcggtaagcctatccctaaccctctcctcggtctcgattctacgtagtaatgaactagtccgtaacttgaaagtatttcgatttcttggctttatatatcttgtggaaaggacgatctcccatagcagtgcagttagac

SEQ ID NO: 3368 - DNA, 968 bp, Homo sapiens
  source 1..968: mol_type = genomic DNA
atcgattgatcaacaagtttgtacaaaaaagttggcatggatcccgcggccagcagctgcatgaggagcctccagcccccagcccctgtctggggctgccttcgaaacccccactcggaaggcaatggggcctcagggctaccccactacccgcccaccccgttctccttccaccagaaaccagacttcctggcgacagcgacggcagcgtaccctgacttctcagcctcctgcctggcagccaccccacacagcctgccccaggaggagcacatcttcactgagcagcaccccgctttcccacagtcccccaactggcacttccctgtctcagacgcccggcgcaggcccaactcaggcccggcagggggttccaaggaaatggggaccagcagcctgggcctggtggacaccacaggaggcccaggcgatgactacggggtgcttgggagcactgccaatgagacagagaagaaatcatccaggcggagaaaggagagttcagacaaccaggagaacagagggaagccggagggcagcagcaaagcccgcaaggagaggacggccttcaccaaggagcagctgcgagagctggaggcagagtttgcccatcataactacctgactcggctccgcagatatgagattgcggtaaacctggacctctctgagcgccaggtcaaagtgtggttccagaaccgaaggatgaagtggaagcgtgtgaagggaggtcagcccatctcccccaatgggcaggaccctgaggatggggactccacagcctctccaagttcagagtgcccaactttcttgtacaaagtggttgatatcggtaagcctatccctaaccctctcctcggtctcgattctacgtagtaatgaactagtccgtaacttgaaagtatttcgatttcttggctttatatatcttgtggaaaggacgaactacaaaattcgacgttacggca

SEQ ID NO: 3369 - DNA, 674 bp, Homo sapiens
  source 1..674: mol_type = genomic DNA
atcgattgatcaacaagtttgtacaaaaaagttggcatgatggtgctggacaaggaggacggcgtgccgatgctctccgtccagcccaaagggaagcagaagggctgtgcgggctgtaaccgcaagatcaaggaccgctatctgctgaaggcattggacaagtactggcacgaagactgcctcaagtgtgcctgctgtgactgccgcctgggcgaggtgggctccaccctctacaccaaggccaacctcatcctgtgccgacgcgactacctgaggctctttggcaccacagggaactgtgctgcttgcagcaagctgatcccagccttcgagatggtgatgcgggcccgggacaacgtgtatcacctcgactgcttcgcctgccagctctgcaaccagagattttgtgtgggagacaaattcttcctgaagaacaacatgatcttgtgtcagatggactatgaggaagggcagctcaatggcacctttgaatcccaagttcagtacccaactttcttgtacaaagtggttgatatcggtaagcctatccctaaccctctcctcggtctcgattctacgtagtaatgaactagtccgtaacttgaaagtatttcgatttcttggctttatatatcttgtggaaaggacgatttatagtactatcgagggaactc

SEQ ID NO: 3370 - DNA, 1487 bp, Homo sapiens
  source 1..1487: mol_type = genomic DNA
atcgattgatcaacaagtttgtacaaaaaagttggcatggctcccaagaaacgcccagaaacccagaagacctccgagattgtattacgccccaggaacaagaggagcaggagtcccctggagctggagcccgaggccaagaagctctgtgcgaagggctccggtcctagcagaagatgtgactcagactgcctctgggtggggctggctggcccacagatcctgccaccatgccgcagcatcgtcaggaccctccaccagcataagctgggcagagcttcctggccatctgtccagcaggggctccagcagtcctttttgcacactctggattcttaccggatattacaaaaggctgccccctttgacaggagggctacatccttggcgtggcacccaactcaccccagcaccgtggctgtgggttccaaagggggagatatcatgctctggaattttggcatcaaggacaaacccaccttcatcaaagggattggagctggagggagcatcactgggctgaagtttaaccctctcaataccaaccagttttacgcctcctcaatggagggaacaactaggctgcaagactttaaaggcaacattctacgagtttttgccagctcagacaccatcaacatctggttttgtagcctggatgtgtctgctagtagccgaatggtggtcacaggagacaacgtggggaacgtgatcctgctgaacatggacggcaaagagctttggaatctcagaatgcacaaaaagaaagtgacgcatgtggccctgaacccatgctgtgattggttcctggccacagcctccgtagatcaaacagtgaaaatttgggacctgcgccaggttagagggaaagccagcttcctctactcgctgccgcacaggcatcctgtcaacgcagcttgtttcagtcccgatggagcccggctcctgaccacggaccagaagagcgagatccgagtttactctgcttcccagtgggactgccccctgggcctgatcccgcaccctcaccgtcacttccagcacctcacacctatcaaggcagcctggcatcctcgctacaacctcattgttgtgggccgatacccagatcctaatttcaaaagttgtaccccttatgaattgaggacgatcgacgtgttcgatggaaactcagggaagatgatgtgtcagctctatgacccagaatcttctggcatcagttcgcttaatgaattcaatcccatgggggacacgctggcctctgcaatgggttaccacattctcatctggagccaggaggaagccaggacacggaagtgcccaactttcttgtacaaagtggttgatatcggtaagcctatccctaaccctctcctcggtctcgattctacgtagtaatgaactagtccgtaacttgaaagtatttcgatttcttggctttatatatcttgtggaaaggacgaactgtcacgagttctaacaagcag

SEQ ID NO: 3371 - DNA, 2165 bp, Homo sapiens
  source 1..2165: mol_type = genomic DNA
atcgattgatcaacaagtttgtacaaaaaagttggcatggcattcagggatgtggctgtggatttcacccaggatgagtggaggctgctgagccctgctcaaaggactctgtacagagaggtgatgctggagaactacagcaacctggtctcactgggaatttcattttctaaaccagaactcatcacccagctggagcaagggaaagagacctggagagaggaaaaaaaatgttcaccggcaacctgtccagatccagagccagagctctacctcgatcctttctgccctccgggtttctccagtcagaaattccccatgcagcatgtgctgtgtaatcatcccccctggatcttcacatgcttgtgtgcagaaggtaacatccagcctggggatccaggcccaggggaccaggagaagcagcaacaagcctctgaggggagaccctggagtgatcaagcagaaggtcctgagggagaaggtgccatgcctttgtttggaagaaccaagaaaaggactctgggagcgttctccaggccaccccagaggcagccagtcagctctcggaacggcctcagaggggtggagttagaagccagcccagctcagacagggaaccctgaggaaacagacaaattgttgaagaggatagaagtcttaggatttggaacagtcaactgtggagagtgtggactgagcttcagcaagatgacaaacctgctcagtcaccagcggatacactcaggggagaagccctacgtgtgtggggtatgtgagaagggcttcagcctaaagaagagcctcgccagacaccagaaggcacactcgggggagaagccaattgtgtgcagggagtgtggacgaggctttaaccggaagtcaacgctaatcatacacgaacggacacactccggtgagaaaccttacatgtgcagtgagtgtgggcgaggcttcagccagaagtcaaacctcatcatacaccagaggacacactcaggggaaaagccttatgtgtgccgggaatgtggcaaaggcttcagccagaagtcagctgtcgtgagacaccagaggacacacttggaggagaagaccatcgtgtgcagtgactgtggcctgggcttcagcgacaggtcaaacctcatctcccaccagaggacgcactctggggagaagccctacgcctgcaaggagtgtgggcgatgcttcaggcagaggaccacccttgtcaaccaccagaggacacactcaaaggagaagccctatgtgtgcggggtgtgtgggcacagcttcagccagaattcaaccctcatctctcacaggcggacacacactggggagaagccgtatgtttgtggggtgtgtgggcgaggctttagtctcaagtcacacctcaacagacaccagaacatacactcaggagagaagcccattgtgtgcaaggactgtggccggggcttcagccagcaatccaacctcatcagacaccagaggacgcactcaggcgagaagcccatggtgtgtggggagtgcgggcgaggcttcagccagaagtcaaaccttgttgcacaccagaggacgcactcaggggagaggccgtatgtgtgccgagagtgtgggcgaggctttagccaccaggccggtctcatcaggcacaagcggaagcactcgagggagaagccctacatgtgcaggcagtgtggactgggctttggcaataagtcagctctaatcacacacaagcgggctcactcggaagagaagccttgtgtgtgcagagagtgtggccaaggctttctccaaaagtcacacctcaccttacatcaaatgacacatacgggggagaagccatatgtgtgcaagacgtgtgggcggggcttcagcctcaagtctcacctcagcagacacaggaagaccacgtctgtccaccacagactgccagtgcagcccgaccctgagccgtgtgcagggcaaccttcggattccttatactctctctgcccaactttcttgtacaaagtggttgatatcggtaagcctatccctaaccctctcctcggtctcgattctacgtagtaatgaactagtccgtaacttgaaagtatttcgatttcttggctttatatatcttgtggaaaggacgagcaaacatttgtgacattacgaaa

SEQ ID NO: 3372 - DNA, 2303 bp, Homo sapiens
  source 1..2303: mol_type = genomic DNA
atcgattgatcaacaagtttgtacaaaaaagttggcatggatttatctgctcttcgcgttgaagaagtacaaaatgtcattaatgctatgcagaaaatcttagagtgtcccatctgtctggagttgatcaaggaacctgtctccacaaagtgtgaccacatattttgcaaattttgcatgctgaaacttctcaaccagaagaaagggccttcacagtgtcctttatgtaagaatgatataaccaaaaggagcctacaagaaagtacgagatttagtcaacttgttgaagagctattgaaaatcatttgtgcttttcagcttgacacaggtttggagtatgcaaacagctataattttgcaaaaaaggaaaataactctcctgaacatctaaaagatgaagtttctatcatccaaagtatgggctacagaaaccgtgccaaaagacttctacagagtgaacccgaaaatccttccttgcaggaaaccagtctcagtgtccaactctctaaccttggaactgtgagaactctgaggacaaagcagcggatacaacctcaaaagacgtctgtctacattgaattgggatctgattcttctgaagataccgttaataaggcaacttattgcagtgtgggagatcaagaattgttacaaatcacccctcaaggaaccagggatgaaatcagtttggattctgcaaaaaaggctgcttgtgaattttctgagacggatgtaacaaatactgaacatcatcaacccagtaataatgatttgaacaccactgagaagcgtgcagctgagaggcatccagaaaagtatcagggtgaagcagcatctgggtgtgagagtgaaacaagcgtctctgaagactgctcagggctatcctctcagagtgacattttaaccactcagcagagggataccatgcaacataacctgataaagctccagcaggaaatggctgaactagaagctgtgttagaacagcatgggagccagccttctaacagctacccttccatcataagtgactcttctgcccttgaggacctgcgaaatccagaacaaagcacatcagaaaaagtattaacttcacagaaaagtagtgaataccctataagccagaatccagaaggcctttctgctgacaagtttgaggtgtctgcagatagttctaccagtaaaaataaagaaccaggagtggaaaggtcatccccttctaaatgcccatcattagatgataggtggtacatgcacagttgctctgggagtcttcagaatagaaactacccatctcaagaggagctcattaaggttgttgatgtggaggagcaacagctggaagagtctgggccacacgatttgacggaaacatcttacttgccaaggcaagatctagagggaaccccttacctggaatctggaatcagcctcttctctgatgaccctgaatctgatccttctgaagacagagccccagagtcagctcgtgttggcaacataccatcttcaacctctgcattgaaagttccccaattgaaagttgcagaatctgcccagagtccagctgctgctcatactactgatactgctgggtataatgcaatggaagaaagtgtgagcagggagaagccagaattgacagcttcaacagaaagggtcaacaaaagaatgtccatggtggtgtctggcctgaccccagaagaatttatgctcgtgtacaagtttgccagaaaacaccacatcactttaactaatctaattactgaagagactactcatgttgttatgaaaacagatgctgagtttgtgtgtgaacggacactgaaatattttctaggaattgcgggaggaaaatgggtagttagctatttctgggtgacccagtctattaaagaaagaaaaatgctgaatgagcatgattttgaagtcagaggagatgtggtcaatggaagaaaccaccaaggtccaaagcgagcaagagaatcccaggacagaaagatcttcagggggctagaaatctgttgctatgggcccttcaccaacatgcccacagggtgtccacccaattgtggttgtgcagccagatgcctggacagaggacaatggcttccatgcaattgggcagatgtgtgcccaactttcttgtacaaagtggttgatatcggtaagcctatccctaaccctctcctcggtctcgattctacgtagtaatgaactagtccgtaacttgaaagtatttcgatttcttggctttatatatcttgtggaaaggacgatgtgcggccgccaccacgtgcgca

SEQ ID NO: 3373 - DNA, 1016 bp, Homo sapiens
  source 1..1016: mol_type = genomic DNA
atcgattgatcaacaagtttgtacaaaaaagttggcatgagctcttattttgtaaactcattttgcggtcgctatccaaatggcccggactaccagttgcataattatggagatcatagttccgtgagcgagcaattcagggactcggcgagcatgcactccggcaggtacggctacggctacaatggcatggatctcagcgtcggccgctcgggctccggccactttggctccggagagcgcgcccgcagctacgctgccagcgccagcgcggcgcccgccgagcccaggtacagccagccggccacgtccacgcactctcctcagcccgatccgctgccctgctccgccgtggccccctcgcccggcagcgacagccaccacggcgggaaaaactccctaagcaactccagcggcgcctcggccgacgccggcagcacccacatcagcagcagagagggggttggcacggcgtccggagccgaggaggacgcccctgccagcagcgagcaggcgagtgcgcagagcgagccgagcccggcgccgcccgcccaaccccagatctacccctggatgcgcaagctgcacataagtcatgacaacataggcggcccggaaggcaaaagggcccggacggcctacacgcgctaccagaccctggagctggagaaggagttccacttcaaccgttacctgacccgcagaaggaggattgaaatagcacatgctctttgcctctccgagagacaaattaaaatctggttccaaaaccggagaatgaagtggaaaaaagataataagctgaaaagcatgagcatggccgcggcaggaggggccttccgtccctgcccaactttcttgtacaaagtggttgatatcggtaagcctatccctaaccctctcctcggtctcgattctacgtagtaatgaactagtccgtaacttgaaagtatttcgatttcttggctttatatatcttgtggaaaggacgatcatggctgactccctagaacatg

SEQ ID NO: 3374 - DNA, 1028 bp, Homo sapiens
  source 1..1028: mol_type = genomic DNA
atcgattgatcaacaagtttgtacaaaaaagttggcatgaaccttctccgagaacagagtagaacacgtcccatttctccaaaagagattgaaagaatggtgggcatcatccatcgaaaatttagttccattcagatgcagctcaaacaaagcacttgtgaagcagttatgattttaagatcaaggttccttgatgccagacggaaaaggcgtaacttcagtaaacaggccacagaaatcttgaatgaatatttttactcacacctcagcaacccctaccccagtgaagaagccaaagaggagctggccaagaaatgcagcatcacagtgtcacagagtcttgtaaaggatccaaaagaaagagggagcaaaggttctgacatccagccaactagcgtggtatccaattggtttggcaacaaacgaatcaggtacaagaagaacattggcaagtttcaggaagaagccaacctctatgctgcaaagacggccgtgacagctgcacacgcagtagcagcagctgtgcagaacaaccagaccaattcgcccaccacaccaaattccggttcttctggttcttttaacctcccaaattctggggacatgttcatgaacatgcagagtctgaatggggattcttaccaagggtcccaagtcggagccaatgtgcaatcacaggtggataccctccgtcatgttatcaatcagacgggaggctacagtgatggccttggaggaaattcactgtacagtccacataatttaaatgctaatggaggctggcaggacgcaacaactccatcttctgtgacttctcctacagaaggcccaggaagtgtgcactcggatacctctaactacccaactttcttgtacaaagtggttgatatcggtaagcctatccctaaccctctcctcggtctcgattctacgtagtaatgaactagtccgtaacttgaaagtatttcgatttcttggctttatatatcttgtggaaaggacgaaaagcgggcgcatttgcagtcact

SEQ ID NO: 3375 - DNA, 1634 bp, Homo sapiens
  source 1..1634: mol_type = genomic DNA
atcgattgatcaacaagtttgtacaaaaaagttggcaccatggacagtagctgccacaacgcgactaccaaaatgttagcgactgctccagctcggggcaacatgatgagcacgtccaaacccttggctttctccattgaacgaatcatggcgcgcaccccagagcccaaggccctgccagtcccccacttcctgcagggagccttacccaagggggaacccaagcactctctgcatctcaactcgtcgatcccctgcatgatccccttcgtgcctgtggcctacgacacgagccccaaggcaggagtgacgggctccgagccgcggaaggccagtctggaggccccggcggcgcccgcggcggtgccctcggctcccgcattcagctgcagcgacctgctcaactgcgcactgagtctcaagggcgacctggcccgcgacgcgctgccgctgcagcagtacaagctggtaaggccgcgtgtggtcaaccactcttcattccacgccatgggcgccttgtgctacctgaaccgaggtgacggcccatgccacccggcagccggcgtgaacatccacccggtggcctcctacttcctcagttcccctttgcacccgcagccaaaaacgtatttagccgaaaggaataaactggtggtcccggcggtggagaaatacccttctggagtagctttcaaagacctgtcccaggctcagctgcagcattacatgaaagaaagcgcccagcttctgtcggaaaaaatcgcgttcaaaacctcggatttcagccgaggctctcctaatgccaagcccaaagttttcacttgcgaagtgtgtggaaaggtctttaatgcgcactataacttaacccgtcacatgccagtgcacacaggagccagacccttcgtttgcaaagtgtgcggaaaaggtttcaggcaagcaagcaccctgtgcaggcacaagatcattcacacgcaggaaaaacctcacaaatgtaaccagtgtggcaaagcatttaatagaagttccactttaaacactcatacccgaatacacgcgggctacaaaccgtttgtgtgtgaattctgtggcaaagggtttcatcaaaaagggaattacaaaaaccacaagttgacccacagcggggagaagcagttcaagtgcaatatctgcaacaaggctttccaccaggtttacaacctcaccttccacatgcacacccacaacgacaagaagcctttcacctgccccacgtgcggcaagggtttctgcaggaactttgacctcaagaagcatgtccgcaagctgcacgacagcagcctggggctggcccgcacgccagctggcgaaccaggcactgaaccgccgcccccgctaccgcagcagccgccgatgacgctgcctcctctgcagccgccgctgccaaccccggggcccctgcagcccgggctccaccagggccaccagttgccaactttcttgtacaaagtggttgatatcggtaagcctatccctaaccctctcctcggtctcgattctacgtagtaatgaactagtccgtaacttgaaagtatttcgatttcttggctttatatatcttgtggaaaggacgacgatgatcccggcttgtgcgtgag

SEQ ID NO: 3376 - DNA, 1421 bp, Homo sapiens
  source 1..1421: mol_type = genomic DNA
atcgattgatcaacaagtttgtacaaaaaagttggcaccatggccatggtgaccggcggctggggcggccccggcggcgacacgaacggcgtggacaaggcgggcggctacccgcgcgcggccgaggacgactcggcctcgccccccggtgccgccagcgacgccgagccgggcgacgaggagcggccggggctgcaggtggactgcgtggtgtgcggggacaagtcgagcggcaagcattacggtgtcttcacctgcgagggctgcaagagctttttcaagcgaagcatccgccgcaacctcagctacacctgccggtccaaccgtgactgccagatcgaccagcaccaccggaatcagtgccagtactgccgtctcaagaagtgcttccgggtgggcatgaggaaggaggcggtgcagcgcggccgcatcccgcactcgctgcctggtgccgtggccgcctcctcgggcagccccccgggctcggcgctggcggcagtggcgagcggcggagacctcttcccggggcagccggtgtccgaactgatcgcgcagctgctgcgcgctgagccctaccctgcggcggccggacgcttcggcgcagggggcggcgcggcgggcgcagtgctgggcatcgacaacgtgtgcgagctggcggcgcggctgctcttcagcaccgtggagtgggcgcgccacgcgcccttcttccccgagctgccggtggccgaccaggtggcgctgctgcgcctgagctggagcgagctcttcgtgctgaacgcggcgcaggcggcgctgcccctgcacacggcgccgctactggccgccgccggcctccacgccgcgcctatggccgccgagcgcgccgtggctttcatggaccaggtgcgcgccttccaggagcaggtggacaagctgggccgcctgcaggtcgactcggccgagtatggctgcctcaaggccatcgcgctcttcacgcccgacgcctgtggcctctcagacccggcccacgttgagagcctgcaggagaaggcgcaggtggccctcaccgagtatgtgcgggcgcagtacccgtcccagccccagcgcttcgggcgcctgctgctgcggctccccgccctgcgcgcggtccctgcctccctcatctcccagctgttcttcatgcgcctggtggggaagacgcccattgagacactgatcagagacatgctgctgtcggggagtaccttcaactggccctacggctcgggccagttgccaactttcttgtacaaagtggttgatatcggtaagcctatccctaaccctctcctcggtctcgattctacgtagtaatgaactagtccgtaacttgaaagtatttcgatttcttggctttatatatcttgtggaaaggacgatcctgcaatttatgtttccaaacg

SEQ ID NO: 3377 - DNA, 1460 bp, Homo sapiens
  source 1..1460: mol_type = genomic DNA
atcgattgatcaacaagtttgtacaaaaaagttggcaccatgtcccaggactcggtgaccttcgcagacgtggctgtgaacttcaccaaagaggagtggaccctgctggacccagctcagaggaatctctacagagacgtgatgctggaaaattctaggaacttggcattcatagattgggcaactccatgtaaaaccaaagacgcaacccctcagccggatattcttcctaaaagaacatttcctgaagccaacagagtgtgtctcacgagcatcagttcccagcactccacattaagagaagactggagatgccccaaaacagaggaaccacacaggcagggggtgaataatgtgaagccacctgcagttgcccctgagaaagatgaatctcctgttagcatttgtgaagatcatgaaatgaggaaccactctaaacctacctgcaggcttgtgccttcacagggagattccataagacaatgtatcctaacacgtgactcaagtattttcaagtataatcctgtcttaaacgatagtcaaaaaacacatgaaaacaacgaagacgatggagtcttggggtggaacattcagtgggttccgtgtgggagaaaaacagagctgaaatcaagcacatggactggcagtcagaacactgtgcatcatatacgtgatgaaattgatacgggggccaacaggcaccagcggaatccatttggaaaagctttccgtgaagacggatcccttagggcacacaacactcatggtcgagagaaaatgtatgattttactcagtgcgagaacacctccagaaataactcaattcacgccatgcagatgcagttgtataccgcagagacaaacaagaaggattgtcaaactggggcaacctctgccaacgctccaaattccggttcacacaagagtcattgcactggagagaaaacccataaatgccccgaatgtgggagagcctttttttatcagtcattccttatgagacatatgaaaattcacactggagagaaaccgtatgaatgtgggaaatgtgggaaagcctttagatattccttacaccttaataaacatttaagaaagcatgttgtgcagaagaagccctacgaatgtgaagaatgtgggaaagtcattcgggagtcctcaaaatatacacatataaggagccacactggagagaaaccctataaatgtaagacatgtggaaaagactttgcaaagtcgtcaggacttaaaaaacatcttaagactcacaaagatgagaagccctgtgaattgccaactttcttgtacaaagtggttgatatcggtaagcctatccctaaccctctcctcggtctcgattctacgtagtaatgaactagtccgtaacttgaaagtatttcgatttcttggctttatatatcttgtggaaaggacgacacctagctttgattgtgagctag

SEQ ID NO: 3378 - DNA, 1022 bp, Homo sapiens
  source 1..1022: mol_type = genomic DNA
atcgattgatcaacaagtttgtacaaaaaagttggcatggccaccactggggccctgggcaactactacgtggactcgttcctgctgggcgccgacgccgcggatgagctgagcgttggccgctatgcgccggggaccctgggccagcctccccggcaggcggcgacgctggccgagcaccccgacttcagcccgtgcagcttccagtccaaggcgacggtgtttggcgcctcgtggaacccagtgcacgcggcgggcgccaacgctgtacccgctgcggtgtaccaccaccatcaccaccacccctacgtgcacccccaggcgcccgtggcggcggcggcgccggacggcaggtacatgcgctcctggctggagcccacgcccggtgcgctctccttcgcgggcttgccctccagccggccttatggcattaaacctgaaccgctgtcggccagaaggggtgactgtcccacgcttgacactcacactttgtccctgactgactatgcttgtggttctcctccagttgatagagaaaaacaacccagcgaaggcgccttctctgaaaacaatgctgagaatgagagcggcggagacaagccccccatcgatcccaataacccagcagccaactggcttcatgcgcgctccactcggaaaaagcggtgcccctatacaaaacaccagaccctggaactggagaaagagtttctgttcaacatgtacctcaccagggaccgcaggtacgaggtggctcgactgctcaacctcaccgagaggcaggtcaagatctggttccagaaccgcaggatgaaaatgaagaaaatcaacaaagaccgagcaaaagacgagtgcccaactttcttgtacaaagtggttgatatcggtaagcctatccctaaccctctcctcggtctcgattctacgtagtaatgaactagtccgtaacttgaaagtatttcgatttcttggctttatatatcttgtggaaaggacgaatcttaccggcatgccgcgcacta

SEQ ID NO: 3379 - DNA, 2276 bp, Homo sapiens
  source 1..2276: mol_type = genomic DNA
accgccaccatggatggtgatcagattgttgtggaaatacaagaagcagtttttgtttctaatattgtggattctgacataactgtgcataactttgttcctgatgacccagactcagttgtaatccaagatgttgttgaagatgttgtcatagaggaggatgttcagtgctcagatatcttagaagaggcagatgtatctgaaaatgtcatcattcctgagcaagtgctggactcagatgtaactgaagaagtttctttaccacactgcacagtcccagatgatgttttagcttctgacattacttcaacctcaatgtctatgccagaacatgttttaacgagtgaatccatgcatgtgtgtgacattggacatgttgaacatatggtgcatgatagtgtagtggaagcagaaatcattactgatcctctgacgagtgacatagtttcagaagaagtattggtagcagactgtgcccctgaagcagtcatagatgccagcgggatctcagtggaccagcaagataatgacaaagccagctgtgaggactacctaatgatttcgttggatgatgctggcaaaatagaacatgatggttccactggagtgaccatcgatgcagaatcagaaatggatccttgtaaagtggatagcacttgtcctgaagtcatcaaggtgtacatttttaaagctgaccctggagaagatgacttaggtggaactgtagacattgtggagagtgaacctgaaaatgatcatggagttgaactacttgatcagaacagcagtattcgtgttcccagggaaaagatggtttatatgactgtcaatgactctcaacaagaagatgaagatttaagtaataattctgatggaattgaaaaccggaatggcactgcaagtgccctcttgcacatagatgagtctgctggccttggcagactggctaaacagaaaccaaagaaaaagagaagacctgattccaggcagtaccaaacagcaataattattggccctgatggtcatcctttgactgtctatccttgcatgatttgtgggaagaagtttaagtcgaggggttttttgaaaagacacatgaaaaaccatcctgaacaccttgccaagaagaagtaccactgtactgactgtgattacactaccaataagaagataagtttacataaccacctggagagccacaagctgaccagcaaggcagagaaggccattgaatgtgatgagtgtgggaagcatttttctcatgcaggggctttgtttactcacaaaatggtgcataaggaaaaaggggccaacaaaatgcacaagtgtaaattctgtgaatatgagacagctgaacaggggttattgaatcgccacctcttggcagtccacagcaagaactttcctcatatttgtgtggagtgtggtaaaggtttccgacacccgtcggaactgagaaagcacatgcgaatccataccggcgagaagccataccaatgccagtactgtgaatataggtctgcagactcttctaacttgaaaacacatataaaaacaaagcatagtaaagagatgccattcaagtgtgacatttgtcttctgactttctcagataccaaagaagtgcagcaacatactcttgtccaccaagaaagcaaaacacatcagtgtttgcattgcgaccacaagagttcaaactcaagtgatttgaaacgacatgtaatttcagttcatacgaaagactatcctcataagtgtgagatgtgcgagaaaggctttcacaggccttcagaacttaagaaacatgtggctgtccacaaaggtaaaaaaatgcaccaatgtagacattgtgactttaagattgcagacccatttgttctaagtcgccatattctctcagttcacacaaaggatcttccatttaggtgtaagagatgtagaaagggatttaggcaacaaaatgagcttaaaaagcatatgaagacacacagtggcaggaaagtatatcagtgtgagtactgtgagtatagcactacagatgcctcaggctttaaacggcacgttatttccattcatacaaaagactatcctcatcggtgtgagtactgcaagaaaggcttccgaagaccttcagaaaagaaccagcacataatgagacaccataaagaagttggtctgccctagtaatgaactagtccgtaacttgaaagtatttcgatttcttggctttatatatcttgtggaaaggacgacggtaaataatataggtccgtatt

SEQ ID NO: 3380 - DNA, 2387 bp, Homo sapiens
  source 1..2387: mol_type = genomic DNA
atcgattgatcaacaagtttgtacaaaaaagttggcatggaaggtgatgcagtcgaagccattgtggaggagtccgaaacttttattaaaggaaaggagagaaagacttaccagagacgccgggaagggggccaggaagaagatgcctgccacttaccccagaaccagacggatgggggtgaggtggtccaggatgtcaacagcagtgtacagatggtgatgatggaacagctggaccccacccttcttcagatgaagactgaagtaatggagggcacagtggctccagaagcagaggctgctgtggacgatacccagattataactttacaggttgtaaatatggaggaacagcccataaacataggagaacttcagcttgttcaagtacctgttcctgtgactgtacctgttgctaccacttcagtagaagaacttcagggggcttatgaaaatgaagtgtctaaagagggccttgcggaaagtgaacccatgatatgccacaccctacctttgcctgaagggtttcaggtggttaaagtgggggccaatggagaggtggagacactagaacaaggggaacttccaccccaggaagatcctagttggcaaaaagacccagactatcagccaccagccaaaaaaacaaagaaaaccaaaaagagcaaactgcgttatacagaggagggcaaagatgtagatgtgtctgtctacgattttgaggaagaacagcaggagggtctgctatcagaggttaatgcagagaaagtggttggtaatatgaagcctccaaagccaacaaaaattaaaaagaaaggtgtaaagaagacattccagtgtgagctttgcagttacacgtgtccacggcgttcaaatttggatcgtcacatgaaaagccacactgatgagagaccacacaagtgccatctctgtggcagggcattcagaacagtcaccctcctgaggaatcaccttaacacacacacaggtactcgtcctcacaagtgcccagactgcgacatggcctttgtgaccagtggagaattggttcggcatcgtcgttacaaacacacccacgagaagccattcaagtgttccatgtgcgattacgccagtgtagaagtcagcaaattaaaacgtcacattcgctctcatactggagagcgtccgtttcagtgcagtttgtgcagttatgccagcagggacacatacaagctgaaaaggcacatgagaacccattcaggggaaaagccttatgaatgttatatttgtcatgctcggtttacccaaagtggtaccatgaagatgcacattttacagaagcacacagaaaatgtggccaaatttcactgtccccactgtgacacagtcatagcccgaaaaagtgatttgggtgtccacttgcgaaagcagcattcctatattgagcaaggcaagaaatgccgttactgtgatgctgtgtttcatgagcgctatgccctcatccagcatcagaagtcacacaagaatgagaagcgctttaagtgtgaccagtgtgattacgcttgtagacaggagaggcacatgatcatgcacaagcgcacccacaccggggagaagccttacgcctgcagccactgcgataagaccttccgccagaagcagcttctcgacatgcacttcaagcgctatcacgaccccaacttcgtccctgcggcttttgtctgttctaagtgtgggaaaacatttacacgtcggaataccatggcaagacatgctgataattgtgctggcccagatggcgtagagggggaaaatggaggagaaacgaagaagagtaaacgtggaagaaaaagaaagatgcgctctaagaaagaagattcctctgacagtgaaaatgctgaaccagatctggacgacaatgaggatgaggaggagcctgccgtagaaattgaacctgagccagagcctcagcctgtgaccccagccccaccacccgccaagaagcggagaggacgaccccctggcagaaccaaccagcccaaacagaaccagccaacagctatcattcaggttgaagaccagaatacaggtgcaattgagaacattatagttgaagtaaaaaaagagccagatgctgagcccgcagagggagaggaagaggaggcccagccagctgccacagatgcccccaacggagacctcacgcccgagatgatcctcagcatgatggaccggtgcccaactttcttgtacaaagtggttgatatcggtaagcctatccctaaccctctcctcggtctcgattctacgtagtaatgaactagtccgtaacttgaaagtatttcgatttcttggctttatatatcttgtggaaaggacgaaccacaccgtttgggacacatctc

SEQ ID NO: 3381 - DNA, 1322 bp, Homo sapiens
  source 1..1322: mol_type = genomic DNA
atcgattgatcaacaagtttgtacaaaaaagttggcatggcgaagcagtacgactcggtggagtgccctttttgtgatgaagtttccaaatacgagaagctcgccaagatcggccaaggcaccttcggggaggtgttcaaggccaggcaccgcaagaccggccagaaggtggctctgaagaaggtgctgatggaaaacgagaaggaggggttccccattacagccttgcgggagatcaagatccttcagcttctaaaacacgagaatgtggtcaacttgattgagatttgtcgaaccaaagcttccccctataaccgctgcaagggtagtatatacctggtgttcgacttctgcgagcatgaccttgctgggctgttgagcaatgttttggtcaagttcacgctgtctgagatcaagagggtgatgcagatgctgcttaacggcctctactacatccacagaaacaagatcctgcatagggacatgaaggctgctaatgtgcttatcactcgtgatggggtcctgaagctggcagactttgggctggcccgggccttcagcctggccaagaacagccagcccaaccgctacaccaaccgtgtggtgacactctggtaccggcccccggagctgttgctcggggagcgggactacggcccccccattgacctgtggggtgctgggtgcatcatggcagagatgtggacccgcagccccatcatgcagggcaacacggagcagcaccaactcgccctcatcagtcagctctgcggctccatcacccctgaggtgtggccaaacgtggacaactatgagctgtacgaaaagctggagctggtcaagggccagaagcggaaggtgaaggacaggctgaaggcctatgtgcgtgacccatacgcactggacctcatcgacaagctgctggtgctggaccctgcccagcgcatcgacagcgatgacgccctcaaccacgacttcttctggtccgaccccatgccctccgacctcaagggcatgctctccacccacctgacgtccatgttcgagtacttggcaccaccgcgccggaagggcagccagatcacccagcagtccaccaaccagagtcgcaatcccgccaccaccaaccagacggagtttgagcgcgtcttctgcccaactttcttgtacaaagtggttgatatcggtaagcctatccctaaccctctcctcggtctcgattctacgtagtaatgaactagtccgtaacttgaaagtatttcgatttcttggctttatatatcttgtggaaaggacgatgcattgattcacatcgactactc

SEQ ID NO: 3382 - DNA, 824 bp, Homo sapiens
  source 1..824: mol_type = genomic DNA
atcgattgatcaacaagtttgtacaaaaaagttggcatggaacccttggccagcaacatccaggtcctgctgcaggcggccgagttcctggagcgccgtgagagagaggccgagcatggttatgcgtccctgtgcccgcatcgcagtccaggccccatccacaggaggaagaagcgacccccccaggctcctggcgcgcaggacagcgggcggtcagtgcacaatgaactggagaagcgcaggagggcccagttgaagcggtgcctggagcggctgaagcagcagatgcccctgggggccgactgtgcccggtacaccacgctgagcctgctgcgccgtgccaggatgcacatccagaagctggaggatcaggagcagcgggcccgacagctcaaggagaggctgcgcagcaagcagcagagcctgcagcggcagctggagcagctccgggggctggcaggggcggccgagcgggagcggctgcgggcggacagtctggactcctcaggcctctcctctgagcgctcagactcagaccaagaggagctggaggtggatgtggagagcctggtgtttgggggtgaggccgagctgctgcggggcttcgtcgccggccaggagcacagctactcgcacggcggcggcgcctggctatgcccaactttcttgtacaaagtggttgatatcggtaagcctatccctaaccctctcctcggtctcgattctacgtagtaatgaactagtccgtaacttgaaagtatttcgatttcttggctttatatatcttgtggaaaggacgacacgatgttcacaggcagggtatg

SEQ ID NO: 3383 - DNA, 1190 bp, Homo sapiens
  source 1..1190: mol_type = genomic DNA
atcgattgatcaacaagtttgtacaaaaaagttggcaccatgcaaagaaatgcaatgtatttaaagaatgtggcagagactgcttgtaactttcaactaactcaatatcaaataagtcatgctaatcagaaaccctatgaatgtcagatatgtggaaagccctttagaaagcgtgcccaccttacccaacataatcgaattcacactggtgggaaaccatatgaatgcaaagaatgtgggaaagtgtttatctgttgttcaacattgattcaacataagagaactcacactagtgagaaaccctatgaatgtctggaatgtagaaagacgtttaggcggagtgcacatcttattcgacatcaaagaattcatactggtgagaaaccttataaatgtaagcaatgttggaaggcctttgcttctgtttctgatttaatagacatcggaaaattcacactgatgagagactttacgaatgtacagaatgtgggaaggcatttaacaatcgctcaactcttattcagcatcagagaattcacactggtgagaagtcctttgaatgtaaggaatgtggcaaagcattcaataattgctcaacacttactcaacaccagagaactcatactaatgagaaatcttatgaatgtcaggaatgtaaaaaggcttttaggcaaagtgcacatcttactcaacatcaaagaattcatactggtgagaaaccatatgagtgtaagtaatgtgggaaggctttcacttgtgtttctgattttaatagacatcagagaattcacactggtgaaaaaccctatgaatgtaaagaatgtggtagagcttttaacaattgttcagctcttattcaacaccagagaattcacactggtgagaaggcttatgaatataagcagtgtgggaaggtttttgtctcctgtccaacacttgttcaacatcagagaacacatactaatgaaaaaccttatgaatgtcagtaatgcaagaaggccttcaagcataatgcacatcttgccaactttcttgtacaaagtggttgatatcggtaagcctatccctaaccctctcctcggtctcgattctacgtagtaatgaactagtccgtaacttgaaagtatttcgatttcttggctttatatatcttgtggaaaggacgaatatcagttcttggggctgtgtgt

SEQ ID NO: 3384 - DNA, 1175 bp, Homo sapiens
  source 1..1175: mol_type = genomic DNA
atcgattgatcaacaagtttgtacaaaaaagttggcatggccgctgcgcgcccagaggcccagagtcggagctcaccgactccggagtcgcgatcccaggagccactggacctggtcctggtgcctgatgactgccggcctggcacacccccgagtgacctcatcgagatccaggtggtgaaggtgacggacaccacgctggtccctgagcccccggagccaggttctttccactgtgccttgtgccctgctgccttccggctggtttccgagctgctgttccacgaacatggccacttggctggggccgagggaggcgggcagggtggggacccgagccggtgccacgtgtgcggccacagctgcccgggccccgccagcctgcgcgcgcactacagcttgcacacgggggagcggccctaccgctgcgcgctctgcccccgcgccttcaaggccttggcgcccctgctccggcaccagcaccggcacggggtggagccgggcacctctcggaggcctccggacacagcggccgttgcagaacagaggcccggggtggccccggagagggcggaggtggtgatggcggcggcggcggcgggcgcagcggtggggaagccttttgcctgcaggttctgcgccaagcccttccgccgctcctcagacatgcgagaccacgagcgcgtgcacactggcgagcggccataccattgcggcatctgcggcaagggcttcacccagtcctcggtgcttagcggccacgcccgcatccacactggcgagcgcccgttccgctgcacgctctgcgaccgcaccttcaacaactcctccaacttccgcaagcaccagcgcacccacttccacgggccggggccggggctgggagactctggaggccagctgggctcgtcggcggctgaggggtcggggagcgggtgtggggtaggggaccctgcggaggaggggcggggggagaccgcgaaggtgaaggtggaggccgaccagtacccaactttcttgtacaaagtggttgatatcggtaagcctatccctaaccctctcctcggtctcgattctacgtagtaatgaactagtccgtaacttgaaagtatttcgatttcttggctttatatatcttgtggaaaggacgaacacaatgctgctctcaggcactc

SEQ ID NO: 3385 - DNA, 1211 bp, Homo sapiens
  source 1..1211: mol_type = genomic DNA
atcgattgatcaacaagtttgtacaaaaaagttggcatgggcagcgccagcccgggtctgagcagcgtatcccccagccacctcctgctgccccccgacacggtgtcgcggacaggcttggagaaggcggcagcgggggcagtgggtctcgagagacgggactggagtcccagtccacccgccacgcccgagcagggcctgtccgccttctacctctcctactttgacatgctgtaccctgaggacagcagctgggcagccaaggcccctggggccagcagtcgggaggagccacctgaggagcctgagcagtgcccggtcattgacagccaagccccagcgggcagcctggacttggtgcccggcgggctgaccttggaggagcactcgctggagcaggtgcagtccatggtggtgggcgaagtgctcaaggacatcgagacggcctgcaagctgctcaacatcaccgcagatcccatggactggagccccagcaatgtgcagaagtggctcctgtggacagagcaccaataccggctgccccccatgggcaaggccttccaggagctggcgggcaaggagctgtgcgccatgtcggaggagcagttccgccagcgctcgcccctgggtggggatgtgctgcacgcccacctggacatctggaagtcagcggcctggatgaaagagcggacttcacctggggcgattcactactgtgcctcgaccagtgaggagagctggaccgacagcgaggtggactcatcatgctccgggcagcccatccacctgtggcagttcctcaaggagttgctactcaagccccacagctatggccgcttcattaggtggctcaacaaggagaagggcatcttcaaaattgaggactcagcccaggtggcccggctgtggggcatccgcaagaaccgtcccgccatgaactacgacaagctgagccgctccatccgccagtattacaagaagggcatcatccggaagccagacatctcccagcgcctcgtctaccagttcgtgcaccccatctgcccaactttcttgtacaaagtggttgatatcggtaagcctatccctaaccctctcctcggtctcgattctacgtagtaatgaactagtccgtaacttgaaagtatttcgatttcttggctttatatatcttgtggaaaggacgaagatacactttattaatgcgaatc

SEQ ID NO: 3386 - DNA, 2684 bp, Homo sapiens
  source 1..2684: mol_type = genomic DNA
atcgattgatcaacaagtttgtacaaaaaagttggcatggagggcgctggcggcgcgaacgacaagaaaaagataagttctgaacgtcgaaaagaaaagtctcgagatgcagccagatctcggcgaagtaaagaatctgaagttttttatgagcttgctcatcagttgccacttccacataatgtgagttcgcatcttgataaggcctctgtgatgaggcttaccatcagctatttgcgtgtgaggaaacttctggatgctggtgatttggatattgaagatgacatgaaagcacagatgaattgcttttatttgaaagccttggatggttttgttatggttctcacagatgatggtgacatgatttacatttctgataatgtgaacaaatacatgggattaactcagtttgaactaactggacacagtgtgtttgattttactcatccatgtgaccatgaggaaatgagagaaatgcttacacacagaaatggccttgtgaaaaagggtaaagaacaaaacacacagcgaagcttttttctcagaatgaagtgtaccctaactagccgaggaagaactatgaacataaagtctgcaacatggaaggtattgcactgcacaggccacattcacgtatatgataccaacagtaaccaacctcagtgtgggtataagaaaccacctatgacctgcttggtgctgatttgtgaacccattcctcacccatcaaatattgaaattcctttagatagcaagactttcctcagtcgacacagcctggatatgaaattttcttattgtgatgaaagaattaccgaattgatgggatatgagccagaagaacttttaggccgctcaatttatgaatattatcatgctttggactctgatcatctgaccaaaactcatcatgatatgtttactaaaggacaagtcaccacaggacagtacaggatgcttgccaaaagaggtggatatgtctgggttgaaactcaagcaactgtcatatataacaccaagaattctcaaccacagtgcattgtatgtgtgaattacgttgtgagtggtattattcagcacgacttgattttctcccttcaacaaacagaatgtgtccttaaaccggttgaatcttcagatatgaaaatgactcagctattcaccaaagttgaatcagaagatacaagtagcctctttgacaaacttaagaaggaacctgatgctttaactttgctggccccagccgctggagacacaatcatatctttagattttggcagcaacgacacagaaactgatgaccagcaacttgaggaagtaccattatataatgatgtaatgctcccctcacccaacgaaaaattacagaatataaatttggcaatgtctccattacccaccgctgaaacgccaaagccacttcgaagtagtgctgaccctgcactcaatcaagaagttgcattaaaattagaaccaaatccagagtcactggaactttcttttaccatgccccagattcaggatcagacacctagtccttccgatggaagcactagacaaagttcacctgagcctaatagtcccagtgaatattgtttttatgtggatagtgatatggtcaatgaattcaagttggaattggtagaaaaactttttgctgaagacacagaagcaaagaacccattttctactcaggacacagatttagacttggagatgttagctccctatatcccaatggatgatgacttccagttacgttccttcgatcagttgtcaccattagaaagcagttccgcaagccctgaaagcgcaagtcctcaaagcacagttacagtattccagcagactcaaatacaagaacctactgctaatgccaccactaccactgccaccactgatgaattaaaaacagtgacaaaagaccgtatggaagacattaaaatattgattgcatctccatctcctacccacatacataaagaaactactagtgccacatcatcaccatatagagatactcaaagtcggacagcctcaccaaacagagcaggaaaaggagtcatagaacagacagaaaaatctcatccaagaagccctaacgtgttatctgtcgctttgagtcaaagaactacagttcctgaggaagaactaaatccaaagatactagctttgcagaatgctcagagaaagcgaaaaatggaacatgatggttcactttttcaagcagtaggaattggaacattattacagcagccagacgatcatgcagctactacatcactttcttggaaacgtgtaaaaggatgcaaatctagtgaacagaatggaatggagcaaaagacaattattttaataccctctgatttagcatgtagactgctggggcaatcaatggatgaaagtggattaccacagctgaccagttatgattgtgaagttaatgctcctatacaaggcagcagaaacctactgcagggtgaagaattactcagagctttggatcaagttaactgaccaactttcttgtacaaagtggttgatatcggtaagcctatccctaaccctctcctcggtctcgattctacgtagtaatgaactagtccgtaacttgaaagtatttcgatttcttggctttatatatcttgtggaaaggacgacccacaatgcggtacgtgcaggga

SEQ ID NO: 3387 - DNA, 2690 bp, Homo sapiens
  source 1..2690: mol_type = genomic DNA
atcgattgatcaacaagtttgtacaaaaaagcaggcaccatggagggcgccggcggcgcgaacgacaagaaaaagataagttctgaacgtcgaaaagaaaagtctcgagatgcagccagatctcggcgaagtaaagaatctgaagttttttatgagcttgctcatcagttgccacttccacataatgtgagttcgcatcttgataaggcctctgtgatgaggcttaccatcagctatttgcgtgtgaggaaacttctggatgctggtgatttggatattgaagatgacatgaaagcacagatgaattgcttttatttgaaagccttggatggttttgttatggttctcacagatgatggtgacatgatttacatttctgataatgtgaacaaatacatgggattaactcagtttgaactaactggacacagtgtgtttgattttactcatccatgtgaccatgaggaaatgagagaaatgcttacacacagaaatggccttgtgaaaaagggtaaagaacaaaacacacagcgaagcttttttctcagaatgaagtgtaccctaactagccgaggaagaactatgaacataaagtctgcaacatggaaggtattgcactgcacaggccacattcacgtatatgataccaacagtaaccaacctcagtgtgggtataagaaaccacctatgacctgcttggtgctgatttgtgaacccattcctcacccatcaaatattgaaattcctttagatagcaagactttcctcagtcgacacagcctggatatgaaattttcttattgtgatgaaagaattaccgaattgatgggatatgagccagaagaacttttaggccgctcaatttatgaatattatcatgctttggactctgatcatctgaccaaaactcatcatgatatgtttactaaaggacaagtcaccacaggacagtacaggatgcttgccaaaagaggtggatatgtctgggttgaaactcaagcaactgtcatatataacaccaagaattctcaaccacagtgcattgtatgtgtgaattacgttgtgagtggtattattcagcacgacttgattttctcccttcaacaaacagaatgtgtccttaaaccggttgaatcttcagatatgaaaatgactcagctattcaccaaagttgaatcagaagatacaagtagcctctttgacaaacttaagaaggaacctgatgctttaactttgctggccccagccgctggagacacaatcatatctttagattttggcagcaacgacacagaaactgatgaccagcaacttgaggaagtaccattatataatgatgtaatgctcccctcacccaacgaaaaattacagaatataaatttggcaatgtctccattacccaccgctgaaacgccaaagccacttcgaagtagtgctgaccctgcactcaatcaagaagttgcattaaaattagaaccaaatccagagtcactggaactttcttttaccatgccccagattcaggatcagacacctagtccttccgatggaagcactagacaaagttcacctgagcctaatagtcccagtgaatattgtttttatgtggatagtgatatggtcaatgaattcaagttggaattggtagaaaaactttttgctgaagacacagaagcaaagaacccattttctactcaggacacagatttagacttggagatgttagctccctatatcccaatggatgatgacttccagttacgttccttcgatcagttgtcaccattagaaagcagttccgcaagccctgaaagcgcaagtcctcaaagcacagttacagtattccagcagactcaaatacaagaacctactgctaatgccaccactaccactgccaccactgatgaattaaaaacagtgacaaaagaccgtatggaagacattaaaatattgattgcatctccatctcctacccacatacataaagaaactactagtgccacatcatcaccatatagagatactcaaagtcggacagcctcaccaaacagagcaggaaaaggagtcatagaacagacagaaaaatctcatccaagaagccctaacgtgttatctgtcgctttgagtcaaagaactacagttcctgaggaagaactaaatccaaagatactagctttgcagaatgctcagagaaagcgaaaaatggaacatgatggttcactttttcaagcagtaggaattggaacattattacagcagccagacgatcatgcagctactacatcactttcttggaaacgtgtaaaaggatgcaaatctagtgaacagaatggaatggagcaaaagacaattattttaataccctctgatttagcatgtagactgctggggcaatcaatggatgaaagtggattaccacagctgaccagttatgattgtgaagttaatgctcctatacaaggcagcagaaacctactgcagggtgaagaattactcagagctttggatcaagttaactgagacccagctttcttgtacaaagtggttgatatcggtaagcctatccctaaccctctcctcggtctcgattctacgtagtaatgaactagtccgtaacttgaaagtatttcgatttcttggctttatatatcttgtggaaaggacgagggcccgctgcgccatcccgcctt

SEQ ID NO: 3388 - DNA, 2459 bp, Homo sapiens
  source 1..2459: mol_type = genomic DNA
atcgattgatcaacaagtttgtacaaaaaagttggcatgggccagactgggaagaaatctgagaagggaccagtttgttggcggaagcgtgtaaaatcagagtacatgcgactgagacagctcaagaggttcagacgagctgatgaagtaaagagtatgtttagttccaatcgtcagaaaattttggaaagaacggaaatcttaaaccaagaatggaaacagcgaaggatacagcctgtgcacatcctgacttctgtgagctcattgcgcgggactagggagtgttcggtgaccagtgacttggattttccaacacaagtcatcccattaaagactctgaatgcagttgcttcagtacccataatgtattcttggtctcccctacagcagaattttatggtggaagatgaaactgttttacataacattccttatatgggagatgaagttttagatcaggatggtactttcattgaagaactaataaaaaattatgatgggaaagtacacggggatagagaatgtgggtttataaatgatgaaatttttgtggagttggtgaatgcccttggtcaatataatgatgatgacgatgatgatgatggagacgatcctgaagaaagagaagaaaagcagaaagatctggaggatcaccgagatgataaagaaagccgcccacctcggaaatttccttctgataaaatttttgaagccatttcctcaatgtttccagataagggcacagcagaagaactaaaggaaaaatataaagaactcaccgaacagcagctcccaggcgcacttcctcctgaatgtacccccaacatagatggaccaaatgctaaatctgttcagagagagcaaagcttacactcctttcatacgcttttctgtaggcgatgttttaaatatgactgcttcctacatcgtaagtgcaattattcttttcatgcaacacccaacacttataagcggaagaacacagaaacagctctagacaacaaaccttgtggaccacagtgttaccagcatttggagggagcaaaggagtttgctgctgctctcaccgctgagcggataaagaccccaccaaaacgtccaggaggccgcagaagaggacggcttcccaataacagtagcaggcccagcacccccaccattaatgtgctggaatcaaaggatacagacagtgatagggaagcagggactgaaacggggggagagaacaatgataaagaagaagaagagaagaaagatgaaacttcgagctcctctgaagcaaattctcggtgtcaaacaccaataaagatgaagccaaatattgaacctcctgagaatgtggagtggagtggtgctgaagcctcaatgtttagagtcctcattggcacttactatgacaatttctgtgccattgctaggttaattgggaccaaaacatgtagacaggtgtatgagtttagagtcaaagaatctagcatcatagctccagctcccgctgaggatgtggatactcctccaaggaaaaagaagaggaaacaccggttgtgggctgcacactgcagaaagatacagctgaaaaaggacggctcctctaaccatgtttacaactatcaaccctgtgatcatccacggcagccttgtgacagttcgtgcccttgtgtgatagcacaaaatttttgtgaaaagttttgtcaatgtagttcagagtgtcaaaaccgctttccgggatgccgctgcaaagcacagtgcaacaccaagcagtgcccgtgctacctggctgtccgagagtgtgaccctgacctctgtcttacttgtggagccgctgaccattgggacagtaaaaatgtgtcctgcaagaactgcagtattcagcggggctccaaaaagcatctattgctggcaccatctgacgtggcaggctgggggatttttatcaaagatcctgtgcagaaaaatgaattcatctcagaatactgtggagagattatttctcaagatgaagctgacagaagagggaaagtgtatgataaatacatgtgcagctttctgttcaacttgaacaatgattttgtggtggatgcaacccgcaagggtaacaaaattcgttttgcaaatcattcggtaaatccaaactgctatgcaaaagttatgatggttaacggtgatcacaggataggtatttttgccaagagagccatccagactggcgaagagctgttttttgattacagatacagccaggctgatgccctgaagtatgtcggcatcgaaagagaaatggaaatcccttgcccaactttcttgtacaaagtggttgatatcggtaagcctatccctaaccctctcctcggtctcgattctacgtagtaatgaactagtccgtaacttgaaagtatttcgatttcttggctttatatatcttgtggaaaggacgatcggacaaaatctcattttcataa

SEQ ID NO: 3389 - DNA, 1616 bp, Homo sapiens
  source 1..1616: mol_type = genomic DNA
atcgattgatcaacaagtttgtacaaaaaagttggcatggcgcaaaggtacgatgagctgccccattacggcgggatggacggagtaggggttcccgcttccatgtacggagaccctcacgcgccgcggccgatccccccggttcaccacctgaaccacgggccgccgctccacgccacacagcactacggcgcgcacgccccgcaccccaatgtcatgccggccagtatgggatccgctgtcaacgacgccttgaagcgggacaaggacgcgatctatgggcacccgttgtttcctctgttagctctggtctttgagaagtgcgagctggcgacctgcactccccgggaacctggagtggctggcggagacgtctgctcctccgactccttcaacgaggacatcgcggtcttcgccaagcaggttcgcgccgaaaagccacttttttcctcaaatccagagctggacaatttgatgatacaagcaatacaagtactaaggtttcatcttttggagttagaaaaggtccacgaactgtgcgataacttctgccaccgatacattagctgtttgaaggggaaaatgcccatcgacctcgtcattgatgaaagagacggcagctccaagtcagatcatgaagaactttcaggctcctccacaaatctcgctgaccataacccttcttcttggcgagaccacgatgatgcaacctcaacccactcagcaggcaccccagggccctccagtgggggccatgcttcccagagcggagacaacagcagtgagcaaggggatggtttagacaacagtgtagcttcacctggtacaggtgacgatgatgatccggataaggacaaaaaacgccagaagaaaagaggcattttccccaaagtagcaacaaatatcatgagagcatggctcttccagcatctcacacatccgtacccttccgaagagcagaagaaacagttagcgcaagacacaggacttacaattctccaagtaaacaactggtttattaatgccagaagaagaatagtacagcccatgattgaccagtcaaatcgagcagtgagccaaggagcagcatatagtccagagggtcagcccatggggagctttgtgttggatggtcagcaacacatggggatccggcctgcaggtttgcagagcatgccaggggactacgtttctcagggtggtcctatgggaatgagtatggcacagccaagttacactcctccccagatgaccccacaccctactcaattaagacatggacccccaatgcattcatatttgccaagccatccccaccacccagccatgatgatgcacggaggaccccctacccaccctggaatgactatgtcagcacagagccccacaatgttaaattctgtagatcccaatgttggcggacaggttatggacattcatgcccaatacccaactttcttgtacaaagtggttgatatcggtaagcctatccctaaccctctcctcggtctcgattctacgtagtaatgaactagtccgtaacttgaaagtatttcgatttcttggctttatatatcttgtggaaaggacgaactgcggctgatcagatccccagg

SEQ ID NO: 3390 - DNA, 1349 bp, Homo sapiens
  source 1..1349: mol_type = genomic DNA
atcgattgatcaacaagtttgtacaaaaaagttggcatggacggagtaggggttcccgcttccatgtacggagaccctcacgcgccgcggccgatccccccggttcaccacctgaaccacgggccgccgctccacgccacacagcactacggcgcgcacgccccgcaccccaatgtcatgccggccagtatgggatccgctgtcaacgacgccttgaagcgggacaaggacgcgatctatgggcacccgttgtttcctctgttagctctggtctttgagaagtgcgagctggcgacctgcactccccgggaacctggagtggctggcggagacgtctgctcctccgactccttcaacgaggacatcgcggtcttcgccaagcaggttcgcgccgaaaagccacttttttcctcaaatccagagctggacaatttgatgatacaagcaatacaagtactaaggtttcatcttttggagttagaaaaggtccacgaactgtgcgataacttctgccaccgatacattagctgtttgaaggggaaaatgcccatcgacctcgtcattgatgaaagagacggcagctccaagtcagatcatgaagaactttcaggctcctccacaaatctcgctgaccataacccttcttcttggcgagaccacgatgatgcaacctcaacccactcagcaggcaccccagggccctccagtgggggccatgcttcccagagcggagacaacagcagtgagcaaggggatggtttagacaacagtgtagcttcacctggtacaggtgacgatgatgatccggataaggacaaaaaacgccagaagaaaagaggcattttccccaaagtagcaacaaatatcatgagagcatggctcttccagcatctcacacatccgtacccttccgaagagcagaagaaacagttagcgcaagacacaggacttacaattctccaagtaaacaactggtttattaatgccagaagaagaatagtacagcccatgattgaccagtcaaatcgagcagtgagccaaggagcagcatatagtccagagggtcagcccatggggagctttgtgttggatggtcagcaacacatggggatccggcctgcaggacctatgagtggaatgggcatgaatatgggcatggatgggcaatggcactacatgtacccaactttcttgtacaaagtggttgatatcggtaagcctatccctaaccctctcctcggtctcgattctacgtagtaatgaactagtccgtaacttgaaagtatttcgatttcttggctttatatatcttgtggaaaggacgaacacacccaatcggacacgtgcag

SEQ ID NO: 3391 - DNA, 1022 bp, Homo sapiens
  source 1..1022: mol_type = genomic DNA
atcgattgatcaacaagtttgtacaaaaaagttggcatgaattctgattcgagctctgtctccagcagagcttcatctccggacatggatgagatgtacctgagggaccaccaccaccgccaccaccaccaccaggagagccgtctcaactcggtctcgtccacgcagggcgatatgatgcagaagatgcccggggaaagcctctcgcgggctggcgccaaggccgcgggagagagcagcaagtacaaaatcaagaagcagctgtcggagcaggacctacagcagttgaggctgaagatcaacggacgcgaacgcaagcggatgcacgacctgaacctagccatggacgggctgcgcgaagtcatgccctacgcgcatgggccgtcggtgcgcaagctctccaagatcgccacactcctgctcgccagaaactacatcctcatgctcaccagctccctggaggagatgaagaggctggttggcgagatctatgggggccaccactcggcctttcactgcgggaccgtgggccactcggccggccaccccgcgcacgcggccaactccgtgcacccggtgcaccccatcttgggcggcgcgctctcatctggcaacgcctcgtcaccgctgtccgccgcctcacttcccgccatcggcaccatccggcctccccactcgctactcaaggcgccctccacgccgcccgcgctgcagctgggcagcggcttccagcactgggctggtctgccctgcccctgcaccatctgccagatgccgccgccgccgcacctgtccgctctctccacagccaacatggcccggctgtcggccgagtccaaggacttgctcaagtgcccaactttcttgtacaaagtggttgatatcggtaagcctatccctaaccctctcctcggtctcgattctacgtagtaatgaactagtccgtaacttgaaagtatttcgatttcttggctttatatatcttgtggaaaggacgactgtggagcgcacaggacggcgcc

SEQ ID NO: 3392 - DNA, 950 bp, Homo sapiens
  source 1..950: mol_type = genomic DNA
atcgattgatcaacaagtttgtacaaaaaagttggcatgacgtgtgttgaacaagacaagctgggtcaagcatttgaagatgcttttgaggttctgaggcaacattcaactggagatcttcagtactcgccagattacagaaattacctggctttaatcaaccatcgtcctcatgtcaaaggaaattccagctgctatggagtgttgcctacagaggagcctgtctataattggagaacggtaattaacagtgctgcggacttctattttgaaggaaatattcatcaatctctgcagaacataactgaaaaccagctggtacaacccactcttctccagcaaaaggggggaaaaggcaggaagaagctccgactgtttgaataccttcacgaatccctgtataatccggagatggcatcttgtattcagtgggtagataaaaccaaaggcatctttcagtttgtatcaaaaaacaaagaaaaacttgccgagctttgggggaaaagaaaaggcaacaggaagaccatgacttaccagaaaatggccagggcactcagaaattacggaagaagtggggaaattaccaaaatccggaggaagctgacttaccagttcagtgaggccattctccaaagactctctccatcctatttcctggggaaagagatcttctattcacagtgtgttcaacctgatcaagaatatctcagtttaaataactggaatgcaaattataattatacatatgccaattaccatgagctaaatcaccatgattgctacccaactttcttgtacaaagtggttgatatcggtaagcctatccctaaccctctcctcggtctcgattctacgtagtaatgaactagtccgtaacttgaaagtatttcgatttcttggctttatatatcttgtggaaaggacgaccgtatctttatagaatcctcgga

SEQ ID NO: 3393 - DNA, 1445 bp, Homo sapiens
  source 1..1445: mol_type = genomic DNA
atcgattgatcaacaagtttgtacaaaaaagttggcatgctggaaatgctagaatataatcactatcaggtgcagacccacctcgaaaaccccaccaagtaccacatacagcaagcccaacggcagcaggtaaagcagtacctttctaccactttagcaaataaacatgccaaccaagtcctgagcttgccatgtccaaaccagcctggcgatcatgtcatgccaccggtgccggggagcagcgcacccaacagccccatggctatgcttacgcttaactccaactgtgaaaaagagggattttataagtttgaagagcaaaacagggcagagagcgagtgcccaggcatgaacacacattcacgagcgtcctgtatgcagatggatgatgtaatcgatgacatcattagcctagaatcaagttataatgaggaaatcttgggcttgatggatcctgctttgcaaatggcaaatacgttgcctgtctcgggaaacttgattgatctttatggaaaccaaggtctgcccccaccaggcctcaccatcagcaactcctgtccagccaaccttcccaacataaaaagggagctcacagagtctgaagcaagagcactggccaaagagaggcagaaaaaggacaatcacaacctgattgaacgaagaagaagatttaacataaatgaccgcattaaagaactaggtactttgattcccaagtcaaatgatccagacatgcgctggaacaagggaaccatcttaaaagcatccgtggactatatccgaaagttgcaacgagaacagcaacgcgcaaaagaacttgaaaaccgacagaagaaactggagcacgccaaccggcatttgttgctcagaatacaggaacttgaaatgcaggctcgagctcatggactttcccttattccatccacgggtctctgctctccagatttggtgaatcggatcatcaagcaagaacccgttcttgagaactgcagccaagacctccttcagcatcatgcagacctaacctgtacaacaactctcgatctcacggatggcaccatcaccttcaacaacaacctcggaactgggactgaggccaaccaagcctatagtgtccccacaaaaatgggatccaaactggaagacatcctgatggacgacaccctttctcccgtcggtgtcactgatccactcctttcctcagtgtcccccggagcttccaaaacaagcagccggaggagcagtatgagcatggaagagacggagcacacttgttacccaactttcttgtacaaagtggttgatatcggtaagcctatccctaaccctctcctcggtctcgattctacgtagtaatgaactagtccgtaacttgaaagtatttcgatttcttggctttatatatcttgtggaaaggacgattcgcaattcttgtcatttgacgt

SEQ ID NO: 3394 - DNA, 479 bp, Homo sapiens
  source 1..479: mol_type = genomic DNA
atcgattgatcaacaagtttgtacaaaaaagttggcatgctggaaatgctagaatataatcactatcaggtgcagacccacctcgaaaaccccaccaagtaccacatacagcaagcccaacggcagcaggtaaagcagtacctttctaccactttagcaaataaacatgccaaccaagtcctgagcttgccatgtccaaaccagcctggcgatcatgtcatgccaccggtgccggggagcagcgcacccaacagccccatggctatgcttacgcttaactccaactgtgaaaaagagtttatgaaacagtgcccaactttcttgtacaaagtggttgatatcggtaagcctatccctaaccctctcctcggtctcgattctacgtagtaatgaactagtccgtaacttgaaagtatttcgatttcttggctttatatatcttgtggaaaggacgaaccggcgcaaagtggtaccttatt

SEQ ID NO: 3395 - DNA, 1994 bp, Homo sapiens
  source 1..1994: mol_type = genomic DNA
atcgattgatcaacaagtttgtacaaaaaagttggcaccatgaccatgaccctccacaccaaagcatctgggatggccctactgcatcagatccaagggaacgagctggagcccctgaaccgtccgcagctcaagatccccctggagcggcccctgggcgaggtgtacctggacagcagcaagcccgccgtgtacaactaccccgagggcgccgcctacgagttcaacgccgcggccgccgccaacgcgcaggtctacggtcagaccggcctcccctacggccccgggtctgaggctgcggcgttcggctccaacggcctggggggtttccccccactcaacagcgtgtctccgagcccgctgatgctactgcacccgccgccgcagctgtcgcctttcctgcagccccacggccagcaggtgccctactacctggagaacgagcccagcggctacacggtgcgcgaggccggcccgccggcattctacaggccaaattcagataatcgacgccagggtggcagagaaagattggccagtaccaatgacaagggaagtatggctatggaatctgccaaggagactcgctactgtgcagtgtgcaatgactatgcttcaggctaccattatggagtctggtcctgtgagggctgcaaggccttcttcaagagaagtattcaaggacataacgactatatgtgtccagccaccaaccagtgcaccattgataaaaacaggaggaagagctgccaggcctgccggctccgcaaatgctacgaagtgggaatgatgaaaggtgggatacgaaaagaccgaagaggagggagaatgttgaaacacaagcgccagagagatgatggggagggcaggggtgaagtggggtctgctggagacatgagagctgccaacctttggccaagcccgctcatgatcaaacgctctaagaagaacagcctggccttgtccctgacggccgaccagatggtcagtgccttgttggatgctgagccccccatactctattccgagtatgatcctaccagacccttcagtgaagcttcgatgatgggcttactgaccaacctggcagacagggagctggttcacatgatcaactgggcgaagagggtgccaggctttgtggatttgaccctccatgatcaggtccaccttctagaatgtgcctggctagagatcctgatgattggtctcgtctggcgctccatggagcacccagggaagctactgtttgctcctaacttgctcttggacaggaaccagggaaaatgtgtagagggcatggtggagatcttcgacatgctgctggctacatcatctcggttccgcatgatgaatctgcagggagaggagtttgtgtgcctcaaatctattattttgcttaattctggagtgtacacatttctgtccagcaccctgaagtctctggaagagaaggaccatatccaccgagtcctggacaagatcacagacactttgatccacctgatggccaaggcaggcctgaccctgcagcagcagcaccagcggctggcccagctcctcctcatcctctcccacatcaggcacatgagtaacaaaggcatggagcatctgtacagcatgaagtgcaagaacgtggtgcccctctatgacctgctgctggagatgctggacgcccaccgcctacatgcgcccactagccgtggaggggcatccgtggaggagacggaccaaagccacttggccactgcgggctctacttcatcgcattccttgcaaaagtattacatcacgggggaggcagagggtttccctgccacggtcttgccaactttcttgtacaaagtggttgatatcggtaagcctatccctaaccctctcctcggtctcgattctacgtagtaatgaactagtccgtaacttgaaagtatttcgatttcttggctttatatatcttgtggaaaggacgactttagaggtaacgcatgaacatc

SEQ ID NO: 3396 - DNA, 845 bp, Homo sapiens
  source 1..845: mol_type = genomic DNA
atcgattgatcaacaagtttgtacaaaaaagttggcatggtgcagtcctgctccgcctacggctgcaagaaccgctacgacaaggacaagcccgtttctttccacaagtttcctcttactcgacccagtctttgtaaagaatgggaggcagctgtcagaagaaaaaactttaaacccaccaagtatagcagtatttgttcagagcactttactccagactgctttaagagagagtgcaacaacaagttactgaaagagaatgctgtgcccacaatatttctttgtactgagccacatgacaagaaagaagatcttctggagccacaggaacagcttcccccacctcctttaccgcctcctgtttcccaggttgatgctgctattggattactaatgccgcctcttcagacccctgttaatctctcagttttctgtgaccacaactatactgtggaggatacaatgcaccagcggaaaaggattcatcagctagaacagcaagttgaaaaactcagaaagaagctcaagaccgcacagcagcgatgcagaaggcaagaacggcagcttgaaaaattaaaggaggttgttcacttccagaaagagaaagacgacgtatcagaaagaggttatgtgattctaccaaatgactactttgaaatagttgaagtaccagcatacccaactttcttgtacaaagtggttgatatcggtaagcctatccctaaccctctcctcggtctcgattctacgtagtaatgaactagtccgtaacttgaaagtatttcgatttcttggctttatatatcttgtggaaaggacgatagggcgtagacgacccttaataa

SEQ ID NO: 3397 - DNA, 1634 bp, Homo sapiens
  source 1..1634: mol_type = genomic DNA
atcgattgatcaacaagtttgtacaaaaaagttggcatggacgcagtggcctttgaggatgtggctgtgaacttcacccaggaggaatgggctttgctgggtccatcacagaagaatttatacagatatgtgatgcaagaaaccatcaggaacctggactgtataagaatgatatgggaagaacagaatactgaagatcagtacaaaaatcctaggagaaatctaagatgtcatatggtagagagattcagtgaaagtaaagacagtagtcagtgtggagaaacatttagcctcattcgagatagtattgtgaacaacagcatttgtcctggagaagatccatgtcaaagcgctgagtgtgaagaagtcataatgggtcatttatcccttaatagccacatcagagttgattctggacacaaaccacatgagtatcaggaatatggagagaagccacatacacataaacaacgtgggaaagccttcagttaccatcactcctttcagtcgcgtggaaggcctcacactggaaagaaacgctatgagtgtaaggaatgtggaaaaaccttcagttctcgtagaaaccttcgaagacacatggtagtgcaaggtggaaatagaccttataaatgtaagttgtgtgggaaagcttttttttggcccagtttattacgtatgcatgaaagaactcacactggagagaaaccgtatgaatgtaagcagtgttctaaagcctttcctttttacagttcctatcgaagacatgagagaatgcacactggggagaaaccgtatgaatgtaagcagtgttctaaagccttgcctgattccagttcctatataagacatgaaagaactcacactggagagaaaccatatacatgtaaacagtgtgggaaagccttcagtgtttccagttcccttcgaagacatgaaaccactcacagtgcagagaaaccctatgagtgtaagcaatgcgggaaaacatttcatcatcttggaagctttcagatacacatgaaaaggcacactggagatcgacctcataaatgtaagatatgtgggaaaggctttgatcgtcccagtttagttcgatatcatgaacgaattcacactggagagaaaccctatgaatgcaagcagtgtgggaaaacgttatctcatagctcaagctttcgaagacacatgataatgcacactggaggtggacctcataaatgcaagatatgtgggaaagcttttgtttatcctagtgtatgtcaaagacacgaaaagtctcacagtggagagaaaccctatgaatgcaagcagtgtgggaaagcgttatctcatagctcaagctttcgaagacatatggtaatgcatacgggagatgggccgaataaatgcaaggtatgtgggaaagcctttgtttatcccagtgtatgtcaaagacatgaaaagactcactggagagaaacaatatgcccaactttcttgtacaaagtggttgatatcggtaagcctatccctaaccctctcctcggtctcgattctacgtagtaatgaactagtccgtaacttgaaagtatttcgatttcttggctttatatatcttgtggaaaggacgaacgcttaggctaatgtccttgtgc

SEQ ID NO: 3398 - DNA, 1640 bp, Homo sapiens
  source 1..1640: mol_type = genomic DNA
atcgattgatcaacaagtttgtacaaaaaagttggcatggcctgcctcaacccggtgcctaaactctacagatctgtaattgaagatgtaattgaaggagttcggaatctatttgctgaagaaggtatagaggaacaagttttaaaagacttgaagcagctctgggaaaccaaggttttgcagtctaaagcaacagaagacttcttcagaaatagcatccaatcacctctgtttactcttcagttgccgcacagcttgcaccaaacattgcaatcgtcaacagcatcattagttattcctgctggtagaactcttccaagttttaccacagcagaactgggcacttcaaactccagtgcaaactttacttttcctggttatcccattcatgtaccagcaggtgtgacactacagactgtatctggtcacctttataaagtcaatgtaccaattatggtgacagagacttctggaagagcaggtattcttcagcatccaattcagcaagtatttcaacagcttggccagccttcagtaatacaaactagtgttccacaattgaatccatggtctcttcaagcaactactgaaaaatcacagagaattgaaaccgtgctacagcaacccgcaattctaccttctgggccagtagataggaaacacttagaaaatgccaccagtgatatacttgtatctcctggaaatgagcataaaatcgtgcctgaagctttgttgtgtcatcaggaaagttctcactatatcagtcttccaggtgttgtattttctccacaggtctctcaaacaaattctaatgtggagtcagtgctcagtggttcagctagcatggctcaaaatctgcatgatgagtccctctccacaagccctcatggggctctccaccagcacgtgactgatattcagcttcatattcttaaaaataggatgtatggatgtgattctgtaaagcaaccaagaaatatagaggaacccagcaacatacctgtatcagagaaggattctaattctcaggtggatttaagcattcgggttactgatgatgatattggtgaaataattcaagtagatggaagcggtgatacatcttccaatgaagaaataggaagtacaagagatgcagatgagaatgaatttctagggaatattgacgggggagatctgaaggtacctgaagaagaagctgacagtatttcaaatgaggattcagccacaaacagtagtgataatgaagaccctcaagtaaacattgtagaagaggaccctttaaattctggagatgatgttagtgaacaggatgtgccagacctgtttgacacggataatgttattgtctgtcagtatgataagattcatcgaagcaagaacaaatggaaattctatttgaaagatggtgttatgtgttttggagggagagactatgtatttgcaaaagccattggtgatgcagagtggtacccaactttcttgtacaaagtggttgatatcggtaagcctatccctaaccctctcctcggtctcgattctacgtagtaatgaactagtccgtaacttgaaagtatttcgatttcttggctttatatatcttgtggaaaggacgagcatattcagagcccgacatatgc

SEQ ID NO: 3399 - DNA, 1952 bp, Homo sapiens
  source 1..1952: mol_type = genomic DNA
atcgattgatcaacaagtttgtacaaaaaagttggcatggaggcgctgagtcgagctgggcaggagatgagcctagcggccctgaagcaacacgacccctatatcaccagcatcgcagacctcacgggccaggtcgctctgtacaccttctgccccaaggccaaccagtgggagaagactgatatagaagggaccttattcgtatatcgaaggtcagcttccccttaccatggttttaccattgtgaatcgactaaatatgcacaatctagttgaaccagtgaataaagatttggaatttcagctccatgaaccatttcttctgtatagaaatgcaagcttgtcgatatatagtatctggttttatgacaagaatgactgtcaccgcatagcaaaactcatggctgatgtggtagaagaggagacacggcgatcccagcaagctgctcgggacaaacagagtcccagccaggccaatggctgcagcgaccacaggcccatcgacatcctggagatgctgagcagagccaaggatgagtatgagaggaatcagatgggtgactcaaatatctccagccctgggttacagccaagcactcagctctccaatctgggaagcaccgagactctagaagaaatgccctccgggtcacaggataagtctgctccatctggacacaagcatctgacggtagaagagttatttggaacctctttgccaaaggaacaaccagcagttgtgggtctggattcagaagaaatggagaggttgccaggagatgcctcccagaaagagcccaattcattcctaccatttccctttgagcagttaggaggagcccctcaatcagaaaccctgggtgtcccttctgctgcccaccattcagtccagcctgaaatcaccaccccggtgctaatcactccagcctccatcacacagtccaatgaaaagcatgctccaacctacacaatcccgttgagccctgttctcagtcccactctgccagctgaagctcctactgcacaggttccccccagcttacctcgaaacagcaccatgatgcaggcagtgaagaccacgcctagacagaggtctccactcctgaaccagccagtccctgagctaagccatgccagtctgattgccaaccagagccccttcagggccccattgaacgtgacgaacacagctggcacatccctcccaagcgttgatcttctccagaaactcaggttgaccccacagcatgaccaaatacagacacaaccacttgggaaaggtgcaatggtagccagcttttctccggcagctggtcagctagccacacctgagagcttcatagagcctccctctaagacagcagcagcaagagtggcggcctcagcctccctgagcaacatggtgcttgctccccttcagtctatgcagcagaaccaggatcctgaagtatttgtgcagcctaaggtgttatccagtgccatcccggttgcaggcgccccactggttactgcaacgaccactgcagtgtcttcagtcctgctggccccaagtgttttccagcagacagttacaagatcttcggaccttgagaggaaagccagctccccttctcctctaactattggaacgccagaaagtcagagaaagccttccattattctcagcaagtctcagctccaggatacattaatacatctaataaagaatgattccagcttcctcagtacacttcatgaagtctacttgcaggttctgaccaagaacaaagacaaccacaacctatgcccaactttcttgtacaaagtggttgatatcggtaagcctatccctaaccctctcctcggtctcgattctacgtagtaatgaactagtccgtaacttgaaagtatttcgatttcttggctttatatatcttgtggaaaggacgaattattaccgatccattactgacg

SEQ ID NO: 3400 - DNA, 1457 bp, Homo sapiens
  source 1..1457: mol_type = genomic DNA
atcgattgatcaacaagtttgtacaaaaaagttggcatgctggagaactacatgaacctggcctctgtggaatgggaaatacaacctagaaccaaacggtcatcacttcagcagggttttttgaagaatcaaatattcagtgggatacaaatgacaagaggctacagtggatggaaactctgtgactgtaagaattgtggagaggtcttcagggaacagttttgccttaagacacacatgagagttcagaatggagggaatacttctgagggtaattgttatggaaaagacaccctcagtgtgcacaaggaagcctctactggacaggaactttccaaatttaatccatgtggaaaagtctttactctaactccaggtcttgctgtacatcttgaagttctcaatgcaagacaaccctacaaatgtaaggaatgtggaaaaggctttaagtattttgcaagccttgataatcatatgggaatccacactgatgagaaactctgtgaatttcaggaatatgggagagctgtcacagcttcttcacacctaaagcagtgtgtagcagttcatacaggaaagaaatccaaaaagactaagaaatgtgggaaatccttcactaatttttctcaactttatgcacctgtgaaaactcataaaggagagaagtcctttgaatgtaaagaatgtggaagatcctttagaaattcctcatgccttaatgatcacattcaaattcacactggaataaaaccacacaagtgtacttactgtgggaaagccttcactagatcaactcaacttactgaacatgtaagaactcacactggaataaaaccctatgaatgtaaggaatgtggccaagcctttgctcagtactcgggcctttctatacacatacgaagtcacagtggaaagaaaccctatcagtgtaaggaatgtgggaaagccttcactacatccacaagtcttattcagcatacaagaattcacacaggagagaagccttatgaatgtgttgaatgtgggaagaccttcattacttcttcccgtcgtagtaaacatttgaaaactcatagtggagaaaagccctttgtatgcaagatatgtgggaaagcatttctatattcctcacgccttaatgttcacctgcgaactcataccggagagaaacccttcgtatgtaaagaatgtgggaaagcatttgctgtttcctcacgcctaagtagacatgaaagaattcacactggggagaaaccctatgaatgcaaggatatgagtgttaccatttacccaactttcttgtacaaagtggttgatatcggtaagcctatccctaaccctctcctcggtctcgattctacgtagtaatgaactagtccgtaacttgaaagtatttcgatttcttggctttatatatcttgtggaaaggacgacaagaatagaaaatagctaacttc

SEQ ID NO: 3401 - DNA, 1319 bp, Homo sapiens
  source 1..1319: mol_type = genomic DNA
atcgattgatcaacaagtttgtacaaaaaagttggcatggagctggaattggatgctggtgaccaagacctgctggccttcctgctagaggaaagtggagatttggggacggcacccgatgaggccgtgagggccccactggactgggcgctgccgctttctgaggtaccgagcgactgggaagtagatgatttgctgtgctccctgctgagtcccccagcgtcgttgaacattctcagctcctccaacccctgccttgtccaccatgaccacacctactccctcccacgggaaactgtctctatggatctagagagtgagagctgtagaaaagaggggacccagatgactccacagcatatggaggagctggcagagcaggagattgctaggctagtactgacagatgaggagaagagtctattggagaaggaggggcttattctgcctgagacacttcctctcactaagacagaggaacaaattctgaaacgtgtgcggaggaagattcgaaataaaagatctgctcaagagagccgcaggaaaaagaaggtgtatgttgggggtttagagagcagggtcttgaaatacacagcccagaatatggagcttcagaacaaagtacagcttctggaggaacagaatttgtcccttctagatcaactgaggaaactccaggccatggtgattgagatatcaaacaaaaccagcagcagcagcacctgcatcttggtcctactagtctccttctgcctcctccttgtacctgctatgtactcctctgacacaagggggagcctgccagctgagcatggagtgttgtcccgccagcttcgtgccctccccagtgaggacccttaccagctggagctgcctgccctgcagtcagaagtgccgaaagacagcacacaccagtggttggacggctcagactgtgtactccaggcccctggcaacacttcctgcctgctgcattacatgcctcaggctcccagtgcagagcctcccctggagtggccattccctgacctcttctcagagcctctctgccgaggtcccatcctccccctgcaggcaaatctcacaaggaagggaggatggcttcctactggtagcccctctgtcattttgcaggacagatactcaggctacccaactttcttgtacaaagtggttgatatcggtaagcctatccctaaccctctcctcggtctcgattctacgtagtaatgaactagtccgtaacttgaaagtatttcgatttcttggctttatatatcttgtggaaaggacgataccgacccatttgtccggcccga

SEQ ID NO: 3402 - DNA, 1421 bp, Homo sapiens
  source 1..1421: mol_type = genomic DNA
atcgattgatcaacaagtttgtacaaaaaagttggcatggacagtgctatcaccctgtggcagttccttcttcagctcctgcagaagcctcagaacaagcacatgatctgttggacctctaatgatgggcagtttaagcttttgcaggcagaagaggtggctcgtctctgggggattcgcaagaacaagcctaacatgaattatgacaaactcagccgagccctcagatactattatgtaaagaatatcatcaaaaaagtgaatggtcagaagtttgtgtacaagtttgtctcttatccagagattttgaacatggatccaatgacagtgggcaggattgagggtgactgtgaaagtttaaacttcagtgaagtcagcagcagttccaaagatgtggagaatggagggaaagataaaccacctcagcctggtgccaagacctctagccgcaatgactacatacactctggcttatattcttcatttactctcaactctttgaactcctccaatgtaaagcttttcaaattgataaagactgagaatccagccgagaaactggcagagaaaaaatctcctcaggagcccacaccatctgtcatcaaatttgtcacgacaccttccaaaaagccaccggttgaacctgttgctgccaccatttcaattggcccaagtatttctccatcttcagaagaaactatccaagctttggagacattggtttccccaaaactgccttccctggaagccccaacctctgcctctaacgtaatgactgcttttgccaccacaccacccatttcgtccataccccctttgcaggaacctcccagaacaccttcaccaccactgagttctcacccagacatcgacacagacattgattcagtggcttctcagccaatggaacttccagagaatttgtcactggagcctaaagaccaggattcagtcttgctagaaaaggacaaagtaaataattcatcaagatccaagaaacccaaagggttagaactggcacccacccttgtgatcacgagcagtgatccaagcccactgggaatactgagcccatctctccctacagcttctcttacaccagcatttttttcacaggtagcttgctcgctctttatggtgtcaccattgctttcatttatttgcccttttaagcaaatccagaatttatacactcaagtttgctttctgttacttaggtttgtcttagaaaggttatgtgtgactgtcatgtgcccaactttcttgtacaaagtggttgatatcggtaagcctatccctaaccctctcctcggtctcgattctacgtagtaatgaactagtccgtaacttgaaagtatttcgatttcttggctttatatatcttgtggaaaggacgacttggacctccttggtccaacctt

SEQ ID NO: 3403 - DNA, 1511 bp, Homo sapiens
  source 1..1511: mol_type = genomic DNA
atcgattgatcaacaagtttgtacaaaaaagttggcatggacactgccagccatagccttgttcttctccagcagctgaacatgcagcgagaatttggttttctgtgtgattgcacagttgcaattggagatgtttacttcaaagcccacagagcagtgcttgctgctttttctaactatttcaagatgatatttattcaccaaacaagtgaatgcataaaaatacaaccaactgacatccaacctgacatattcagctatttgttgcacattatgtacacggggaaagggccaaaacagattgtggatcatagtcgtttggaggaagggattcgatttcttcacgccgactacctttctcacattgcaactgaaatgaatcaagtgttctcaccagagactgtgcagtcctcaaatttatatggcattcagatctcaacaacccaaaaaacagttgtcaaacaaggactggaggtcaaagaagctccttccagtaacagtggaaacagagctgctgtccagggtgaccacccccagttgcagttgtctcttgctattggtctggatgatggcactgcagaccagcagagggcctgtcctgccacccaggccctggaggagcaccagaagcccccagtttccatcaagcaggagagatgtgacccagaatctgtgatctcccagagccacccctcaccctcatcagaggtgacaggccccacttttactgaaaacagtgtcaaaatacacttatgccattactgtggggaacgttttgattcccgtagtaacctaaggcaacatctccatacacatgtgtctggatccctgccattcggtgtccctgcttccattctggaaagtaatgaccttggtgaagtgcatccccttaatgaaaacagcgaggcccttgaatgccgcaggctcagctccttcattgttaaggagaatgaacagcagccagaccacaccaaccggggtaccacagagcctttgcagatcagtcaagtatctttgatctccaaagacacagagccagtagaattaaactgtaatttttctttttcaaggaaaagaaaaatgagctgtaccatctgtggtcataaattccctcgaaagagccaattgttggaacacatgtatacacacaaaggtaaatcttacagatataaccgatgccaaaggtttggtaatgcattggcccagagatttcagccatactgtgacagctggtctgatgtctccctgaaaagttctcgcttgtcacaagaacacttagacttgccttgtgccttagagtcagagctcacacaagaaaatgtggatactatcctagttgagtacccaactttcttgtacaaagtggttgatatcggtaagcctatccctaaccctctcctcggtctcgattctacgtagtaatgaactagtccgtaacttgaaagtatttcgatttcttggctttatatatcttgtggaaaggacgacagcgcagagcactaagcaggttg

SEQ ID NO: 3404 - DNA, 1496 bp, Homo sapiens
  source 1..1496: mol_type = genomic DNA
atcgattgatcaacaagtttgtacaaaaaagttggcatgcactccaccacccccatcagctccctcttctccttcaccagccccgcagtgaagagactgctaggctggaagcaaggagatgaagaggaaaagtgggcagagaaggcagtggactctctagtgaagaagttaaagaagaagaagggagccatggacgagctggagagggctctcagctgcccggggcagcccagcaaatgcgtcacgattccccgctccctggacgggcggctgcaggtgtcccaccgcaagggcctgccccatgtgatttactgtcgcgtgtggcgctggccggatctgcagtcccaccacgagctgaagccgctggagtgctgtgagttcccatttggctccaagcagaaagaagtgtgcattaacccttaccactaccgccgggtggagactccagtactgcctcctgtgctcgtgccaagacacagtgaatataacccccagctcagcctcctggccaagttccgcagcgcctccctgcacagtgagccactcatgccacacaacgccacctatcctgactctttccagcagcctccgtgctctgcactccctccctcacccagccacgcgttctcccagtccccgtgcacggccagctaccctcactccccaggaagtccttctgagccagagagtccctatcaacactcagactttcgaccagtttgttacgaggagccccagcactggtgctcggtcgcctactatgaactgaacaaccgagttggggagacattccaggcttcctcccgaagtgtgctcatagatgggttcaccgacccttcaaataacaggaacagattctgtcttggacttctttctaatgtaaacagaaactcaacgatagaaaataccaggagacatataggaaagggtgtgcacttgtactacgtcgggggagaggtgtatgccgagtgcgtgagtgacagcagcatctttgtgcagagccggaactgcaactatcaacacggcttccacccagctaccgtctgcaagatccccagcggctgcagcctcaaggtcttcaacaaccagctcttcgctcagctcctggcccagtcagttcaccacggctttgaagtcgtgtatgaactgaccaagatgtgtactatccggatgagttttgttaagggttggggtgctgagtatcatcgccaggatgtcaccagcaccccctgctggattgagattcatcttcatgggccactgcagtggctggacaaagttctgactcagatgggctctccacataaccccatttcttcagtgtcttacccaactttcttgtacaaagtggttgatatcggtaagcctatccctaaccctctcctcggtctcgattctacgtagtaatgaactagtccgtaacttgaaagtatttcgatttcttggctttatatatcttgtggaaaggacgatctcgaacattagcttcacaagtc

SEQ ID NO: 3405 - DNA, 2195 bp, Homo sapiens
  source 1..2195: mol_type = genomic DNA
atcgattgatcaacaagtttgtacaaaaaagttggcatggctattaccctacagcccagtgacctgatctttgagttcgcaagcaacgggatggatgatgatatccaccagctggaagacccctctgtgttcccagctgtgatcgtggagcaggtaccctaccctgatttactgcatctgtactcgggactggagttggacgacgttcacaatggcatcataacagacgggaccttgtgcatgacgcaggatcagatcctggaaggcagttttttgctgacagatgacaatgaggccacctcgcacaccatgtcaaccgcggaagtcttactcaatatggagtctcccagcgatatcctggatgagaagcagatcttcagtacctccgaaatgcttccagactcggaccctgcaccagctgtcactctgcccaactacctgtttcctgcctctgagcccgatgccctgaacagggcgggtgacactagtgaccaggaggggcattctctggaggagaaggcctccagagaggaaagtgccaagaagactgggaaatcaaagaagagaatccggaagaccaagggcaaccgaagtacctcacctgtcactgaccccagcatccccattaggaagaaatcaaaggatggcaaaggcagcaccatctatctgtgggagttcctcctggctcttctgcaagacagaaacacctgtcccaagtacatcaagtggacccagcgagagaaaggcatcttcaaactggtggactccaaagctgtgtccaagctgtgggggaagcagaaaaacaagcctgacatgaactatgagacaatggggcgggcactaagatactactaccaaagaggcatactggccaaagtggaagggcagaggctggtgtaccagtttaaggagatgcccaaggacctggtggtcattgaagatgaggatgagagcagcgaagccacagcagccccacctcaggcctccacggcctctgtggcctctgccagtaccacccggcgaaccagctccagggtctcatccagatctgccccccagggcaagggcagctcttcttgggagaagccaaaaattcagcatgtcggtctccagccatctgcgagtctggaattgggaccgtcgctagacgaggagatccccactacctccaccatgctcgtctctccagcagagggccaggtcaagctcaccaaagctgtgagtgcatcttcagtgcccagcaacatccacctaggagtggcccccgtggggtcgggctcggccctgaccctgcagacgatcccactgaccacggtgctgaccaatgggcctcctgccagtactactgctcccactcagctcgttctccagagtgttccagcggcctctactttcaaggacaccttcactttgcaggcctctttccccctgaacgccagtttccaagacagccaggtggcagccccaggggctccactgattctcagtggcctcccccaacttctggctggggccaaccgtccgaccaacccggcgccacccacggtcacaggggctggaccagcagggcccagctctcagccccctgggactgtcattgctgccttcatcaggacttctggcactacagcagcccctagggtcaaggaggggccactgaggtcctcctcctatgttcagggtatggtgacgggggcccccatggaggggctgctggttcctgaagagaccctgagggagctcctgagagatcaggctcatcttcagccacttccaacccaggtggtttccaggggttcccacaatccgagccttctgggcaaccagactttgtctcctcccagccgccccactgttgggctgaccccagtggctgaacttgagctctcctcaggctcagggtccctgctgatggctgagcctagtgtgaccacatctgggagccttctgacaagatcccccaccccagcccctttctccccattcaaccctacttccctcattaagatggagccccatgacatatacccaactttcttgtacaaagtggttgatatcggtaagcctatccctaaccctctcctcggtctcgattctacgtagtaatgaactagtccgtaacttgaaagtatttcgatttcttggctttatatatcttgtggaaaggacgataacaaaactgaggtaaactttac

SEQ ID NO: 3406 - DNA, 638 bp, Homo sapiens
  source 1..638: mol_type = genomic DNA
atcgattgatcaacaagtttgtacaaaaaagttggcatggcggatcggctcacgcagcttcaggacgctgtgaattcgcttgcagatcagttttgtaatgccattggagtattgcagcaatgtggtcctcctgcctctttcaataatattcagacagcaattaacaaagaccagccagctaaccctacagaagagtatgcccagctttttgcagcactgattgcacgaacagcaaaagacattgatgttttgatagattccttacccagtgaagaatctacagctgctttacaggctgctagcttgtataagctagaagaagaaaaccatgaagctgctacatgtctggaggatgttgtttatcgaggagacatgcttctggagaagatacaaagcgcacttgctgatattgcacagtcacagctgaagacaagaagtggtacccatagccagtctcttccagactcatacccaactttcttgtacaaagtggttgatatcggtaagcctatccctaaccctctcctcggtctcgattctacgtagtaatgaactagtccgtaacttgaaagtatttcgatttcttggctttatatatcttgtggaaaggacgagttttaccacttatgaaaatccga

SEQ ID NO: 3407 - DNA, 1097 bp, Homo sapiens
  source 1..1097: mol_type = genomic DNA
atcgattgatcaacaagtttgtacaaaaaagttggcaccatgtatttttcccaggaagaatgggagttattggatcccactcagaaggccctctacaatgatgtaatgcaggaaaactatgagactgtcatctctctagcattgtttgtgctccccaaacctaaagtgatctcctgtctagagcaaggggaagagccatgggttcaagtatccccggagtttaaggatagtgccggaaaatctcctacagggttaaagctcaaaaacgacactgaaaatcatcagcctgtgtctctttctgacttagaaatacaagcatcagcaggcgtcatatcaaaaaaggccaaagtaaaagttccccagaaaacagcaggcaaagaaaatcattttgatatgcacagagtgggaaaatggcaccaagattttccagtgaagaaaagaaagaaactttcaacctggaaacaagagctgctcaaacttatggatcgtcacaagaaagattgtgcaagagagaagccttttaaatgtcaggaatgtgggaaaaccttcagagttagctctgaccttattaagcaccaaagaattcacactgaagagaaaccctataaatgtcaacagtgtgataagaggtttagatggagttcagatcttaataagcacttaacaacacaccaaggaataaaaccatataaatgttcatggtgtgggaaaagcttcagtcaaaatacaaatttacatacacaccaaagaactcatacaggagaaaagcccttcacatgtcatgaatgtggaaaaaaattcagtcagaactcccaccttattaaacaccggagaacccacacaggtgagcagccatatacttgtagcatatgcaggagaaacttcagcaggcggtcaagccttcttagacaccagaaactccacctgttgccaactttcttgtacaaagtggttgatatcggtaagcctatccctaaccctctcctcggtctcgattctacgtagtaatgaactagtccgtaacttgaaagtatttcgatttcttggctttatatatcttgtggaaaggacgaaataccatgaccaacaataagccc

SEQ ID NO: 3408 - DNA, 1712 bp, Homo sapiens
  source 1..1712: mol_type = genomic DNA
atcgattgatcaacaagtttgtacaaaaaagttggcatggcctgggctctgaagctgcctctggccgacgaagtgattgaatccgggttggtgcaggactttgatgctagcctgtccgggatcggccaggaactgggtgctggtgcctatagcatgagtgatgtccttgcattgcccatttttaagcaagaagagtcgagtttgcctcctgataatgagaataaaatcctgccttttcaatatgtgctttgtgctgctacctctccagcagtgaaactccatgatgaaaccctaacgtatctcaatcaaggacagtcttatgaaattcgaatgctagacaataggaaacttggagaacttccagaaattaatggcaaattggtgaagagtatattccgtgtggtgttccatgacagaaggcttcagtacactgagcatcagcagctagagggctggaggtggaaccgacctggagacagaattcttgacatagatatcccgatgtctgtgggtataatcgatcctagggctaatccaactcaactaaatacagtggagttcctgtgggaccctgcaaagaggacatctgtgtttattcaggtgcactgtattagcacagagttcactatgaggaaacatggtggagaaaagggggtgccattccgagtacaaatagataccttcaaggagaatgaaaacggggaatatactgagcacttacactcggccagctgccagatcaaagttttcaagcccaaaggtgcagacagaaagcaaaaaacggatagggaaaaaatggagaaacgaacacctcatgaaaaggagaaatatcagccttcctatgagacaaccatactcacagagtgttctccatggcccgagatcacgtatgtcaataactccccatcacctggcttcaacagttcccatagcagtttttctcttggggaaggaaatggttcaccaaaccaccagccagagccaccccctccagtcacagataacctcttaccaacaaccacacctcaggaagctcagcagtggttgcatcgaaatcgtttttctacattcacaaggcttttcacaaacttctcaggggcagatttattgaaattaactagagatgatgtgatccaaatctgtggccctgcagatggaatcagactttttaatgcattaaaaggccggatggtgcgtccaaggttaaccatttatgtttgtcaggaatcactgcagttgagggagcagcaacaacagcagcagcaacagcagcagaagcatgaggatggagactcaaatggtactttcttcgtttaccatgctatctatctagaagaactaacagctgttgaattgacagaaaaaattgctcagcttttcagcatttccccttgccagatcagccagatttacaagcaggggccaacaggaattcatgtgctcatcagtgatgagatgatacagaactttcaggaagaagcatgttttattctggacacaatgaaagcagaaaccaatgatagctatcatatcatactgaagtacccaactttcttgtacaaagtggttgatatcggtaagcctatccctaaccctctcctcggtctcgattctacgtagtaatgaactagtccgtaacttgaaagtatttcgatttcttggctttatatatcttgtggaaaggacgatttcgactaccgcgcaaactagct

SEQ ID NO: 3409 - DNA, 1694 bp, Homo sapiens
  source 1..1694: mol_type = genomic DNA
atcgattgatcaacaagtttgtacaaaaaagttggcatggctgcaaattgcacatcctcatggagtctaggagaatcctgcaacagacctgggttggagctgccacggtctatggcatcctcagaaactcaacttggaaatcacgacgtggaccctgagatttctcacgtgaacttcaggatgttcagctgcccgaaggagtcggaccccatccaggctctgaggaaactcactgagctgtgccatctgtggctgaggcccgacctccacaccaaagagcagatcctggacatgctggtgatggagcagttcatgatctccatgccccaggagctccaggtcttagtcatgatgaacggtgtgcagagctgcaaagacctggaggacctgctacgaaataacagaagacccaagaaatggtctgtggtcaccttccacggaaaggaatatattgtgcaggactcagatatcgagatggctgaagccccctccagtgtcagagatgatctgaaagacgtgtccagccaacgggcctcctcggtgaaccagatgcgtccaggggaaggccaggcccaccgagagctgcagatcctgcccagggtccctgcattgtccaggaggcagggagaggactttctgctacacaagagtattgacgtaacaggtgacccaaagtctctgagacccaagcagaccttggagaaggatctgaaggaaaacagggaagagaacccaggactgacatccccagagcctcagcttccaaagagtcccacagatctggtgagagcaaaggaggggaaggaccccccaaaaatagcctctgtggaaaatgtggatgctgacacaccttctgcctgcgttgtggagagagaagcttcgactcacagcgggaacagaggagacgctctgaatctgagcagtcccaaaagaagcaaaccagatgcctcctccatttcccaagaagagcctcaaggagaagccacacctgtgggcaacagagaatccccgggacaagctgggatgaattcaattcattccccaggccctgcgagcccagtcagtcacccggatggccaagaagccaaggcactgccgccctttgcatgtgacgtgtgcgagaagaggtttacgtgtaattccaagctagtcatccacaagagatcacacacaggcgagagactctttcaatgtaatctctgtgggaagcgcttcatgcagcttattagcctccaatttcaccagcgaacccacactggcgagaggccctacacgtgtgacgtctgccagaagcagttcacccagaagtcctacttgaagtgtcacaagagaagccacacaggggagaagcccttcgaatgtaaagactgcaagaaagttttcacctacagggggagcctgaaggagcaccagcgcatccactccggagagaaaccctacaaatgttccaagtgtccaagagccttcagtcggctgaaattgttaagacgccaccagaaaacacatccagaagctacttctcagtgcccaactttcttgtacaaagtggttgatatcggtaagcctatccctaaccctctcctcggtctcgattctacgtagtaatgaactagtccgtaacttgaaagtatttcgatttcttggctttatatatcttgtggaaaggacgacgctgccaatcctccgatctctag

SEQ ID NO: 3410 - DNA, 2174 bp, Homo sapiens
  source 1..2174: mol_type = genomic DNA
accgccaccatgaatctacgttctgtatttactgtagaacaacaaaggattttacagcgttattatgaaaatggaatgacaaatcaaagtaaaaattgctttcagctcatattacagtgtgcacaggagactaagctggacttcagtgtagtcaggacgtgggttggcaataagagaagaaagatgagtagtaagaactctgaatctggaacagcaacaacaggaacctctttgtcagctccagacatcacagtcagaaatgtggttaatattgctcgaccctcaagccagcagtcttcttggacatctgccaataatgatgtcattgtaactggtatatacagtccagccagttcatcaagtaggcaaggaacaaacaaacatacagacacacaaattacagaagcacataaaatccctattcagaaaacagccactaaaaatgatactgagtttcagttacacattcctgtccaaagacaagtagcacactgtaaaaatgcttccctactcctaggtgaaaaaacaattattttgtcaagacagacaagtgtgctaaatgctggaaactcagtattcaatcacgcaaagaaaaactatggaaactcttcagtacaagcttctgaaatgacagtacctcaaaagccttctgtgtgccaccgaccttgtaaaattgaaccagttgggattcaaaggtcatataagcctgaacacacaggcccagcattacataacttatgtgggcaaaagccaactattagagacccttactgtagaacacaaaacttggaaatccgtgaagtgttttcattggcagttagcgattacccccagagaattctgggaggaaatgccccacagaagcctagctcagcagaaggaaattgtttgtccattgcaatggagactggagatgctgaggatgaatatgccagagaggaagagctggcatcgatgagagcacagataccaagctattcgagattttatgaaagtggcagttcccttcgagctgagaaccaaagtacaaccttgcccggaccaggaagaaatatgccaaattcacaaatggtgaatattagagatatgtcagacaatgtactgtatcaaaacagaaactaccatttgacaccacggacctcattacatacagcatctagtacaatgtacagtaataccaatccattacggagtaatttttctcctcattttgcatcatcaaaccaattgagattatcacaaaaccaaaacaattaccagatttcaggaaaccttactgtgccttggattacagggtgttctagaaaaagagcactacaggaccgcactcagttcagtgaccgagacttagccacccttaagaagtattgggacaatggcatgaccagcctgggctctgtttgtagagagaaaattgaagctgtggcaactgaattaaatgttgactgtgaaatagttcggacttggattgggaatcgaagaaggaaatatcgtttaatggggattgaagttccacctccaagaggaggccctgctgatttctctgagcagcctgagtctggttctttatctgcactcacaccaggagaggaagctgggcctgaagtaggagaggataatgacagaaatgatgaagtatccatctgtttgtctgaaggaagctctcaagaagagcccaatgaagttgttccgaatgatgcaagggctcataaggaagaggaccaccatgcagtaaccacagataatgtgaaaatagaaattattgatgatgaagaaagtgacatgataagtaattctgaagtagaacaagtaaactctttcttggattataagaatgaagaagtcaaattcattgaaaatgagctcgagattcaaaagcaaaaatactttaaacttcagacttttgttagaagcttgatattagcaatgaaagctgatgataaggaacaacagcaggcactgctgtcagatttacctcctgaattagaggaaatggatttcaatcatgcctcactggagcctgatgatacctcattcagtgtatcttctttgtcagagaaaaatgtctcagaaagtttgtagtaatgaactagtccgtaacttgaaagtatttcgatttcttggctttatatatcttgtggaaaggacgatccctcgagggggtgtacctggaa

SEQ ID NO: 3411 - DNA, 1388 bp, Homo sapiens
  source 1..1388: mol_type = genomic DNA
atcgattgatcaacaagtttgtacaaaaaagttggcatgtcgggcgaggacgagcaacaggagcaaactatcgctgaggacctggtcgtgaccaagtataagatggggggcgacatcgccaacagggtacttcggtccttggtggaagcatctagctcaggtgtgtcggtactgagcctgtgtgagaaaggtgatgccatgattatggaagaaacagggaaaatcttcaagaaagaaaaggaaatgaagaaaggtattgcttttcccaccagcatttcggtaaataactgtgtatgtcacttctcccctttgaagagcgaccaggattatattctcaaggaaggtgacttggtaaaaattgaccttggggtccatgtggatggcttcatcgctaatgtagctcacacttttgtggttgatgtagctcaggggacccaagtaacagggaggaaagcagatgttattaaggcagctcacctttgtgctgaagctgccctacgcctggtcaaacctggaaatcagaacacacaagtgacagaagcctggaacaaagttgcccactcatttaactgcacgccaatagaaggtatgctgtcacaccagttgaagcagcatgtcatcgatggagaaaaaaccattatccagaatcccacagaccagcagaagaaggaccatgaaaaagctgaatttgaggtacatgaagtatatgctgtggatgttctcgtcagctcaggagagggcaaggccaaggatgcaggacagagaaccactatttacaaacgagacccctctaaacagtatggactgaaaatgaaaacttcacgtgccttcttcagtgaggtggaaaggcgttttgatgccatgccgtttactttaagagcatttgaagatgagaagaaggctcggatgggtgtggtggagtgcgccaaacatgaactgctgcaaccatttaatgttctctatgagaaggagggtgaatttgttgcccagtttaaatttacagttctgctcatgcccaatggccccatgcggataaccagtggtcccttcgagcctgacctctacaagtctgagatggaggtccaggatgcagagctaaaggccctcctccagagttctgcaagtcgaaaaacccagaaaaagaaaaaaaagaaggcctccaagactgcagagaatgccaccagtggggaaacattagaagaaaatgaagctggggactgcccaactttcttgtacaaagtggttgatatcggtaagcctatccctaaccctctcctcggtctcgattctacgtagtaatgaactagtccgtaacttgaaagtatttcgatttcttggctttatatatcttgtggaaaggacgaagtctgaatacgaaagttattgtg

SEQ ID NO: 3412 - DNA, 1529 bp, Homo sapiens
  source 1..1529: mol_type = genomic DNA
atcgattgatcaacaagtttgtacaaaaaagttggcatgtctgaaagatcagatctccttcacttcaagtttgaaaattatggagattcaatgttacaaaaaatgaacaaattaagagaagagaataaattttgtgatgttacagttctcatagatgatattgaggtacagggacataaaattgtgtttgctgcaggttcccccttcttaagagaccaatttttactgaatgattccagagaggtgaaaatctccatattacagagttccgaagtggggagacaattgctcttatcctgttatagtggtgtgctggaattccctgagatggaactggtaaattacttgactgctgcaagttttcttcagatgagccacattgtagaacggtgcacacaggccctgtggaagtttataaagccaaaacaaccaatggatagtaaagagggatgtgaaccacagagtgcttctccccagtcaaaagaacagcagggagatgccagaggctccccaaagcaggactcaccttgtattcatccatctgaagacagtatggatatggaggacagtgatattcagattgttaaggtagaatctattggggatgtatcagaggttagaagtaaaaaagatcagaaccagtttatttcttctgaacccactgctttacattcatcagagccccagcactccctgataaattcaactgtggaaaacagagtaagtgaaatagaacaaaaccatctccacaattatgccctttcttatacaggcagtgataacatcatcatggcctcaaaagatgtctttggccctaatattcgaggtgtagacaaaggcctacagtggcatcaccagtgcccaaagtgtaccagggtgtttcgtcacctggagaactacgccaaccatttaaaaatgcacaaactctttatgtgtctactctgcggcaagactttcactcagaaaggcaaccttcatcgacacatgcgtgtgcatgccggaattaaacctttccagtgtaaaatctgtgggaaaaccttttctcagaagtgttccttacaggatcatcttaaccttcacagtggagataagccccataaatgtaactattgtgatatggtttttgcacataaaccagttttgaggaaacaccttaaacagctgcatggcaaaaacagctttgataatgccaatgagagaaatgtacaagacctcacagtggattttgattcttttgcatgtacaacagtcacagactctaaagggtgtcagccacaacccgatgcaacacaggtcctggatgcaggtaaactggcccaagctgtcctgaacttaagaaatgatagtacttgtgtgaattgcccaactttcttgtacaaagtggttgatatcggtaagcctatccctaaccctctcctcggtctcgattctacgtagtaatgaactagtccgtaacttgaaagtatttcgatttcttggctttatatatcttgtggaaaggacgaggagccggttctaatcgtcatggt

SEQ ID NO: 3413 - DNA, 482 bp, Homo sapiens
  source 1..482: mol_type = genomic DNA
atcgattgatcaacaagtttgtacaaaaaagttggcatgggaccattgcaatttagagatgtggccatagaattctctctggaggagtggcattgcctggacactgcacagcggaatttatataggaatgtgatgttagagaactacagtaacctggtcttccttggtattactgtttctaagccagacctgatcacctgtctggagcaaggaagaaaacctttgaccatgaagagaaatgagatgatagccaaaccctcagtgagcttccttcaagttcacagtgagagccaaagtcctcttcatgacatatacccaactttcttgtacaaagtggttgatatcggtaagcctatccctaaccctctcctcggtctcgattctacgtagtaatgaactagtccgtaacttgaaagtatttcgatttcttggctttatatatcttgtggaaaggacgatatcgtatgcagtgatgccatgtc

SEQ ID NO: 3414 - DNA, 2033 bp, Homo sapiens
  source 1..2033: mol_type = genomic DNA
atcgattgatcaacaagtttgtacaaaaaagttggcatgtcaggctgggagtcatattacaaaaccgagggcgatgaagaagcagaggaagaacaagaagagaaccttgaagcaagtggagactataaatattcaggaagagatagtttgatttttttggttgatgcctccaaggctatgtttgaatctcagagtgaagatgagttgacaccttttgacatgagcatccagtgtatccaaagtgtgtacatcagtaagatcataagcagtgatcgagatctcttggctgtggtgttctatggtaccgagaaagacaaaaattcagtgaattttaaaaatatttacgtcttacaggagctggataatccaggtgcaaaacgaattctagagcttgaccagtttaaggggcagcagggacaaaaacgtttccaagacatgatgggccacggatctgactactcactcagtgaagtgctgtgggtctgtgccaacctctttagtgatgtccaattcaagatgagtcataagaggatcatgctgttcaccaatgaagacaacccccatggcaatgacagtgccaaagccagccgggccaggaccaaagccggtgatctccgagatacaggcatcttccttgacttgatgcacctgaagaaacctgggggctttgacatatccttgttctacagagatatcatcagcatagcagaggatgaggacctcagggttcactttgaggaatccagcaagctagaagacctgttgcggaaggttcgcgccaaggagaccaggaagcgagcactcagcaggttaaagctgaagctcaacaaagatatagtgatctctgtgggcatttataatctggtccagaaggctctcaagcctcctccaataaagctctatcgggaaacaaatgaaccagtgaaaaccaagacccggacctttaatacaagtacaggcggtttgcttctgcctagcgataccaagaggtctcagatctatgggagtcgtcagattatactggagaaagaggaaacagaagagctaaaacggtttgatgatccaggtttgatgctcatgggtttcaagccgttggtactgctgaagaaacaccattacctgaggccctccctgttcgtgtacccagaggagtcgctggtgattgggagctcaaccctgttcagtgctctgctcatcaagtgtctggagaaggaggttgcagcattgtgcagatacacaccccgcaggaacatccctccttattttgtggctttggtgccacaggaagaagagttggatgaccagaaaattcaggtgactcctccaggcttccagctggtctttttaccctttgctgatgataaaaggaagatgccctttactgaaaaaatcatggcaactccagagcaggtgggcaagatgaaggctatcgttgagaagcttcgcttcacatacagaagtgacagctttgagaaccccgtgctgcagcagcacttcaggaacctggaggccttggccttggatttgatggagccggaacaagcagtggacctgacattgcccaaggttgaagcaatgaataaaagactgggctccttggtggatgagtttaaggagcttgtttacccaccagattacaatcctgaagggaaagttaccaagagaaaacacgataatgaaggttctggaagcaaaaggcccaaggtggagtattcagaagaggagctgaagacccacatcagcaagggtacgctgggcaagttcactgtgcccatgctgaaagaggcctgccgggcttacgggctgaagagtggtctgaagaagcaggagctgctggaagccctcaccaagcacttccaggactgcccaactttcttgtacaaagtggttgatatcggtaagcctatccctaaccctctcctcggtctcgattctacgtagtaatgaactagtccgtaacttgaaagtatttcgatttcttggctttatatatcttgtggaaaggacgacctcgtcttgcttaaggattcaaa

SEQ ID NO: 3415 - DNA, 1067 bp, Homo sapiens
  source 1..1067: mol_type = genomic DNA
atcgattgatcaacaagtttgtacaaaaaagttggcatgagtggctccttcgatcgcaagctcagcagcatcctcaccgacatctccagctcccttagctgccatgcgggctccaaggactcgcctaccctgcccgagtcttctgtcactgacctgggctactacagcgctccccagcacgattactactcgggccagccctatggccagacggtgaacccctacacctaccaccaccaattcaatctcaatgggcttgcaggcacgggcgcttactcgcccaagtcggaatatacctacggagcctcctaccggcaatacggggcgtatcgggagcagccgctgccagcccaggacccagtgtcggtgaaggaggagccggaagcagaggtgcgcatggtgaatgggaagcccaagaaggtccgaaagccgcgtacaatctactccagctaccagctggccgccctgcagcgccgcttccagaaggcccagtacctggcgctgcccgagcgcgccgagctggccgcgcagctgggcctcacgcagacacaggtgaaaatctggttccagaaccgccgttccaagttcaagaaactctacaagaacggggaggtgccgctggagcacagtcccaataacagtgattccatggcctgcaactcaccaccatcacccgccctctgggacacctcttcccactccactccggcccctgcccgcagtcagctgcccccgccgctcccatacagtgcctcccccagctacctggacgaccccaccaactcctggtatcacgcacagaacctgagtggaccccacttacagcagcagccgcctcagccagccaccctgcaccatgcctctcccgggcccccgcccaaccctggggctgtgtactgcccaactttcttgtacaaagtggttgatatcggtaagcctatccctaaccctctcctcggtctcgattctacgtagtaatgaactagtccgtaacttgaaagtatttcgatttcttggctttatatatcttgtggaaaggacgattcgaagatgcctttaacatcctc

SEQ ID NO: 3416 - DNA, 1676 bp, Homo sapiens
  source 1..1676: mol_type = genomic DNA
atcgattgatcaacaagtttgtacaaaaaagttggcatgaagatgagaagaatcaagccagctgctacttctcatgtcgaagggtcaggtggagtatcagccaaggggaaaaggaaacccaggcaggaagaagatgaagactatcgagaatttcctcagaagaagcataagctttatgggaggaagcaacggcctaaaactcagcccaatcccaaatcccaggcccgtcgtattcggaaggaaccaccagtttatgcagcaggcagtttggaggagcaatggtacttagaaatcgttgataaaggcagtgtctcctgccctacctgccaggcagtggggaggaagaccatagagggtttaaagaaacacatggaaaactgcaagcaggaaatgtttacttgtcatcattgtgggaaacaacttcgttcactggcagggatgaagtatcatgtcatggcaaatcataatagtttgcccattttgaaagccggagatgaaatagatgagccaagtgagagggaaaggctccgaacagttctaaagagactgggaaagctcaggtgcatgcgtgagagttgctccagtagcttcaccagcatcatgggatatctctaccatgtcagaaaatgtggcaaaggggctgcagagctggaaaagatgaccctgaaatgtcaccactgtggaaaaccatataggtcgaaggctggacttgcatatcacctgaggtcagagcatgggcctatatccttctttccagagtcaggacagccagagtgcttaaaggagatgaacctagagtcaaagagtgggggccgagttcagagacgttctgccaagatagctgtataccacctacaggagctggcctctgctgaactggccaaggaatggcccaagaggaaggtgcttcaggacctggtacctgatgatcgaaagttaaaatatactcgtccagggctccctaccttcagccaggaagtactacataaatggaagacagatatcaagaaatatcatcgtattcagtgtcctaaccagggctgtgaggctgtctacagcagtgtatctggccttaaagctcacctgggctcttgtacattgggaaactttgtggctggaaaatacaaatgtcttctatgtcagaaagaatttgtgtcagagagtggtgtcaagtatcacatcaactccgtccatgctgaggactggttcgttgtaaacccaacaacaaccaaaagctttgaaaagctgatgaagataaagcagcggcagcaagaagaagaaaagcggaggcagcagcacaggagcagaaggtctctaagaaggcggcagcagcctggcattgagcttcccgagacagagctgagtcttagagtagggaaggatcagaggaggaataatgaggaactggtagtgtcagcctcctgtaaggaaccagagcaggagccagtgccagcacagttccagaaagtaaagcccccaaagactaatcataaacgaggaaggaaatacccaactttcttgtacaaagtggttgatatcggtaagcctatccctaaccctctcctcggtctcgattctacgtagtaatgaactagtccgtaacttgaaagtatttcgatttcttggctttatatatcttgtggaaaggacgaatgtctgtttatccgtctggcggc

SEQ ID NO: 3417 - DNA, 1298 bp, Homo sapiens
  source 1..1298: mol_type = genomic DNA
atcgattgatcaacaagtttgtacaaaaaagttggcaccatggcccagccagggtccggctgcaaagcgaccacccgctgtcttgaagggaccgcgccgcccgccatggctcagtctgacgccgaggccctggcaggagctctggacaaggacgagggtcaggcctccccatgtacgcccagcacgccatctgtctgctcaccgccctctgccgcctcctccgtgccgtctgcaggcaagaacatctgctccagctgcggcctcgagatcctggaccgatatctgctcaaggtcaacaacctcatctggcacgtgcggtgcctcgagtgctccgtgtgtcgcacgtcgctgaggcagcagaacagctgctacatcaagaacaaggagatcttctgcaagatggactacttcagccgattcgggaccaagtgtgcccggtgcggccgacagatctacgccagcgactgggtgcggagagctcgcggcaacgcctaccacctggcctgcttcgcctgcttctcgtgcaagcgccagctgtccactggtgaggagttcggcctggtcgaggagaaggtgctctgccgcatccactacgacaccatgattgagaacctcaagagggccgccgagaacgggaacggcctcacgttggagggggcagtgccctcggaacaggacagtcaacccaagccggccaagcgcgcgcggacgtccttcaccgcggaacagctgcaggttatgcaggcgcagttcgcgcaggacaacaaccccgacgctcagacgctgcagaagctggcggacatgacgggcctcagccggagagtcatccaggtgtggtttcaaaactgccgggcgcgtcataaaaagcacacgccgcaacacccagtgccgccctcgggggcgcccccgtcccgccttccctccgccctgtccgacgacatccactacaccccgttcagcagccccgagcgggcgcgcatggtcaccctgcacggctacattgagagtcaggtacagtgcgggcaggtgcactgccggctgccttacaccgcaccccccgtccacctcaaagccgatatggatgggccgctctccaaccggggtgagaaggtcatcctttttcagtacttgccaactttcttgtacaaagtggttgatatcggtaagcctatccctaaccctctcctcggtctcgattctacgtagtaatgaactagtccgtaacttgaaagtatttcgatttcttggctttatatatcttgtggaaaggacgacgatgcggtcttcatctaaggatc

SEQ ID NO: 3418 - DNA, 1250 bp, Homo sapiens
  source 1..1250: mol_type = genomic DNA
atcgattgatcaacaagtttgtacaaaaaagttggcatgaccacagccctggaacctgaggaccaaaaaggacttctgataattaaggcagaggaccattactggggacaggattccagctcacaaaagtgcagtcctcacaggagggaactctatagacaacacttcaggaagctctgctatcaggatgcacctggaccccgtgaagctcttacccagctgtgggagctctgccgtcagtggctgaggccagaatgccacaccaaggagcagattttagacctgctggtgctagaacagttcctgagcattcttcctaaagacctgcaagcatgggtgcgtgcacaccatccagagactggagaggaggcagtgacggtactggaggatctggagagagagcttgatgaacctggaaagcaggtcccaggcaattcagaaagacgggacatactcatggacaagttggcccccttgggaaggccatatgaatcactgactgtccagctccatcccaaaaagacccagctggagcaggaagctgggaaaccacaaaggaatggtgataaaactaggactaagaatgaagagttgttccagaaggaagatatgcccaaagacaaggaattccttggggagataaatgacagactgaacaaagatactcctcagcatcctaagtccaaagatattattgaaaatgagggcagatcagaatggcaacagagggaaagaagacgatataaatgtgatgaatgtgggaaaagtttcagtcatagctcagaccttagtaaacacaggagaactcacacgggagagaagccctataaatgtgatgagtgtggaaaagccttcattcagcgctcacatctcattggacatcatagagtacacacgggagtaaaaccctataaatgtaaagaatgtgggaaagacttcagtgggcgcacaggtcttattcagcatcagagaatccacacaggtgaaaaaccctatgaatgtgatgagtgtggaaggcctttccgagtaagttcagctcttattagacatcaaagaattcataccgcaaataaactctactacccaactttcttgtacaaagtggttgatatcggtaagcctatccctaaccctctcctcggtctcgattctacgtagtaatgaactagtccgtaacttgaaagtatttcgatttcttggctttatatatcttgtggaaaggacgaggcggggtggtgacggtcgcgtac

SEQ ID NO: 3419 - DNA, 1220 bp, Homo sapiens
  source 1..1220: mol_type = genomic DNA
atcgattgatcaacaagtttgtacaaaaaagttggcatggagtatttcatggtgcccactcagaaggtgccctctttgcaacatttcaggaaaacagagaaagaagtgataggagggctctgtagccttgccaacattccactaacccccgagactcagcgggaccaggagcggcggattcggcgggagatcgccaacagcaacgagcggagacgcatgcagagcatcaacgcgggattccagtccctcaagaccctcatcccccacacagacggagagaagctcagcaaggcagccattctccagcagacagccgagtacatcttctccctggagcaggagaagaccaggctcttgcagcagaacacacagctcaagcgcttcatccaggagctgagcggctcgtcccccaagcgacggcgggcagaggacaaggacgaaggcataggctccccggacatctgggaggacgagaaggcggaggacctgcggcgggagatgattgagctgcggcagcagctggacaaggagcgctcggtgcgcatgatgctggaggagcaggtgcgctcgctggaggcccacatgtacccggaaaagctcaaggtgattgcgcagcaggtgcagctgcagcagcagcaggaacaggtgaggctgctgcaccaggagaagctggagcgggaacagcagcagctgcggacccagcttctgccccctccggcccccacccaccaccccacggtgatcgtgccagcaccgcctcctcctccctcccaccacatcaatgtcgtcaccatgggcccctcctcggtcatcaactctgtttccacatcccggcaaaatctggacaccatcgtgcaggcaatccagcacatcgagggcacccaggaaaagcaggagctggaggaggagcagcggcgagctgtcatcgtgaagcctgtccgcagctgcccggaggcccccacctctgacaccgcctccgactccgaggcctcagacagtgacgccatggaccagagccgggaggagccgtcgggggacggggagcttccctgcccaactttcttgtacaaagtggttgatatcggtaagcctatccctaaccctctcctcggtctcgattctacgtagtaatgaactagtccgtaacttgaaagtatttcgatttcttggctttatatatcttgtggaaaggacgacaaacctttcccaagcctccaatc

SEQ ID NO: 3420 - DNA, 1100 bp, Homo sapiens
  source 1..1100: mol_type = genomic DNA
atcgattgatcaacaagtttgtacaaaaaagttggcaccatggagttcacggcgtcccccaagccccaactctcctcccgggccaacgccttctccattgccgcgctcatgtcgagcggcggctctaaggagaaggaggcgacggagaacacaatcaaacccctggagcaatttgtggagaagtcgtcctgtgcccagcccctgggtgagctgaccagcctggatgctcatggggagtttggtggaggcagtggcagcagcccgtcctcctcctctctgtgcactgagccactgatccccaccacccccatcatccccagtgaggaaatggccaaaattgcctgcagcctggagaccaaggagctttgggacaaattccatgagctgggcaccgagatgatcatcaccaagtcgggcaggaggatgtttccaaccatccgggtgtccttttcgggggtggatcctgaggccaagtacatagtcctgatggacatcgtccctgtggacaacaagaggtaccgctacgcctaccaccggtcctcctggctggtggctggcaaggccgacccgccgttgccagccaggctctatgtgcatccagattctccttttaccggtgagcaactactcaaacagatggtgtcttttgaaaaggtgaaactcaccaacaatgaactggatcaacatggccatataattttgaactcaatgcataagtaccagccaagggtgcacatcattaagaagaaagaccacacagcctcattgctcaacctgaagtctgaagaatttagaactttcatctttccagaaacagtttttacggcagtcactgcctaccagaatcaactgataacgaagctgaaaatagatagcaatccttttgccaaaggattccgggattcctccaggctcactgacattgagaggttgccaactttcttgtacaaagtggttgatatcggtaagcctatccctaaccctctcctcggtctcgattctacgtagtaatgaactagtccgtaacttgaaagtatttcgatttcttggctttatatatcttgtggaaaggacgaacctaacctaactacgcttgaacg

SEQ ID NO: 3421 - DNA, 1832 bp, Homo sapiens
  source 1..1832: mol_type = genomic DNA
atcgattgatcaacaagtttgtacaaaaaagttggcatggcgacggcgaccatagctctccaggtcaatggccagcaaggaggggggtccgagccggcggcggcggcggcagtggtggcagcgggagacaaatggaaacctccacagggcacagactccatcaagatggagaacgggcagagcacagccgccaagctggggctgcctcccctgacgcccgagcagcaggaggcccttcagaaggccaagaagtacgccatggagcagagcatcaagagtgtgctggtgaagcagaccatcgcgcaccagcagcagcagctcaccaacctgcagatggcggctcagcggcagcgggcgctggccatcatgtgccgcgtctacgtgggctctatctactatgagctgggggaggacaccatccgccaggcctttgccccctttggccccatcaagagcatcgacatgtcctgggactccgtcaccatgaagcacaagggctttgccttcgtggagtatgaggtccccgaagctgcacagctggccttggagcagatgaactcggtgatgctggggggcaggaacatcaaggtgggcagacccagcaacatagggcaggcccagcccatcatagaccagttggctgaggaggcacgggccttcaaccgcatctacgtggcctctgtgcaccaggacctctcagacgatgacatcaagagcgtgtttgaggcctttggcaagatcaagtcctgcacactggcccgggaccccacaactggcaagcacaagggctacggcttcattgagtacgagaaggcccagtcgtcccaagatgctgtgtcttccatgaacctctttgacctgggtggccagtacttgcgggtgggcaaggctgtcacaccgcccatgcccctactcacaccagccacgcctggaggcctcccacctgccgctgctgtggcagctgctgcagccactgccaagatcacagctcaggaagcagtggccggagcagcggtgctgggtaccctgggcacacctggactggtgtccccagcactgaccctggcccagcccctgggcactttgccccaggctgtcatggctgcccaggcacctggagtcatcacaggtgtgaccccagcccgtcctcctatcccggtcaccatcccctcggtgggagtggtgaaccccatcctggccagccctccaacgctgggtctcctggagcccaagaaggagaaggaagaagaggagctgtttcccgagtcagagcggccagagatgctgagcgagcaggagcacatgagcatctcgggcagtagcgcccgacacatggtgatgcagaagctgctccgcaagcaggagtctacagtgatggttctgcgcaacatggtggaccccaaggacatcgatgatgacctggaaggggaggtgacagaggagtgtggcaagttcggggccgtgaaccgcgtcatcatctaccaagagaaacaaggcgaggaggaggatgcagaaatcattgtcaagatctttgtggagttttccatagcctctgagactcataaggccatccaggccctcaatggccgctggtttgctggccgcaaggtggtggctgaagtgtacgaccaggagcgttttgataacagtgacctctctgcgtgcccaactttcttgtacaaagtggttgatatcggtaagcctatccctaaccctctcctcggtctcgattctacgtagtaatgaactagtccgtaacttgaaagtatttcgatttcttggctttatatatcttgtggaaaggacgaaactgaccgccgaaacggatactc

SEQ ID NO: 3422 - DNA, 1754 bp, Homo sapiens
  source 1..1754: mol_type = genomic DNA
atcgattgatcaacaagtttgtacaaaaaagttagcatggagaacgggcagagcacagccgccaagctggggctgcctcccctgacgcccgagcagcaggaggcccttcagaaggccaagaagtacgccatggagcagagcatcaagagtgtgctggtgaagcagaccatcgcgcaccagcagcagcagctcaccaacctgcagatggcagcagtgacaatgggctttggagatcctctctcacctttgcaatcgatggcggctcagcggcagcgggcgctggccatcatgtgccgcgtctacgtgggctctatctactatgagctgggggaggacaccatccgccaggcctttgccccctttggccccatcaagagcatcgacatgtcctgggactccgtcaccatgaagcacaagggctttgccttcgtggagtatgaggtccccgaagctgcacagctggccttggagcagatgaactcggtgatgctggggggcaggaacatcaaggtgggcagacccagcaacatagggcaggcccagcccatcatagaccagttggctgaggaggcacgggccttcaaccgcatctacgtggcctctgtgcaccaggacctctcagacgatgacatcaagagcgtgtttgaggcctttggcaagatcaagtcctgcacactggcccgggaccccacaactggcaagcacaagggctacggcttcattgagtacgagaaggcccagtcgtcccaagatgctgtgtcttccatgaacctctttgacctgggtggccagtacttgcgggtgggcaaggctgtcacaccgcccatgcccctactcacaccagccacgcctggaggcctcccacctgccgctgctgtggcagctgctgcagccactgccaagatcacagctcaggaagcagtggccggagcagcggtgctgggtaccctgggcacacctggactggtgtccccagcactgaccctggcccagcccctgggcactttgccccaggctgtcatggctgcccaggcacctggagtcatcacaggtgtgaccccagcccgtcctcctatcccggtcaccatcccctcggtgggagtggtgaaccccatcctggccagccctccaacgctgggtctcctggagcccaagaaggagaaggaagaagaggagctgtttcccgagtcagagcggccagagatgctgagcgagcaggagcacatgagcatctcgggcagtagcgcccgacacatggtgatgcagaagctgctccgcaagcaggagtctacagtgatggttctgcgcaacatggtggaccccaaggacatcgatgatgacctggaaggggaggtgacagaggagtgtggcaagttcggggccgtgaaccgcgtcatcatctaccaagagaaacaaggcgaggaggaggatgcagaaatcattgtcaagatctttgtggagttttccatagcctctgagactcataaggccatccaggccctcaatggccgctggtttgctggccgcaaggtggtggctgaagtgtacgaccaggagcgttttgataacagtgacctctctgcgtgcccaactttcttgtacaaagtggttgatatcggtaagcctatccctaaccctctcctcggtctcgattctacgtagtaatgaactagtccgtaacttgaaagtatttcgatttcttggctttatatatcttgtggaaaggacgataggtctacttataatctgcacga

SEQ ID NO: 3423 - DNA, 1703 bp, Homo sapiens
  source 1..1703: mol_type = genomic DNA
atcgattgatcaacaagtttgtacaaaaaagttggcatggagaacgggcagagcacagccgccaagctggggctgcctcccctgacgcccgagcagcaggaggcccttcagaaggccaagaagtacgccatggagcagagcatcaagagtgtgctggtgaagcagaccatcgcgcaccagcagcagcagctcaccaacctgcagatggcggctcagcggcagcgggcgctggccatcatgtgccgcgtctacgtgggctctatctactatgagctgggggaggacaccatccgccaggcctttgccccctttggccccatcaagagcatcgacatgtcctgggactccgtcaccatgaagcacaagggctttgccttcgtggagtatgaggtccccgaagctgcacagctggccttggagcagatgaactcggtgatgctggggggcaggaacatcaaggtgggcagacccagcaacatagggcaggcccagcccatcatagaccagttggctgaggaggcacgggccttcaaccgcatctacgtggcctctgtgcaccaggacctctcagacgatgacatcaagagcgtgtttgaggcctttggcaagatcaagtcctgcacactggcccgggaccccacaactggcaagcacaagggctacggcttcattgagtacgagaaggcccagtcgtcccaagatgctgtgtcttccatgaacctctttgacctgggtggccagtacttgcgggtgggcaaggctgtcacaccgcccatgcccctactcacaccagccacgcctggaggcctcccacctgccgctgctgtggcagctgctgcagccactgccaagatcacagctcaggaagcagtggccggagcagcggtgctgggtaccctgggcacacctggactggtgtccccagcactgaccctggcccagcccctgggcactttgccccaggctgtcatggctgcccaggcacctggagtcatcacaggtgtgaccccagcccgtcctcctatcccggtcaccatcccctcggtgggagtggtgaaccccatcctggccagccctccaacgctgggtctcctggagcccaagaaggagaaggaagaagaggagctgtttcccgagtcagagcggccagagatgctgagcgagcaggagcacatgagcatctcgggcagtagcgcccgacacatggtgatgcagaagctgctccgcaagcaggagtctacagtgatggttctgcgcaacatggtggaccccaaggacatcgatgatgacctggaaggggaggtgacagaggagtgtggcaagttcggggccgtgaaccgcgtcatcatctaccaagagaaacaaggcgaggaggaggatgcagaaatcattgtcaagatctttgtggagttttccatagcctctgagactcataaggccatccaggccctcaatggccgctggtttgctggccgcaaggtggtggctgaagtgtacgaccaggagcgttttgataacagtgacctctctgcgtgcccaactttcttgtacaaagtggttgatatcggtaagcctatccctaaccctctcctcggtctcgattctacgtagtaatgaactagtccgtaacttgaaagtatttcgatttcttggctttatatatcttgtggaaaggacgagtccggcttgaaggtggcctctta

SEQ ID NO: 3424 - DNA, 1646 bp, Homo sapiens
  source 1..1646: mol_type = genomic DNA
atcgattgatcaacaagtttgtacaaaaaagttggcatggcaggtgggggcggcgacctgagcaccaggaggctgaatgaatgtatttcaccagtagcaaatgagatgaaccatcttcctgcacacagccacgatttgcaaaggatgttcacggaagaccagggtgtagatgacaggctgctctatgacattgtattcaagcacttcaaaagaaataaggtggagatttcaaatgcaataaaaaagacatttccattcctcgagggcctccgtgatcgtgatctcatcacaaataaaatgtttgaagattctcaagattcttgtagaaacctggtccctgtacagagagtggtgtacaatgttcttagtgaactggagaagacatttaacctgccagttctggaagcactgttcagcgatgtcaacatgcaggaataccccgatttaattcacatttataaaggctttgaaaatgtaatccatgacaaattgcctctccaagaaagtgaagaagaagagagggaggagaggtctggcctccaactaagtcttgaacaaggaactggtgaaaactcttttcgaagcctgacttggccaccttcgggttccccatctcatgctggtacaaccccacctgaaaatggactctcagagcacccctgtgaaacagaacagataaatgcaaagagaaaagatacaaccagtgacaaagatgattcgctaggaagccaacaaacaaatgaacaatgtgctcaaaaggctgagccaacagagtcctgcgaacaaattgctgtccaagtgaataatggggatgctggaagggagatgccctgcccgttgccctgtgatgaagaaagcccagaggcagagctacacaaccatggaatccaaattaattcctgttctgtgcgactggtggatataaaaaaggaaaagccattttctaattcaaaagttgagtgccaagcccaagcaagaactcatcataaccaggcatctgacataatagtcatcagcagtgaggactctgaaggatccactgacgttgatgagcccttagaagtcttcatctcagcaccgagaagtgagcctgtgatcaataatgacaaccctttagaatcaaatgatgaaaaggagggccaagaagccacttgctcacgaccccagattgtaccagagcccatggatttcagaaaattatctacattcagagaaagttttaagaaaagagtgataggacaagaccacgacttttcagaatccagtgaggaggaggcgcccgcagaagcctcaagcggggcactgagaagcaagcatggtgagaaggctcctatgacttctagaagtacatctacttggagaatacccagcaggaagagacgtttcagcagtagtgacttttcagacctgagtaatggagaagagcttcaggaaacctgcagctcatccctaagaagagggtcaggtaaagaagattacccaactttcttgtacaaagtggttgatatcggtaagcctatccctaaccctctcctcggtctcgattctacgtagtaatgaactagtccgtaacttgaaagtatttcgatttcttggctttatatatcttgtggaaaggacgaagacgtttcatagcctacagaggc

SEQ ID NO: 3425 - DNA, 1478 bp, Homo sapiens
  source 1..1478: mol_type = genomic DNA
atcgattgatcaacaagtttgtacaaaaaagttggcatggctgctgagtctgatgttctgcatttccagtttgaacagcaaggagatgtggtcttgcagaaaatgaatcttttgagacagcagaatttattttgtgatgtatcaatttacattaatgacactgagttccaggggcacaaggtgattttggctgcttgctccacttttatgagagatcagtttttactcacacagtcaaaacatgtcagaatcaccatcttacagagtgcagaagttggcagaaaattgttactgtcttgctatactggagcacttgaagttaaaaggaaagagcttttgaaatacttgactgctgccagttaccttcagatggttcacattgtggaaaagtgcacagaagctttgtcaaagtatctggaaattgatctttctatgaaaaacaacaaccaacacactgacctgtgtcagtcttctgatcctgatgttaagaatgaagatgaaaattctgataaagactgtgagataattgaaatttcagaagatagtcctgtaaacatagatttccatgttaaagaagaggaaagcaatgctttgcagtctacagtagagagtctgacatcagagagaaaggaaatgaagtcaccagagctgtctacagtagacataggttttaaagacaatgaaatttgtatccttcatgtagaatccatcagtacagctggtgtcgaaaatgggcagttttcacagccttgtacctcttcaaaagcaagcatgtatttctctgaaacacagcattcattgatcaattctacagttgagagcagagtggctgaagttcctgggaatcaagatcagggcttattttgtgagaatactgaaggaagttatggtacagtgagtgagattcagaatctggaggaaggttattcactgaggcaccagtgccccaggtgtcctcgaggctttcttcatgttgaaaactatctgcgccaccttaaaatgcataaactattcttatgcttacagtgcggaaaaacatttacacagaagaaaaatctcaaccgacacatccgaggacacatgggcatacggccctttcagtgtactgtgtgcttgaagacatttactgccaaaagcacacttcaggaccacttgaacatacacagtggggatcggccatacaaatgccactgttgtgatatggatttcaagcacaagtctgctctcaaaaagcacttaacctctgtccatggcagaagcagtggtgaaaaactatctaggcctgatctcaaaaggcaaagtctactatacccaactctcttgtacaaagtggttgatatcggtaagcctatccctaaccctctcctcggtctcgattctacgtagtaatgaactagtccgtaacttgaaagtatttcgatttcttggctttatatatcttgtggaaaggacgagcattacagtcgttgccaaagcta

SEQ ID NO: 3426 - DNA, 1289 bp, Homo sapiens
  source 1..1289: mol_type = genomic DNA
atcgattgatcaacaagtttgtacaaaaaagttggcatggagaaaggtgggaacatacaattggagattcctgacttcagcaactctgtcctgagccatctaaaccagttgcgcatgcagggccgtctctgtgatattgtggtcaatgtgcaaggacaagcttttcgggctcacaaagtggtgctggctgccagctccccctatttccgggatcacatgtccttgaatgagatgagtacagtctccatttcagtcatcaagaaccctactgtttttgaacagctcctttctttctgttacacagggcggatatgcctgcaactggcagatatcatcagctacctaacagctgccagttttctgcaaatgcagcatattatagacaaatgtacacagatcctggagggcattcatttcaaaattaatgtggctgaggttgaagcagaattaagtcaaacaaggacaaagcatcaagagagacctccagagtctcacagggttacaccaaatctcaaccgctcccttagcccacgacataataccccaaagggaaaccggcgaggtcaggttagtgctgtgctggatatcagagagctaagtcctcctgaggagtccaccagccctcagatcattgaaccaagttctgatgtagagagccgggagcccattcttcggatcaaccgagcaggacagtggtatgtggagacaggagtggcggaccgtgggggtcggagtgatgatgaagttagagttcttggagcagtacacatcaaaactgaaaatctggaggagtggcttgggcctgagaatcagccttctggagaagatgggagtagtgcagaggaagtaacagccatggtgattgataccacaggccatggttctgtaggacaggaaaattatactttagggtcttcaggagccaaggtggctcggccaacaagcagtgaagttgacagatttagcccctccggcagtgttgttcccttgacagagagacacagagccagaagtgagtctcctgggagaatggatgagcctaagcaacccagctcccaggtatggagttgtggatttagaactgctttggtggttggaggaattgctactgtgtatgaatacccaactttcttgtacaaagtggttgatatcggtaagcctatccctaaccctctcctcggtctcgattctacgtagtaatgaactagtccgtaacttgaaagtatttcgatttcttggctttatatatcttgtggaaaggacgagcaaagcgcccatacatgcataac

SEQ ID NO: 3427 - DNA, 1652 bp, Homo sapiens
  source 1..1652: mol_type = genomic DNA
atcgattgatcaacaagtttgtacaaaaaagttggcatggcgcagacgcagggcacccggaggaaagtctgttactactacgacggggatgttggaaattactattatggacaaggccacccaatgaagcctcaccgaatccgcatgactcataatttgctgctcaactatggtctctaccgaaaaatggaaatctatcgccctcacaaagccaatgctgaggagatgaccaagtaccacagcgatgactacattaaattcttgcgctccatccgtccagataacatgtcggagtacagcaagcagatgcagagattcaacgttggtgaggactgtccagtattcgatggcctgtttgagttctgtcagttgtctactggtggttctgtggcaagtgctgtgaaacttaataagcagcagacggacatcgctgtgaattgggctgggggcctgcaccatgcaaagaagtccgaggcatctggcttctgttacgtcaatgatatcgtcttggccatcctggaactgctaaagtatcaccagagggtgctgtacattgacattgatattcaccatggtgacggcgtggaagaggccttctacaccacggaccgggtcatgactgtgtcctttcataagtatggagagtacttcccaggaactggggacctacgggatatcggggctggcaaaggcaagtattatgctgttaactacccgctccgagacgggattgatgacgagtcctatgaggccattttcaagccggtcatgtccaaagtaatggagatgttccagcctagtgcggtggtcttacagtgtggctcagactccctatctggggatcggttaggttgcttcaatctaactatcaaaggacacgccaagtgtgtggaatttgtcaagagctttaacctgcctatgctgatgctgggaggcggtggttacaccattcgtaacgttgcccggtgctggacatatgagacagctgtggccctggatacggagatccctaatgagcttccatacaatgactactttgaatactttggaccagatttcaagctccacatcagtccttccaatatgactaaccagaacacgaatgagtacctggagaagatcaaacagcgactgtttgagaaccttagaatgctgccgcacgcacctggggtccaaatgcaggcgattcctgaggacgccatccctgaggagagtggcgatgaggacgaagacgaccctgacaagcgcatctcgatctgctcctctgacaaacgaattgcctgtgaggaagagttctccgattctgaagaggagggagaggggggccgcaagaactcttccaacttcaaaaaagccaagagagtcaaaacagaggatgaaaaagagaaagacccagaggagaagaaagaagtcaccgaagaggagaaaaccaaggaggagaagccagaagccaaaggggtcaaggaggaggtcaagttggcctgcccaactttcttgtacaaagtggttgatatcggtaagcctatccctaaccctctcctcggtctcgattctacgtagtaatgaactagtccgtaacttgaaagtatttcgatttcttggctttatatatcttgtggaaaggacgatcacagttgctgcgacatacgaac

SEQ ID NO: 3428 - DNA, 1658 bp, Homo sapiens
  source 1..1658: mol_type = genomic DNA
atcgattgatcaacaagtttgtacaaaaaagcaggcaccatggcgcagacgcagggcacccggaggaaagtctgttactactacgacggggatgttggaaattactattatggacaaggccacccaatgaagcctcaccgaatccgcatgactcataatttgctgctcaactatggtctctaccgaaaaatggaaatctatcgccctcacaaagccaatgctgaggagatgaccaagtaccacagcgatgactacattaaattcttgcgctccatccgtccagataacatgtcggagtacagcaagcagatgcagagattcaacgttggtgaggactgtccagtattcgatggcctgtttgagttctgtcagttgtctactggtggttctgtggcaagtgctgtgaaacttaataagcagcagacggacatcgctgtgaattgggctgggggcctgcaccatgcaaagaagtccgaggcatctggcttctgttacgtcaatgatatcgtcttggccatcctggaactgctaaagtatcaccagagggtgctgtacattgacattgatattcaccatggtgacggcgtggaagaggccttctacaccacggaccgggtcatgactgtgtcctttcataagtatggagagtacttcccaggaactggggacctacgggatatcggggctggcaaaggcaagtattatgctgttaactacccgctccgagacgggattgatgacgagtcctatgaggccattttcaagccggtcatgtccaaagtaatggagatgttccagcctagtgcggtggtcttacagtgtggctcagactccctatctggggatcggttaggttgcttcaatctaactatcaaaggacacgccaagtgtgtggaatttgtcaagagctttaacctgcctatgctgatgctgggaggcggtggttacaccattcgtaacgttgcccggtgctggacatatgagacagctgtggccctggatacggagatccctaatgagcttccatacaatgactactttgaatactttggaccagatttcaagctccacatcagtccttccaatatgactaaccagaacacgaatgagtacctggagaagatcaaacagcgactgtttgagaaccttagaatgctgccgcacgcacctggggtccaaatgcaggcgattcctgaggacgccatccctgaggagagtggcgatgaggacgaagacgaccctgacaagcgcatctcgatctgctcctctgacaaacgaattgcctgtgaggaagagttctccgattctgaagaggagggagaggggggccgcaagaactcttccaacttcaaaaaagccaagagagtcaaaacagaggatgaaaaagagaaagacccagaggagaagaaagaagtcaccgaagaggagaaaaccaaggaggagaagccagaagccaaaggggtcaaggaggaggtcaagttggcctgagacccagctttcttgtacaaagtggttgatatcggtaagcctatccctaaccctctcctcggtctcgattctacgtagtaatgaactagtccgtaacttgaaagtatttcgatttcttggctttatatatcttgtggaaaggacgattatggaagctaataccaattgta

SEQ ID NO: 3429 - DNA, 1490 bp, Homo sapiens
  source 1..1490: mol_type = genomic DNA
atcgattgatcaacaagtttgtacaaaaaagttggcatggccaagaccgtggcctatttctacgaccccgacgtgggcaacttccactacggagctggacaccctatgaagccccatcgcctggcattgacccatagcctggtcctgcattacggtctctataagaagatgatcgtcttcaagccataccaggcctcccagcatgacatgtgccgcttccactccgaggactacattgacttcctgcagagagtcagccccaccaatatgcaaggcttcaccaagagtcttaatgccttcaacgtaggcgatgactgcccagtgtttcccgggctctttgagttctgctcgcgttacacaggcgcatctctgcaaggagcaacccagctgaacaacaagatctgtgatattgccattaactgggctggtggtctgcaccatgccaagaagtttgaggcctctggcttctgctatgtcaacgacattgtgattggcatcctggagctgctcaagtaccaccctcgggtgctctacattgacattgacatccaccatggtgacggggttcaagaagctttctacctcactgaccgggtcatgacggtgtccttccacaaatacggaaattacttcttccctggcacaggtgacatgtatgaagtcggggcagagagtggccgctactactgtctgaacgtgcccctgcgggatggcattgatgaccagagttacaagcaccttttccagccggttatcaaccaggtagtggacttctaccaacccacgtgcattgtgctccagtgtggagctgactctctgggctgtgatcgattgggctgctttaacctcagcatccgagggcatggggaatgcgttgaatatgtcaagagcttcaatatccctctactcgtgctgggtggtggtggttatactgtccgaaatgttgcccgctgctggacatatgagacatcgctgctggtagaagaggccattagtgaggagcttccctatagtgaatacttcgagtactttgccccagacttcacacttcatccagatgtcagcacccgcatcgagaatcagaactcacgccagtatctggaccagatccgccagacaatctttgaaaacctgaagatgctgaaccatgcacctagtgtccagattcatgacgtgcctgcagacctcctgacctatgacaggactgatgaggctgatgcagaggagaggggtcctgaggagaactatagcaggccagaggcacccaatgagttctatgatggagaccatgacaatgacaaggaaagcgatgtggagatttacccaactttcttgtacaaagtggttgatatcggtaagcctatccctaaccctctcctcggtctcgattctacgtagtaatgaactagtccgtaacttgaaagtatttcgatttcttggctttatatatcttgtggaaaggacgatacctccataaaccgaagaatgac

SEQ ID NO: 3430 - DNA, 1496 bp, Homo sapiens
  source 1..1496: mol_type = genomic DNA
atcgattgatcaacaagtttgtacaaaaaagcaggcaccatggccaagaccgtggcctatttctacgaccccgacgtgggcaacttccactacggagctggacaccctatgaagccccatcgcctggcattgacccatagcctggtcctgcattacggtctctataagaagatgatcgtcttcaagccataccaggcctcccagcatgacatgtgccgcttccactccgaggactacattgacttcctgcagagagtcagccccaccaatatgcaaggcttcaccaagagtcttaatgccttcaacgtaggcgatgactgcccagtgtttcccgggctctttgagttctgctcgcgttacacaggcgcatctctgcaaggagcaacccagctgaacaacaagatctgtgatattgccattaactgggctggtggtctgcaccatgccaagaagtttgaggcctctggcttctgctatgtcaacgacattgtgattggcatcctggagctgctcaagtaccaccctcgggtgctctacattgacattgacatccaccatggtgacggggttcaagaagctttctacctcactgaccgggtcatgacggtgtccttccacaaatacggaaattacttcttccctggcacaggtgacatgtatgaagtcggggcagagagtggccgctactactgtctgaacgtgcccctgcgggatggcattgatgaccagagttacaagcaccttttccagccggttatcaaccaggtagtggacttctaccaacccacgtgcattgtgctccagtgtggagctgactctctgggctgtgatcgattgggctgctttaacctcagcatccgagggcatggggaatgcgttgaatatgtcaagagcttcaatatccctctactcgtgctgggtggtggtggttatactgtccgaaatgttgcccgctgctggacatatgagacatcgctgctggtagaagaggccattagtgaggagcttccctatagtgaatacttcgagtactttgccccagacttcacacttcatccagatgtcagcacccgcatcgagaatcagaactcacgccagtatctggaccagatccgccagacaatctttgaaaacctgaagatgctgaaccatgcacctagtgtccagattcatgacgtgcctgcagacctcctgacctatgacaggactgatgaggctgatgcagaggagaggggtcctgaggagaactatagcaggccagaggcacccaatgagttctatgatggagaccatgacaatgacaaggaaagcgatgtggagatttagaacccagctttcttgtacaaagtggttgatatcggtaagcctatccctaaccctctcctcggtctcgattctacgtagtaatgaactagtccgtaacttgaaagtatttcgatttcttggctttatatatcttgtggaaaggacgataaacgacgttatacgacactcga

SEQ ID NO: 3431 - DNA, 1028 bp, Homo sapiens
  source 1..1028: mol_type = genomic DNA
atcgattgatcaacaagtttgtacaaaaaagttggcaccatgggcagcaaagaagatgcgggcaaggggtgtccggcggccggtggcgtctccagcttcaccatccagtccatcctgggcgggggcccctcggaggcaccgcgggagcccgtcggctggccagccaggaagcgcagcctgtccgtgtcctcggaggaggaggagccggacgacggctggaaggcgcccgcctgcttctgcccagaccagcacggccctaaggagcagggccccaagcaccatccccccatcccttttccttgcctgggtacccccaagggcagcggaggctcgggcccgggcggcttggagcgcacgcctttcctctctccttcgcactcggactttaaagaagagaaagagaggctcctgcccgcgggctcgccctcgccggggtccgagcggccgcgggacggcggcgctgagcggcaggccggcgcggccaagaagaagacgcgcaccgtcttttcgcgcagccaggtgtaccagctcgagtccaccttcgacatgaagcgctacctgagcagctcggagcgcgcctgcctcgcctccagcctgcagctcacggagacccaggtaaagacttggttccagaaccgccgcaacaagtggaagcggcagctctcggctgagctggaggcggccaacatggcgcacgcgtcggcgcagactctggtgagcatgccgctggtgttccgggacagttcgctgctgcgcgtgccggtgccgcgctcgctcgcctttcccgcgccgctctactacccgggaagcaacctctcggccttacctctctacaacctatacaacaagctcgactacttgccaactttcttgtacaaagtggttgatatcggtaagcctatccctaaccctctcctcggtctcgattctacgtagtaatgaactagtccgtaacttgaaagtatttcgatttcttggctttatatatcttgtggaaaggacgattgatttccagtgcgagaagaccg

SEQ ID NO: 3432 - DNA, 3227 bp, Homo sapiens
  source 1..3227: mol_type = genomic DNA
atcgattgatcaacaagtttgtacaaaaaagcaggcaccatggatctgactcttgctgaacttcaggaaatggcatctcgccagcagcaacagattgaagcccagcaacaattgctggcaactaaggaacagcgcttaaagtttttgaaacaacaagatcagcgacaacagcaacaagttgctgagcaggagaaacttaaaaggctaaaagaaatagctgagaatcaggaagctaagctaaaaaaagtgagagcacttaaaggccacgtggaacagaagagactaagcaatgggaaacttgtggaggaaattgaacagatgaataatttgttccagcaaaaacagagggagctcgtcctggctgtgtcaaaagtagaagaactgaccaggcagctagagatgctcaagaacggcaggatcgacagccaccatgacaatcagtctgcagtggctgagcttgatcgcctctataaggagctgcagctaagaaacaaattgaatcaagagcagaatgccaagctacaacaacagagggagtgtttgaataagcgtaattcagaagtggcagtcatggataagcgtgttaatgagctgagggaccggctgtggaagaagaaggcagctctacagcaaaaagaaaatctaccagtttcatctgatggaaatcttccccagcaagccgcgtcagccccaagccgtgtggctgcagtaggtccctatatccagtcgtctactatgcctcggatgccctcaaggcctgaattgctggtgaagccagccctgccggatggttccttggtcattcaggcttcagaggggccgatgaaaatacagacactgcccaacatgagatctggggctgcttcacaaactaaaggctctaaaatccatccagttggccctgattggagtccttcaaatgcagatcttttcccaagccaaggctctgcttctgtacctcaaagcactgggaatgctctggatcaagttgatgatggagaggttccgctgagggagaaagagaagaaagtgcgtccgttctcaatgtttgatgcagtagaccagtccaatgccccaccttcctttggtactctgaggaagaaccagagcagtgaagatatcttgcgggatgctcaggttgcaaataaaaatgtggctaaagtaccacctcctgttcctacaaaaccaaaacagattaatttgccttattttggacaaactaatcagccaccttcagacattaagccagacggaagttctcagcagttgtcaacagttgttccgtccatgggaactaaaccaaaaccagcagggcagcagccgagagtgctgctatctcccagcataccttcggttggccaagaccagaccctttctccaggttctaagcaagaaagtccacctgctgctgccgtccggccctttactccccagccttccaaagacaccttacttccacccttcagaaaaccccagaccgtggcagcaagttcaatatattccatgtatacgcaacagcaggcgccaggaaaaaacttccagcaggctgtgcagagcgcgttgaccaagactcataccagagggccacacttttcaagtgtatatggtaagcctgtaattgctgctgcccagaatcaacagcagcacccagagaacatttattccaatagccagggcaagcctggcagtccagaacctgaaacagagcctgtttcttcagttcaggagaaccatgaaaacgaaagaattcctcggccactcagcccaactaaattactgcctttcttatctaatccttaccgaaaccagagtgatgctgacctagaagccttacgaaagaaactgtctaacgcaccaaggcctctaaagaaacgtagttctattacagagccagagggtcctaatgggccaaatattcagaagcttttatatcagaggaccaccatagcggccatggagaccatctctgtcccatcatacccatccaagtcagcttctgtgactgccagctcagaaagcccagtagaaatccagaatccatatttacatgtggagcccgaaaaggaggtggtctctctggttcctgaatcattgtccccagaggatgtggggaatgccagtacagagaacagtgacatgccagctccttctccaggccttgattatgagcctgagggagtcccagacaacagcccaaatctccagaataacccagaagaaccaaatccagaggctccacatgtgcttgatgtgtacctggaggagtaccctccatacccacccccaccatacccatctggggagcctgaagggcccggagaagactcggtgagcatgcgcccgcctgaaatcaccgggcaggtctctctgcctcctggtaaaaggacaaacttgcgtaaaactggctcagagcgtatcgctcatggaatgagggtgaaattcaacccccttgctttactgctagattcgtctttggagggagaatttgaccttgtacagagaattatttatgaggttgatgacccaagcctccccaatgatgaaggcatcacggctcttcacaatgctgtgtgtgcaggccacacagaaatcgttaagttcctggtacagtttggtgtaaatgtaaatgctgctgatagtgatggatggactccattacattgtgctgcctcatgtaacaacgtccaagtgtgtaagtttttggtggagtcaggagccgctgtgtttgccatgacctacagtgacatgcagactgctgcagataagtgcgaggaaatggaggaaggctacactcagtgctcccaatttctttatggagttcaggagaagatgggcataatgaataaaggagtcatttatgcgctttgggattatgaacctcagaatgatgatgagctgcccatgaaagaaggagactgcatgacaatcatccacagggaagacgaagatgaaatcgaatggtggtgggcgcgccttaatgataaggagggatatgttccacgtaacttgctgggactgtacccaagaattaaaccaagacaaaggagcttggcctgagacccagctttcttgtacaaagtggttgatatcggtaagcctatccctaaccctctcctcggtctcgattctacgtagtaatgaactagtccgtaacttgaaagtatttcgatttcttggctttatatatcttgtggaaaggacgacccgcacgcaaactacattcgtca

SEQ ID NO: 3433 - DNA, 1448 bp, Homo sapiens
  source 1..1448: mol_type = genomic DNA
accgccaccatgtttgactgtatggatgttctgtcagtgagtcctgggcaaatcctggatttctacactgcgagtccgtcttcctgcatgctccaggagaaagctctcaaagcatgcttcagtggattgacccaaaccgaatggcagcatcggcacactgctcaatcaattgaaacacagagcaccagctctgaggaactcgtcccaagccccccatctccacttcctccccctcgagtgtacaaaccctgcttcgtctgccaggacaaatcatcagggtaccactatggggtcagcgcctgtgagggatgtaagggctttttccgcagaagtattcagaagaatatgatttacacttgtcaccgagataagaactgtgttattaataaagtcaccaggaatcgatgccaatactgtcgactccagaagtgctttgaagtgggaatgtccaaagaatctgtcaggaatgacaggaacaagaaaaagaaggagacttcgaagcaagaatgcacagagagctatgaaatgacagctgagttggacgatctcacagagaagatccgaaaagctcaccaggaaactttcccttcactctgccagctgggtaaatacaccacgaattccagtgctgaccatcgagtccgactggacctgggcctctgggacaaattcagtgaactggccaccaagtgcattattaagatcgtggagtttgctaaacgtctgcctggtttcactggcttgaccatcgcagaccaaattaccctgctgaaggccgcctgcctggacatcctgattcttagaatttgcaccaggtataccccagaacaagacaccatgactttctcagacggccttaccctaaatcgaactcagatgcacaatgctggatttggtcctctgactgaccttgtgttcacctttgccaaccagctcctgcctttggaaatggatgacacagaaacaggccttctcagtgccatctgcttaatctgtggagaccgccaggaccttgaggaaccgacaaaagtagataagctacaagaaccattgctggaagcactaaaaatttatatcagaaaaagacgacccagcaagcctcacatgtttccaaagatcttaatgaaaatcacagatctccgtagcatcagtgctaaaggtgcagagcgtgtaattaccttgaaaatggaaattcctggatcaatgccacctctcattcaagaaatgctggagaattctgaaggacatgaacccttgaccccaagttcaagtgggaacacagcagagcacagtcctagcatctcacccagctcagtggaaaacagtggggtcagtcagtcaccactcgtgcaatagtaatgaactagtccgtaacttgaaagtatttcgatttcttggctttatatatcttgtggaaaggacgacgcattgtatttcgactggatggt

SEQ ID NO: 3434 - DNA, 1832 bp, Homo sapiens
  source 1..1832: mol_type = genomic DNA
atcgattgatcaacaagtttgtacaaaaaagttggcatgggagatatctttttgtgtaagaaagtggaatcaccaaagaagaatttgagagaatccaaacaaagggaggaggatgatgaagatccagatctgatctatgttggggtggagcatgtacatagagatgctgaagttctctttgtcgggatgatttcaaattcaaaaccagtcgtttcaaacattttgaacagagtcaccccaggctcaaattcaagaagaaagaaaggccacttccgtcaatatcctgctcacgtgtcgcagcctgcaaatcatgtgacctctatggcaaaagccatcatgccggtttctctgtctgaggggcgatcgacagatagtcctgtcactatgaagtcttcatctgaacctggttataaaatgagctcaccacaagttgtttctcccagttcctcagactcgctccccccagggactcagtgtctagttggagctatggtctctggaggaggcagaaatgagagttctcctgattcaaagcgactttccacttcagatataaacagcagagattccaaaagggttaaactcagggatggaatcccaggggtaccttctttagctgtggtcccttcagatatgtcttctacaataagcacaaatacaccctcacaggggatctgcaactcatcaaaccatgttcagaatggagtaacatttccttggcctgatgctaatggaaaggcacatttcaatcttacagatccagagagagcaagtgagtctgccctggcaatgacagacatttcaagtctagcaagtcaaaacaagacctttgatcccaagaaagaaaatcccatcgtgttacttagcgacttttactatggacagcataaaggagatgggcagccggaacagaagactcacaccacctttaaatgcctcagctgcgtgaaagttctaaaaaatattaagtttatgaatcacatgaagcatcatttggaatttgagaagcagaggaacgacagctgggaagaccacaccacctgccagcactgccaccggcagtttcccactcccttccagctacagtgtcacattgatagtgtacacatcgccatggggccctctgctgtctgtaaaatctgtgaattgtcatttgaaacagatcaggtcctcttacaacacatgaaggaccatcataagcctggcgaaatgccttatgtgtgccaggtttgccattacagatcgtcggtctttgctgatgtggaaacacattttagaacgtgccatgaaaacacaaagaatttgctttgtctgttttgtctcaaacttttcaaaactgcaataccatacatgaatcattgttggaggcacagcagaaggagggtccttcagtgttccaagtgccggctacagtttttgacgttgaaggaggaaatagagcacaaaaccaaggaccatcaaacatttaaaaagccggagcaactgcaagggttgcctagtgaaacaaaagttattattcaaacttcagttcagccaggatcaagtggtatggcttccgttattgttagcaacactgaccctcagtcttctcctgtaaaaactaaaaagaagacggctatgaacactagagattccagactcccttgcagcaaggattctagctgcccaactttcttgtacaaagtggttgatatcggtaagcctatccctaaccctctcctcggtctcgattctacgtagtaatgaactagtccgtaacttgaaagtatttcgatttcttggctttatatatcttgtggaaaggacgactgttcaattggtgactaacccac

SEQ ID NO: 3435 - DNA, 641 bp, Homo sapiens
  source 1..641: mol_type = genomic DNA
atcgattgatcaacaagtttgtacaaaaaagttggcatgctctcagtccagccagacaccaagccgaaaggttgtgctggctgcaaccgaaagatcaaggaccggtatcttctaaaggcactggacaaatactggcatgaagactgcctgaagtgtgcctgctgtgactgtcgcttgggagaggtgggctccaccctgtacactaaagctaatcttatcctttgtcgcagagactatctgaggctctttggtgtaacgggaaactgcgctgcctgtagtaagctcatccctgcctttgagatggtgatgcgtgccaaggacaatgtttaccacctggactgctttgcatgtcagctttgtaatcagagattttgtgttggagacaaatttttcctaaagaataacatgatcctttgccagacggactacgaggaaggtttaatgaaagaaggttatgcaccccaggttcgctgcccaactttcttgtacaaagtggttgatatcggtaagcctatccctaaccctctcctcggtctcgattctacgtagtaatgaactagtccgtaacttgaaagtatttcgatttcttggctttatatatcttgtggaaaggacgaagcgatgataccctaacgcctagg

SEQ ID NO: 3436 - DNA, 665 bp, Homo sapiens
  source 1..665: mol_type = genomic DNA
atcgattgatcaacaagtttgtacaaaaaagttggcatgaccaaaataaaggcagatcccgacgggcccgaggctcaggcggaggcgtgttccggggagcgcacctaccaggagctgctggtcaaccagaaccccatcgcgcagcccctggcttctcgccgcctcacgcggaagctctacaaatgcatcaagaaagcggtgaagcagaagcagattcggcgcggggtgaaagaggttcagaaatttgtcaacaaaggagaaaaagggatcatggttttggcaggagacacactgcccattgaggtatactgccatctcccagtcatgtgtgaggaccgaaatttgccctatgtctatatcccctctaagacggacctgggtgcagccgcaggctccaagcgccccacctgtgtgataatggtcaagccccatgaggagtaccaggaggcttacgatgagtgcctggaggaggtgcagtcactgcccctacccctatgcccaactttcttgtacaaagtggttgatatcggtaagcctatccctaaccctctcctcggtctcgattctacgtagtaatgaactagtccgtaacttgaaagtatttcgatttcttggctttatatatcttgtggaaaggacgatgagtgatcagagtcttaaagccc

SEQ ID NO: 3437 - DNA, 1148 bp, Homo sapiens
  source 1..1148: mol_type = genomic DNA
atcgattgatcaacaagtttgtacaaaaaagttggcatggacgccttcaaggggggcatgagcctggagcggctgccggaggggctccggccgccgccgccgccaccccatgacatggggcccgccttccacctggcccggcccgccgacccccgcgagccgctcgagaactccgccagcgagtcgtctgacacggagctgccagagaaggagcgcggcggggaacccaaggggcccgaggacagtggtgcgggaggcacgggctgcggcggcgcagacgacccagccaagaagaagaagcagcggcggcaacgtacgcacttcacaagccagcagttgcaagagctagaggccacgttccagaggaaccgctaccccgacatgagcatgagggaggagatcgccgtgtggaccaacctcaccgagccgcgcgtgcgggtctggttcaagaaccggcgagccaagtggcgtaagcgcgagcgtaaccagcagctggacctgtgcaagggtggctacgtgccgcagttcagcggcctagtgcagccctacgaggacgtgtacgccgccggctactcctacaacaactgggccgccaagagcctggcgccagcgccgctctccaccaagagcttcaccttcttcaactccatgagcccgctgtcgtcgcagtccatgttctcagcacccagctccatctcctccatgaccatgccgtccagcatgggcccaggcgccgtgcctggcatgcccaactcgggcctcaacaacatcaacaacctcaccggctcctcgctcaactcggccatgtcgccgggcgcttgcccgtacggcactcccgcctcgccctacagcgtctaccgggacacgtgcaactcgagcctagccagcctgcggctcaagtccaaacagcactcgtcgtttggctacggcggcctgcagggcccggcctcgggcctcaacgcgtgccagtacaacagctgcccaactttcttgtacaaagtggttgatatcggtaagcctatccctaaccctctcctcggtctcgattctacgtagtaatgaactagtccgtaacttgaaagtatttcgatttcttggctttatatatcttgtggaaaggacgaaaccttagactcttccgctccctt

SEQ ID NO: 3438 - DNA, 1178 bp, Homo sapiens
  source 1..1178: mol_type = genomic DNA
atcgattgatcaacaagtttgtacaaaaaagttggcatgaactgcatgaaaggcccgcttcacttggagcaccgagcagcggggaccaagctgtcggccgtctcctcatcttcctgtcaccatccccagccgttagccatggcttcggttctggctcccggtcagccccggtcgctggactcctccaagcacaggctggaggtgcacaccatctccgacacctccagcccggaggccgcagagaaagataaaagccagcaggggaagaatgaggacgtgggcgccgaggacccgtctaagaagaagcggcaaaggcggcagcggactcactttaccagccagcagctccaggagctggaggccactttccagaggaaccgctacccggacatgtccacacgcgaagaaatcgctgtgtggaccaaccttacggaagcccgagtccgggtttggttcaagaatcgtcgggccaaatggagaaagagggagcgcaaccagcaggccgagctatgcaagaatggcttcgggccgcagttcaatgggctcatgcagccctacgacgacatgtacccaggctattcctacaacaactgggccgccaagggccttacatccgcctccctatccaccaagagcttccccttcttcaactctatgaacgtcaaccccctgtcatcacagagcatgttttccccacccaactctatctcgtccatgagcatgtcgtccagcatggtgccctcagcagtgacaggcgtcccgggctccagtctcaacagcctgaataacttgaacaacctgagtagcccgtcgctgaattccgcggtgccgacgcctgcctgtccttacgcgccgccgactcctccgtatgtttatagggacacgtgtaactcgagcctggccagcctgagactgaaagcaaagcagcactccagcttcggctacgccagcgtgcagaacccggcctccaacctgagtgcttgccagtatgcagtggaccggcccgtgtgcccaactttcttgtacaaagtggttgatatcggtaagcctatccctaaccctctcctcggtctcgattctacgtagtaatgaactagtccgtaacttgaaagtatttcgatttcttggctttatatatcttgtggaaaggacgaatgttatcagatcccccgcaacgg

SEQ ID NO: 3439 - DNA, 821 bp, Homo sapiens
  source 1..821: mol_type = genomic DNA
atcgattgatcaacaagtttgtacaaaaaagttggcatgctggggtttttgtccgcacgccaaacgggtttggaggaccctcttcgccttcggagagcagagtcaacacggagagttttgggactggaattaaataaagacagagatgttgaaagaatccacggcggtggaattaacacccttgacattgaacctgttgaagggagatacatgttatcaggtggttcagatggtgtgattgtactttatgaccttgagaactccagcagacaatcttattacacatgtaaagcagtgtgttccattggcagagatcatcctgatgttcacagatacagtgtggagactgtacagtggtatcctcatgacactggcatgttcacatcaagctcatttgataaaactctgaaagtatgggatacaaatacattacaaactgcagatgtatttaattttgaggaaacagtttacagtcatcatatgtctccagtctccaccaagcactgtttggtagcagttggtactagaggacccaaagtacaactttgtgacttgaagtctggatcctgttctcacattctacagggtatttttattttatttcaaacggcaactactttgagtaaacgattcaataaaaagaaacgttactacccaactttcttgtacaaagtggttgatatcggtaagcctatccctaaccctctcctcggtctcgattctacgtagtaatgaactagtccgtaacttgaaagtatttcgatttcttggctttatatatcttgtggaaaggacgatgcagccacttttttaggcacctt

SEQ ID NO: 3440 - DNA, 1697 bp, Homo sapiens
  source 1..1697: mol_type = genomic DNA
atcgattgatcaacaagtttgtacaaaaaagttggcaccatgtcttccatggaggagattcaggtggagctgcaatgtgctgacctctggaagcggttccatgatattggaactgaaatgatcatcaccaaagcaggcaggaggatgtttcctgccatgagagtgaaaatcactggcctagatccacatcagcagtactacatagcaatggacattgtgcctgtggacaataaaagatacagatatgtgtatcatagctccaagtggatggtggctggcaatgctgattcccctgtgcccccaagagtttatatacaccctgattctctagcttctggagacacctggatgagacaggtggtcagttttgacaaactcaagcttaccaacaatgagttggatgatcaaggacatatcattctgcactctatgcacaaataccagcctcgagttcatgtgattcgcaaagacttcagcagtgacctttcacccactaagcctgttcctgttggggatggggtgaaaacgttcaactttcctgagactgtgttcaccacagttacggcctatcagaatcagcagattaccagattaaaaattgaccgaaacccttttgctaaaggattcagagattctgggagaaacagaactggacttgaagccatcatggagacatatgcattctggagacctcctgtgcgcacactcaccttcgaagacttcaccaccatgcagaagcagcaaggaggcagcacaggcacttccccaaccacctccagcactgggacaccatccccttcggcttcttctcatcttttatctccatcctgttctcctccaacttttcatctggcccccaacactttcaatgtgggctgccgagaaagccagctgtgtaatctaaacctctctgattatccaccatgtgcccgaagcaacatggctgccttgcagagctacccagggctgagtgacagtggctacaacaggcttcagagtggcaccacttcagccactcagccctctgaaaccttcatgcctcagaggactccatccctgatctcaggaataccaactcctccctcgttgcctggcaacagcaagatggaagcctacggtggccagctggggtcctttcccacttcccagtttcagtatgtcatgcaggcaggcaatgctgcctccagctcctcatcaccacacatgttcgggggcagccacatgcagcagagctcctacaatgccttctcccttcacaacccttacaacctgtatggatacaatttccccacttcccctaggctagctgcaagcccggaaaaactgagcgcctctcaaagcactttactctgttcttctccttccaacggggcctttggagagaggcagtacctgccgtcagggatggagcacagcatgcacatgattagtccttcacccaataaccaacaggcaaccaacacttgtgatggccggcagtatggggcagttccaggctcctcctcccagatgtccgtgcacatggttttgccaactttcttgtacaaagtggttgatatcggtaagcctatccctaaccctctcctcggtctcgattctacgtagtaatgaactagtccgtaacttgaaagtatttcgatttcttggctttatatatcttgtggaaaggacgatttggctttttcaccgcctactga

SEQ ID NO: 3441 - DNA, 2081 bp, Homo sapiens
  source 1..2081: mol_type = genomic DNA
atcgattgatcaacaagtttgtacaaaaaagttggcatggcagaccagagaatggacatttcttcaaccatcagtgatttcatgtccccgggccccaccgacctgctttccagctctcttggtaccagtggtgtggattgcaaccgcaaacggaaaggcagctccactgactaccaagaaagcatggacacagacaaagatgaccctcatggaaggttagaatatacagaacaccaaggaaggataaaaaatgcaagggaagctcacagtcagattgaaaagcggcgtcgggataaaatgaacagttttatagatgaattggcttctttggtaccaacatgcaacgcaatgtccaggaaattagataaacttactgtgctaaggatggctgttcagcacatgaaaacattaagaggtgccaccaatccatacacagaagcaaactacaaaccaacttttctatcagacgatgaattgaaacacctcattctcagggcagcagatggatttttgtttgtcgtaggatgtgaccgagggaagatactctttgtctcagagtctgtcttcaagatcctcaactacagccagaatgatctgattggtcagagtttgtttgactacctgcatcctaaagatattgccaaagtcaaggagcagctctcctcctctgacaccgcaccccgggagcggctcatagatgcaaaaactggacttccagttaaaacagatataacccctgggccatctcgattatgttctggagcacgacgttctttcttctgtaggatgaagtgtaacaggccttcagtaaaggttgaagacaaggacttcccctctacctgctcaaagaaaaaagatcgaaaaagcttctgcacaatccacagcacaggctatttgaaaagctggccacccacaaagatggggctggatgaagacaacgaaccagacaatgaggggtgtaacctcagctgcctcgtcgcaattggacgactgcattctcatgtagttccacaaccagtgaacggggaaatcagggtgaaatctatggaatatgtttctcggcacgcgatagatggaaagtttgtttttgtagaccagagggcaacagctattttggcatatttaccacaagaacttctaggcacatcgtgttatgaatattttcaccaagatgacataggacatcttgcagaatgtcataggcaagttttacagacgagagaaaaaattacaactaattgctataaatttaaaatcaaagatggttcttttatcacactacggagtcgatggttcagtttcatgaacccttggaccaaggaagtagaatatattgtctcaactaacactgttgttttagccaacgtcctggaaggcggggacccaaccttcccacagctcacagcatccccccacagcatggacagcatgctgccctctggagaaggtggcccaaagaggacccaccccactgttccagggattccagggggaacccgggctggggcaggaaaaataggccgaatgattgctgaggaaatcatggaaatccacaggataagagggtcatcgccttctagctgtggctccagcccattgaacatcacgagtacgcctccccctgatgcctcttctccaggaggcaagaagattttaaatggagggactccagacattccttccagtggcctactatcaggccaggctcaggagaacccaggttatccatattctgatagttcttctattcttggtgagaacccccacataggtatagacatgattgacaacgaccaaggatcaagtagtcccagtaatgatgaggcagcaatggctgtcatcatgagcctcttggaagcagatgctggactgggtggccctgttgactttagtgacttgccatggccgctgtacccaactttcttgtacaaagtggttgatatcggtaagcctatccctaaccctctcctcggtctcgattctacgtagtaatgaactagtccgtaacttgaaagtatttcgatttcttggctttatatatcttgtggaaaggacgactctctcttcccaacttcctaggc

SEQ ID NO: 3442 - DNA, 761 bp, Homo sapiens
  source 1..761: mol_type = genomic DNA
atcgattgatcaacaagtttgtacaaaaaagttggcatgtctcccagccttcaggaaggcgctcagctcggggaaaacaaaccctcaacttgctccttttcaattgagagaatcttaggactggaccagaagaaagactgtgttccattaatgaaaccccacaggccctgggcagacacctgcagctcatcagggaaagatggtaacttatgtctacatgtcccaaatcctcccagtgggatttcattccctagcgtggtggatcacccaatgccagaagaaagagcttcgaaatatgaaaattacttttcagcctcagaaagactgtctttgaaaagagagttgagttggtatagaggccgaagaccaagaactgcttttactcaaaaccagattgaagtgttagaaaatgtctttagagtaaactgctatcctggtatcgatattagagaagacttagctcaaaaattgaatctagaggaagacagaatccagatttggtttcaaaatcggcgtgcaaaactgaaaaggtcccatagagaatcacagtttctaatggcgaaaaaaaatttcaacacaaatctgctggaatacccaactttcttgtacaaagtggttgatatcggtaagcctatccctaaccctctcctcggtctcgattctacgtagtaatgaactagtccgtaacttgaaagtatttcgatttcttggctttatatatcttgtggaaaggacgaacaccagcattaccctcgctcatt

SEQ ID NO: 3443 - DNA, 1025 bp, Homo sapiens
  source 1..1025: mol_type = genomic DNA
atcgattgatcaacaagtttgtacaaaaaagttggcatgtttggatttccaacagctaccctgctggactgtcatggaagatatgcccagaatgtagcgttcttcaatgtgatgactgaagcccaccacaaatatgaccactctgaggctacaggatcctcaagctgggatatccaaaattctttcagaagagagaagctggaacaaaaatccccagattcgaagacactacaggaagattcacctggagtgagacaaagggtctatgagtgccaggagtgtggaaaatccttccggcaaaaaggtagtctaacgttacatgagagaatccacactggtcaaaagccttttgagtgcacccactgtggaaaaagcttcagggccaaaggcaatcttgttacacatcaacggatacacacgggagagaagccttatcagtgcaaggagtgtgggaaaagcttcagtcaacgaggtagtctcgctgtccacgagagactccacactggacagaaaccctacgagtgtgctatttgtcagagaagcttcaggaatcagagtaaccttgctgttcacaggagagttcacagtggtgagaagccctatagatgtgatcagtgtggaaaagccttcagtcagaaaggaagcttaattgttcacatcagagtccacacaggcctgaagccctatgcctgtacccagtgcaggaagagtttccacaccagggggaattgtattctgcatggcaaaatccacacaggagagacaccctatctgtgcggccagtgtggaaaaagcttcacccagagagggagtctggctgtgcaccagcgaagctgctcacagaggctcaccctttgcccaactttcttgtacaaagtggttgatatcggtaagcctatccctaaccctctcctcggtctcgattctacgtagtaatgaactagtccgtaacttgaaagtatttcgatttcttggctttatatatcttgtggaaaggacgagttcaccgttgtgtcccctagatg

SEQ ID NO: 3444 - DNA, 869 bp, Homo sapiens
  source 1..869: mol_type = genomic DNA
atcgattgatcaacaagtttgtacaaaaaagttggcatggcggcggcggttcggatgaacatccagatgctgctggaggcggccgactatctggagcggcgggagagagaagctgaacatggttatgcctccatgttaccatacaataacaaggacagagatgccttaaaacggaggaacaaatccaaaaagaataacagcagtagcagatcaactcacaatgaaatggagaagaatagacgggctcatcttcgcttgtgcctggagaagttgaaggggctggtgccactgggacccgaatcaagtcgacacactacgttgagtttattaacaaaagccaaattgcacataaagaaacttgaagattgtgacagaaaagccgttcaccaaatcgaccagcttcagcgagagcagcgacacctgaagaggcagctggagaagctgggcattgagaggatccggatggacagcatcggctccaccgtctcctcggagcgctccgactccgacagggaagaaatcgacgttgacgtggagagcacggactatctcacaggtgatctggactggagcagcagcagtgtgagcgactctgacgagcggggcagcatgcagagcctcggcagtgatgagggctattccagcaccagcatcaagagaataaagctgcaggacagtcacaaggcgtgtcttggtctctacccaactttcttgtacaaagtggttgatatcggtaagcctatccctaaccctctcctcggtctcgattctacgtagtaatgaactagtccgtaacttgaaagtatttcgatttcttggctttatatatcttgtggaaaggacgatttacacctccgttaaccaacccc

SEQ ID NO: 3445 - DNA, 1499 bp, Homo sapiens
  source 1..1499: mol_type = genomic DNA
atcgattgatcaacaagtttgtacaaaaaagttggcatgggtccagtaattggaatgactccagataagagagctgaaaccccaggagctgaaaagattgcaggattaagccagatttacaaaatgggaagcttgcctgaagctgttgatgctgccaggccgaaggccactctagtggacagtgagtcagcagatgatgaactcacaaacttgaactggcttcatgaaagcactaatcttctaacaaacttcagcctcggaagtgagggtcttccaattgttagtccattgtatgacatagagggagatgatgtgccatcctttggaccagcttgctaccagaacccagaaaaaaaatcagcgacttcaaagcccccatactcctttagtcttctcatttatatggccattgagcactctccaaataaatgtttgcctgtcaaagaaatttatagctggattctggaccattttccatattttgctactgcaccaacaggctggaagaattctgttcgacataatctgtccctgaataaatgttttcagaaagtggaaagaagccatggcaaggttaatggaaaaggttccttatggtgtgttgatccggaatataaacccaatcttatccaggcactgaagaagcaacctttttcttcagcatcttcacaaaatggttctttatcacctcactatttaagctctgtaatcaagcagaaccaggtgcgaaacctcaaagaatctgatattgatgctgctgctgcaatgatgcttttaaatacttctatagaacaaggaattttagaatgtgagaagcctcttcctcttaaaacagcattgcaaaaaaagaggagttacggcaatgcatttcatcatcccagtgctgtacgattacaagagagtgattctttagccaccagcattgatccaaaagaagatcacaattacagtgcaagtagcatggcagcacagcgttgtgcatccaggtctagcgtgtcttctctgtcttctgtggatgaggtatatgaatttatcccaaagaatagtcacgtgggaagtgatggcagtgaaggatttcacagtgaagaagatacagacgttgattatgaagatgatcctcttggagacagtggctatgcatcacagccttgtgcaaaaatctctgaaaaagggcagtcaggcaaaaagatgcgaaaacagacatgtcaagaaattgatgaggagctcaaagaggcagctggatctctgctccaccttgctggaattcgtacatgtttaggttccctaataagtactgcaaagacacaaaatcaaaagcaacggaaaaaatacccaactttcttgtacaaagtggttgatatcggtaagcctatccctaaccctctcctcggtctcgattctacgtagtaatgaactagtccgtaacttgaaagtatttcgatttcttggctttatatatcttgtggaaaggacgaactcaccctggagggttactcggc

SEQ ID NO: 3446 - DNA, 1670 bp, Homo sapiens
  source 1..1670: mol_type = genomic DNA
accgccaccatggaggaacacggagtgacccaaaccgaacatatggctaccatagaagcacatgcagtggcccagcaagtgcagcaggtccatgtggctacttacaccgagcatagtatgctgagtgctgatgaagactcgccttcttctcccgaggacacctcttacgatgactcagatatactcaactccacagcagctgatgaggtgacagctcatctggcagctgcaggtcctgtgggaatggccgctgctgctgctgtggcaacaggaaagaaacggaaacggcctcatgtatttgagtctaatccatctatccggaagaggcaacaaacacgtttgcttcggaaacttcgagccacgttagatgaatatactactcgtgtgggacagcaagctattgtcctctgtatctcaccctccaaacctaaccctgtctttaaagtgtttggtgcagcacctttggagaatgtggtgcgtaagtacaagagcatgatcctggaagacctggagtctgctctggcagaacacgcccctgcgccacaggaggttaactcagaactgccgcctctcaccatcgacggaattccagtctctgtggacaaaatgacccaggcccagcttcgggcatttatcccagagatgctcaagtactctacaggtcggggaaaaccaggctgggggaaagaaagctgcaagcccatctggtggcctgaagatatcccctgggcaaatgtccggagtgatgtccgcacagaagagcaaaagcagagggtttcatggacccaggcactacggaccatagttaaaaactgttataaacagcatgggcgggaagaccttttgtatgcctttgaagatcagcaaacgcaaacacaggccacagccacacatagtatagctcatcttgtaccatcacagactgtagtccagacttttagtaaccctgatggcactgtctcacttatccaggttggtacgggggcaacagtagccacattggctgatgcttcagaattgccaaccacggtcaccgttgcccaagtgaattattctgccgtggctgatggagaggtggaacaaaattgggccacgttacagggaggtgagatgaccatccagacgacgcaagcatcagaggccacccaggcggtggcatcgttggcagaggccgcagtggcagcttctcaggagatgcagcagggagctacagtcactatggcgcttaacagcgaagctgccgcccatgctgtcgccaccctggctgaggccaccttacaaggtgggggacagatcgtcttgtctggggaaaccgcagcagccgtcggagcacttactggagtccaagatgctaatggcctctttatggcagatcgtgcaggtcgcaagtggatcctgactgacaaagccacaggcctggtccagatccctgtgagcatgtaccagactgtggtgaccagcctcgcccagggcaacggaccagtgcaggtggccatggcccctgtgaccaccaggatatcagacagcgcagtcaccatggacggccaagctgtggaggtggtgacattggaacagtagtaatgaactagtccgtaacttgaaagtatttcgatttcttggctttatatatcttgtggaaaggacgaggtggatacctagtgtgaaacccg

SEQ ID NO: 3447 - DNA, 1736 bp, Homo sapiens
  source 1..1736: mol_type = genomic DNA
atcgattgatcaacaagtttgtacaaaaaagttggcatggcctttcgccatttaattgagttcacatatacagcaaaattaatgatacaaggagaagaagaagccaatgatgtatggaaagcagcagagtttctacaaatgctagaagctatcaaagcccttgaagtcaggaacaaagaaaactcagctcccttagaggaaaataccacaggaaaaaatgaggccaaaaaaaggaagattgcagaaacttcaaatgttatcactgagtcattgccatctgcagaatcagaacctgttgaaattgaggtagagattgccgaaggcaccattgaagtggaagatgaaggcatcgaaacattagaggaagtggcttctgccaagcagtccgtaaagtacatacagagcacaggttcctctgatgattctgctctagcactgttggcagatattaccagcaagtaccgtcaaggtgacagaaaagggcagattaaagaagatggctgtccatctgaccccacgagcaaacaggagcacatgaaatcacactccactgagagtttcaagtgtgaaatatgcaataaacgatatcttcgagagagcgcatggaaacagcacctaaattgttaccaccttgaagaaggtggagtcagtaagaagcaaagaactgggaaaaaaattcatgtatgtcagtactgtgagaaacagtttgaccattttggacattttaaagaacatcttcgaaaacatacaggtgaaaaaccttttgaatgtccaaattgtcatgaacgatttgctagaaatagcactctgaaatgtcacctcactgcatgccaaactggagtaggggcaaaaaaaggaaggaagaagctctacgaatgccaggtctgcaacagtgtgtttaacagctgggaccagttcaaagatcacttggtaatacacactggagataaacccaaccattgtactttatgtgatttgtggtttatgcaaggaaatgaattaaggaggcatctcagtgatgctcacaatatttcagagcgtctagtaacggaagaagttctttcagtagaaacacgtgtgcaaactgaacctgtaacatcaatgactattatagaacaagttgggaaggtgcatgtgctaccattgcttcaggttcaggtggattcagcacaagtgactgtggaacaagtccatccagatctgctccaggacagccaggtgcacgattcacacatgagtgagcttccagagcaggtccaagtgagttatctagaagtgggccgaattcagactgaagaaggtactgaagtacatgtagaggagctgcatgttgaacgggtcaatcaaatgccagtggaagtacaaactgaacttctagaagcagatttggaccacgtgaccccagaaatcatgaaccaagaggagagagagtctagccaagcagatgctgctgaggctgccagggaagatcacgaagatgctgaggatttagagaccaagccaacagtggattctgaagcagaaaaggcagagaatgaggacagaacagctctgccagttttagaatgcccaactttcttgtacaaagtggttgatatcggtaagcctatccctaaccctctcctcggtctcgattctacgtagtaatgaactagtccgtaacttgaaagtatttcgatttcttggctttatatatcttgtggaaaggacgaacaagatggatagcatctcggttg

SEQ ID NO: 3448 - DNA, 2516 bp, Homo sapiens
  source 1..2516: mol_type = genomic DNA
atcgattgatcaacaagtttgtacaaaaaagttggcatggcccaatggaatcagctacagcagcttgacacacggtacctggagcagctccatcagctctacagtgacagcttcccaatggagctgcggcagtttctggccccttggattgagagtcaagattgggcatatgcggccagcaaagaatcacatgccactttggtgtttcataatctcctgggagagattgaccagcagtatagccgcttcctgcaagagtcgaatgttctctatcagcacaatctacgaagaatcaagcagtttcttcagagcaggtatcttgagaagccaatggagattgcccggattgtggcccggtgcctgtgggaagaatcacgccttctacagactgcagccactgcggcccagcaagggggccaggccaaccaccccacagcagccgtggtgacggagaagcagcagatgctggagcagcaccttcaggatgtccggaagagagtgcaggatctagaacagaaaatgaaagtggtagagaatctccaggatgactttgatttcaactataaaaccctcaagagtcaaggagacatgcaagatctgaatggaaacaaccagtcagtgaccaggcagaagatgcagcagctggaacagatgctcactgcgctggaccagatgcggagaagcatcgtgagtgagctggcggggcttttgtcagcgatggagtacgtgcagaaaactctcacggacgaggagctggctgactggaagaggcggcaacagattgcctgcattggaggcccgcccaacatctgcctagatcggctagaaaactggataacgtcattagcagaatctcaacttcagacccgtcaacaaattaagaaactggaggagttgcagcaaaaagtttcctacaaaggggaccccattgtacagcaccggccgatgctggaggagagaatcgtggagctgtttagaaacttaatgaaaagtgcctttgtggtggagcggcagccctgcatgcccatgcatcctgaccggcccctcgtcatcaagaccggcgtccagttcactactaaagtcaggttgctggtcaaattccctgagttgaattatcagcttaaaattaaagtgtgcattgacaaagactctggggacgttgcagctctcagaggatcccggaaatttaacattctgggcacaaacacaaaagtgatgaacatggaagaatccaacaacggcagcctctctgcagaattcaaacacttgaccctgagggagcagagatgtgggaatgggggccgagccaattgtgatgcttccctgattgtgactgaggagctgcacctgatcacctttgagaccgaggtgtatcaccaaggcctcaagattgacctagagacccactccttgccagttgtggtgatctccaacatctgtcagatgccaaatgcctgggcgtccatcctgtggtacaacatgctgaccaacaatcccaagaatgtaaacttttttaccaagcccccaattggaacctgggatcaagtggccgaggtcctgagctggcagttctcctccaccaccaagcgaggactgagcatcgagcagctgactacactggcagagaaactcttgggacctggtgtgaattattcagggtgtcagatcacatgggctaaattttgcaaagaaaacatggctggcaagggcttctccttctgggtctggctggacaatatcattgaccttgtgaaaaagtacatcctggccctttggaacgaagggtacatcatgggctttatcagtaaggagcgggagcgggccatcttgagcactaagcctccaggcaccttcctgctaagattcagtgaaagcagcaaagaaggaggcgtcactttcacttgggtggagaaggacatcagcggtaagacccagatccagtccgtggaaccatacacaaagcagcagctgaacaacatgtcatttgctgaaatcatcatgggctataagatcatggatgctaccaatatcctggtgtctccactggtctatctctatcctgacattcccaaggaggaggcattcggaaagtattgtcggccagagagccaggagcatcctgaagctgacccaggtagcgctgccccatacctgaagaccaagtttatctgtgtgacaccaacgacctgcagcaataccattgacctgccgatgtccccccgcactttagattcattgatgcagtttggaaataatggtgaaggtgctgaaccctcagcaggagggcagtttgagtccctcacctttgacatggagttgacctcggagtgcgctacctcccccatgtgcccaactttcttgtacaaagtggttgatatcggtaagcctatccctaaccctctcctcggtctcgattctacgtagtaatgaactagtccgtaacttgaaagtatttcgatttcttggctttatatatcttgtggaaaggacgatatgatgtagccaaccgatgtcca

SEQ ID NO: 3449 - DNA, 2255 bp, Homo sapiens
  source 1..2255: mol_type = genomic DNA
atcgattgatcaacaagtttgtacaaaaaagttggcatggcgtcgggcccgggctcccaggaacgggaagggctcctgatagtgaagctggaggaggactgcgcctggagccaggagctgcccccacctgacccaggaccgagccccgaggcctcccacttgcgcttcagacggttccgcttccaagaggcagctggtccccgggaagccctcagccggctccaagagctttgccatgggtggcttcggcctgagatgcgcacgaaggagcagatcttggagctgctggtgttagagcagttcctgaccatcctgccccaggagatccagagcagggtgcaggagctgcatccggagagcggcgaagaagcggtgacccttgtggaggatatgcagagagagcttgggagactgagacaacaggtcacaaaccatgggcggggaacagaagtgcttttggaggagcctttgcctctggaaacagcacgagagtcaccgagcttcaagctggagccaatggagactgagcgaagccctggccccaggctgcaggagctgctaggccccagcccccaaagggacccccaggctgtaaaggagagggcattatctgctccctggctttctctttttcctcctgaagggaacatggaagacaaggagatgactgggccccagttgcctgagagcttagaggacgtggcaatgtacatctcccaggaggagtgggggcatcaggatcctagtaagagggccctctccagggacacggtgcaggagagttatgagaatgtggactcactggagtctcacattcccagtcaggaggtcccaggcacccaggtgggacaaggaggaaagctatgggatcccagtgtccagagctgcaaggagggcctgagccccagaggcccagctccaggagaagagaaatttgagaacctggaaggtgttccgtctgtatgctctgagaacatccaccctcaggtgctgcttcctgaccaggcccgaggggaggtgccctggagtcctgagctgggaagacctcatgaccggtcgcaaggggattgggcgcctcccccagagggtggaatggagcaggccttggcaggagcctcaagtggcagagaactggggcgaccgaaggaactgcagccaaagaaactccatttatgtcccttgtgtggcaaaaatttctctaacaactcaaacctaattaggcaccagagaatacatgcagctgaaagactgtgtatgggtgtggactgcactgaaatctttggtgggaacccacgtttcctgtcactacacagagcacacctgggagaggaggcccacaagtgccttgaatgtgggaaatgcttcagtcagaacacccatctgactcgccaccaacgcacccacacgggtgagaagccctatcagtgcaacatttgcggaaaatgtttctcctgcaactccaacctccacaggcaccagagaacgcacactggggagaagccctacaagtgccctgagtgtggggagatctttgctcacagttccaacctccttcggcaccagagaattcacactggagagcgaccttataagtgtcccgagtgtgggaaaagtttctctcggagttcacacctcgtcattcacgaaagaactcatgagagagagagactttaccccttctctgagtgtggggaagctgtgagtgacagcaccccctttcttacaaaccatggagcccataaggcagagaagaagctctttgaatgtttgacttgtgggaaaagcttccggcagggcatgcacctcaccagacatcagagaacacacacaggagagaaaccgtataaatgtaccctttgtggggaaaacttctctcatagatccaatttaatcaggcaccagagaatccacacaggagaaaaaccctatacctgtcatgagtgcggagacagcttctctcacagctccaatcggattcgccacctgagaacgcatacgggagagagaccctataaatgttctgaatgtggagaaagcttctctcggagttcccgtcttatgagtcatcagagaactcacacaggttacccaactttcttgtacaaagtggttgatatcggtaagcctatccctaaccctctcctcggtctcgattctacgtagtaatgaactagtccgtaacttgaaagtatttcgatttcttggctttatatatcttgtggaaaggacgattaattcacttaattgcatttagt

SEQ ID NO: 3450 - DNA, 1058 bp, Homo sapiens
  source 1..1058: mol_type = genomic DNA
atcgattgatcaacaagtttgtacaaaaaagttggcatggagcccggcaattatgccaccttggatggagccaaggatatcgaaggcttgctgggagcgggaggggggcggaatctggtcgcccactcccctctgaccagccacccagcggcgcctacgctgatgcctgctgtcaactatgcccccttggatctgccaggctcggcggagccgccaaagcaatgccacccatgccctggggtgccccaggggacgtccccagctcccgtgccttatggttactttggaggcgggtactactcctgccgagtgtcccggagctcgctgaaaccctgtgcccaggcagccaccctggccgcgtaccccgcggagactcccacggccggggaagagtaccccagccgccccactgagtttgccttctatccgggatatccgggaacctaccagcctatggccagttacctggacgtgtctgtggtgcagactctgggtgctcctggagaaccgcgacatgactccctgttgcctgtggacagttaccagtcttgggctctcgctggtggctggaacagccagatgtgttgccagggagaacagaacccaccaggtcccttttggaaggcagcatttgcagactccagcgggcagcaccctcctgacgcctgcgcctttcgtcgcggccgcaagaaacgcattccgtacagcaaggggcagttgcgggagctggagcgggagtatgcggctaacaagttcatcaccaaggacaagaggcgcaagatctcggcagccaccagcctctcggagcgccagattaccatctggtttcagaaccgccgggtcaaagagaagaaggttctcgccaaggtgaagaacagcgctaccccttacccaactttcttgtacaaagtggttgatatcggtaagcctatccctaaccctctcctcggtctcgattctacgtagtaatgaactagtccgtaacttgaaagtatttcgatttcttggctttatatatcttgtggaaaggacgaggccccagtgcccgggttcgttca

SEQ ID NO: 3451 - DNA, 722 bp, Homo sapiens
  source 1..722: mol_type = genomic DNA
accgccaccatgtccacgggctcggtgagtgatccggaggagatggagcttcgggggctgcagcgggagtacccggtccccgcctccaagaggccgcccctccgcggcgtagagcgcagctacgcctcgcccagtgacaactcgtcggcagaggaggaggaccccgacggcgaggaggagcgctgcgctctgggcacagccggcagcgcggaaggctgcaagaggaagcggccccgtgtggctgggggcggcggcgcaggtggtagcgcgggcggtggtggcaagaagcccctcccggccaagggctcagccgcagagtgcaagcagtcgcagcggaacgcggccaacgcccgtgagcgtgcccggatgcgcgtgctgagcaaagccttctccaggctcaagaccagcctgccctgggtgccccccgacactaagctctccaagctggacacgctccggctggcttccagttacatcgctcacctgcggcagctgttgcaggaggaccgctatgagaacggctacgtgcacccagtgaacctgacatggccattcgtggtctcgggaagaccggactctgacaccaaagaagtttccgcagccaacagactatgtggaaccaccgcttagtaatgaactagtccgtaacttgaaagtatttcgatttcttggctttatatatcttgtggaaaggacgaactctcagagattcttagaggtaa

SEQ ID NO: 3452 - DNA, 878 bp, Homo sapiens
  source 1..878: mol_type = genomic DNA
atcgattgatcaacaagtttgtacaaaaaagttggcatggagctgtatgagacatccccctacttctaccaggaaccccgcttctatgatggggaaaactacctgcctgtccacctccagggcttcgaaccaccaggctacgagcggacggagctcaccctgagccccgaggccccagggccccttgaggacaaggggctggggacccccgagcactgtccaggccagtgcctgccgtgggcgtgtaaggtgtgtaagaggaagtcggtgtccgtggaccggcggcgggcggccacactgagggagaagcgcaggctcaagaaggtgaatgaggccttcgaggccctgaagagaagcaccctgctcaaccccaaccagcggctgcccaaggtggagatcctgcgcagtgccatccagtacatcgagcgcctccaggccctgctcagctccctcaaccaggaggagcgtgacctccgctaccggggcgggggcgggccccagccaggggtgcccagcgaatgcagctctcacagcgcctcctgcagtccagagtggggcagtgcactggagttcagcgccaacccaggggatcatctgctcacggctgaccctacagatgcccacaacctgcactccctcacctccatcgtggacagcatcacagtggaagatgtgtctgtggccttcccagatgaaaccatgcccaactgcccaactttcttgtacaaagtggttgatatcggtaagcctatccctaaccctctcctcggtctcgattctacgtagtaatgaactagtccgtaacttgaaagtatttcgatttcttggctttatatatcttgtggaaaggacgattgctccttaaattgtggctacac

SEQ ID NO: 3453 - DNA, 1589 bp, Homo sapiens
  source 1..1589: mol_type = genomic DNA
atcgattgatcaacaagtttgtacaaaaaagttggcatggactattcgtacgacgaggacctggacgagctgtgccccgtgtgcggggacaaggtgtccggctaccactacggactgctcacgtgtgagagctgcaagggcttcttcaagcgcacggtgcagaacaacaagcactacacgtgcaccgagagccagagctgcaagatcgacaagacgcagcgcaagcgctgtcccttctgccgcttccagaaatgcctgacggtggggatgcgcctggaagccgtgcgcgctgaccgtatgaggggtggccggaacaagtttgggccgatgtacaagcgggaccgggccctgaaacagcagaagaaggcacagattcgggccaatggcttcaagctggagacagggcccccgatgggggtgcccccgccgccccctcccgcaccggactacgtgctgcctcccagcctgcatgggcctgagcccaagggcctggccgccggtccacctgctgggccactgggcgactttggggccccagcactgcccatggccgtgcccggtgcccacgggccactggctggctacctctaccctgcctttcctggccgtgccatcaagtctgagtacccggagccttatgccagccccccacagcctgggctgccgtacggctacccagagcccttctctggagggcccaacgtgcctgagctcatcctgcagctgctgcagctggagccggatgaggaccaggtgcgggcccgcatcttgggctgcctgcaggagcccaccaaaagccgccccgaccagccggcggccttcggcctcctgtgcagaatggccgaccagaccttcatctccatcgtggactgggcacgcaggtgcatggtcttcaaggagctggaggtggccgaccagatgacgctgctgcagaactgctggagcgagctgctggtgttcgaccacatctaccgccaggtccagcacggcaaggagggcagcatcctgctggtcaccgggcaggaggtggagctgaccacagtggccacccaggcgggctcgctgctgcacagcctggtgttgcgggcgcaggagctggtgctgcagctgcttgcgctgcagctggaccggcaggagtttgtctgcctcaagttcatcatcctcttcagcctggatttgaagttcctgaataaccacatcctggtgaaagacgctcaggagaaggccaacgccgccctgcttgactacaccctgtgccactacccgcactgcggggacaaattccagcagctgctgctgtgcctggtggaggtgcgggccctgagcatgcaggccaaggagtacctgtaccacaagcacctgggcaacgagatgccccgcaacaacctgctcatcgaaatgctgcaagccaagcagacttgcccaactttcttgtacaaagtggttgatatcggtaagcctatccctaaccctctcctcggtctcgattctacgtagtaatgaactagtccgtaacttgaaagtatttcgatttcttggctttatatatcttgtggaaaggacgacaatgtgattcgaggccactgctt

SEQ ID NO: 3454 - DNA, 1457 bp, Homo sapiens
  source 1..1457: mol_type = genomic DNA
atcgattgatcaacaagtttgtacaaaaaagttggcatggctgtatcactaacagcagctgaaactctggcccttcagggtacacagggacaagagaagatgatgatgatgggaccaaaggaagaggaacagtcttgtgagtatgagaccaggctacctgggaaccactctaccagtcaagagatcttccgccaacgcttcaggcatctccgctaccaggagactcctggtccccgggaggccttgagccaactacgagtactctgctgtgagtggctgaggccagagaaacacacgaaggagcagatcctggagttcctggtgctggaacaattcttgaccatcctgcctgaggagctccaatcctgggtgcggggacatcaccctaagagtggagaggaggctgtgactgtgctggaggatttagagaaaggacttgaaccagagccgcaggtcccaggccctgcacatggacctgcacaggaagagccatgggagaagaaggaatctctgggagcagcccaggaagcactgagcatccagctccagcctaaggagacccagcctttcccaaagagtgaacaggtatatttacattttctgtcagttgttacagaagatggcccagagcccaaggacaaaggatcattgccacaaccacccattactgaagtggaatcacaggtgttctcagaaaaacttgctactgacacctctacatttgaagctacctctgagggtaccttagaactgcagcagagaaatcccaaagcggagagactgaggtggtcccctgcccaggaggaaagtttcaggcagatggttgtcatccataaggaaattcccacagggaagaaagaccatgaatgtagtgaatgtggtaaaaccttcatttataactcacatcttgttgtccaccagagagttcattctggagagaaaccctataagtgtagtgactgtgggaaaactttcaaacagagctcaaacctcggtcagcatcagagaattcatacaggagagaaacccttcgaatgtaatgaatgtgggaaggccttcagatggggtgctcatcttgttcagcatcagaggattcactcaggagagaagccctatgagtgtaatgagtgtgggaaggcctttagtcaaagctcatatctaagtcagcatcggagaattcacagtggagagaaaccttttatatgtaaagaatgtgggaaagcttatggatggtgctcagagctcattagacatcggagagttcatgccagaaaagagccttcccattgcccaactttcttgtacaaagtggttgatatcggtaagcctatccctaaccctctcctcggtctcgattctacgtagtaatgaactagtccgtaacttgaaagtatttcgatttcttggctttatatatcttgtggaaaggacgaatacttcaaaaagaaattgaaccg

SEQ ID NO: 3455 - DNA, 1622 bp, Homo sapiens
  source 1..1622: mol_type = genomic DNA
atcgattgatcaacaagtttgtacaaaaaagttggcatgttaggaactgtgaagatggaagggcatgaaaccagcgactggaacagctactacgcagacacgcaggaggcctactcctccgtcccggtcagcaacatgaactcaggcctgggctccatgaactccatgaacacctacatgaccatgaacaccatgactacgagcggcaacatgaccccggcgtccttcaacatgtcctatgccaacccgggcctaggggccggcctgagtcccggcgcagtagccggcatgccggggggctcggcgggcgccatgaacagcatgactgcggccggcgtgacggccatgggtacggcgctgagcccgagcggcatgggcgccatgggtgcgcagcaggcggcctccatgaatggcctgggcccctacgcggccgccatgaacccgtgcatgagccccatggcgtacgcgccgtccaacctgggccgcagccgcgcgggcggcggcggcgacgccaagacgttcaagcgcagctacccgcacgccaagccgccctactcgtacatctcgctcatcaccatggccatccagcaggcgcccagcaagatgctcacgctgagcgagatctaccagtggatcatggacctcttcccctattaccggcagaaccagcagcgctggcagaactccatccgccactcgctgtccttcaatgactgcttcgtcaaggtggcacgctccccggacaagccgggcaagggctcctactggacgctgcacccggactccggcaacatgttcgagaacggctgctacttgcgccgccagaagcgcttcaagtgcgagaagcagccgggggccggcggcgggggcgggagcggaagcgggggcagcggcgccaagggcggccctgagagccgcaaggacccctctggcgcctctaaccccagcgccgactcgcccctccatcggggtgtgcacgggaagaccggccagctagagggcgcgccggcccccgggcccgccgccagcccccagactctggaccacagtggggcgacggcgacagggggcgcctcggagttgaagactccagcctcctcaactgcgccccccataagctccgggcccggggcgctggcctctgtgcccgcctctcacccggcacacggcttggcaccccacgagtcccagctgcacctgaaaggggacccccactactccttcaaccacccgttctccatcaacaacctcatgtcctcctcggagcagcagcataagctggacttcaaggcatacgaacaggcactgcaatactcgccttacggctctacgttgcccgccagcctgcctctaggcagcgcctcggtgaccaccaggagccccatcgagccctcagccctggagccggcgtactaccaaggtgtgtattccagacccgtcctaaacacttcctacccaactttcttgtacaaagtggttgatatcggtaagcctatccctaaccctctcctcggtctcgattctacgtagtaatgaactagtccgtaacttgaaagtatttcgatttcttggctttatatatcttgtggaaaggacgatatgtagcacctgagtcttcctcg

SEQ ID NO: 3456 - DNA, 1256 bp, Homo sapiens
  source 1..1256: mol_type = genomic DNA
atcgattgatcaacaagtttgtacaaaaaagttggcatgctgggctcagtgaagatggaggcccatgacctggccgagtggagctactacccggaggcgggcgaggtctactcgccggtgaccccagtgcccaccatggcccccctcaactcctacatgaccctgaatcctctaagctctccctatccccctggggggctccctgcctccccactgccctcaggacccctggcacccccagcacctgcagcccccctggggcccactttcccaggcctgggtgtcagcggtggcagcagcagctccgggtacggggccccgggtcctgggctggtgcacgggaaggagatgccgaaggggtatcggcggcccctggcacacgccaagccaccgtattcctatatctcactcatcaccatggccatccagcaggcgccgggcaagatgctgaccttgagtgaaatctaccagtggatcatggacctcttcccttactaccgggagaatcagcagcgctggcagaactccattcgccactcgctgtctttcaacgactgcttcgtcaaggtggcgcgttccccagacaagcctggcaagggctcctactgggccctacaccccagctcagggaacatgtttgagaatggctgctacctgcgccgccagaaacgcttcaagctggaggagaaggtgaaaaaagggggcagcggggctgccaccaccaccaggaacgggacagggtctgctgcctcgaccaccacccccgcggccacagtcacctccccgccccagcccccgcctccagcccctgagcctgaggcccagggcggggaagatgtgggggctctggactgtggctcacccgcttcctccacaccctatttcactggcctggagctcccaggggagctgaagctggacgcgccctacaacttcaaccaccctttctccatcaacaacctaatgtcagaacagacaccagcacctcccaaactggacgtggggtttgggggctacggggctgaaggtggggagcctggagtctactaccagggcctctattcccgctctttgcttaatgcatcctacccaactttcttgtacaaagtggttgatatcggtaagcctatccctaaccctctcctcggtctcgattctacgtagtaatgaactagtccgtaacttgaaagtatttcgatttcttggctttatatatcttgtggaaaggacgacacgaagcaggaactcgataacag

SEQ ID NO: 3457 - DNA, 2891 bp, Homo sapiens
  source 1..2891: mol_type = genomic DNA
atcgattgatcaacaagtttgtacaaaaaagttggcatgaaaatcggcagtgggttcctgagtggcggcggaggtaccggcagtagcggtggtagcggctccggcggcggtggtagtggcggcggcggcggcggcggcagcagcggcaggagggcagagatggaacccacctttccccagggtatggttatgttcaaccaccgtcttcccccggtcaccagcttcacccggccggcggggtcggccgcccctcccccgcaatgcgtgttatcctcctctacctccgcagccccggccgctgagcccccccctccgccagccccggacatgactttcaagaaggagccggcggcgtcagccgcggccttcccctcgcagaggacctcctgggggttcttgcagtctttggttagcatcaaacaggagaaacccgcggatcctgaggagcagcagtcccaccaccaccatcaccaccaccactatggggggctgttcgctggagctgaagagaggtctccaggcctaggaggcggtgaaggggggagtcacggcgtcatccaggacctcagtattctccaccagcatgtccagcagcaaccagcccagcaccaccgtgacgtattactcagcagcagtagcaggactgatgaccaccatggcactgaggagccaaagcaggacactaatgtcaaaaaggcaaaaaggccaaagccagaatctcagggaatcaaagccaagaggaagccaagtgcatcttccaaaccttctttggttggagatggagaaggtgccatcctctccccaagtcagaaacctcatatctgtgatcactgtagtgctgctttccgaagctcctatcacctgcggagacatgtcctcattcatacaggagaaagacctttccagtgcagccagtgtagtatgggtttcattcagaaatacctactacagagacatgagaaaattcatagtagagagaagccatttggatgtgatcagtgcagcatgaagtttattcagaagtaccatatggagagacacaagaggacacatagtggagaaaagccatataagtgtgacacttgccaacagtatttttcaaggactgatagattgttgaagcacaggcgcacatgtggtgaagtcatagttaaaggagccactagtgcagaacctgggtcatcaaaccataccaatatgggtaatctggctgtgttgtctcagggaaatacaagttcttcaaggagaaaaacaaagtcaaaaagcatagctattgaaaataaggaacagaagaccggtaaaacaaatgaatcacaaatttcaaataatataaacatgcagagttactcagtagaaatgcctaccgtgtcttccagtggaggcataattggcactggaatagatgaactgcagaagagggtgccaaaattgatctttaagaaaggaagcagaaagaatacagataaaaactaccttaactttgtgtcaccattaccagacatagtaggacagaaatccttgtctggaaaaccaagtggctcacttggcatagtatcaaataatagtgtggagaccattggtcttctccaaagtacaagtggcaaacaaggtcagataagtagtaattatgatgatgccatgcagttttcaaagaaaagaagatatttaccaactgccagcagcaacagtgccttttctataaacgtaggacacatggtctcccaacagtctgtcattcagtctgcaggtgtcagtgttttggacaatgaggcaccattgtcacttattgactcctcagctctaaatgctgaaattaaatcttgtcatgacaagtctggaattcctgatgaggttttacaaagtattttggatcaatactccaacaaatcagaaagccagaaagaggatcctttcaatattgcagaaccacgagtggatttacacacctcaggagaacactcagaattggttcaagaagaaaatttgagcccaggcacccaaacaccttcaaatgataaagcaagtatgttgcaagaatactccaaatacctccaacaggcttttgaaaaatccactaatgcaagttttactcttggacacggtttccaatttgtcagtttgtcttcacctctccacaaccacactttgtttccagaaaaacaaatatacactacgtctcctttggagtgtggtttcggccaatctgttacctcagtgttgccatcttcattgccaaagcctccttttgggatgttgtttggatctcagccaggtctttatttgtctgctttggatgctacacatcagcagttgacaccttcccaggagctggatgatctgatagattctcagaagaacttagagacttcatcagccttccagtcctcatctcagaaattgactagccagaaggaacagaaaaacttagagtcttcaacaggctttcagattccatctcaggagttagctagccagatagatcctcagaaagacatagagcctagaacaacgtatcagattgagaactttgcacaagcgtttggttctcagtttaagtcgggcagcagggtgccaatgacctttatcactaactctaatggagaagtggaccatagagtaaggacttcagtgtcagatttctcagggtatacaaatatgatgtctgatgtaagtgagccatgtagtacaagagtaaagacacccaccagccagagttacaggtacccaactttcttgtacaaagtggttgatatcggtaagcctatccctaaccctctcctcggtctcgattctacgtagtaatgaactagtccgtaacttgaaagtatttcgatttcttggctttatatatcttgtggaaaggacgaatgacccgatgccggcctcaggcc

SEQ ID NO: 3458 - DNA, 1085 bp, Homo sapiens
  source 1..1085: mol_type = genomic DNA
atcgattgatcaacaagtttgtacaaaaaagttggcaccatggggaacgagctctttctggccttcaccacatctcacctccccttagcggagcagaaacttgccaggtataaactccgaattgttaagccaccaaaattacccctagagaaaaaacccaaccctgataaggatggtccagattatgagcccaacctctggatgtgggtaaatcccaacattgtgtatccccctggaaagctggaggtctcaggacgtaggaagagggaggacctgacaagcacactcccctcctctcagccaccccagaaggaggaagatgccagctgctcagaggccgcaggggtggaatcactgtcccagtcctccagcaagcggtctccccctcggaagcggtttgccttttcccccagcacctgggagctcacagaagaggaggaggctgaggaccaggaagacagctcctctatggctctcccatcccctcacaaaagggcccccctccagagtcggaggcttcggcaagccagcagccaggcggggaggctctggtcccggccccctctcaattacttccacctaattgccctggcattaagaaacagttccccctgtggcctcaacgtgcaacagatctacagtttcactcgaaagcacttcccctttttccggacggccccggaaggctggaagaatactgtccgtcacaatctctgttttcgagacagctttgagaaagtgcctgtcagcatgcagggcggggccagcacacggcctcgatcttgcctctggaagttgaccgaggagggacaccgccgctttgcggaggaggcccgcgccttggcttccactcggctagaaagtatccaacagtgcatgagccagccagatgtgatgcccttcctctttgatcttttgccaactttcttgtacaaagtggttgatatcggtaagcctatccctaaccctctcctcggtctcgattctacgtagtaatgaactagtccgtaacttgaaagtatttcgatttcttggctttatatatcttgtggaaaggacgatgcttaaaactaacacaaacagaa

SEQ ID NO: 3459 - DNA, 1406 bp, Homo sapiens
  source 1..1406: mol_type = genomic DNA
atcgattgatcaacaagtttgtacaaaaaagttggcatgactactaaaaatttagaaaccaaagtcaccgttacttcatccccaatccgaggagcaggagatggaatggaaactgaggaaccacctaaatctgttgaagttacctccggagtccaatctagaaagcatcatagtcttcagagtccatggaagaaagcagttccatcagagagcccaggagttcttcagctagggaaaatgctcactgaaaaagcaatggaagttaaagctgtaagaatattagttcccaaagctgctataactcatgatatccccaacaaaaatacaaaggttaagtctctgggacatcataaaggagaattccttggtcagtcagagggagttatagaacctaataaggaactctcagaggtaaagaatgtattggaaaagctcaagaattctgaaagaaggttactacaggacaaagaaggtctttcaaaccagctccgtgtacagacagaggtaaatcgtgagttaaaaaagttactggtggcttctgttggggatgatcttcagtatcactttgaacgtctagcccgtgagaaaaatcagcttattttagaaaatgaagccctaggtcgaaacacagctcagctttctgaacagttagaacgtatgtcaatacagtgtgatgtatggcgaagtaaattccttgcaagcagggtaatggcagatgagttaaccaactcaagagcagctttacagcgtcaaaaccgtgatgcacacggggctatacaagatctcctaagtgaacgggaacagtttcgtcaagaaatgatagctacccagaaattattggaggagctcttagtttccttgcaatggggaagagagcaaacttactcccctagtgtacaaccccacagcacagcagagctagcattaacaaatcacaagttggcaaaagcagtaaattctcatcttctgggaaatgttggcattaacaatcaaaaaaagattccatcaacagttgaattctgcagcaccccagctgagaaaatggctgaaacggttctaagaattttagatccagttacctgcaaagagagttcacctgataatccattttttgagtcttcaccaaccaccttacttgctacaaagaaaaatattggacgatttcatccctatactagatatgaaaatataactttcaattgctgcaatcactgccggggagaactgattgccctttacccaactttcttgtacaaagtggttgatatcggtaagcctatccctaaccctctcctcggtctcgattctacgtagtaatgaactagtccgtaacttgaaagtatttcgatttcttggctttatatatcttgtggaaaggacgacattcctgttgtccctccttaacg

SEQ ID NO: 3460 - DNA, 2285 bp, Homo sapiens
  source 1..2285: mol_type = genomic DNA
atcgattgatcaacaagtttgtacaaaaaagttggcaccatggcgaagaggtcgcgcagtgaggatgaggatgatgaccttcagtatgccgatcatgattatgaagtaccacaacaaaaaggactgaagaaactctggaacagagtaaaatggacaagggacgaggatgataaattaaagaagttggttgaacaacatggaactgatgattggactctaattgctagtcatcttcaaaatcgctctgattttcagtgccagcatcgatggcagaaagttttaaatcctgaattgataaagggtccttggactaaagaagaagatcagagggttattgaattagttcagaaatatgggccaaaaagatggtctttaattgcaaaacatttaaaaggaagaataggcaagcagtgtagagaaagatggcataatcatctgaatcctgaggtaaagaaatcttcctggacagaagaggaggacaggatcatctatgaagcacataagcggttgggaaatcgttgggcagaaattgccaaactacttccaggaaggactgataattctatcaaaaatcattggaattctactatgcgaagaaaagtggaacaggagggctatttacaagatggaataaaatcagaacgatcttcatctaaacttcaacacaaaccttgtgcagctatggatcatatgcaaacccagaatcagttttacatacctgttcagatccctgggtatcagtatgtgtcacctgaaggcaattgtatagaacatgttcagcctacttctgcctttattcagcaacccttcattgatgaagatcctgataaggaaaagaaaataaaggaacttgagatgcttcttatgtcagctgagaatgaagttagaagaaagcgaattccatcacagcctggaagtttttctagctggtctggtagtttcctcatggatgataacatgtctaatactctaaatagccttgacgagcacactagtgagttttacagtatggatgaaaatcagcctgtgtctgctcagcagaattcacccacaaagttcctggccgtggaggcaaacgctgtgttatcctctttgcagaccatcccagaatttgcagagactctagaacttattgaatctgatcctgtagcatggagtgacgttaccagttttgatatttctgatgctgctgcttctcctatcaaatccaccccagttaaattaatgagaattcagcacaatgaaggagccatggaatgccaatttaacgtcagtcttgtacttgaagggaaaaaaaacacttgtaatggtggcaacagtgaagctgttcctttaacatccccaaatatagccaagtttagcactccaccagccatcctcagaaagaagagaaaaatgcgagtgggtcattccccaggcagcgaacttagggatggctcattgaacgatggtggtaatatggcgctaaaacatacaccactgaaaacactaccattttctccttcacagtttttcaacacatgtcctggtaatgaacaacttaatatagaaaatccttcatttacatcaacccctatttgtgggcagaaagctctcattacaactcctcttcataaggaaacaactcccaaagatcaaaaggaaaatgtagggtttagaacacctactattagaagatctatactgggtaccacaccaagaactcctactccttttaagaatgcgcttgctgctcaggagaaaaaatatggacctcttaaaattgtgtcccagccacttgctttcttggaagaagatattcgggaagttttaaaagaagaaactggaacagacctattcctcaaagaggaagatgaacctgcttacaaaagctgcaaacaagagaataccgcttctgggaagaaagtcagaaaatcactagtcttagataattgggaaaaagaagaatcaggcactcaactgttgactgaagacatttcagacatgcagtcaaattgtgaatgggaaacagtggtttatgggaagacagaagaccaacttattatgactgaacaagcaagaagatatctgagtacttacacagctaccagtagtacttcaagagctctcatactgttgccaactttcttgtacaaagtggttgatatcggtaagcctatccctaaccctctcctcggtctcgattctacgtagtaatgaactagtccgtaacttgaaagtatttcgatttcttggctttatatatcttgtggaaaggacgatcacacacatgctcgctgactgtg

SEQ ID NO: 3461 - DNA, 2282 bp, Homo sapiens
  source 1..2282: mol_type = genomic DNA
atcgattgatcaacaagtttgtacaaaaaagttggcaccatggcgaagaggtcgcgcagtgaggatgaggatgatgaccttcagtatgccgatcatgattatgaagtaccacaacaaaaaggactgaagaaactctggaacagagtaaaatggacaagggacgaggatgataaattaaagaagttggttgaacaacatggaactgatgattggactctaattgctagtcatcttcaaaatcgctctgattttcagtgccagcatcgatggcagaaagttttaaatcctgaattgataaagggtccttggactaaagaagaagatcagagggttattgaattagttcagaaatatgggccaaaaagatggtctttaattgcaaaacatttaaaaggaagaataggcaagcagtgtagagaaagatggcataatcatctgaatcctgaggtaaagaaatcttcctggacagaagaggaggacaggatcatctatgaagcacataagcggttgggaaatcgttgggcagaaattgccaaactacttccaggaaggactgataattctatcaaaaatcattggaattctactatgcgaagaaaagtggaacaggagggctatttacaagatggaataaaatcagaacgatcttcatctaaacttcaacacaaaccttgtgcagctatggatcatatgcaaacccagaatcagttttacatacctgttcagatccctgggtatcagtatgtgtcacctgaaggcaattgtatagaacatgttcagcctacttctgcctttattcagcaacccttcattgatgaagatcctgataaggaaaagaaaataaaggaacttgagatgcttcttatgtcagctgagaatgaagttagaagaaagcgaattccatcacctggaagtttttctagctggtctggtagtttcctcatggatgataacatgtctaatactctaaatagccttgacgagcacactagtgagttttacagtatggatgaaaatcagcctgtgtctgctcagcagaattcacccacaaagttcctggccgtggaggcaaacgctgtgttatcctctttgcagaccatcccagaatttgcagagactctagaacttattgaatctgatcctgtagcatggagtgacgttaccagttttgatatttctgatgctgctgcttctcctatcaaatccaccccagttaaattaatgagaattcagcacaatgaaggagccatggaatgccaatttaacgtcagtcttgtacttgaagggaaaaaaaacacttgtaatggtggcaacagtgaagctgttcctttaacatccccaaatatagccaagtttagcactccaccagccatcctcagaaagaagagaaaaatgcgagtgggtcattccccaggcagcgaacttagggatggctcattgaacgatggtggtaatatggcgctaaaacatacaccactgaaaacactaccattttctccttcacagtttttcaacacatgtcctggtaatgaacaacttaatatagaaaatccttcatttacatcaacccctatttgtgggcagaaagctctcattacaactcctcttcataaggaaacaactcccaaagatcaaaaggaaaatgtagggtttagaacacctactattagaagatctatactgggtaccacaccaagaactcctactccttttaagaatgcgcttgctgctcaggagaaaaaatatggacctcttaaaattgtgtcccagccacttgctttcttggaagaagatattcgggaagttttaaaagaagaaactggaacagacctattcctcaaagaggaagatgaacctgcttacaaaagctgcaaacaagagaataccgcttctgggaagaaagtcagaaaatcactagtcttagataattgggaaaaagaagaatcaggcactcaactgttgactgaagacatttcagacatgcagtcaaattgtgaatgggaaacagtggtttatgggaagacagaagaccaacttattatgactgaacaagcaagaagatatctgagtacttacacagctaccagtagtacttcaagagctctcatactgttgccaactttcttgtacaaagtggttgatatcggtaagcctatccctaaccctctcctcggtctcgattctacgtagtaatgaactagtccgtaacttgaaagtatttcgatttcttggctttatatatcttgtggaaaggacgatggcgccctggttgcgactctact

SEQ ID NO: 3462 - DNA, 2429 bp, Homo sapiens
  source 1..2429: mol_type = genomic DNA
atcgattgatcaacaagtttgtacaaaaaagttggcaccatggccaccgctaacagcatcatcgtgctggatgatgatgacgaagatgaagcagctgctcagccagggccctcccacccactccccaatgcggcctcacctggggcagaagcccctagctcctctgagcctcatggggccagaggaagcagtagttcgggcggcaagaaatgctacaagctggagaatgagaagctgttcgaagagttccttgaactttgtaagatgcagacagcagaccaccctgaggtggtcccattcctctataaccggcagcaacgtgcccactctctgtttttggcctcggcggagttctgcaacatcctctctagggtcctgtctcgggcccggagccggccagccaagctctatgtctacatcaatgagctctgcactgttctcaaggcccactcagccaaaaagaagctgaacttggcccctgccgccaccacctccaatgagccctctgggaataaccctcccacacacctctccttggaccccacaaatgctgaaaacactgcctctcagtctccaaggacccgtggttcccggcggcagatccagcgtttggagcagctgctggcgctctatgtggcagagatccggcggctgcaggaaaaggagttggatctctcagaattggatgacccagactccgcatacctgcaggaggcacggttgaagcgtaagctgatccgcctctttgggcgactatgtgagctgaaagactgctcttcactgaccggccgtgtcatagagcagcgcatcccctaccgtggcacccgctacccagaggttaacaggcgcattgagcggctcatcaacaagccagggcctgataccttccctgactatggggatgtgcttcgggctgtagagaaggcagctgcccgacacagccttggcctcccccgacagcagctccagctcatggctcaggatgccttccgagatgtgggcatcaggttacaggagcgacgtcacctcgatctcatctacaactttggctgccacctcacagatgactataggccaggcgttgaccctgcactatcagatcctgtgttggcccggcgccttcgggaaaaccggagtttggccatgagtcggctggatgaggtcatctccaaatatgcaatgttgcaagacaaaagtgaggagggcgagagaaaaaagagaagagctcggctccaaggcacctcttcccactctgcagacacccccgaagcctccttggattctggtgagggccctagtggaatggcatcccaggggtgcccttctgcctccagagctgagacagatgacgaagacgatgaggagagtgatgaggaagaggaggaggaggaggaagaagaagaggaggaggccacagattctgaagaggaggaggatctggaacagatgcaggagggtcaggaggatgatgaagaggaggacgaagaggaagaagcagcagcaggtaaagatggagacaagagccccatgtcctcactacagatctccaatgaaaagaacctggaacctggcaaacagatcagcagatcttcaggggagcagcaaaacaaaggacgcatagtgtcaccatcgttactgtcagaagaacccctggccccctccagcatagatgctgaaagcaatggagaacagcctgaggagctgaccctggaggaagaaagccctgtgtctcagctctttgagctagagattgaagctttgcccctggataccccttcctctgtggagacggacatttcctcttccaggaagcaatcagaggagcccttcaccactgtcttagagaatggagcaggcatggtctcttctacttccttcaatggaggcgtctctcctcacaactggggagattctggtcccccctgcaaaaaatctcggaaggagaagaagcaaacaggatcagggccattaggaaacagctatgtggaaaggcaaaggtcagtgcatgagaagaatgggaaaaagatatgtaccctgcccagcccaccttcccccttggcttccttggccccagttgctgattcctccacgagggtggactctcccagccatggcctggtgaccagctccctctgcatcccttctccagcccggctgtcccaaaccccccattcacagcctcctcggcctggtacttgcaagacaagtgtggccacacaatgcgatccagaagagatcatcgtgctctcagactctgatttgccaactttcttgtacaaagtggttgatatcggtaagcctatccctaaccctctcctcggtctcgattctacgtagtaatgaactagtccgtaacttgaaagtatttcgatttcttggctttatatatcttgtggaaaggacgacacccctcagctcagtcgccgatc

SEQ ID NO: 3463 - DNA, 1154 bp, Homo sapiens
  source 1..1154: mol_type = genomic DNA
atcgattgatcaacaagtttgtacaaaaaagttggcatgagagctcatgctggacacaaacgatctgagtgtggtggggaatggagagagacgccccgtaaacagaaacaacatgggaaagcctccatttcccccagtagtggtgcacggcgcacagtaacaccaactcgaaagagaccttatgaatgcaaggtgtgcgggaaagcctttaattctcccaatttatttcaaatccatcaaagaactcacactggaaagaggtcctataaatgtagggaaatagtgagagccttcacagtttccagtttctttcgaaaacatggaaaaatgcatactggagaaaaacgctatgaatgtaaatactgtggaaaacctatcgattatcccagtttatttcaaattcatgttagaactcacactggagaaaaaccttacaaatgtaaacaatgtggtaaagccttcatttccgcaggttaccttcggacacatgaaatcagatctcacgcgctggagaaatcccaccaatgtcaggaatgtgggaaaaaactcagttgttccagttcccttcacagacatgaaagaactcatagtggaggaaaactctacgaatgtcaaaaatgtgccaaagtctttagatgtcccacgtcccttcaagcacatgaaagagctcacactggagaaagaccttatgaatgtaataaatgtggtaaaaccttcaattatcccagttgttttcgaagacataaaaaaactcatagtggagaaaagccatatgaatgtacaaggtgtggtaaagcctttgggtggtgcagttccctccgaagacatgaaatgactcacactggagaaaaaccctttgattgtaaacagtgtggtaaagtctttactttttcaaattaccttagacttcatgaaagaactcatttggccgggcgtagccagtgctttggcaggaggcagggggatcacctgagcccaggagtttgcccaactttcttgtacaaagtggttgatatcggtaagcctatccctaaccctctcctcggtctcgattctacgtagtaatgaactagtccgtaacttgaaagtatttcgatttcttggctttatatatcttgtggaaaggacgaaattcccattgtgattgggcctgc

SEQ ID NO: 3464 - DNA, 1076 bp, Homo sapiens
  source 1..1076: mol_type = genomic DNA
atcgattgatcaacaagtttgtacaaaaaagttggcatgggcgatgggggcgccgagcgcgaccggggccccgcgcgccgggcggagtctggtggcggcggtgggcgctgcggagaccgcagcggagcgggggacttgcgagctgatggcggtggccacagcccaacggaggtggccgggacctcagcctccagtcccgcaggctccagggagagtggagccgacagcgacgggcagcccgggcccggcgaggcagaccactgccgccgcatactggtgcgagatgccaaagggacaattcgggaaattgtcctgcctaagggcctggacctggaccggcccaagcggacacgtacatccttcactgccgagcagctgtaccgcctggagatggagttccagcgctgccagtatgtggtgggccgcgagcgcactgagctggcccgccagctgaacctctccgagacccaggtgaaggtctggttccagaaccgccgcaccaagcagaagaaagaccagagcagagacctggagaagcgggcgtcctcctcagcctccgaggcctttgccacctccaacattctgcggctgctggagcagggccggctgctctctgtgcccagggcccctagcctcctggcgctgacccctagcctgccaggcctacctgccagccacaggggcacctccttaggtgaccccaggaactcctccccacgcctcaacccgctgtcctcggcctcagcgtcccccccactgccgccccctctgccagctgtctgcttttcctcggccccgctcctggatctgcctgccggctacgaactgggttcctcggccttcgagccatacagctggctagaacggaaagtgggcagcgccagcagctgcaagaaagctaacacttacccaactttcttgtacaaagtggttgatatcggtaagcctatccctaaccctctcctcggtctcgattctacgtagtaatgaactagtccgtaacttgaaagtatttcgatttcttggctttatatatcttgtggaaaggacgatctaactcttccacctccagacaa

SEQ ID NO: 3465 - DNA, 917 bp, Homo sapiens
  source 1..917: mol_type = genomic DNA
atcgattgatcaacaagtttgtacaaaaaagttggcatgtcggacagtgatctaggtgaggacgaaggcctcctctccctggcgggcaaaaggaagcgcagggggaacctgcccaaggagtcggtgaagatcctccgggactggctgtacttgcaccgctacaacgcctacccctcagagcaggagaagctgagcctttctggacagaccaacctgtcagtgctgcaaatatgtaactggttcatcaatgcccggcggcggcttctcccagacatgcttcggaaggatggcaaagaccctaatcagtttaccatttcccgccgcgggggtaaggcctcagatgtggccctcccccgtggcagcagcccctcagtgctggctgtgtctgtcccagcccccaccaatgtgctctccctgtctgtgtgctccatgccgcttcactcaggccagggggaaaagccagcagcccctttcccacgtggggagctggagtctcccaagcccctggtgacccctggtagcacacttactctgctgaccagggctgaggctggaagccccacaggtggactcttcaacacgccaccacccacacccccagagcaggacaaagaggacttcagcagcttccagctgctggtggaggtggcgctacagagggctgctgagatggagcttcagaagcagcaggacccatcactcccattactgcacactcccatccctttagtctctgaaaatccccagtacccaactttcttgtacaaagtggttgatatcggtaagcctatccctaaccctctcctcggtctcgattctacgtagtaatgaactagtccgtaacttgaaagtatttcgatttcttggctttatatatcttgtggaaaggacgaactgggtcacagtagtgattaccc

SEQ ID NO: 3466 - DNA, 1784 bp, Homo sapiens
  source 1..1784: mol_type = genomic DNA
atcgattgatcaacaagtttgtacaaaaaagttggcatggacgtaagattttatccacctccagcccagcccgccgctgcgcccgacgctccctgtctgggaccttctccctgcctggacccctactattgcaacaagtttgacggtgagaacatgtatatgagcatgacagagccgagccaggactatgtgccagccagccagtcctaccctggtccaagcctggaaagtgaagacttcaacattccaccaattactcctccttccctcccagaccactcgctggtgcacctgaatgaagttgagtctggttaccattctctgtgtcaccccatgaaccataatggcctgctaccatttcatccacaaaacatggacctccctgaaatcacagtctccaatatgctgggccaggatggaacactgctttctaattccatttctgtgatgccagatatacgaaacccagaaggaactcagtacagttcccatcctcagatggcagccatgagaccaaggggccagcctgcagacatcaggcagcagccaggaatgatgccacatggccagctgactaccattaaccagtcacagctaagtgctcaacttggtttgaatatgggaggaagcaatgttccccacaactcaccatctccacctggaagcaagtctgcaactccttcaccatccagttcagtgcatgaagatgaaggcgatgatacctctaagatcaatggtggagagaagcggcctgcctctgatatggggaaaaaaccaaaaactcccaaaaagaagaagaagaaggatcccaatgagccccagaagcctgtgtctgcctatgcgttattctttcgtgatactcaggccgccatcaagggccaaaatccaaacgctacctttggcgaagtctctaaaattgtggcttcaatgtgggacggtttaggagaagagcaaaaacaggtctataaaaagaaaaccgaggctgcgaagaaggagtacctgaagcaactcgcagcatacagagccagccttgtatccaagagctacagtgaacctgttgacgtgaagacatctcaacctcctcagctgatcaattcgaagccgtcggtgttccatgggcccagccaggcccactcggccctgtacctaagttcccactatcaccaacaaccgggaatgaatcctcacctaactgccatgcatcctagtctccccaggaacatagcccccaagccgaataaccaaatgccagtgactgtctctatagcaaacatggctgtgtcccctcctcctcccctccagatcagcccgcctcttcaccagcatctcaacatgcagcagcaccagccgctcaccatgcagcagccccttgggaaccagctccccatgcaggtccagtctgccttacactcacccaccatgcagcaaggatttactcttcaacccgactatcagactattatcaatcctacatctacagctgcacaagttgtcacccaggcaatggagtatgtgcgttcggggtgcagaaatcctcccccacaaccggtggactggaataacgactactgcagtagtgggggcatgcagagggacaaagcactgtaccttacttgcccaactttcttgtacaaagtggttgatatcggtaagcctatccctaaccctctcctcggtctcgattctacgtagtaatgaactagtccgtaacttgaaagtatttcgatttcttggctttatatatcttgtggaaaggacgatagccgccgttacgcctattctca

SEQ ID NO: 3467 - DNA, 2345 bp, Homo sapiens
  source 1..2345: mol_type = genomic DNA
atcgattgatcaacaagtttgtacaaaaaagttggcaccatgggcatgaggatcaaactgcaaagcaccaaccaccccaacaacctgctgaaggaactcaacaagtgccggctctcagagaccatgtgcgacgtcaccattgtggtggggagccgctccttcccggcccacaaggctgtgctggcctgtgcagctggctacttccagaacctcttcctgaatactgggcttgatgctgccaggacctatgtggtggacttcatcacccctgccaactttgagaaggttctgagctttgtctacacttcagaactcttcacagacctgatcaatgttggggtcatctacgaggtagctgagcgtctgggtatggaggacctcctccaggcctgtcactctacctttcctgatctggagagcactgccagggccaagcccctgaccagcaccagtgagagccactctggtaccctgagttgtccttcggcagaacctgcccatccccttggagaactccgaggtggtggggactaccttggtgctgatagaaactatgtgttgcccagtgatgctggagggagctataaagaggaagagaagaatgttgccagtgacgctaaccatagcctgcatctgccgcaaccgcccccaccaccgccaaagacagaagaccatgacacccctgctcccttcacgtccattcctagcatgatgacccagccactcctaggcactgtcagcacgggcatccagaccagcacgagctcctgccagccatacaaagttcaaagcaatggagacttcagtaaaaacagcttcctcacccctgacaatgcagtagacattaccactgggaccaactcctgtctgagcaatagtgagcactccaaagatcctggctttgggcagatggatgagctccagctcgaggacctgggggatgatgacttgcagtttgaagaccctgctgaggatataggcacaactgaggaggtgattgagctgagtgatgacagtgaggatgagttggcttttggagagaatgacaatcgggagaataaggccatgccctgccaggtgtgcaagaaagttctagagcccaacattcaactgatccggcagcatgctcgggaccatgtggacctgctgacgggcaactgcaaggtctgcgagacccacttccaggaccgaaactcccgggtaactcatgtcctgtcccacattggtattttccttttctcctgcgacatgtgtgaaactaagttctttacccagtggcagctgacccttcaccgacgggatggaatatttgagaacaacatcattgtccaccccaacgatcccctgccagggaagctgggtctcttttcaggggcagcctccccagagctgaaatgcgctgcctgtgggaaagtattggccaaagatttccatgtggtccggggccacatccttgaccatctaaacttgaagggccaggcctgcagtgtctgcgaccagcgtcaccttaacctctgcagcctcatgtggcacacgctgtcccatctcggcatctcagtcttctcctgttctgtctgtgcgaacagctttgtggactggcatcttctagagaagcacatggctgtgcaccaaagtctggaagacgccctcttccactgccgcttgtgcagccagagcttcaagtcagaggctgcctatcgctaccacgtcagccagcacaaatgcaacagtggccttgatgcacggcctggttttgggctgcagcacccagctctccagaagcggaagctgccagcagaggagtttctgggtgaagagctggcgctgcagggccaacctgggaacagcaagtatagctgcaaggtctgtggcaaaagatttgcccacacaagcgaattcaactaccaccggcggatccacacgggggagaagccataccaatgtaaggtgtgccacaagttctttcgaggccgctcgaccatcaagtgccacctaaagacacactcgggggccctcatgtaccgctgcacagtctgtgggcactacagttccacccttaacctcatgagcaaacatgttggtgtgcacaaaggcagcctcccccctgacttcaccatcgagcagaccttcatgtacatcatccattccaaagaggcggataagaacccggacagtttgccaactttcttgtacaaagtggttgatatcggtaagcctatccctaaccctctcctcggtctcgattctacgtagtaatgaactagtccgtaacttgaaagtatttcgatttcttggctttatatatcttgtggaaaggacgaacccaaagctgtcgtgggggaccg

SEQ ID NO: 3468 - DNA, 1625 bp, Homo sapiens
  source 1..1625: mol_type = genomic DNA
atcgattgatcaacaagtttgtacaaaaaagttggcatgatgaccaaggtactaggcatggccccagttctgggccctaggcctccacaggagcaggtggggcctctgatggtaaaagtcgaggagaaagaagagaaaggcaagtaccttcctagcctggagatgttccgccagcgcttcaggcagtttgggtaccatgatacccctggaccccgagaggccctgagccaactccgggtgctctgctgtgagtggctgaggcccgagatccacaccaaggagcagatcctggagctactggtgctggagcagttcctgaccatcctgccccaggagctccaggcctgggtgcaggagcattgcccggagagcgctgaagaggctgtcactctcctcgaagatctggagcgggaactggatgagccaggacaccaggtctcaactcctccaaacgaacagaaaccggtgtgggagaagatatcctcctcaggaactgcaaaggaatccccgagcagcatgcagccacagcccttggagaccagtcacaaatacgagtcttgggggcccctgtacatccaagagtctggtgaggagcaggagttcgctcaagatccaagaaaggtccgagattgcagattgagtacccagcacgaggaatcagcagatgagcagaaaggttctgaagcagaggggctcaaaggggatataatttctgtgattatcgccaataaacctgaggccagcttagagaggcagtgcgtaaaccttgaaaatgaaaaaggaacaaaaccccctcttcaagaggcaggctccaagaaaggtagagaatcagttcctactaaacctaccccaggagagagacgttatatatgtgctgaatgtggcaaagcctttagtaatagctcaaatctcaccaaacacaggagaacacacactggggagaaaccttacgtgtgcaccaagtgtgggaaagctttcagccacagctcaaacctcaccctccactacagaacacacttggtggaccggccctatgactgtaagtgtggaaaagcttttgggcagagctcagaccttcttaaacatcagagaatgcacacagaagaggcgccatatcagtgcaaagattgtggcaaggctttcagcgggaaaggcagcctcattcgtcactatcggatccacactggggagaagccttatcagtgtaacgaatgtgggaagagcttcagtcagcatgcgggcctcagctcccaccagagactccacaccggagagaagccatataagtgtaaggagtgtgggaaagccttcaaccacagctccaacttcaataaacaccacagaatccacaccggggaaaagccctactggtgtcatcactgtggaaagaccttctgtagcaagtccaatctttccaaacatcagcgagtccacactggagagggagaagcaccgtacccaactttcttgtacaaagtggttgatatcggtaagcctatccctaaccctctcctcggtctcgattctacgtagtaatgaactagtccgtaacttgaaagtatttcgatttcttggctttatatatcttgtggaaaggacgacaacttggcctgcctcgggaaatt

SEQ ID NO: 3469 - DNA, 1493 bp, Homo sapiens
  source 1..1493: mol_type = genomic DNA
atcgattgatcaacaagtttgtacaaaaaagttggcatgagcggcggcgtgtacgggggagatgaagttggagcccttgtttttgacattggatcctatactgtgagagctggttatgctggtgaggactgccccaaggtggattttcctacagctattggtatggtggtagaaagagatgacggaagcacattaatggaaatagatggcgataaaggcaaacaaggcggtcccacctactacatagatactaatgctctgcgtgttccgagggagaatatggaggccatttcacctctaaaaaatgggatggttgaagactgggatagtttccaagctattttggatcatacctacaaaatgcatgtcaaatcagaagccagtctccatcctgttctcatgtcagaggcaccgtggaatactagagcaaagagagagaaactgacagagttaatgtttgaacactacaacatccctgccttcttcctttgcaaaactgcagttttgacagcatttgctaatggtcgttctactgggctgattttggacagtggagccactcataccactgcaattccagtccacgatggctatgtccttcaacaaggcattgtgaaatcccctcttgctggagactttattactatgcagtgcagagaactcttccaagaaatgaatattgaattggttcctccatatatgattgcatcaaaagaagctgttcgtgaaggatctccagcaaactggaaaagaaaagagaagttgcctcaggttacgaggtcttggcacaattatatgtgtaattgtgttatccaggattttcaagcttcggtacttcaagtgtcagattcaacttatgatgaacaagtggctgcacagatgccaactgttcattatgaattccccaatggctacaattgtgattttggtgcagagcggctaaagattccagaaggattatttgacccttccaatgtaaaggggttatcaggaaacacaatgttaggagtcagtcatgttgtcaccacaagtgttgggatgtgtgatattgatatcagaccaggtctctatggcagtgtaatagtggcaggaggaaacacactaatacagagttttactgacaggttgaatagagagctgtctcagaaaactcctccaagtatgcggttgaaattgattgcaaataatacaacagtggaacggaggtttagctcatggattggcggctccattctagcctctttgggtacctttcaacagatgtggatttccaagcaagaatatgaagaaggagggaagcagtgtgtagaaagaaaatgcccttgcccaactttcttgtacaaagtggttgatatcggtaagcctatccctaaccctctcctcggtctcgattctacgtagtaatgaactagtccgtaacttgaaagtatttcgatttcttggctttatatatcttgtggaaaggacgactgacagtacagcgtcagtcatta

SEQ ID NO: 3470 - DNA, 1436 bp, Homo sapiens
  source 1..1436: mol_type = genomic DNA
atcgattgatcaacaagtttgtacaaaaaagttggcatgttggcggctgcgctcctaaaggccaagtcccaggagctggtaacctttgaggatgtagctgtgtacttcatccggaaggagtggaagcgtttggaacctgctcagagggacctctatagagatgtgatgctggagaattacgggaatgtgttctcactggatcgtgagaccaggactgaaaatgatcaagaaatttctgaagacacaagatcacatggggtcctactgggaagatttcaaaaggatatttctcagggtctcaagtttaaagaagcctatgaacgagaagtcagtctgaaaaggccgctggggaactcccctggagaaagactgaacaggaaaatgccagattttggtcaagtgacagttgaggagaagctaacccccaggggagagagaagcgagaaatataatgattttgggaacagcttcactgtgaattccaaccttatctcacatcagagactccccgtgggagacagaccccataagtgtgatgaatgtagcaagagctttaatcgaacttcagaccttattcaacatcagagaatccacactggggaaaagccctatgaatgtaatgagtgtgggaaggccttcagccagagctcacaccttattcagcatcagagaatccacactggggaaaaaccttatgaatgtagtgattgtgggaaaaccttcagctgtagctctgccctcattctgcatcggaggatccacacgggggagaaaccctatgaatgtaatgagtgtgggaagaccttcagctggagctccaccctcacccaccatcagagaatccacactggtgagaaaccctacgcctgcaatgaatgtgggaaggccttcagcaggagctcaacccttattcaccatcagagaatccacactggagaaaaaccctatgaatgtaatgaatgtgggaaagccttcagccagagctcacacctctatcagcaccagagaatccacactggagagaagccctacgaatgtatggaatgtggaggaaagtttacctacagttcaggccttattcagcatcaaagaatccacaccggggagaacccctatgaatgtagtgagtgtgggaaagccttcaggtacagctcggctcttgttcgccatcagagaattcacactggagagaagcctttgaatgggatcggcatgagcaaaagctccctcagagttacgaccgagttaaatatcagagagtccacgtgcccaactttcttgtacaaagtggttgatatcggtaagcctatccctaaccctctcctcggtctcgattctacgtagtaatgaactagtccgtaacttgaaagtatttcgatttcttggctttatatatcttgtggaaaggacgaagttcaaacaaggcagtcgggatt

SEQ ID NO: 3471 - DNA, 1598 bp, Homo sapiens
  source 1..1598: mol_type = genomic DNA
atcgattgatcaacaagtttgtacaaaaaagttggcatggaaactgaacagccagaagaaaccttccctaacactgaaaccaatggtgaatttggtaaacgccctgcagaagatatggaagaggaacaagcatttaaaagatctagaaacactgatgagatggttgaattacgcattctgcttcagagcaagaatgctggggcagtgattggaaaaggaggcaagaatattaaggctctccgtacagactacaatgccagtgtttcagtcccagacagcagtggccccgagcgcatattgagtatcagtgctgatattgaaacaattggagaaattctgaagaaaatcatccctaccttggaagagggcctgcagttgccatcacccactgcaaccagccagctcccgctcgaatctgatgctgtggaatgcttaaattaccaacactataaaggaagtgactttgactgcgagttgaggctgttgattcatcagagtctagcaggaggaattattggggtcaaaggtgctaaaatcaaagaacttcgagagaacactcaaaccaccatcaagcttttccaggaatgctgtcctcattccactgacagagttgttcttattggaggaaaacccgatagggttgtagagtgcataaagatcatccttgatcttatatctgagtctcccatcaaaggacgtgcacagccttatgatcccaatttttacgatgaaacctatgattatggtggttttacaatgatgtttgatgaccgtcgcggacgcccagtgggatttcccatgcggggaagaggtggttttgacagaatgcctcctggtcggggtgggcgtcccatgcctccatctagaagagattatgatgatatgagccctcgtcgaggaccacctccccctcctcccggacgaggcggccggggtggtagcagagctcggaatcttcctcttcctccaccaccaccacctagagggggagacctcatggcctatgacagaagagggagacctggagaccgttacgacggcatggttggtttcagtgctgatgaaacttgggactctgcaatagatacatggagcccatcagaatggcagatggcttatgaaccacagggtggctccggatatgattattcctatgcagggggtcgtggctcatatggtgatcttggtggacctattattactacacaagtaactattcccaaagatttggctggatctattattggcaaaggtggtcagcggattaaacaaatccgtcatgagtcgggagcttcgatcaaaattgatgagcctttagaaggatccgaagatcggatcattaccattacaggaacacaggaccagatacagaatgcacagtatttgctgcagaacagtgtgaagcagtatgcagatgttgaaggattctacccaactttcttgtacaaagtggttgatatcggtaagcctatccctaaccctctcctcggtctcgattctacgtagtaatgaactagtccgtaacttgaaagtatttcgatttcttggctttatatatcttgtggaaaggacgaccccattgtatatagattgtgaat

SEQ ID NO: 3472 - DNA, 1580 bp, Homo sapiens
  source 1..1580: mol_type = genomic DNA
atcgattgatcaacaagtttgtacaaaaaagttggcaccatgtctcaggggtcagtgacattcagagatgtggccatagacttctcccaggaggagtggaaatggcttcagcctgctcaaagagatttgtacagatgtgtaatgttggagaactatggccatctggtctcactgggtctttccatttctaagccagatgtggtttccttattggagcaagggaaagaaccctggctggggaaaagggaagtgaaaagagatctgttttcagtttcagagtcaagtggtgagatcaaagacttttcaccaaaaaatgtcatttatgatgactcatcccagtatttgatcatggaaagaattctaagtcaaggccctgtgtattccagttttaaaggaggctggaaatgcaaggatcatactgagatgctgcaagaaaatcagggatgtattaggaaagtaacagtctctcatcaagaagccctggctcaacatatgaatatcagtactgtggagaggccctatggatgccatgaatgtggaaaaacttttggtcgacgcttttccctggtgttacaccagaggactcatactggagagaaaccatatgcatgtaaggaatgtggcaaaacctttagccagatttcaaaccttgtgaaacaccaaatgatacatactggaaagaaaccccatgagtgtaaggactgtaataaaacattcagttacctttcatttcttattgaacaccagagaacgcacactggggagaaaccttatgaatgtactgagtgtggaaaggcctttagccgtgcctccaacctcactcgacatcaaagaattcacataggaaagaaacaatatatatgtaggaaatgtggtaaagcatttagcagtggctcagaactcattcgccaccagattacacatactggagagaaaccttatgaatgcattgaatgtgggaaggcatttcgccgtttctcacaccttactcgacatcagagcatccatacaaccaaaaccccgtatgaatgtaatgaatgtaggaaagctttccgttgtcactcattccttattaaacatcagagaattcatgctggagaaaagctctatgaatgtgatgaatgtggtaaagttttcacttggcatgcatcccttattcaacatacgaagagtcacactggagagaaaccctatgcgtgtgctgaatgtgataaagccttcagccggagcttttccctcattctacatcagagaactcatactggagagaaaccctatgtatgtaaggtatgcaacaaatccttcagctggagctcaaaccttgctaaacatcagaggacacacactcttgacaacccctatgaatatgaaaattcatttaattaccactcattccttactgaacaccagttgccaactttcttgtacaaagtggttgatatcggtaagcctatccctaaccctctcctcggtctcgattctacgtagtaatgaactagtccgtaacttgaaagtatttcgatttcttggctttatatatcttgtggaaaggacgagttataggtccagctaccggctca

SEQ ID NO: 3473 - DNA, 1148 bp, Homo sapiens
  source 1..1148: mol_type = genomic DNA
atcgattgatcaacaagtttgtacaaaaaagttggcaccatggaggctggaccctggagagtttctgcacccccttcaggacccccacagttccccgctgtggtccctggaccatcgctggaggtggcccgagctcacatgctggctttggggccacagcagctgctggcccaggatgaggagggggacacgctccttcacctgtttgcggctcgggggctgcgctgggcggcatatgctgcggctgaggtgctccaggtgtaccggcgtcttgacattcgtgagcataagggcaagacccctctcctggtggcggctgctgccaaccagcccctgattgtggaggatctgttgaacctgggagcagagcccaatgccgctgaccatcagggacgttcggtcttgcacgtggccgctacctacgggctcccaggagttctcttggctgtgcttaactctggggtccaggttgacctggaagccagagacttcgagggcctcaccccgctccacacggccatcctggcccttaacgttgctatgcgcccttccgacctctgtccccgggtgctgagcacacaggcccgagacaggctggattgtgtccacatgttgctgcaaatgggtgctaatcacaccagccaggagatcaagagcaacaagacagttctgcacttggccgtgcaggctgccaaccccactctggttcagctgctgctggagctgccccggggagacctgcggacctttgtcaacatgaaggcccacgggaacacagccctccacatggcggctgccctgccccctgggccggcccaggaggccatcgtgcggcacctgttggcagctggggcggaccccacactgcgcaacctggagaatgagcagcccgttcacctgctgcggcccgggccgggccctgaggggctccggcagctgttgaagaggagccgtgtggcgccgccaggcctgtcctctttgccaactttcttgtacaaagtggttgatatcggtaagcctatccctaaccctctcctcggtctcgattctacgtagtaatgaactagtccgtaacttgaaagtatttcgatttcttggctttatatatcttgtggaaaggacgatcgatctttatcttcatcaagcaa

SEQ ID NO: 3474 - DNA, 1232 bp, Homo sapiens
  source 1..1232: mol_type = genomic DNA
atcgattgatcaacaagtttgtacaaaaaagttggcatgacatgccctcgcaatgtaactccgaactcgtacgcggagcccttggctgcgcccggcggaggagagcgctatagccggagcgcaggcatgtatatgcagtctgggagtgacttcaattgcggggtgatgaggggctgcgggctcgcgccctcgctctccaagagggacgagggcagcagccccagcctcgccctcaacacctatccgtcctacctctcgcagctggactcctggggcgaccccaaagccgcctatcgcctggaacaacctgttggcaggccgctgtcctcctgctcctacccacctagtgtcaaggaggagaatgtctgctgcatgtacagcgcagagaagcgggcgaaaagtggccccgaggcagctctctactcccaccccttgccggagtcctgccttggggagcacgaggtacccgtgcccagctactaccgcgccagcccgagctactccgcgctggacaagacgccccactgttctggggccaacgacttcgaagcccctttcgagcagcgggccagtctcaacccgcgcgccgaacatctggaatcgcctcagctggggggcaaagtgagtttccctgagacccccaagtccgacagccagacccccagccccaatgaaatcaagacggagcagagcctggcgggccctaaagggagcccctcggagagcgaaaaggagagggccaaagctgccgactccagcccagacacctcggataacgaagcgaaagaggagataaaggcagaaaacaccacaggaaattggctgacagcaaagagcggaaggaagaagaggtgcccctatactaaacaccagacgctggaattggagaaagaatttctgttcaatatgtatttgacgcgagagcgccgcctggagattagcaagaccattaaccttacagacagacaagtcaaaatctggtttcaaaatcgcagaatgaaactcaagaaaatgaaccgagagaatcggatccgggaactgacctccaattttaatttcacctgcccaactttcttgtacaaagtggttgatatcggtaagcctatccctaaccctctcctcggtctcgattctacgtagtaatgaactagtccgtaacttgaaagtatttcgatttcttggctttatatatcttgtggaaaggacgaaattgtcgtctagacatagcaagc

SEQ ID NO: 3475 - DNA, 1610 bp, Homo sapiens
  source 1..1610: mol_type = genomic DNA
atcgattgatcaacaagtttgtacaaaaaagttggcaccatgacgatgctcctggacggaggcccgcagttccctgggctgggagtgggcagcttcggcgcgccgcgccaccacgagatgcccaaccgtgagccggcaggcatggggctgaatcccttcggggactcaacccacgccgccgccgccgccgccgccgccgctgccttcaagctgagccctgccgcggcgcacgatctatcttcaggccagagctcggctttcacgccgcagggttcgggctacgccaacgccctgggccaccatcaccaccaccatcaccatcatcaccacaccagccaggtgcccagctacggtggcgctgcctctgccgccttcaactcaacgcgcgagtttctgttccgccagcgcagctccgggctcagtgaggcggcctcgggtggcgggcagcacgggctcttcgccggctcggcgagcagcctgcatgctccagctggcatccccgagccccctagctacttgctgtttcccgggctgcatgagcagggcgctgggcacccgtcgcccacagggcacgtggacaacaaccaggtccacctggggctgcgtggggagctgttcggccgtgctgacccataccgcccagtggccagcccgcgcacggacccctacgcggccggcgctcagtttcctaactacagccccatgaacatgaacatgggagtgaacgtggcggcccaccacgggcccggcgccttcttccgttatatgcggcagcctatcaagcaggagctgtcgtgcaagtggatcgacgaggctcagctgagccggcccaagaagagctgcgaccggaccttcagcaccatgcatgagctggtgacacatgtcaccatggagcatgtggggggcccggagcagaacaaccacgtctgctactgggaggagtgcccccgggagggcaagtctttcaaggcgaagtacaaactggtcaaccacatccgagtgcacacgggcgagaagcccttcccatgccccttcccgggctgcgggaagatctttgcccgttctgagaacctcaagatccacaagaggacccacacaggtgagaaacctttcaaatgtgaatttgaaggctgtgacagacgctttgccaacagcagcgaccgtaagaagcacatgcatgtgcatacctcggacaagccctatatctgcaaagtgtgcgacaagtcctacacgcacccgagctccctgcgcaaacacatgaaggttcatgaatctcaagggtcagattcctcccctgctgccagttcaggctatgaatcttccactccacccgctatagcttctgcaaacagtaaagataccactaaaaccccttctgcagttcaaactagcaccagccacaaccctggacttcctcctaattttaacgaatggtacgtcttgccaactttcttgtacaaagtggttgatatcggtaagcctatccctaaccctctcctcggtctcgattctacgtagtaatgaactagtccgtaacttgaaagtatttcgatttcttggctttatatatcttgtggaaaggacgatcataaccgatcaatacgccctca

SEQ ID NO: 3476 - DNA, 1559 bp, Homo sapiens
  source 1..1559: mol_type = genomic DNA
atcgattgatcaacaagtttgtacaaaaaagttggcatgaacctggagggcggcggccgaggcggagagttcggcatgagcgcggtgagctgcggcaacgggaagctccgccagtggctgatcgaccagatcgacagcggcaagtaccccgggctggtgtgggagaacgaggagaagagcatcttccgcatcccctggaagcacgcgggcaagcaggactacaaccgcgaggaggacgccgcgctcttcaaggcttgggcactgtttaaaggaaagttccgagaaggcatcgacaagccggaccctcccacctggaagacgcgcctgcggtgcgctttgaacaagagcaatgactttgaggaactggttgagcggagccagctggacatctcagacccgtacaaagtgtacaggattgttcctgagggagccaaaaaaggagccaagcagctcaccttggaggacccgcagatgtccatgagccacccctacaccatgacaacgccttacccttcgctcccagcccagcaggttcacaactacatgatgccacccctcgaccgaagctggagggactacgtcccggatcagccacacccggaaatcccgtaccaatgtcccatgacgtttggaccccgcggccaccactggcaaggcccagcttgtgaaaatggttgccaggtgacaggaaccttttatgcttgtgccccacctgagtcccaggctcccggagtccccacagagccaagcataaggtctgccgaagccttggcgttctcagactgccggctgcacatctgcctgtactaccgggaaatcctcgtgaaggagctgaccacgtccagccccgagggctgccggatctcccatggacatacgtatgacgccagcaacctggaccaggtcctgttcccctacccagaggacaatggccagaggaaaaacattgagaagctgctgagccacctggagaggggcgtggtcctctggatggcccccgacgggctctatgcgaaaagactgtgccagagcaggatctactgggacgggcccctggcgctgtgcaacgaccggcccaacaaactggagagagaccagacctgcaagctctttgacacacagcagttcttgtcagagctgcaagcgtttgctcaccacggccgctccctgccaagattccaggtgactctatgctttggagaggagtttccagaccctcagaggcaaagaaagctcatcacagctcacgtagaacctctgctagccagacaactatattattttgctcaacaaaacagtggacatttcctgaggggctacgatttaccagaacacatcagcaatccagaagattaccacagatctatccgccattcctctattcaagaatgcccaactttcttgtacaaagtggttgatatcggtaagcctatccctaaccctctcctcggtctcgattctacgtagtaatgaactagtccgtaacttgaaagtatttcgatttcttggctttatatatcttgtggaaaggacgacttgcgcacagcttttttacgtga

SEQ ID NO: 3477 - DNA, 839 bp, Homo sapiens
  source 1..839: mol_type = genomic DNA
atcgattgatcaacaagtttgtacaaaaaagttggcaccatggcggcagcagccgctctgagggcgcctgctcaggttgttggcatggaggggaagatgaggcagcaccttctaagcagagcacgtgtatacatatatacaaagaccagggaggtcatagtggagaaaggccttatgagtgtggggaatataggaaattatttaagaacaagtcctgcctcactgaacccagaagagatcacaaacacaggaatgttcgcactggagaaaggccttatgagtgcagcaaatatgggaaattatttcaccaaaagcctacactccatattcatgagagatttcatactgggcaaaagacctatgagtgcagtgagtgtggaaaatcatttcaccaaagctcttcactcttgcagcgtcagacacttcacactagagaaaggccttatgagtgtattgaatgtgggaaagcctttgctgaaaagtccagtctcattaaccacaggaaagttcactctggagcaaagcgttatgaatgcaatgaatgtgggaagtcctttgcttatacatctagtctcattaaacacaggaggattcacactggagagaggccttatgagtgcagtgaatgtgggagatcctttgctgaaaactccagtcttattaaacactttgccaactttcttgtacaaagtggttgatatcggtaagcctatccctaaccctctcctcggtctcgattctacgtagtaatgaactagtccgtaacttgaaagtatttcgatttcttggctttatatatcttgtggaaaggacgagctgttgtgtgtcatccagcatca

SEQ ID NO: 3478 - DNA, 888 bp, Homo sapiens
  source 1..888: mol_type = genomic DNA
atcgattgatcaacaagtttgtacaaaaaagttgggcatgttcaagagaatggccgaatttgggcctgactccggcgggagagtaaagggtgttactatcgttaaaccaatagtttacggtaatgttgctcggtattttggaaagaaaagagaagaagatgggcacactcatcagtggacagtatatgtgaaaccatatagaaatgaggatatgtcagcatatgtgaagaaaatccagtttaaattacatgaaagctatggcaatcctttaagagttgttactaaacctccatatgaaattactgaaacaggatggggtgaattcgaaataatcatcaaaatatttttcattgaccctaatgaaagacctgtaaccctgtatcatttgctaaagctgtttcaatcagacaccaatgcaatgctggggaaaaagacagtggtttcagagttctatgatgaaatgatatttcaagacccaacagcaatgatgcaacaattattgacaacatctcgtcagctaacattaggagcctataagcatgaaacagaatttgcagagcttgaagtgaaaaccagagaaaaattagaagctgctaagaaaaaaacaagctttgagattgcagagcttaaggagagattaaaagcaagtcgtgaaactataaattgtttaaaaaatgaaatcagaaaacttgaagaagatgaccaagcaaaagacatatacccaactttcttgtacaaagtggttgatatcggtaagcctatccctaaccctctcctcggtctcgattctacgtagtaatgaactagtccgtaacttgaaagtatttcgatttcttggctttatatatcttgtggaaaggacgagtatttaaagattcgaaccaatta

SEQ ID NO: 3479 - DNA, 722 bp, Homo sapiens
  source 1..722: mol_type = genomic DNA
atcgattgatcaacaagtttgtacaaaaaagttggcatgctgctgctgccgccgcggccaccccaccctcggtcctcctctccggaggccatggacccaccgccccccaaggctccccctttccccaaggcggaaggcccctcctccactccttcctcggcggcggggccccgacccccgcggctgggccgccacctcctcatcgacgccaatggggtcccctacacatacacggtgcagctggaggaggagccccggggcccgccccagcgcgaggcgcccccaggagagcccggccctcgcaagggctacagctgcccggagtgcgcccgtgtctttgccagccctctgcggctgcagagccaccgcgtgtcgcactcggacctcaagcccttcacgtgcggcgcctgcggcaaggccttcaagcgctccagccacctgtcgcggcatcgcgccacgcaccgcgcccgcgccgggccgccgcacacctgcccgctctgtccacgccgcttccaggacgccgcggagctggcgcagcacgtgcgcctccactacccaactttcttgtacaaagtggttgatatcggtaagcctatccctaaccctctcctcggtctcgattctacgtagtaatgaactagtccgtaacttgaaagtatttcgatttcttggctttatatatcttgtggaaaggacgatccattgcccgagttggggctgtc

SEQ ID NO: 3480 - DNA, 1601 bp, Homo sapiens
  source 1..1601: mol_type = genomic DNA
atcgattgatcaacaagtttgtacaaaaaagttggcatgacgtcaatggccagcttgttttcttttactagtccagcagtaaagcgattgttgggctggaaacaaggtgatgaggaggagaaatgggcagaaaaggcagttgatgctttggtgaagaaactaaaaaagaaaaagggtgccatggaggaactggagaaagccttgagcagtccaggacagccgagtaaatgtgtcactattcccagatctttagatggacgcctgcaggtttctcacagaaaaggcttaccccatgttatatattgtcgtgtttggcgctggccggatttgcagagtcatcatgagctaaagccgttggatatttgtgaatttccttttggatctaagcaaaaagaagtttgtatcaacccataccactataagagagtggagagtccagtcttacctccagtattagtgcctcgtcataatgaattcaatccacaacacagccttctggttcagtttaggaacctgagccacaatgaaccacacatgccacaaaatgccacgtttccagattctttccaccagcccaacaacactccttttcccttatctccaaacagcccttatcccccttctcctgctagcagcacatatcccaactccccagcaagttctggaccaggaagtccatttcagctcccagctgatacgcctcctcctgcctatatgccacctgatgatcagatgggtcaagataattcccagcctatggatacaagcaataatatgattcctcagattatgcccagtatatccagcagggatgttcagcctgttgcctatgaagagcctaaacattggtgttcaatagtctactatgaattaaacaatcgtgttggagaagcttttcatgcatcttctactagtgtgttagtagatggattcacagatccttcaaataacaaaagtagattctgcttgggtttgttgtcaaatgttaatcgtaattcgacaattgaaaacactaggcgacatattggaaaaggtgttcatctgtactatgttggtggagaggtgtatgcggaatgcctcagtgacagcagcatatttgtacagagtaggaactgcaactttcatcatggctttcatcccaccactgtctgtaagattcccagcagctgcagcctcaaaatttttaacaatcaggagtttgctcagcttctggctcaatctgtcaaccatgggtttgaggcagtatatgagctcaccaaaatgtgtaccattcggatgagttttgtcaagggttggggagcagaatatcaccggcaggatgtaaccagcaccccatgttggattgagattcatcttcatgggcctcttcagtggctggataaagtccttactcagatgggctcccctctgaaccccatatcttctgtttcatacccaactttcttgtacaaagtggttgatatcggtaagcctatccctaaccctctcctcggtctcgattctacgtagtaatgaactagtccgtaacttgaaagtatttcgatttcttggctttatatatcttgtggaaaggacgacccataccggcaaatactaccact

SEQ ID NO: 3481 - DNA, 716 bp, Homo sapiens
  source 1..716: mol_type = genomic DNA
atcgattgatcaacaagtttgtacaaaaaatttggcatgagcagcaatgagtgcttcaagtgtggacgatctggccactgggcccgggaatgtcctactggtggaggccgtggtcgtggaatgagaagccgtggcagaggtttccagtttgtttcctcgtctcttccagacatttgttatcgctgtggtgagtctggtcatcttgccaaggattgtgatcttcaggaggatgcctgctataactgcggtagaggtggccacattgccaaggactgcaaggagcccaagagagagcgagagcaatgctgctacaactgtggcaaaccaggccatctggctcgtgactgcgaccatgcagatgagcagaaatgctattcttgtggagaattcggacacattcaaaaagactgcaccaaagtgaagtgctataggtgtggtgaaactggtcatgtagccatcaactgcagcaagacaagtgaagtcaactgttaccgctgtggcgagtcagggcaccttgcacgggaatgcacaattgaggctacagcctacccaactttcttgtacaaagtggttgatatcggtaagcctatccctaaccctctcctcggtctcgattctacgtagtaatgaactagtccgtaacttgaaagtatttcgatttcttggctttatatatcttgtggaaaggacgatcacaccaccctttgcccggcggt

SEQ ID NO: 3482 - DNA, 716 bp, Homo sapiens
  source 1..716: mol_type = genomic DNA
atcgattgatcaacaagtttgtacaaaaaagttggcatgagcagcaatgagtgcttcaagtgtggacgatctggccactgggcccgggaatgtcctactggtggaggccgtggtcgtggaatgagaagccgtggcagaggtttccagtttgtttcctcgtctcttccagatatttgttatcgctgtggtgagtctggtcatcttgccaaggattgtgatcttcaggaggatgcctgctataactgcggtagaggtggccacattgccaaggactgcaaggagcccaagagagagcgagagcaatgctgctacaactgtggcaaaccaggccatctggctcgtgactgcgaccatgcagatgagcagaaatgctattcttgtggagaattcggacacattcaaaaagactgcaccaaagtgaagtgctataggtgtggtgaaactggtcatgtagccatcaactgcagcaagacaagtgaagtcaactgttaccgctgtggcgagtcagggcaccttgcacgggaatgcacaattgaggctacagcctacccaactttcttgtacaaagtggttgatatcggtaagcctatccctaaccctctcctcggtctcgattctacgtagtaatgaactagtccgtaacttgaaagtatttcgatttcttggctttatatatcttgtggaaaggacgaacctacctcctgacacatcaactt

SEQ ID NO: 3483 - DNA, 1205 bp, Homo sapiens
  source 1..1205: mol_type = genomic DNA
atcgattgatcaacaagtttgtacaaaaaagttggcatggcagaaacatcgccagagccttctgggcagcttgttgtacactcagacgctcacagtgacactgtgctggccagttttgaggatcagaggaagaaaggcttcctctgtgacattactttaatcgtggagaatgtacatttccgggcccacaaagccttacttgctgccagtagtgaatacttctcaatgatgtttgcagaagagggggaaatcggccaatccatttatatgctggaaggcatggttgcagacacctttggtatcctgctggaatttatctacacaggttatctccatgccagtgagaaaagtacagaacaaatcctggctactgctcagttcttaaaagtctatgacctggtaaaggcttacacagacttccaaaataatcatagctccccaaagccaacaactttgaacactgctggtgccccagtggttgttatctctaataagaaaaacgatcctccaaagcggaaacggggaagaccaaaaaaagtcaatacattgcaggaggagaaatcagaactggctgcagaggaagaaatacagttaagagtgaacaattcagttcagaatagacaaaactttgtggttaaaggagacagtggtgtactgaatgagcaaattgcagcaaaagaaaaggaagaatcggagcctacttgtgagccaagtagagaggaggaaatgccagttgaaaaagatgagaactatgatcccaagaccgaggatggccaggcaagccagagtcgatacagcaagcggaggatttggagatccgtcaaacttaaagattacaaacttgttggggatcaagaggaccatggttcagccaagaggatctgtggaaggagaaagcgccctggaggccctgaggcccgctgtaaagactgtggcaaggtctttaagtacaatcactttttagcaatccaccagaggagccacacaggtaatgatgttttcaaagctgattgcagtgtgttgcagaattgggagtacccaactttcttgtacaaagtggttgatatcggtaagcctatccctaaccctctcctcggtctcgattctacgtagtaatgaactagtccgtaacttgaaagtatttcgatttcttggctttatatatcttgtggaaaggacgacataccccgggcccccagcacacc

SEQ ID NO: 3484 - DNA, 2300 bp, Homo sapiens
  source 1..2300: mol_type = genomic DNA
atcgattgatcaacaagtttgtacaaaaaagttggcaccatggcagaaacatcgccagagccttctgggcagcttgttgtacactcagacgctcacagtgacactgtgctggccagttttgaggatcagaggaagaaaggcttcctctgtgacattactttaatcgtggagaatgtacatttccgggcccacaaagccttacttgctgccagtagtgaatacttctcaatgatgtttgcagaagagggggaaatcggccaatccatttatatgctggaaggcatggttgcagacacctttggtatcctgctggaatttatctacacaggttatctccatgccagtgagaaaagtacagaacaaatcctggctactgctcagttcttaaaagtctatgacctggtaaaggcttacacagacttccaaaataatcatagctccccaaagccaacaactttgaacactgctggtgccccagtggttgttatctctaataagaaaaacgatcctccaaagcggaaacggggaagaccaaaaaaagtcaatacattgcaggaggagaaatcagaactggctgcagaggaagaaatacagttaagagtgaacaattcagttcagaatagacaaaactttgtggttaaaggagacagtggtgtactgaatgagcaaattgcagcaaaagaaaaggaagaatcggagcctacttgtgagccaagtagagaggaggaaatgccagttgaaaaagatgagaactatgatcccaagaccgaggatggccaggcaagccagagtcgatacagcaagcggaggatttggagatccgtcaaacttaaagattacaaacttgttggggatcaagaggaccatggttcagccaagaggatctgtggaaggagaaagcgccctggaggccctgaggcccgctgtaaagactgtggcaaggtctttaagtacaatcactttttagcaatccaccagaggagccacacaggggagcgacctttcaaatgtaatgagtgtggaaaaggctttgcccagaagcactcgctacaggtccacaccaggatgcacacaggcgagcggccgtacacctgcaccgtgtgcagcaaggctctgaccaccaagcactcactgctggagcacatgagcctgcactcaggacagaagtcttttacctgtgatcaatgcggaaaatatttcagccagaacagacagctaaagagccattaccgagttcatacaggccactcattaccggaatgcaaagactgccatcgcaaattcatggatgtgtctcagctaaagaaacatctgcgaacacacacaggtgagaagccatttacttgtgaaatctgtggcaaatctttcacagcaaagagttctcttcagacccacatcagaatccatcgaggagaaaagccatactcctgtggcatttgtggcaaatccttctctgactccagtgccaaaaggagacactgcattctacacactggcaagaagcctttctcctgccctgagtgtaacttacagtttgctcgcttagacaacttgaaggctcacttgaaaattcatagcaaggagaagcatgcttcagatgccagcagcatttctggcagtagtaatacagaagaggtcaggaatattcttcagctacagccatatcaactctctacctcgggagagcaggaaattcagcttctcgtaaccgattctgtacataacatcaatttcatgcccggtcctagccagggaatcagcattgtgactgcagagagttcccaaaacatgactgcagaccaggctgctaatcttaccctgctcacgcagcagccagagcaactgcagaatttaattctttcagctcaacaggagcaaacagaacacattcagagcctcaatatgattgaaagccagatggggccctcacaaacagagccagtgcacgtgatcactctgtccaaggaaacactggaacatcttcatgcccatcaagagcaaacagaggagctccatttagctacaagtacttcagatccagctcagcacctgcagctgacacaggagcctggtccgccaccacccactcaccacgtgccccagccaacgccacttggccaggagcagagcttgccaactttcttgtacaaagtggttgatatcggtaagcctatccctaaccctctcctcggtctcgattctacgtagtaatgaactagtccgtaacttgaaagtatttcgatttcttggctttatatatcttgtggaaaggacgagatgcatttggtttgtctgccctc

SEQ ID NO: 3485 - DNA, 1766 bp, Homo sapiens
  source 1..1766: mol_type = genomic DNA
atcgattgatcaacaagtttgtacaaaaaagttggcatggctctgagctctcgggcgcgtgccttctccgtggaagccttggtggggagacccagcaaaagaaaactccaagacccaatacaggcggagcagcctgagctgcgggagaaaaagggcggagaggaagaggaggagagaaggagcagcgctgcagggaagagcgagccgcttgaaaaacaacctaagacagagccctcaacatctgcttcctctggctgcggcagcgacagcggctacggcaacagctctgaaagtctggaagagaaagatattcaaatggagcttcaaggatctgaactgtggaaaagattccatgacatcgggactgagatgatcattactaaagcgggcaggcggatgttcccctctgttcgggtcaaggtgaaagggttggatccagggaagcagtaccatgtggccatcgatgtggtgccggtggattccaaacgctataggtacgtctatcacagctcacagtggatggtagctgggaatacagaccatttgtgcatcattcctagattctatgttcacccggactcaccctgctcgggagagacctggatgcggcagatcatcagctttgatcgcatgaaactcaccaacaatgagatggatgacaaaggccacatcattctgcaatccatgcataagtacaaaccccgagtgcacgtgatagagcaaggcagcagtgttgacctgtcccagattcagtccttgcccactgaaggtgttaaaacattctcctttaaagaaactgagttcaccacagtaacggcttaccaaaaccaacagattacgaaactaaaaatagaaagaaatccttttgctaaaggatttagagatactggaagaaacaggggtgtattggatgggcttttagagacctacccatggaggccttctttcactctcgattttaaaacctttggcgcagacacacaaagtggaagcagtggctcatctccagtgacctctagtggaggggccccctctcctttgaactccttactttctccactttgcttttcacctatgtttcatttacctacaagctcccttggaatgccctgtccagaggcatacctgcccaatgtcaacctgcctctatgctacaagatttgtccaactaatttttggcaacagcaacctcttgttttaccggctcctgaaagactagcaagcagcaacagttctcagtctttagccccactcatgatggaagtgcctatgttatcttccctgggggtcaccaattcaaaaagcggttcatctgaagactccagtgatcagtatctacaagcacctaattctaccaatcaaatgttatatggattacagtcacctggaaatatttttctgccaaactccatcaccccagaagcacttagttgctcctttcatccttcctatgacttttatagatacaatttctctatgccatctagactgataagtggttccaaccatcttaaagtgaatgacgacagtcaagtttcttttggagaaggcaaatgtaatcatgttcattggtatccagcaattaaccattacctttacccaactttcttgtacaaagtggttgatatcggtaagcctatccctaaccctctcctcggtctcgattctacgtagtaatgaactagtccgtaacttgaaagtatttcgatttcttggctttatatatcttgtggaaaggacgagagtcgctccagcttcttacaaca

SEQ ID NO: 3486 - DNA, 1202 bp, Homo sapiens
  source 1..1202: mol_type = genomic DNA
accgccaccatgagtgaagaggagcaaggctccggcactaccacgggctgcgggctgcctagtatagagcaaatgctggccgccaacccaggcaagaccccgatcagccttctgcaggagtatgggaccagaatagggaagacgcctgtgtacgaccttctcaaagccgagggccaagcccaccagcctaatttcaccttccgggtcaccgttggcgacaccagctgcactggtcagggccccagcaagaaggcagccaagcacaaggcagctgaggtggccctcaaacacctcaaaggggggagcatgctggagccggccctggaggacagcagttctttttctcccctagactcttcactgcctgaggacattccggtttttactgctgcagcagctgctaccccagttccatctgtagtcctaaccaggagcccccccatggaactgcagccccctgtctcccctcagcagtctgagtgcaaccccgttggtgctctgcaggagctggtggtgcagaaaggctggcggttgccggagtacacagtgacccaggagtctgggccagcccaccgcaaagaattcaccatgacctgtcgagtggagcgtttcattgagattgggagtggcacttccaaaaaattggcaaagcggaatgcggcggccaaaatgctgcttcgagtgcacacggtgcctctggatgcccgggatggcaatgaggtggagcctgatgatgaccacttctccattggtgtgggctcccgcctggatggtcttcgaaaccggggcccaggttgcacctgggattctctacgaaattcagtaggagagaagatcctgtccctccgcagttgctccctgggctccctgggtgccctgggccctgcctgctgccgtgtcctcagtgagctctctgaggagcaggcctttcacgtcagctacctggatattgaggagctgagcctgagtggactctgccagtgcctggtggaactgtccacccagccggccactgtgtgtcatggctctgcaaccaccagggaggcagcccgtggtgaggctgcccgccgtgccctgcagtacctcaagatcatggcaggcagcaagtagtaatgaactagtccgtaacttgaaagtatttcgatttcttggctttatatatcttgtggaaaggacgagaccgcacggccgaaattctactc

SEQ ID NO: 3487 - DNA, 1361 bp, Homo sapiens
  source 1..1361: mol_type = genomic DNA
atcgattgatcaacaagtttgtacaaaaaagttggcaccatgtgtgtcccagtcctgaaagatattttgcatctagctgatctccctgggcagaaaccatacttggttggagaatgtacaaaccatcaccagcaccagaagcatcacagtgcaaagaaatccttgaagagggacatggacagagcctcatatgtgaagtgctgcctattctgtatgtcattgaagccctttcgcaaatgggaggttggaaaggaccttccagccatgttgcggcttctgaggtccctggtctttcctggaggcaagaaacccggcacaattactgaatgtggggaggacattcgcagtcaaaaaagtcattacaagtcaggtgaatgtgggaaggcttccaggcacaaacacactcctgtttaccatccaagagtctacactggaaaaaagctttatgagtgtagcaaatgtgggaaagccttccgtggcaagtactcacttgttcagcaccagagagtccatactggagaaaggccttgggagtgcaatgaatgtggaaaattctttagccaaacctcccacctgaatgatcatcggagaatccacaccggagaaaggccttatgagtgcagcgaatgtggaaaattatttagacaaaactccagccttgttgaccaccagaaaatacacactggagcaaggccttatgagtgtagccagtgtgggaaatcctttagccaaaaagccacccttgttaaacaccaaagagttcacactggagaaaggccttataagtgtggtgaatgtgggaattcctttagtcaaagtgccattcttaatcaacaccgaagaattcacactggagcaaagccttatgagtgtggccagtgtgggaaatcctttagtcaaaaagctaccctcattaaacaccagagagttcacactggagaaaggccttataagtgtggtgactgtgggaaatcctttagtcaaagctccatccttattcaacaccggagaattcatactggagcaaggccttatgagtgtggccagtgtggaaagtcctttagccaaaagtctggtctcattcaacaccaagtggttcacactggagaaaggccttatgagtgcaacaaatgtgggaattcctttagccaatgctccagcctcatacatcaccaaaaatgtcataacacattgccaactttcttgtacaaagtggttgatatcggtaagcctatccctaaccctctcctcggtctcgattctacgtagtaatgaactagtccgtaacttgaaagtatttcgatttcttggctttatatatcttgtggaaaggacgaagttattagtaataatttaaacct

SEQ ID NO: 3488 - DNA, 1091 bp, Homo sapiens
  source 1..1091: mol_type = genomic DNA
atcgattgatcaacaagtttgtacaaaaaagttggcatggagaaaatgtcccgaccgctccccctgaatcccacctttatcccgcctccctacggcgtgctcaggtccctgctggagaacccgctgaagctcccccttcaccacgaagacgcatttagtaaagataaagacaaggaaaagaagctggatgatgagagtaacagcccgacggtcccccagtcggcattcctggggcctaccttatgggacaaaacccttccctatgacggagatactttccagttggaatacatggacctggaggagtttttgtcagaaaatggcattccccccagcccatctcagcatgaccacagccctcaccctcctgggctgcagccagcttcctcggctgccccctcggtcatggacctcagcagccgggcctctgcaccccttcaccctggcatcccatctccgaactgtatgcagagccccatcagaccaggtcagctgttgccagcaaaccgcaatacaccaagtcccattgatcctgacaccatccaggtcccagtgggttatgagccagacccagcagatcttgccctttccagcatccctggccaggaaatgtttgaccctcgcaaacgcaagttctctgaggaagaactgaagccacagcccatgatcaagaaagctcgcaaagtcttcatccctgatgacctgaaggatgacaagtactgggcaaggcgcagaaagaacaacatggcagccaagcgctcccgcgacgcccggaggctgaaagagaaccagatcgccatccgggcctcgttcctggagaaggagaactcggccctccgccaggaggtggctgacttgaggaaggagctgggcaaatgcaagaacatacttgccaagtatgaggccaggcacgggcccctgtacccaactttcttgtacaaagtggttgatatcggtaagcctatccctaaccctctcctcggtctcgattctacgtagtaatgaactagtccgtaacttgaaagtatttcgatttcttggctttatatatcttgtggaaaggacgatcccaaggagtggaagacatatgg

SEQ ID NO: 3489 - DNA, 1406 bp, Homo sapiens
  source 1..1406: mol_type = genomic DNA
atcgattgatcaacaagtttgtacaaaaaagttggcatggttcactccagcatgggggctccagaaataagaatgtctaagcccctggaggccgagaagcaaggtctggactccccatcagagcacacagacaccgaaagaaatggaccagacactaatcatcagaacccccaaaataagacctccccattctccgtgtccccaactggccccagtacaaagatcaaggctgaagaccccagtggcgattcagccccagcagcacccctgccccctcagccggcccagcctcatctgccccaggcccaactcatgttgacgggcagccagctagctggggacatacagcagctcctccagctccagcagctggtgcttgtgccaggccaccacctccagccacctgctcagttcctgctaccgcaggcccagcagagccagccaggcctgctaccgacaccaaatctattccagctacctcagcaaacccagggagctcttctgacctcccagccccgggccgggcttcccacacagccccccaaatgcttggagccaccatcccaccccgaggagcccagtgatctggaggagctggagcaattcgcccgcaccttcaagcaacgccgcatcaagctgggcttcacgcagggtgatgtgggcctggccatgggcaagctctacggcaacgacttcagccagacgaccatttcccgcttcgaggccctcaacctgagcttcaagaacatgtgcaaactcaagcccctcctggagaagtggctcaacgatgcagagactatgtctgtggactcaagcctgcccagccccaaccagctgagcagccccagcctgggtttcgacggcctgcccggccggagacgcaagaagaggaccagcatcgagacaaacgtccgcttcgccttagagaagagttttctagcgaaccagaagcctacctcagaggagatcctgctgatcgccgagcagctgcacatggagaaggaagtgatccgcgtctggttctgcaaccggcgccagaaggagaaacgcatcaacccctgcagtgcggcccccatgctgcccagcccagggaagccggccagctacagcccccatatggtcacaccccaagggggcgcggggaccttaccgttgtcccaagcttccagcagtctgagcacaacagcacaaaccccagccctcaaggcagccactcggctatcggcttgtcaggcctgcccaactttcttgtacaaagtggttgatatcggtaagcctatccctaaccctctcctcggtctcgattctacgtagtaatgaactagtccgtaacttgaaagtatttcgatttcttggctttatatatcttgtggaaaggacgaatcggtgccccacatgacggccca

SEQ ID NO: 3490 - DNA, 1895 bp, Homo sapiens
  source 1..1895: mol_type = genomic DNA
atcgattgatcaacaagtttgtacaaaaaagttggcatggctaatgcagaagtgagtgtcccagtgggggatgtggttgtggtacctactgaaggaaatgaaggggagaatcctgaagacactaaaacccaagtgattttgcagttacagcctgtgcaacaagggatttatgaagctgggtcggagaacaacacggcagttgtagcagtagaaactcacacgatacacaaaattgaagaagggattgatacaggcactatagaagcaaatgaggatatggaaattgcttaccccataacttgtggggagagcaaagccatcctcctctggaagaagtttgtatgtccaggaataaacgtgaagtgtgtcaagttcaatgatcagttgatcagccccaagcactttgttcatctggctggcaagtccactctgaaggactggaagagagctattcgtctgggtgggatcatgctcaggaaaatgatggactccggacagattgatttttaccaacatgacaaagtttgctccaatacctgcagaagcaccaaatttgatcttctgatcagcagtgcaagagctccagtgccaggacagcagacaagtgtggtgcagacacccacttcggctgatggtagcatcacgcagattgccatctcagaagagagcatggaagaggcagggctggaatggaactcagctctcaccgctgctgtcaccatggccacggaggagggtgtaaagaaagactcagaggaaatttcagaggacactttgatgttctggaaaggaatagctgatgtagggctgatggaagaggttgtctgcaatatacagaaggaaatagaggagctactcaggggagttcagcagcggctcatccaggctcccttccaagtcacagatgctgctgttctcaacaatgtagcacacacatttggcctaatggacacagtcaagaaggttttagacaacagaaggaaccaagtagagcagggagaagaacagtttctctatactctgacagacttggaacgccagttggaggagcagaagaagcaaggccaggatcacaggctgaaatctcagacagttcaaaatgtggtactgatgcctgtgagcactcctaagcctccaaaaaggccccggctccagcggccagcctccaccactgtcttgagcccttctcctcctgtccagcagcctcagttcacagtcatctcacccatcaccatcaccccagtgggtcagtcattttccatgggcaatattccagtggccaccctcagccagggctccagtcctgtgactgtccacacactgccttctggccctcagctcttccgctatgccacagtggtctcctctgccaagagcagctcaccagacacagtgaccatccacccttcatctagcttggcgctgctgagctctactgccatgcaggatgggagtacactgggcaacatgaccaccatggttagccctgtggaattggtggccatggagtccggcctaacctcggcaattcaggctgttgaaagcacctcagaggatgggcagaccatcattgagattgatccagccccggacccagaagctgaagatactgagggcaaagcagtcatcttggagacagagctgaggactgaggagaaagttgtggctgagatggaagaacaccagcatcaagttcacaatgtggagattgtggtcttagaggattacccaactttcttgtacaaagtggttgatatcggtaagcctatccctaaccctctcctcggtctcgattctacgtagtaatgaactagtccgtaacttgaaagtatttcgatttcttggctttatatatcttgtggaaaggacgaaaattggtaggtctcgcttgaata

SEQ ID NO: 3491 - DNA, 1154 bp, Homo sapiens
  source 1..1154: mol_type = genomic DNA
atcgattgatcaacaagtttgtacaaaaaagttggcatggcgtctaccagccgtttggatgctcttccaagagtcacatgtccaaaccatccagatgcgattttagtggaggactacagagccggtgatatgatctgtcctgaatgtggcttggttgtaggtgaccgggttattgatgtgggatctgaatggcgaactttcagcaatgacaaagcaacaaaagatccatctcgagttggagattctcagaatcctcttctgagtgatggagatttgtctaccatgattggcaagggcacaggagctgcaagttttgacgaatttggcaattctaagtaccagaatcggagaacaatgagcagttctgatcgggcaatgatgaatgcattcaaagaaatcactaccatggcagacagaatcaatctacctcgaaatatagttgatcgaacaaataatttattcaagcaagtatatgaacagaagagcctgaagggaagagctaatgatgctatagcttctgcttgtctctatattgcctgtagacaagaaggggttcctaggacatttaaagaaatatgtgccgtatcacgaatttctaagaaagaaattggtcggtgttttaaacttattttgaaagcgctagaaaccagtgtggatttgattacaactggggacttcatgtccaggttctgttccaacctttgtcttcctaaacaagtacagatggcagctacacatatagcccgtaaagctgtggaattggacttggttcctgggaggagccccatctctgtggcagcggcagctatttacatggcctcacaggcatcagctgaaaagaggacccaaaaagaaattggagatattgctggtgttgctgatgttacaatcagacagtcctatagactgatctatcctcgagccccagatctgtttcctacagacttcaaatttgacaccccagtggacaaactaccacagctatacccaactttcttgtacaaagtggttgatatcggtaagcctatccctaaccctctcctcggtctcgattctacgtagtaatgaactagtccgtaacttgaaagtatttcgatttcttggctttatatatcttgtggaaaggacgaccagctatcgattcagatagtgtc

SEQ ID NO: 3492 - DNA, 848 bp, Homo sapiens
  source 1..848: mol_type = genomic DNA
atcgattgatcaacaagtttgtacaaaaaagttggcatggcacatgtttcttcagaaactcaagatgtttcccccaaagatgaattaactgcttcagaagcctccactaggtctccattgtgtgaacacaccttccctggggactcagacttacggtcaatgattgaagaacatgcttttcaggttttgtcacaaggatccttgttagaaagtccaagttacacagtttgtgtctctgagccagataaagatgatgattttctttctctgaactttcccaggaaactttggaaaatagtggaaagtgaccaattcaagtctatttcatgggatgagaatggaacttgcatagtgattaatgaagaactcttcaagaaagaaattttggaaacaaaggctccttacagaatatttcaaactgatgctatcaaaagttttgttcgacagctcaacctttatggatttagtaaaattcaacagaattttcaaagatctgcctttctagccacctttctgtcagaagagaaagaatcgtctgtcttaagcaagcttcatgtctttgtgtttcaccacagtctatttggagcaacattcggagaacatcactttcagccatgccctttaccatctggtaacaaggctcccatttctacttggagtggagattcctggttgctgtgcccaactttcttgtacaaagtggttgatatcggtaagcctatccctaaccctctcctcggtctcgattctacgtagtaatgaactagtccgtaacttgaaagtatttcgatttcttggctttatatatcttgtggaaaggacgatcacacgtattcgagtgcgcggtc

SEQ ID NO: 3493 - DNA, 1226 bp, Homo sapiens
  source 1..1226: mol_type = genomic DNA
atcgattgatcaacaagtttgtacaaaaaagttggcatgccagagtggccaccttgcttatctgtggccccggccctggtgatcaccatggcagctgggaagggagccccgttgagcccatcggctgaaaacagatggcgacttagcgaacctgagctgggccggggctgcaagccagtgctgctcgagaagacgaaccgcctgggccctgaggctgctgtgggcagggcgggccgggatgtgggcagtgcggagctggcactgttggtagccccaggcaagccccgacctggcaagccgctgcccccgaagacacgtggagagcagaggcagagcgccttcacggagctgccgaggatgaaggaccggcaggtggatgctcaggcccaggagagggagcacgatgaccccacaggccaacctggtgccccacagctgacccagaacatccccagaggcccagctggcagcaaagtcttctctgtgtggcccagcggagcacgaagtgagcaaagaagcgcctttagcaaaccaaccaagcgaccagcagagaggcctgagctaacctcagtcttccctgcaggggaatctgcagatgccctgggggagctgtctggactcctcaacactacagacctcgcttgttggggtcgactttcaactcccaagcttttggttggtgatttgtggaacttgcaagcattgccacagaatgctccactctgtagcacttttctgggtgcccctacactgtggctggagcatacccaggcccaggtgcccccaccctcatcatcctccaccacttcgtgggccctcctgccacccaccctcacctccctgggcttgtccacccagaactggtgtgcaaagtgcaacctgtcctttcgcctaacgtccgacctggtctttcacatgcgatcccaccacaaaaaggagcatgcggggcctgacccacattctcagaagcggagagaagaggcccttgcctgccctgtgtgccaggagcacttccgggagcgccaccacctctcccggcacatgacttctcacagctacccaactttcttgtacaaagtggttgatatcggtaagcctatccctaaccctctcctcggtctcgattctacgtagtaatgaactagtccgtaacttgaaagtatttcgatttcttggctttatatatcttgtggaaaggacgatttgtcggggttgttgcacatcca

SEQ ID NO: 3494 - DNA, 962 bp, Homo sapiens
  source 1..962: mol_type = genomic DNA
atcgattgatcaacaagtttgtacaaaaaagttggcatgcagttgccccccgcgctgtgcgcccgcctcgctgcggggcccggggcggcggagccactgcctgtagagcgggatcccgcggctggggccgcgccctttcgcttcgttgcgcgccccgtgcgcttcccgcgggagcaccagttcttcgaggatggggacgtgcagcgccacctctacctccaggacgtgatcatgcaggtggccgacgtgcctgagaagcccagggtgcccgcgtttgcctgccaggtggccggctgctgccaggtgttcgatgccctggacgactacgagcaccactaccacacgctgcacggaaatgtttgctccttttgcaagcgggccttcccttccggacacctgctggacgcccacatcctggagtggcacgattcgctcttccagatcctgtctgagaggcaggacatgtatcagtgcttggtagaaggctgcacagagaagttcaagaccagcagagaccggaaggatcacatggtgaggatgcacctgtaccccgcggacttccggtttgataagccaaagaaaagcagaagcccagcctcagcagaagccccaggggacagtggagagcggtcagaaggggaggccatggaaatctgctctgagcctgtggcagcctcccctgcaccggcaggtgagaggcggatctacagacatagaataccctctaccatctgctttggtcagggtgccgctcgaggatttaaaagcaacaagaagaaaaccaaacaatgctgcccaactttcttgtacaaagtggttgatatcggtaagcctatccctaaccctctcctcggtctcgattctacgtagtaatgaactagtccgtaacttgaaagtatttcgatttcttggctttatatatcttgtggaaaggacgattctcacttacccacgctgacacc

SEQ ID NO: 3495 - DNA, 956 bp, Homo sapiens
  source 1..956: mol_type = genomic DNA
atcgattgatcaacaagtttgtacaaaaaagttggcatgaatgtgcggagggtggaaagcatttcggctcagctggaggaggccagctctacaggcggtttcctgtacgctcagaacagcaccaagcgcagcattaaagagcggctcatgaagctcttgccctgctcagctgccaaaacgtcgtctcctgctattcaaaacagcgtggaagatgaactggagatggccaccgtcaggcatcggcccgaagcccttgagcttctggaagcccagagcaaatttaccaagaaagagcttcagatcctttacagaggatttaagaacgaatgccccagtggtgttgttaatgaagaaaccttcaaagagatttactcgcagttctttccacagggagactctacaacatatgcacattttctgttcaatgcatttgatacagaccacaatggagctgtgagtttcgaggatttcatcaaaggtctttccattttgctccgggggacagtacaagaaaaactcaattgggcatttaatctgtatgacataaataaagatggctacatcactaaagaggaaatgcttgatataatgaaagcaatatacgatatgatgggtaaatgtacatatcctgtcctcaaagaagatgctcccagacaacacgttgaaacattttttcagaaaatggacaaaaataaagatggggttgttaccatagatgagttcattgaaagctgccaaaaagatgaaaacataatgcgctccatgcagctctttgaaaatgtgatttacccaactttcttgtacaaagtggttgatatcggtaagcctatccctaaccctctcctcggtctcgattctacgtagtaatgaactagtccgtaacttgaaagtatttcgatttcttggctttatatatcttgtggaaaggacgagatgactattttgactttctttct

SEQ ID NO: 3496 - DNA, 455 bp, Homo sapiens
  source 1..455: mol_type = genomic DNA
atcgattgatcaacaagtttgtacaaaaaagttggcatggggcgcagaaagtcaaaacgaaagccgcctcccaagaagaagatgacaggcaccctcgagacccagttcacctgccccttctgcaaccacgagaaatcctgtgatgtgaaaatggaccgtgcccgcaacaccggagtcatctcttgtaccgtgtgcctagaggaattccagacgcccataacgtatctgtcagaacccgtggatgtgtacagtgattggatagacgcctgcgaggcggccaatcagtacccaactttcttgtacaaagtggttgatatcggtaagcctatccctaaccctctcctcggtctcgattctacgtagtaatgaactagtccgtaacttgaaagtatttcgatttcttggctttatatatcttgtggaaaggacgagctaccttgaactaatttccgacc

SEQ ID NO: 3497 - DNA, 1031 bp, Homo sapiens
  source 1..1031: mol_type = genomic DNA
atcgattgatcaacaagtttgtacaaaaaagttggcatggctgtggaatctggagtgatttcaaccctgatacctcaggatcctccggaacaagaactaatactagtgaaagtagaagataacttttcctgggatgagaaatttaagcagaatgggagtactcaatcctgccaagaattgtttcgtcagcaattcagaaaattttgctaccaggagacacctgggccccgggaggctctgagccgactccaggaactttgctatcagtggctaatgccagagttgcacacaaaggagcagatcttagaactgctggtactggagcagttcctgagcattctgcctgaggagctgcagatctgggttcagcaacataatccagaaagcggcgaggaagctgtgaccctgttggaggatttagagagggagtttgatgacccagggcagcaggtcccagctagtccacagggaccagcagtgccatggaaggatttaacatgtctcagagcatcccaagagtcaacagacatccacctccagcccttaaagacacagctgaaatcctggaaaccatgcctttcccctaaaagtgattgtgagaacagtgaaacagcaacaaaagagggcatctcagaagaaaaatcacagggactccctcaggaaccttcatttcgaggaattaagttgtccagacctcccaaagcttcttcagctatccgttgggaatgtgtttctccaggaagttttcccggcgatatcatagctgctgaggctacacattcaacaatttcttgctttgccatcaacactttgccagccaccatcctgccatctaaaaatgtgaatagaaagtatttttcctgcccaactttcttgtacaaagtggttgatatcggtaagcctatccctaaccctctcctcggtctcgattctacgtagtaatgaactagtccgtaacttgaaagtatttcgatttcttggctttatatatcttgtggaaaggacgatcatctctctttctatccgtagtc

SEQ ID NO: 3498 - DNA, 1436 bp, Homo sapiens
  source 1..1436: mol_type = genomic DNA
atcgattgatcaacaagtttgtacaaaaaagttggcaccatggagactagaccacagagcaaggattcaacttcagtgcaagatttttccaaagcagaatcatgcaaagttgcaataatagacagactgacacggaatagtgtctatgactctaacttggaagcagcccttgaatgtgaaaattggttagagaatcagcaaggaaatcaggagagacatttgagagaaatgttcactcacatgaattcactctctgaggaaacagaccataagcatgatgtatactggaaaagcttcaatcagaaatctgtccttatcactgaagacagagttcccaaaggatcttatgccttccatacacttgaaaaaagcttgaaacaaaaatcaaacttaatgaaaaagcagagaacttataaagagaaaaaacctcataaatgtaatgattgtggtgaactcttcacctaccattcagtgcttattcgacaccagagagtccatactggagagaaaccctatacctgcaatgaatgtgggaaatcttttagccacagagctaatttaactaaacaccagagaactcatactagaattctctttgaatgcagtgaatgcaagaaaaccttcacagaaagctcatcccttgcaacacatcagagaattcacgttggagagagaccttatgaatgcaatgaatgtgggaaaggttttaatcgaagtacacatcttgtgcagcatcagttgattcatactggagtgaagccttatgaatgtaatgaatgtgataaagcttttattcattcatcagcactcattaaacatcaaagaactcatactggagagaaaccttataaatgtcaagaatgtgggaaagcctttagccattgctcatccctaactaagcatcagagagttcatactggagaaaagccatatgaatgcagtgaatgtggaaaaacttttagtcagagcacacatcttgttcaacatcagagaattcacactggagagaaaccctatgagtgtaatgaatgtgggaaaaccttcagccggagctccaattttgctaaacatcaaagaattcatattggaaagaaaccgtacaaatgtagcgagtgtggaaaagccttcattcattcatcagctctcattcaacatcagagaactcataccggagagaaaccctttagatgtaatgagtgtgggaaaagctttaagtgcagttcatctctcatcagacatcaaagagttcacactgaagagcaacccttgccaactttcttgtacaaagtggttgatatcggtaagcctatccctaaccctctcctcggtctcgattctacgtagtaatgaactagtccgtaacttgaaagtatttcgatttcttggctttatatatcttgtggaaaggacgacgggctcaatccgagcggcaacga

SEQ ID NO: 3499 - DNA, 1526 bp, Homo sapiens
  source 1..1526: mol_type = genomic DNA
atcgattgatcaacaagtttgtacaaaaaagttggcaccatgctccaaacaacttggcctcaggagtcagtgacctttgaggatgtggctgtttacttcacccagaatcaatgggccagcctcgaccctgcgcagagggccctgtacggggaggtgatgctggagaattatgcaaatgtggcttctctggtagcgtttccattccccaaacctgctctgatctcccacctggagagaggggaagcaccatggggcccagatccctgggacaccgagattctgagaggcatcagtcaaggtggtgagtcctggatcaaaaatgaagggctagttataaagcaggaagcctctgaagaaacagagttgcacagaatgccagtaggaggacttctcaggaacgtttctcagcactttgattttaaaaggaaggcactgaagcagactttcaatctaaatccaaatctgatacttcgaggtggaatgaagttctatgaatgtaaagaatgtgggaaaatcttccgatataactcaaagcttattcggcatcagatgagtcatactggggaaaagccctttaagtgtaaggagtgtggcaaagctttcaagtccagctatgattgtattgtacatgagaaaaaccacattggagaagggccctatgaatgtaaggagtgtggcaaaggtttgagttccaacacagccttgactcaacatcagaggatccacactggagagaaaccctatgaatgtaaagagtgtggaaaggctttccgtaggagtgcggcatacctgcagcatcagagattacacacgggagagaaactctataaatgtaaggaatgttggaaagctttcggttgtaggtcactttttattgtccatcagagaattcatactggggagaaaccttatcaatgtaaggagtgtggcaaagccttcacccagaaaatagcctccattcagcatcagagagttcacactggggagaagccttatgaatgtaaggtgtgtgggaaagccttcaaatggtatggaagttttgttcagcatcagaaattgcaccctgtggagaagaagccagtcaaggtccttgggccatccctggtcagtccccagtgctcctctccagccatacctcctgttcttctccagggatcctgttctgcttcagccgtagctgtgccttcactgacctttccacatgctgtgctcattcctacctctgggaattttttcatgctgctgcctacatctggaataccttcttcatctgcccaaatagtgcgtgtcttccagggtcttactcccactgtgaaaccttccccagttattctcaccccttcttctcactcctcattgccaactttcttgtacaaagtggttgatatcggtaagcctatccctaaccctctcctcggtctcgattctacgtagtaatgaactagtccgtaacttgaaagtatttcgatttcttggctttatatatcttgtggaaaggacgaatagacgtttacattagttcgcgc

SEQ ID NO: 3500 - DNA, 1841 bp, Homo sapiens
  source 1..1841: mol_type = genomic DNA
atcgattgatcaacaagtttgtacaaaaaagttggcatggctagagaaccgagaaaaaacgcagccctggacgcccagtctgcagaagaccagacggggctcctgaccgtgaaggtggagaaggaggaagcctccgccttgacggcggaggtgagagcaccctgcagccctgctcggggccccgaacgctcccgccagcgcttccgaggcttccgctacccggaggctgcgggcccccgcgaggcgttgagccggctccgagaactctgcggacaatggctgcagcctgagatgcacagcaaggagcagatcctggagctgctggtgctggagcagttcctgaccatcctgccggggaatctgcagagctgggtgcgggagcagcatccagagagcggggaggaggtggtggtgctattggagtatttggagaggcagctggatgagccggcgccgcaggttcccgttggtgaccaggggcaagaactgctctgttgcaagatggcactattgacacaaactcaagggtctcaaagtagccagtgccagccaatgaaggctctgttcaagcatgaatctctgggatcccagcccttacacgatagagttctccaggttcctgggcttgcccagggagggtgctgcagagaagatgcaatggtagcttccaggctcactccagggtcccagggtttgctgaaaatggaagatgtggccctgaccctcactcctgggtggacacagctggattcatctcaggtgaacctctacagagatgaaaagcaggagaaccatagcagcctggtctcccttggtggtgaaatacagactaagagcagggacttgcctccagtcaagaagcttccagaaaaggagcatgggaagatatgccacctgagggaagacattgcccagattcctacacatgcagaagctggtgaacaggagggcaggttacaaagaaagcagaaaaatgccatagggagtaggcgacattattgccatgaatgtggaaagagttttgctcaaagttcaggcctgactaaacacaggagaatccacactggtgagaaaccctatgaatgtgaagactgtggaaagaccttcattgggagctctgcccttgtcattcatcagagagtccacactggtgagaagccatatgagtgtgaagaatgtggtaaggtcttcagtcacagctcaaaccttatcaaacaccagagaacccacactggggagaagccctatgagtgtgatgactgtgggaagaccttcagccagagctgcagcctccttgaacatcacaaaattcatactggggagaagccataccagtgcaatatgtgtggcaaagcctttaggcggaattcacatctcctgagacatcagaggattcatggtgataaaaatgttcagaatcctgagcacggggagtcctgggaaagtcagggtaggacggaaagccagtgggaaaatactgaggctcccgtgtcttataaatgtaatgagtgtgagagaagtttcacacggaatagaagtcttattgaacatcagaaaatccacactggtgagaaaccctatcagtgtgacacatgtggaaaaggtttcactcgaacttcataccttgttcaacatcagagaagccatgtagggaaaaaaactctttcacagtgcccaactttcttgtacaaagtggttgatatcggtaagcctatccctaaccctctcctcggtctcgattctacgtagtaatgaactagtccggaacttgaaagtatttcgatttcttggctttatatatcttgtggaaaggacgagccttcaatggaattgcatcaatc

SEQ ID NO: 3501 - DNA, 2285 bp, Homo sapiens
  source 1..2285: mol_type = genomic DNA
atcgattgatcaacaagtttgtacaaaaaagttggcatggcgacgtcgggggcgaacgggcctggttcggccacggcctcggcttccaatccgcgcaaatttagtgagaagattgcgctgcagaagcagcgtcaggccgaggagacggcggccttcgaggaggtgatgatggacatcggctccacccggttacaggcccaaaaactgcgactggcatacacaaggagctctcattatggtgggtctctgcccaatgttaaccagattggctctggcctggccgagttccagagccccctccactcacctttggattcatctcggagcactcggcaccatgggctggtggaacgggtgcagcgagatcctcgaagaatggtgtccccacttcgccgatacacccgccacattgacagctctccctatagtcctgcctacttatctcctcccccagagtctagctggcgaaggacgatggcctggggcaatttccctgcagagaaggggcagttgtttcgactaccatctgcacttaacaggacaagctctgactctgcccttcatacaagtgtgatgaaccccagtccccaggatacctacccaggccccacacctcccagcatcctgcccagccgacgtgggggtattctggatggtgaaatggaccccaaagtacctgctattgaggagaacttgctagatgacaagcatttgctgaagccatgggatgctaagaagctatcctcatcctcttcccgacctcggtcctgtgaagtccctggaattaacatctttccatctcctgaccagcctgccaatgtgcctgtcctcccacctgccatgaacacggggggctccctacctgacctcaccaacctgcactttcccccaccactgcccacccccctggaccctgaagagacagcctaccctagcctgagtgggggcaacagtacctccaatttgacccacaccatgactcacctgggcatcagcaggggcatgggcctgggcccaggctatgatgcaccaggacttcattcacctctcagccacccatccctgcagtcctccctaagcaatcccaacctccaggcttccctgagcagtcctcagccccagcttcagggctcccacagccacccctctctgcctgcctcctccttggcccgccatgtactgcccaccacctccctgggccacccctcactcagtgctccggctctttcctcctcctcttcctcctcctccacttcatctcctgttttgggcgccccctcttaccctgcttctacccctggggcctccccccaccaccgccgtgtgcccctcagccccctgagtttgctcgcgggcccagccgacgccagaaggtcccaacagcagctgcccaaacagttttcgccaacaatgtcacccaccttgtcttccatcactcagggcgtccccctggataccagtaaactgtccactgaccagcggttacccccatacccatacagctccccaagtctggttctgcctacccagccccacaccccaaagtctctacagcagccagggctgccctctcagtcttgttcagtgcagtcctcaggtgggcagcccccaggcaggcagtctcattatgggacaccgtacccacctgggcccagtgggcatgggcaacagtcttaccaccggccaatgagtgacttcaacctggggaatctggagcagttcagcatggagagcccatcagccagcctggtgctggatccccctggcttttctgaagggcctggatttttagggggtgaggggccaatgggtggcccccaggatccccacaccttcaaccaccagaacttgacccactgttcccgccatggctcagggcctaacatcatcctcacaggggactcctctccaggtttctctaaggagattgcagcagccctggccggagtgcctggctttgaggtgtcagcagctggattggagctagggcttgggctagaagatgagctgcgcatggagccactgggcctggaagggctaaacatgctgagtgacccctgtgccctgctgcctgatcctgctgtggaggagtcattccgcagtgaccggctccaatgcccaactttcttgtacaaagtggttgatatcggtaagcctatccctaaccctctcctcggtctcgattctacgtagtaatgaactagtccgtaacttgaaagtatttcgatttcttggctttatatatcttgtggaaaggacgaatcgtattcaaccatgaacagtcc

SEQ ID NO: 3502 - DNA, 1835 bp, Homo sapiens
  source 1..1835: mol_type = genomic DNA
atcgattgatcaacaagtttgtacaaaaaagttggcatggccgcggccaaggccgagatgcagctgatgtccccgctgcagatctctgacccgttcggatcctttcctcactcgcccaccatggacaactaccctaagctggaggagatgatgctgctgagcaacggggctccccagttcctcggcgccgccggggccccagagggcagcggcagcaacagcagcagcagcagcagcgggggcggtggaggcggcgggggcggcagcaacagcagcagcagcagcagcaccttcaaccctcaggcggacacgggcgagcagccctacgagcacctgaccgcagagtcttttcctgacatctctctgaacaacgagaaggtgctggtggagaccagttaccccagccaaaccactcgactgccccccatcacctatactggccgcttttccctggagcctgcacccaacagtggcaacaccttgtggcccgagcccctcttcagcttggtcagtggcctagtgagcatgaccaacccaccggcctcctcgtcctcagcaccatctccagcggcctcctccgcctccgcctcccagagcccacccctgagctgcgcagtgccatccaacgacagcagtcccatttactcagcggcacccaccttccccacgccgaacactgacattttccctgagccacaaagccaggccttcccgggctcggcagggacagcgctccagtacccgcctcctgcctaccctgccgccaagggtggcttccaggttcccatgatccccgactacctgtttccacagcagcagggggatctgggcctgggcaccccagaccagaagcccttccagggcctggagagccgcacccagcagccttcgctaacccctctgtctactattaaggcctttgccactcagtcgggctcccaggacctgaaggccctcaataccagctaccagtcccagctcatcaaacccagccgcatgcgcaagtaccccaaccggcccagcaagacgcccccccacgaacgcccttacgcttgcccagtggagtcctgtgatcgccgcttctcccgctccgacgagctcacccgccacatccgcatccacacaggccagaagcccttccagtgccgcatctgcatgcgcaacttcagccgcagcgaccacctcaccacccacatccgcacccacacaggcgaaaagcccttcgcctgcgacatctgtggaagaaagtttgccaggagcgatgaacgcaagaggcataccaagatccacttgcggcagaaggacaagaaagcagacaaaagtgttgtggcctcttcggccacctcctctctctcttcctacccgtccccggttgctacctcttacccgtccccggttactacctcttatccatccccggccaccacctcatacccatcccctgtgcccacctccttctcctctcccggctcctcgacctacccatcccctgtgcacagtggcttcccctccccgtcggtggccaccacgtactcctctgttccccctgctttcccggcccaggtcagcagcttcccttcctcagctgtcaccaactccttcagcgcctccacagggctttcggacatgacagcaaccttttctcccaggacaattgaaatttgctacccaactttcttgtacaaagtggttgatatcggtaagcctatccctaaccctctcctcggtctcgattctacgtagtaatgaactagtccgtaacttgaaagtatttcgatttcttggctttatatatcttgtggaaaggacgagttttggctacaattcgcgcaagc

SEQ ID NO: 3503 - DNA, 1802 bp, Homo sapiens
  source 1..1802: mol_type = genomic DNA
atcgattgatcaacaagtttgtacaaaaaagttggcatggcccttcgatcagtgatgttcagtgatgtatccatagacttctctccagaagagtgggaatacctggacttggaacaaaaggacttgtacagagatgtcatgttggagaactacagcaacttggtctcactgggatgcttcatttctaaaccagatgtgatttcctcattggagcaaggaaaagagccttggaaagttgtgaggaaaggaagaagacaatatccagatttggagaccaagtatgagaccaagaagttatctttagaaaatgacatttatgaaataaatttatcccagtggaagataatggaaagaattgaaaaccatggccttaagggtctcattttaaaaaatgattgggaatccacaggaaaaattgaaggacaggagagacctcaagaaggatacttcagtagtgtgaaaatgccatctgaaaaggtgtcctcttaccagaaacgcacatctgttactccacatcagagacttcattttgttgataaaccctatgaatgtaaggaatgtgggaaggcgttcagagtgcgccaacagcttacttttcatcacagaattcatactggtgaaaaaccgtatgaatgtaaggaatgtgggatggccttcagacagactgcacaccttactcgacatcagagacttcattctggtgaaaaactctatgaatgtaaggaatgtggggaagctttcatatgtggtgcagatcttagagtacatcagaaaatgcatattggtgagaagccctatgaatgtaaagaatgtgggaaggcttttagggtacgaggacaacttactctgcatcagaggattcatactggtgagaaaccctatgtgtgtaaagagtgtggaaaagcctttagacagtacgcacacctgactcggcatcagaagcttaatagtgctgacaggctctatgaatgcaaagaatgtgggaaggcctttttgtgtggctctggtcttagagtacatcacaaacttcatactggtgagaaaccctatgaatgtaaggaatgcgggaaggcctttagagtgcgacaacaactaacactccatcagagaattcatactggtgagaaaccctatgaatgtaaggaatgtggaaagacctttagccgtggctatcatcttattctccatcacagaattcatactggtgaaaaaccttacgaatgtaaggaatgctggaaagcctttagtcgctactcacaacttatttcacatcagagtattcatattggtgttaagccctatgactgtaaggaatgcgggaaggccttcagactactttcacaactcacacagcatcagagtattcatattggtgagaaaccttataaatgtaaggaatgtggcaaggcctttagattgcgccaaaaacttactctacatcagagcattcatactggcgaaaaaccctttgagtgtaaggaatgtaggaaggcctttagacttaattcatcccttattcaacatctgagaattcattctggtgagaaaccctatgaatgtaaggaatgtaagaaggcctttaggcaacattcacaccttactcatcatctgaaaattcataatgtaaaaatctacccaactttcttgtacaaagtggttgatatcggtaagcctatccctaaccctctcctcggtctcgattctacgtagtaatgaactagtccgtaacttgaaagtatttcgatttcttggctttatatatcttgtggaaaggacgagctttttgacgatcaatctagcac

SEQ ID NO: 3504 - DNA, 917 bp, Homo sapiens
  source 1..917: mol_type = genomic DNA
atcgattgatcaacaagtttgtacaaaaaagttggcatgccagcccgccttgagacctgcatctccgacctcgactgcgccagcagcagcggcagtgacctatccggcttcctcaccgacgaggaagactgtgccagactccaacaggcagcctccgcttcggggccgcccgcgccggcccgcaggggcgcgcccaatatctcccgggcgtctgaggttccaggggcacaggacgacgagcaggagaggcggcggcgccgcggccggacgcgggtccgctccgaggcgctgctgcactcgctgcgcaggagccggcgcgtcaaggccaacgatcgcgagcgcaaccgcatgcacaacttgaacgcggccctggacgcactgcgcagcgtgctgccctcgttccccgacgacaccaagctcaccaaaatcgagacgctgcgcttcgcctacaactacatctgggctctggccgagacactgcgcctggcggatcaagggctgcccggaggcggtgcccgggagcgcctcctgccgccgcagtgcgtcccctgcctgcccggtcccccaagccccgccagcgacgcggagtcctggggctcaggtgccgccgccgcctccccgctctctgaccccagtagcccagccgcctccgaagacttcacctaccgccccggcgaccctgttttctccttcccaagcctgcccaaagacttgctccacacaacgccctgtttcattccttaccactacccaactttcttgtacaaagtggttgatatcggtaagcctatccctaaccctctcctcggtctcgattctacgtagtaatgaactagtccgtaacttgaaagtatttcgatttcttggctttatatatcttgtggaaaggacgactcacctatgtaagatcaattttc

SEQ ID NO: 3505 - DNA, 2279 bp, Homo sapiens
  source 1..2279: mol_type = genomic DNA
atcgattgatcaacaagtttgtacaaaaaagttggcaccatggaaaaaattctccaaatggctgaaggtattgatattggggagatgccttcatatgatctggtgctgtccaaaccttccaaaggtcaaaaacgccacctctcaacatgtgatggtcaaaatcctcctaaaaagcaagccggttccaaattccatgcgagacctcgttttgagcctgtacattttgtagctagtagttcaaaagatgaaagacaggaagatccttatggccctcaaacaaaagaggtaaatgaacaaacacattttgccagcatgccaagagacatctaccaagattatactcaagactctttcagtatacaagatgggaattctcagtattgtgattcatcaggattcattctcacaaaagaccagcctgtaacagccaacatgtattttgacagtgggaaccctgccccaagcaccacatcacagcaggcaaactctcagtcaactcctgagccttcaccatcacagacatttcccgagtctgtggtagccgagaagcagtattttattgaaaaattaacggcgacaatctggaagaacctttctaatccagaaatgacttctggatctgataaaattaattatacatatatgttaactcgttgtattcaggcgtgtaagacaaatcctgagtatatatatgctcctttaaaggaaattcctcctgccgacatccccaaaaataaaaaacttctaactgatggctatgcttgtgaagttagatgccaaaatatctacttaactacaggttatgctggcagcaagaatgggtccagggatcgagctacagagctagctgtaaaactcttgcagaaacgtattgaagttagagttgtccggcggaaattcaagcatacatttggagaggacctcgtggtgtgtcagattggcatgtcctcctatgaatttcctccagctctgaagccaccagaagacctggtggtgctgggtaaagatgcttccgggcagccaatttttaatgcttctgccaaacactggaccaattttgtcattacagaaaatgcaaatgatgcaattggtatccttaacaattctgcctcattcaacaagatgtcaattgaatacaaatatgagatgatgccaaatcgcacatggcgttgtcgagtgtttttacaagatcactgcttagctgaaggttatggaaccaagaaaacaagtaaacatgcagctgccgacgaggctttgaaaattcttcaaaaaacacagcccacttatccatctgtcaaaagttcacaatgccatacaggctcttcacccagaggatctggaaagaagaaagatataaaggatcttgtagtttatgagaattcttcaaatcccgtgtgcacgctgaacgacacagctcagtttaaccgaatgacagttgagtatgtctatgaaaggatgacaggcctccgctggaaatgcaaagtgattctagagagtgaagtaattgcagaagcagttggggtgaagaaaactgtcaaatatgaagctgctggggaagctgtgaaaaccctcaaaaagacccagccaactgtcattaacaacttgaagaaaggagctgttgaagatgtgatttcaagaaatgaaattcagggccgctcagcagaggaggcttacaaacagcaaatcaaagaagataatattggaaatcagctgctgagaaagatgggttggactggtggtggtttaggtaaatctggtgagggcatacgggagcctatctcagtgaaagagcagcataagcgggaagggcttggtctggatgtagagagggtgaataaaattgccaagagagatattgaacagatcatcagaaactacgcccgctccgagagccacacagatttgactttctctagagagctgactaatgatgaacggaagcaaatacatcagattgcccagaagtatggtcttaagagtaagtctcatggggtgggccatgataggtacctagtggtaggtagaaaaagacggaaggaagacctactagatcagctcaaacaggaaggccaagtgggccattacgagcttgttatgcctcaagcaaatttgccaactttcttgtacaaagtggttgatatcggtaagcctatccctaaccctctcctcggtctcgattctacgtagtaatgaactagtccgtaacttgaaagtatttcgatttcttggctttatatatcttgtggaaaggacgaagtcttgggtaagccttcctaaaa

SEQ ID NO: 3506 - DNA, 1499 bp, Homo sapiens
  source 1..1499: mol_type = genomic DNA
atcgattgatcaacaagtttgtacaaaaaagttggcatgttatcagatgagttagaatccaaaccagagctcctggtacagtttgttcagaatacgtccatcccattgggacaggggcttgtagaatcagaagctaaagatattacttgcttgtccctccttcccgtgactgaagcctcagaatgcagtcggctaatgttaccagatgatactacaaatcattctaactcctccaaggaggtcccttcctcagctgttttgagaagccttcgggtgaatgtgggtccagacggagaggagacgagagctcagactgtacagaaatccccggagtttttgtccacttcagagtcttctagcttgttgcaagatctacagccaagtgatagcacttcttttattcttcttaacctaacaagagcaggtctgggctcttcagctgagcacttagtgtttgtacaggatgaggcagaagattcagggaatgatttcctctccagtgagagcacagacagtagcattccatggttcctccgggttcaggagttggcccatgacagtttgattgctgctactcgtgcacaactggcaaagaatgcaaaaaccagcagcaatggagaaaatgtccaccttggttctggtgatgggcagtcaaaagattctgggccccttcctcaagtggaaaagaagctcaagtgtacagttgaaggttgtgaccggacatttgtatggccagctcactttaaataccacctcaagactcatcgaaatgaccgctccttcatctgtcctgcagaaggttgtgggaaaagcttctatgtgctgcagaggctgaaggtgcacatgaggacccacaatggagagaagccctttatgtgccatgagtctggctgtggtaagcagtttactacagctggaaacctgaagaaccaccggcgcatccacacaggagagaaacctttcctttgtgaagcccaaggatgtggccgttcctttgctgagtattctagcctccgaaaacatctggtggttcactcaggagagaagcctcatcagtgccaagtctgtgggaagaccttctctcagagtggaagcaggaatgtgcatatgagaaagcatcacctgcagctgggagcagctgggagtcaagagcaggagcaaactgaggtgcttgctgaaggatccccacgttccctgtcttcagtgcctgatgtgacacatcacctggtgaccatgcagtcagggaggcaatcatatgaagtttctgtcttaactgcagtaaatccacaagagttactaaaccaaggagatttaactgaaagacggacatgcccaactttcttgtacaaagtggttgatatcggtaagcctatccctaaccctctcctcggtctcgattctacgtagtaatgaactagtccgtaacttgaaagtatttcgatttcttggctttatatatcttgtggaaaggacgagacctgtcagatcctccccacgtc

SEQ ID NO: 3507 - DNA, 1571 bp, Homo sapiens
  source 1..1571: mol_type = genomic DNA
atcgattgatcaacaagtttgtacaaaaaagttggcatgccgcagctgaacggcggtggaggggatgacctaggcgccaacgacgaactgatttccttcaaagacgagggcgaacaggaggagaagagctccgaaaactcctcggcagagagggatttagctgatgtcaaatcgtctctagtcaatgaatcagaaacgaatcaaaacagctcctccgattccgaggcggaaagacggcctccgcctcgctccgaaagtttccgagacaaatcccgggaaagtttggaagaagcggccaagaggcaagatggagggctctttaaggggccaccgtatcccggctaccccttcatcatgatccccgacctgacgagcccctacctccccaacggatcgctctcgcccaccgcccgaacctatctccagatgaaatggccactgcttgatgtccaggcagggagcctccagagtagacaagccctcaaggatgcccggtccccatcaccggcacacattgtctctaacaaagtgccagtggtgcagcaccctcaccatgtccaccccctcacgcctcttatcacgtacagcaatgaacacttcacgccgggaaacccacctccacacttaccagccgacgtagaccccaaaacaggaatcccacggcctccgcaccctccagatatatccccgtattacccactatcgcctggcaccgtaggacaaatcccccatccgctaggatggcaaggtcaaccagtgtacccaatcacgacaggaggattcagacacccctaccccacagctctgaccgtcaatgcttccatgtccaggttccctccccatatggtcccaccacatcatacgctacacacgacgggcattccgcatccggccatagtcacaccaacagtcaaacaggaatcgtcccagagtgatgtcggctcactccatagttcaaagcatcaggactccaaaaaggaagaagaaaagaagaagccccacataaagaaacctcttaatgcattcatgttgtatatgaaggaaatgagagcaaaggtcgtagctgagtgcacgttgaaagaaagcgcggccatcaaccagatccttgggcggaggtggcatgcactgtccagagaagagcaagcgaaatactacgagctggcccggaaggagcgacagcttcatatgcaactgtaccccggctggtccgcgcgggataactatggaaagaagaagaagaggaaaagggacaagcagccgggagagaccaatgaacacagcgaatgtttcctaaatccttgcctttcacttcctccgattacaggagaaaaaaaaagtgcgttcgctacatacaaggtgaaggcagctgcctcagcccatcctcttcagatggaagcttactacccaactttcttgtacaaagtggttgatatcggtaagcctatccctaaccctctcctcggtctcgattctacgtagtaatgaactagtccgtaacttgaaagtatttcgatttcttggctttatatatcttgtggaaaggacgagcctcgcggcgtgacgatttcttc

SEQ ID NO: 3508 - DNA, 2021 bp, Homo sapiens
  source 1..2021: mol_type = genomic DNA
atcgattgatcaacaagtttgtacaaaaaagttggcatgatggacttggagctgccgccgccgggactcccgtcccagcaggacatggatttgattgacatactttggaggcaagatatagatcttggagtaagtcgagaagtatttgacttcagtcagcgacggaaagagtatgagctggaaaaacagaaaaaacttgaaaaggaaagacaagaacaactccaaaaggagcaagagaaagcctttttcgctcagttacaactagatgaagagacaggtgaatttctcccaattcagccagcccagcacatccagtcagaaaccagtggatctgccaactactcccaggttgcccacattcccaaatcagatgctttgtactttgatgactgcatgcagcttttggcgcagacattcccgtttgtagatgacaatgaggtttcttcggctacgtttcagtcacttgttcctgatattcccggtcacatcgagagcccagtcttcattgctactaatcaggctcagtcacctgaaacttctgttgctcaggtagcccctgttgatttagacggtatgcaacaggacattgagcaagtttgggaggagctattatccattcctgagttacagtgtcttaatattgaaaatgacaagctggttgagactaccatggttccaagtccagaagccaaactgacagaagttgacaattatcatttttactcatctataccctcaatggaaaaagaagtaggtaactgtagtccacattttcttaatgcttttgaggattccttcagcagcatcctctccacagaagaccccaaccagttgacagtgaactcattaaattcagatgccacagtcaacacagattttggtgatgaattttattctgctttcatagctgagcccagtatcagcaacagcatgccctcacctgctactttaagccattcactctctgaacttctaaatgggcccattgatgtttctgatctatcactttgcaaagctttcaaccaaaaccaccctgaaagcacagcagaattcaatgattctgactccggcatttcactaaacacaagtcccagtgtggcatcaccagaacactcagtggaatcttccagctatggagacacactacttggcctcagtgattctgaagtggaagagctagatagtgcccctggaagtgtcaaacagaatggtcctaaaacaccagtacattcttctggggatatggtacaacccttgtcaccatctcaggggcagagcactcacgtgcatgatgcccaatgtgagaacacaccagagaaagaattgcctgtaagtcctggtcatcggaaaaccccattcacaaaagacaaacattcaagccgcttggaggctcatctcacaagagatgaacttagggcaaaagctctccatatcccattccctgtagaaaaaatcattaacctccctgttgttgacttcaacgaaatgatgtccaaagagcagttcaatgaagctcaacttgcattaattcgggatatacgtaggaggggtaagaataaagtggctgctcagaattgcagaaaaagaaaactggaaaatatagtagaactagagcaagatttagatcatttgaaagatgaaaaagaaaaattgctcaaagaaaaaggagaaaatgacaaaagccttcacctactgaaaaaacaactcagcaccttatatctcgaagttttcagcatgctacgtgatgaagatggaaaaccttattctcctagtgaatactccctgcagcaaacaagagatggcaatgttttccttgttcccaaaagtaagaagccagatgttaagaaaaactacccaactttcttgtacaaagtggttgatatcggtaagcctatccctaaccctctcctcggtctcgattctacgtagtaatgaactagtccgtaacttgaaagtatttcgatttcttggctttatatatcttgtggaaaggacgagtgaatttatgtctctatttattg

SEQ ID NO: 3509 - DNA, 1487 bp, Homo sapiens
  source 1..1487: mol_type = genomic DNA
atcgattgatcaacaagtttgtacaaaaaagttggcaccatgtcagcctttgatatgtcccatgggttttttcccagggaaccaatctgtccttttgaagaaaagacaaagataggaacgatggtagaggaccaccggtcaaattcttaccaggattcagtgacgtttgatgatgtggctgtggagttcaccccagaggagtgggctttactggacacaactcagaaatacctctacagagatgtgatgctggagaactacatgaacctggcctctgtggatttctttttctgcttaacttcagaatgggaaatacaacctagaaccaaacggtcatcacttcagcagggttttttgaagaatcaaatattcactgggatacaaatgcagacaagaagctacagtggatggaaactctgtgagaattgtggagaggtcttcagtgaacagttttgccttaagacacacatgagagctcagaatggagggaacacttttgagggtaattgttatggaaaagacagcatcagtgtgcacaaggaagcctctattggacaagaactttccaaatttaatccatgtggaaaagtcttcaccttaactccaggccttgctgtgcatcttgaaattctcaatggaagacaaccctacaaatgtaaggaatgtggaaaaggctttaagtattttgcaagccttgataatcacatgggaatccacattggagagaaactctgtgaatttcaggaatgtgagagagccatcacaacttcctcacacttaaagcagtgtgtagcagttcatactggaaagaaatccgaaaagactaagaactgtgggaaatccttcactaatttttctcaactttctgcacatgcaaaaactcataaaggagagaagtcctttgaatgtaaagaatgtggaagatcctttagaaattcctcatcctttaatgttcacattcaaattcacactggaataaaaccacacaaatgtacggaatgtgggaaagccttcactagatcaactcaccttactcaacatgtaagaactcacactggaataaaaccctatgaatgtaaggaatgtggccaagccttcactcagtacacgggccttgctatacacatacgaaatcacactggagagaaaccctatcagtgtaaggaatgtgggaaagccttcaatagatcttcaacgcttactcaacatagaagaattcacacaggagagaagccttatgaatgtgttgaatgtgggaagaccttcattacttcttcccatcgtagtaaacatttgaaaactcacagtggagaaaggttgccaactttcttgtacaaagtggttgatatcggtaagcctatccctaaccctctcctcggtctcgattctacgtagtaatgaactagtccgtaacttgaaagtatttcgatttcttggctttatatatcttgtggaaaggacgatgatttcaacacttcattttcagg

SEQ ID NO: 3510 - DNA, 1310 bp, Homo sapiens
  source 1..1310: mol_type = genomic DNA
atcgattgatcaacaagtttgtacaaaaaagttggcatggggactcctcccggcctgcagaccgactgcgaggcgctgctcagccgcttccaggagacggacagtgtacgcttcgaggacttcacggagctctggagaaacatgaagttcgggactatcttctgtggcagaatgagaaatttagaaaagaacatgtttacaaaagaagctttagctttggcttggcgatattttttacctccatacaccttccagatcagagttggtgctttgtatctgctatatggattatataatacccaactgtgtcaaccaaaacaaaagatcagagttgccctgaaggattgggatgaagttttaaaatttcagcaagatttagtaaatgcacagcattttgatgcagcttatatttttaggaagctacgactagacagagcatttcactttacagcaatgcccaaattgctgtcatataggatgaagaaaaaaattcaccgagctgaagttacagaagaatttaaggacccaagtgatcgtgtgatgaaacttatcacttctgatgtattagaggaaatgctgaatgttcatgatcattatcagaacatgaaacatgtaatttcagttgataagtccaagccagataaagccctcagcttgataaaggatgatttttttgacaatattaagaacatagttttggagcatcagcagtggcacaaagacagaaagaatccatccttaaagtcaaaaactaatgatggagaagaaaaaatggaaggaaattcacaagaaacggagagatgtgaaagggcagaatcattagcgaaaataaaatcaaaggccttttcagttgtcatacaggcatccaaatcaagaaggcatcgtcaagtcaaactcgactcttctgactctgattctgcatctggtcaagggcaagtcaaagcaactaggaaaaaagagaagaaagaaagattgaaaccagcaggaaggaagatgtctctcagaaacaaaggcaatgtgcagaatatacacaaggaagataaacctttaagtctgagtatgcctgtaattacagaagaagaagagaatgaaagtttgagtggaacagagttcactgcatccaagaagaggagaaaacactgcccaactttcttgtacaaagtggttgatatcggtaagcctatccctaaccctctcctcggtctcgattctacgtagtaatgaactagtccgtaacttgaaagtatttcgatttcttggctttatatatcttgtggaaaggacgaagacataacataatcaaagtatag

SEQ ID NO: 3511 - DNA, 1298 bp, Homo sapiens
  source 1..1298: mol_type = genomic DNA
atcgattgatcaacaagtttgtacaaaaaagttggcatgagcgaggtggaggcggcagcgggggctacagcggtccccgcggcgacggtgcccgcgacggcggcaggggtggtagcggtggtggtaccggtgcccgcaggggagccgcagaaaggcggcggggcgggcggcgggggcggagccgcctcgggccccgctgctgggaccccctcggcgccgggctcccgcacccctggcaatccggcgacggcggtctcgggaacccccgcccccccggcccggagtcaggcggacaagccggtgctggcaatccaagtcctgggcactgtcaaatggttcaacgtccggaatggttacggattcatcaacaggaatgacaccaaggaagatgtctttgttcaccagacagctattaaaagaaacaaccccaggaagtttctgcgcagcgttggagatggggagactgtggaatttgatgtcgtggaaggagagaagggcgcagaagccactaatgtaactgggcctgggggagtacccgtgaagggcagccgttatgcccccaaccgacgtaagtcccgccgattcatcccccggcctccctcagttgccccaccacccatggtggcagagatcccctcggcggggacaggacctggcagtaaaggggagcgggctgaagactctgggcaacggccccgacgatggtgccccccacccttcttctaccgacggcggtttgtgcgaggcccccggcctcccaaccagcagcagcctatagagggcactgacagggtagaacccaaagagacagccccattggaggggcaccaacagcagggagatgagcgagtccccccgcccagattccggcccaggtaccgaaggcctttccgccccaggccacgccagcagcctaccacagaaggtggggatggtgagaccaagcccagccaaggtcccgctgatggttcccggcctgagccccagcgcccacgaaaccgcccctacttccagcggagacggcagcaggcccctggcccccagcaggcccctggcccccggcagcccgcagcccctgagacctcagcccctgtcaacagtggggaccccaccaccaccatcctggagtgcccaactttcttgtacaaagtggttgatatcggtaagcctatccctaaccctctcctcggtctcgattctacgtagtaatgaactagtccgtaacttgaaagtatttcgatttcttggctttatatatcttgtggaaaggacgacccatgtgatctcgcgattgtgtc

SEQ ID NO: 3512 - DNA, 878 bp, Homo sapiens
  source 1..878: mol_type = genomic DNA
atcgattgatcaacaagtttgtacaaaaaagttggcatggcgccacccgcggcgcctggccgggaccgtgtgggccgtgaggatgaggacggctgggagacgcgaggggaccgcaaggcccggaagcccctggtggagaagaagcggcgcgcgcggatcaacgagagcctgcaggagctgcggctgctgctggcgggcgccgaggtgcaggccaagctggagaacgccgaagtgctggagctgacggtgcggcgggtccagggtgtgctgcggggccgggcgcgcgagcgcgagcagctgcaggcggaagcgagcgagcgcttcgctgccggctacatccagtgcatgcacgaggtgcacacgttcgtgtccacgtgccaggccatcgacgctaccgtcgctgccgagctcctgaaccatctgctcgagtccatgccgctgcgtgagggcagcagcttccaggatctgctgggggacgccctggcggggccacctagagcccctggacggagtggctggcctgcggggggcgctccgggatccccaatacccagccccccgggtcctggggacgacctgtgctccgacctggaggaggcccctgaggctgaactgagtcaggctcctgctgaggggcccgacttggtgcccgcagccctgggcagcctgaccacagcccaaattgcccggagtgtctggaggccttggtgcccaactttcttgtacaaagtggttgatatcggtaagcctatccctaaccctctcctcggtctcgattctacgtagtaatgaactagtccgtaacttgaaagtatttcgatttcttggctttatatatcttgtggaaaggacgattcggacaggtcccaagagctagc

SEQ ID NO: 3513 - DNA, 1670 bp, Homo sapiens
  source 1..1670: mol_type = genomic DNA
atcgattgatcaacaagtttgtacaaaaaagttggcatggaaaaccttacaaaacacagcattgagtgttcaagtttcagaggtgattgggaatgtaaaaaccagtttgagagaaaacagggatctcaggaaggacatttcagtgaaatgatatttactcctgaagacatgcccactttcagtatccagcatcagagaattcatactgatgagaaactccttgaatgtaaggaatgtgggaaggattttagttttgtatcagtccttgttcgacatcagcgaattcatactggtgagaaaccttatgaatgcaaagaatgtggcaaggcctttggtagtggtgcaaaccttgcttaccatcaaagaattcatactggtgagaagccttttgaatgtaaagaatgtgggaaggcctttggtagtggctcaaaccttactcaccatcagagaattcatactggtgagaaaccctatgagtgtaaggaatgtgggaaagcctttagttttggatcaggccttattcgacatcagatcattcacagtggtgagaagccttatgagtgtaaggaatgtgggaagtcctttagttttgaatcagcccttattcggcatcacagaattcacacaggtgagaaaccttatgaatgtatagattgtggtaaagcctttggcagtggttcaaaccttactcaacatcggcggattcatactggtgagaaaccttatgaatgcaaagcatgtggaatggcctttagcagtggttcggctcttactcggcatcagagaattcataccggtgagaaaccatatatatgtaatgaatgtggtaaggcctttagttttggatcagcccttactcgacatcaaagaattcatactggtgagaaaccttatgtatgtaaggaatgtgggaaggcttttaatagtggctcagatctcactcagcatcagagaattcacactggtgagaaaccctatgagtgtaaggagtgtgagaaagcctttagaagtggttcaaaacttattcagcatcaaagaatgcatactggagagaaaccttatgaatgtaaggaatgtgggaagacctttagtagtggttcagaccttactcaacatcacagaattcatactggtgagaaaccctatgaatgtaaggaatgtgggaaggcctttggtagtggctcaaaacttatccaacaccagctaatccatactggtgaaagaccctatgaatgtaaagaatgtggaaagtcctttagtagtggttcagctcttaatcggcaccagagaatacacactggtgagaaaccctatgaatgtaaggagtgtgggaaggctttttatagtggctcaagccttactcagcatcagagaattcatacaggtgagaaactttatgaatgtaagaactgtgggaaggcttatgggagggattcagagtttcagcaacataagaaaagtcataatggtaagaaactctgcgaattggaaactataaattgcccaactttcttgtacaaagtggttgatatcggtaagcctatccctaaccctctcctcggtctcgattctacgtagtaatgaactagtccgtaacttgaaagtatttcgatttcttggctttatatatcttgtggaaaggacgatgttaaaattctcagctcttgacc

SEQ ID NO: 3514 - DNA, 1871 bp, Homo sapiens
  source 1..1871: mol_type = genomic DNA
atcgattgatcaacaagtttgtacaaaaaagttggcatggactcagtggtctttgaggatgtggctgtggacttcaccctggaggagtgggctttgctggattctgctcagagggacctctacagagatgtgatgctggagaccttccggaacctggcctcagtagatgatgggactcaatttaaagccaatgggtcagtttctctgcaggatatgtacgggcaagaaaaatctaaggaacagacaataccaaacttcacaggaaataattcctgtgcctacactttagaaaaaaattgtgaaggctatggcactgaagaccaccacaaaaatctgagaaatcatatggtggacagattctgtacacataatgaaggtaatcaatatggagaagccatccatcaaatgccagatcttaccctgcacaagaaagtttctgctggagaaaaaccatatgaatgcaccaagtgcaggacagtcttcacgcatctttcttctcttaaaaggcacgtcaagtctcactgtggacgaaaagcacctccaggtgaggaatgtaagcaggcctgcatttgtccctcacacctacacagtcacggaagaaccgacactgaggagaagccgtataagtgtcaagcatgtgggcaaactttccaacatcctcgttacctctcccaccacgtaaagactcacacagcagagaaaacctacaaatgcgagcagtgtcggatggcgtttaatgggttcgcaagcttcactagacatgtgagaactcacacaaaagacaggccatataaatgtcaggaatgtgggagagccttcatttatccctcgacatttcaaagacacatgacaacacacactggagagaagccctataaatgtcagcactgtgggaaagccttcacttacccccaggcttttcaaagacatgagaagacgcacacgggagagaagccctatgaatgcaagcagtgtgggaaaacattcagttggtctgaaaccttgcgagtccacatgaggatccacaccggggacaaactctataaatgtgaacactgtgggaaggcttttacctcttccagatcattccaaggtcatttgaggacgcacactggagagaaaccttatgagtgtaaacaatgtgggaaagccttcacttggtcctcaacgtttagagaacatgtgagaattcacacgcaagagcagctctataaatgtgaacaatgtgggaaggcttttacctcttccagatcattccgaggtcatttgaggacgcacactggagagaagccttatgagtgtaaacaatgtggaaaaaccttcacttggtcctcaacgtttagagaacatgtgagaattcacacgcaagagcagctccataaatgtgaacactgtgggaaggcctttacctcttccagagcattccaaggtcatttgaggatgcacactggagagaagccttatgagtgtaaacaatgtggaaaaaccttcacttggtcctcaaccttacataatcatgtgaggatgcacactggagagaaacctcacaaatgtaaacaatgtgggatgtccttcaagtggcactcctccttccggaaccatctgaggatgcacacaggacagaaatcccacgaatgtcagtcatactcaaaagccttcagttgccaagtcattctttctaaaaccagtgagagcacacactacccaactttcttgtacaaagtggttgatatcggtaagcctatccctaaccctctcctcggtctcgattctacgtagtaatgaactagtccgtaacttgaaagtatttcgatttcttggctttatatatcttgtggaaaggacgatggtagcagcaggccgatatttta

SEQ ID NO: 3515 - DNA, 1820 bp, Homo sapiens
  source 1..1820: mol_type = genomic DNA
atcgattgatcaacaagtttgtacaaaaaagttggcatggtggctgggtggttgacaaattactctcaggactcagtgacctttgaggatgtggctgtggacttcacccaggaggagtggactttgctggatcaaactcagagaaacttatacagagatgtgatgctggagaactataagaatctagttgcagtagattgggagagtcatattaataccaaatggtcagcacctcagcagaattttttgcaggggaaaacatccagtgtggtggaaatggagagaaaccattttggagaggaactgtttgactttaaccaatgtgaaaaagccttgagtgaacactcatgccttaagactcacaggagaacttactttagaaagaaaacctgtgagtgtaatcaatgtgaaaaagccttcagaaaaccctctatctttactttacacaagaaaactgatatcggagaggaacttcctaactgtaatcaatgtgaaacagccttcagccaacatctacatcttgtttgcaagaaaactagccaaaatctacatcttgtttgcaagaaaactcacactcaagagaaaccatataaatgcagtgactgtgaaaaaggcttaccttcctcctcacacctcagagaatgtgtaagaatttatggtggagagagaccatatactcataaggagtatgtcgaaaccttttctcattctacagccctttttgtacacatgcaaactcaagatggagaaaaattctatgaatgtaaagcatgtgggaaacccttcactgagtcgtcatatcttactcaacatttaagaactcatagtagagtgttacctatagaacataagaaatttggcaaagcctttgctttttccccagatcttgctaaacatataagacttagaactagaggaaaacactatgtttgtaatgaatgtggcaaagaatttacttgtttctcaaaactcaacattcacataagggttcacactggagaaaaaccgtatgagtgcaacaaatgtgggaaagccttcactgattcatcaggtcttataaaacacaggcgaactcacactggagaaaagccttatgaatgtaaggaatgtgggaaagcttttgctaactcttcacatcttactgtacatatgagaactcacactggtgagaagccttatcaatgtaaggaatgtggaaaagcctttattaattcctcttcctttaaaagtcacatgcagactcatcctggtgtaaaaccctatgactgtcaacagtgtgggaaagccttcattcgatcctcatttcttattcgacatttgagaagtcacagtgcagaaaggccttttgaatgtgaggaatgtgggaaagcctttagatactcctcgcaccttagtcaacataaaagaatacatacaggggagaggccatataaatgtcaaaagtgtgggcaagccttcagtatctcatcaggccttacagtacacatgagaactcacactggtgaacggccctttgaatgtcaggaatgtgggaaagcctttactcggtccacatatcttattcgacatctaagaagtcatagtgtggagaaaccatataaggaatgtgggcaaacctttagtaattcctcatgccttactgaatgtgtgtgcccaactttcttgtacaaagtggttgatatcggtaagcctatccctaaccctctcctcggtctcgattctacgtagtaatgaactagtccgtaacttgaaagtatttcgatttcttggctttatatatcttgtggaaaggacgacaaacacctcaaccgattatcgtc

SEQ ID NO: 3516 - DNA, 1802 bp, Homo sapiens
  source 1..1802: mol_type = genomic DNA
atcgattgatcaacaagtttgtacaaaaaagttggcatgatccaggcccaggaatccataacactggaggatgtggctgtggacttcacttgggaggagtggcaactcctgggcgctgctcagaaggacctgtaccgggacgtgatgttggagaactacagcaacctggtggcagtggggtatcaagccagcaaaccggatgcactcttcaagttggaacaaggagaacaactgtggacaattgaagatggaatccacagtggagcctgttcagacatatggaaagttgatcatgtgctggagcgcttgcagagtgaaagcctggtgaacagaaggaaaccatgtcatgaacatgatgcatttgaaaatattgttcattgcagcaaaagtcagtttctgttagggcaaaatcatgatatatttgacttacgtggaaaaagtttgaaatccaatttaactttagttaaccagagcaaaggctatgaaataaagaactctgttgagtttactggaaatggggactcctttcttcatgctaaccatgaacgacttcatactgcaattaaattccctgcaagtcaaaaactcatcagcactaagtcccaattcatcagtcccaagcatcagaaaacacgaaaattagagaagcatcatgtgtgcagtgaatgtgggaaagccttcatcaagaagtcttggctaactgatcaccaggtaatgcatacaggagagaaaccccacagatgtagtctatgtgagaaagccttctccagaaagttcatgcttactgaacatcagcgaactcatacaggagaaaaaccttatgaatgccctgaatgtggcaaagcctttctcaagaaatcacggctcaacatacatcagaaaacacataccggagagaaaccctatatatgcagtgaatgtggaaaaggcttcatccagaaaggaaatctcattgtacaccagcgaattcatacaggtgagaaaccttatatatgcaatgaatgtggaaaaggcttcattcagaagacgtgtctcatagcacatcagagatttcacacaggaaagacgccctttgtgtgcagtgaatgtggaaaatcctgttctcagaaatcaggtctcattaaacatcaaagaattcacacaggagagaaaccctttgaatgtagtgaatgtgggaaagcctttagcacaaagcaaaagctcattgtccatcaaaggactcatacaggagagagaccctatggctgtaacgagtgtgggaaagcgtttgcgtatatgtcgtgtctggttaagcataagagaatacacacaagggagaaacaagaggcagccaaggtggaaaatcctcctgcagagaggcacagctcattacacaccagtgatgtcatgcaggagaaaaactctgctaacggggcgactacacaagtgccttctgtggcccctcagacatcattaaacatcagcggcctcctcgcaaacaggaacgtagtccttgtgggacagccagtggtcagatgtgcagcctcaggagataacagaggatttgcacaggacagaaaccttgtgaatgcagtgaatgtggttgtgccttccgtgatcaattatgtcttattttatgttacagaaaacccatacccaactttcttgtacaaagtggttgatatcggtaagcctatccctaaccctctcctcggtctcgattctacgtagtaatgaactagtccgtaacttgaaagtatttcgatttcttggctttatatatcttgtggaaaggacgattttctgcagacatacctttacca

SEQ ID NO: 3517 - DNA, 1466 bp, Homo sapiens
  source 1..1466: mol_type = genomic DNA
atcgattgatcaacaagtttgtacaaaaaagttggcatgatgtattctcccatctgtctcactcaggatgaatttcacccattcatcgaggcacttcttccacatgtccgtgcaattgcctatacttggttcaacctgcaggctcgaaaacgcaagtactttaaaaagcatgagaagcgaatgtcaaaggatgaagaaagagcagtcaaagatgagcttctcagtgaaaagcctgaaatcaaacagaagtgggcatccaggctccttgccaaactgcgcaaagatattcgccaggagtatcgagaggactttgtgctcaccgtgactggcaagaagcacccgtgctgtgtcttatccaatcccgaccagaagggtaagattaggagaatcgactgcctgcgacaggcagacaaagtctggcgtctggatctagtcatggtgatcctgttcaaaggcatccccttggaaagtaccgatggagagcggctcatgaaatccccacattgcacaaacccagcactttgtgtccagccacatcatatcacagtatcagttaaggagcttgatttgtttttggcatactacgtgcaggagcaagattctggacaatcaggaagtccaagccacaatgatcctgccaagaatcctccaggttaccttgaggatagttttgtaaaatctggagtcttcaatgtatcagaacttgtaagagtatccagaacgcccataacccagggaactggagtcaacttcccaattggagaaatcccaagccaaccatactatcatgacatgaactcgggggtcaatcttcagaggtctctgtcttctccaccaagcagcaaaagacccaaaactatatccatagatgaaaatatggaaccaagtcctacaggagacttttacccctctccaagttcaccagctgctggaagtcgaacatggcacgaaagagatcaagatatgtcttctccgactactatgaagaagcctgaaaagccattgttcagctctgcatctccacaggattcttccccaagactgagcactttcccccagcaccaccatcccggaatacctggagttgcacacagtgtcatctcaactcgaactccacctccaccttcaccgttgccatttccaacacaagctatccttcctccagccccatcgagctacttttctcatccaacaatcagatatcctccccacctgaatcctcaggatactctgaagaactatgtaccttcttatgacccatccagtccacaaaccagccagtcctggtacctgggctacccaactttcttgtacaaagtggttgatatcggtaagcctatccctaaccctctcctcggtctcgattctacgtagtaatgaactagtccgtaacttgaaagtatttcgatttcttggctttatatatcttgtggaaaggacgacccgtgcagttgagcgctagtgat

SEQ ID NO: 3518 - DNA, 1745 bp, Homo sapiens
  source 1..1745: mol_type = genomic DNA
atcgattgatcaacaagtttgtacaaaaaagttggcatggcctccgggagtgtggccgagtgcctgcagcaggagaccacctgccccgtgtgcctgcagtacttcgcagagcccatgatgctcgactgcggccataacatctgttgcgcgtgcctcgcccgctgctggggcacggcagagactaacgtgtcgtgcccgcagtgccgggagaccttcccgcagaggcacatgcggcccaaccggcacctggccaacgtgacccaactggtaaagcagctgcgcaccgagcggccgtcggggcccggcggcgagatgggcgtgtgcgagaagcaccgcgagcccctgaagctgtactgcgaggaggaccagatgcccatctgcgtggtgtgcgaccgctcccgcgagcaccgcggccacagcgtgctgccgctcgaggaggcggtggagggcttcaaggagcaaatccagaaccagctcgaccatttaaaaagagtgaaagatttaaagaagagacgtcgggcccagggggaacaggcacgagctgaactcttgagcctaacccagatggagagggagaagattgtttgggagtttgagcagctgtatcactccttaaaggagcatgagtatcgcctcctggcccgccttgaggagctagacttggccatctacaatagcatcaatggtgccatcacccagttctcttgcaacatctcccacctcagcagcctgatcgctcagctagaagagaagcagcagcagcccaccagggagctcctgcaggacattggggacacattgagcagggctgaaagaatcaggattcctgaaccttggatcacacctccagatttgcaagagaaaatccacatttttgcccaaaaatgtctattcttgacggagagtctaaagcagttcacagaaaaaatgcagtcagatatggagaaaatccaagaattaagagaggctcagttatactcagtggacgtgactctggacccagacacggcctaccccagcctgatcctctctgataatctgcggcaagtgcggtacagttacctccaacaggacctgcctgacaaccccgagaggttcaatctgtttccctgtgtcttgggctctccatgcttcatcgccgggagacattattgggaggtagaggtgggagataaagccaagtggaccataggtgtctgtgaagactcagtgtgcagaaaaggtggagtaacctcagccccccagaatggattctgggcagtgtctttgtggtatgggaaagaatattgggctcttacctccccaatgactgccctacccctgcggaccccgctccagcgggtggggattttcttggactatgatgctggtgaggtctccttctacaacgtgacagagaggtgtcacaccttcactttctctcatgctaccttttgtgggcctgtccggccctacttcagtctgagttactcgggagggaaaagtgcagctcctctgatcatctgccccatgagtgggatagatgggttttctggccatgttgggaatcatggtcattccatggagacctccccttgcccaactttcttgtacaaagtggttgatatcggtaagcctatccctaaccctctcctcggtctcgattctacgtagtaatgaactagtccgtaacttgaaagtatttcgatttcttggctttatatatcttgtggaaaggacgattaaccagtgagcacccgagaagc

SEQ ID NO: 3519 - DNA, 1403 bp, Homo sapiens
  source 1..1403: mol_type = genomic DNA
atcgattgatcaacaagtttgtacaaaaaagttggcatgtctcaggtgacatttagtgatgtggctatagacttctctcatgaagagtgggcatgcctagattctgctcagagggacttatacaaggatgtgatggtccagaattatgagaacctggtctctgtaggtctttccgtaactaagccatatgtgatcatgttattggaggatggaaaagagccctggatgatggagaaaaaactgtcaaaagattgggaatcaagatgggaaaacaaggaattatcaacaaagaaggatatttatgatgaagattcaccccaaccagtaacaatggaaaaagttgtaaaacaaagttatgaattttcaaattctaataagaatttggaatatacagaatgcgacacatttagaagcacctttcattcaaagtctactctttctgaaccacaaaacaattctgctgaagggaattcacacaaatatgatatattaaagaagaatttatcaaaaaagtcagttataaaaagtgagagaataaatggtggaaagaaacttttaaattctaataaaagtggggcagccttcaaccagagcaaatctcttacccttccccagacttgtaatagagagaaaatctatacatgcagtgaatgtgggaaagcctttggcaaacagtcaatcctcagtcgccactggagaattcatacaggagagaagccctatgaatgtcgtgaatgtgggaagacttttagccatggttcatcccttacacgacatcagataagccatagtggagagaaaccttacaaatgcattgaatgtgggaaggcctttagccatggctcatcacttactaaccatcagagcactcacacgggagagaaaccgtatgaatgtatgaactgtggaaagtcttttagtcgtgtgtcccttctcattcagcatctaagaattcatacgcaagaaaaacgctatgagtgtcgtatatgtggaaaggccttcattcatagttcgtctctcattcaccatcagaaaagccatactggagagaagccttatgaatgtagagaatgtgggaaagctttctgctgtagctcacaccttactcaacatcaaagaattcacagtatgaagaaaaaatatgaatgcaacaaatgtctcaaggtctttagtagcttctcatttcttgttcaacatcagagtattcatactgaagaaaaaccgtttgaagtttacccaactttcttgtacaaagtggttgatatcggtaagcctatccctaaccctctcctcggtctcgattctacgtagtaatgaactagtccgtaacttgaaagtatttcgatttcttggctttatatatcttgtggaaaggacgacttactcgagaagcctaggagatg

SEQ ID NO: 3520 - DNA, 836 bp, Homo sapiens
  source 1..836: mol_type = genomic DNA
atcgattgatcaacaagtttgtacaaaaaagttggcatgtggactctcgggcgccgcgcagtagccggcctcctggcgtcacccagcccggcccaggcccagaccctcacccgggtcccgcggccggcagagttggccccactctgcggccgccgtggcctgcgcaccgacatcgatgcgacctgcacgccccgccgcgcaagttcgaaccaacgtggcctcaaccagatttggaatgtcaaaaagcagagtgtctatttgatgaatttgaggaaatctggaactttgggccacccaggctctctagatgagaccacctatgaaagactagcagaggaaacgctggactctttagcagagttttttgaagaccttgcagacaagccatacacgtttgaggactatgatgtctcctttgggagtggtgtcttaactgtcaaactgggtggagatctaggaacctatgtgatcaacaagcagacgccaaacaagcaaatctggctatcttctccatccagtggacctaagcgttatgactggactgggaaaaactgggtgtactcccacgacggcgtgtccctccatgagctgctggccgcagagctcactaaagccttaaaaaccaaactggacttgtcttccttggcctattccggaaaagatgcttgcccaactttcttgtacaaagtggttgatatcggtaagcctatccctaaccctctcctcggtctcgattctacgtagtaatgaactagtccgtaacttgaaagtatttcgatttcttggctttatatatcttgtggaaaggacgaacattgcagaaactagatcaatgc

SEQ ID NO: 3521 - DNA, 3173 bp, Homo sapiens
  source 1..3173: mol_type = genomic DNA
atcgattgatcaacaagtttgtacaaaaaagcaggcttcgccaccatggagaccaaaggctaccacagtctccctgaaggtctagatatggaaagacggtggggtcaagtttctcaggctgtggagcgttcttccctgggacctacagagaggaccgatgagaataactacatggagattgtcaacgtaagctgtgtttccggtgctattccaaacaacagtactcaaggaagcagcaaagaaaaacaagaactactcccttgccttcagcaagacaataatcggcctgggattttaacatctgatattaaaactgagctggaatctaaggaactttcagcaactgtagctgagtccatgggtttatatatggattctgtaagagatgctgactattcctatgagcagcagaaccaacaaggaagcatgagtccagctaagatttatcagaatgttgaacagctggtgaaattttacaaaggaaatggccatcgtccttccactctaagttgtgtgaacacgcccttgagatcatttatgtctgactctgggagctccgtgaatggtggcgtcatgcgcgccgttgttaaaagccctatcatgtgtcatgagaaaagcccgtctgtttgcagccctctgaacatgacatcttcggtttgcagccctgctggaatcaactctgtgtcctccaccacagccagctttggcagttttccagtgcacagcccaatcacccagggaactcctctgacatgctcccctaatgttgaaaatcgaggctccaggtcgcacagccctgcacatgctagcaatgtgggctctcctctctcaagtccgttaagtagcatgaaatcctcaatttccagccctccaagtcactgcagtgtaaaatctccagtctccagtcccaataatgtcactctgagatcctctgtgtctagccctgcaaatattaacaactcaaggtgctctgtttccagcccttcgaacactaataacagatccacgctttccagtccggcagccagtactgtgggatctatctgtagccctgtaaacaatgccttcagctacactgcttctggcacctctgctggatccagtacattgcgggatgtggttcccagtccagacacgcaggagaaaggtgctcaagaggtcccttttcctaagactgaggaagtagagagtgccatctcaaatggtgtgactggccagcttaatattgtccagtacataaaaccagaaccagatggagcttttagcagctcatgtctaggaggaaatagcaaaataaattcggattcttcattctcagtaccaataaagcaagaatcaaccaagcattcatgttcaggcacctcttttaaagggaatccaacagtaaacccgtttccatttatggatggctcgtatttttcctttatggatgataaagactattattccctatcaggaattttaggaccacctgtgcccggctttgatggtaactgtgaaggcagcggattcccagtgggtattaaacaagaaccagatgatgggagctattacccagaggccagcatcccttcctctgctattgttggggtgaattcaggtggacagtccttccactacaggattggtgctcaaggtacaatatctttatcacgatcggctagagaccaatctttccaacacctgagttcctttcctcctgtcaatactttagtggagtcatggaaatcacacggcgacctgtcgtctagaagaagtgatgggtatccggtcttagaatacattccagaaaatgtatcaagctctactttacgaagtgtttctactggatcttcaagaccttcaaaaatatgtttggtgtgtggggatgaggcttcaggatgccattatggggtagtcacctgtggcagctgcaaagttttcttcaaaagagcagtggaagggcaacacaactatttatgtgctggaagaaatgattgcatcattgataagattcgacgaaagaattgtcctgcttgcagacttcagaaatgtcttcaagctggaatgaatttaggagcacgaaagtcaaagaagttgggaaagttaaaagggattcacgaggagcagccacagcagcagcagcccccacccccacccccacccccgcaaagcccagaggaagggacaacgtacatcgctcctgcaaaagaaccctcggtcaacacagcactggttcctcagctctccacaatctcacgagcgctcacaccttcccccgttatggtccttgaaaacattgaacctgaaattgtatatgcaggctatgacagctcaaaaccagatacagccgaaaatctgctctccacgctcaaccgcttagcaggcaaacagatgatccaagtcgtgaagtgggcaaaggtacttccaggatttaaaaacttgcctcttgaggaccaaattaccctaatccagtattcttggatgtgtctatcatcatttgccttgagctggagatcgtacaaacatacgaacagccaatttctctattttgcaccagacctagtctttaatgaagagaagatgcatcagtctgccatgtatgaactatgccaggggatgcaccaaatcagccttcagttcgttcgactgcagctcacctttgaagaatacaccatcatgaaagttttgctgctactaagcacaattccaaaggatggcctcaaaagccaggctgcatttgaagaaatgaggacaaattacatcaaagaactgaggaagatggtaactaagtgtcccaacaattctgggcagagctggcagaggttctaccaactgaccaagctgctggactccatgcatgacctggtgagcgacctgctggaattctgcttctacaccttccgagagtcccatgcgctgaaggtagagttccccgcaatgctggtggagatcatcagcgaccagctgcccaaggtggagtcggggaacgccaagccgctctacttccaccggaagtgataggacccagctttcttgtacaaagtggttgatatcggtaagcctatccctaaccctctcctcggtctcgattctacgtagtaatgaactagtccgtaacttgaaagtatttcgatttcttggctttatatatcttgtggaaaggacgagtaacgagttacctggttaactcc

SEQ ID NO: 3522 - DNA, 2537 bp, Homo sapiens
  source 1..2537: mol_type = genomic DNA
atcgattgatcaacaagtttgtacaaaaaagttggcatggactccaaagaatcattaactcctggtagagaagaaaaccccagcagtgtgcttgctcaggagaggggagatgtgatggacttctataaaaccctaagaggaggagctactgtgaaggtttctgcgtcttcaccctcactggctgtcgcttctcaatcagactccaagcagcgaagacttttggttgattttccaaaaggctcagtaagcaatgcgcagcagccagatctgtccaaagcagtttcactctcaatgggactgtatatgggagagacagaaacaaaagtgatgggaaatgacctgggattcccacagcagggccaaatcagcctttcctcgggggaaacagacttaaagcttttggaagaaagcattgcaaacctcaataggtcgaccagtgttccagagaaccccaagagttcagcatccactgctgtgtctgctgcccccacagagaaggagtttccaaaaactcactctgatgtatcttcagaacagcaacatttgaagggccagactggcaccaacggtggcaatgtgaaattgtataccacagaccaaagcacctttgacattttgcaggatttggagttttcttctgggtccccaggtaaagagacgaatgagagtccttggagatcagacctgttgatagatgaaaactgtttgctttctcctctggcgggagaagacgattcattccttttggaaggaaactcgaatgaggactgcaagcctctcattttaccggacactaaacccaaaattaaggataatggagatctggttttgtcaagccccagtaatgtaacactgccccaagtgaaaacagaaaaagaagatttcatcgaactctgcacccctggggtaattaagcaagagaaactgggcacagtttactgtcaggcaagctttcctggagcaaatataattggtaataaaatgtctgccatttctgttcatggtgtgagtacctctggaggacagatgtaccactatgacatgaatacagcatccctttctcaacagcaggatcagaagcctatttttaatgtcattccaccaattcccgttggttccgaaaattggaataggtgccaaggatctggagatgacaacttgacttctctggggactctgaacttccctggtcgaacagttttttctaatggctattcaagccccagcatgagaccagatgtaagctctcctccatccagctcctcaacagcaacaacaggaccacctcccaaactctgcctggtgtgctctgatgaagcttcaggatgtcattatggagtcttaacttgtggaagctgtaaagttttcttcaaaagagcagtggaaggacagcacaattacctatgtgctggaaggaatgattgcatcatcgataaaattcgaagaaaaaactgcccagcatgccgctatcgaaaatgtcttcaggctggaatgaacctggaagctcgaaaaacaaagaaaaaaataaaaggaattcagcaggccactacaggagtctcacaagaaacctctgaaaatcctggtaacaaaacaatagttcctgcaacgttaccacaactcacccctaccctggtgtcactgttggaggttattgaacctgaagtgttatatgcaggatatgatagctctgttccagactcaacttggaggatcatgactacgctcaacatgttaggagggcggcaagtgattgcagcagtgaaatgggcaaaggcaataccaggtttcaggaacttacacctggatgaccaaatgaccctactgcagtactcctggatgtttcttatggcatttgctctggggtggagatcatatagacaatcaagtgcaaacctgctgtgttttgctcctgatctgattattaatgagcagagaatgactctaccctgcatgtacgaccaatgtaaacacatgctgtatgtttcctctgagttacacaggcttcaggtatcttatgaagagtatctctgtatgaaaaccttactgcttctctcttcagttcctaaggacggtctgaagagccaagagctatttgatgaaattagaatgacctacatcaaagagctaggaaaagccattgtcaagagggaaggaaactccagccagaactggcagcggttttatcaactgacaaaactcttggattctatgcatgaagtggttgaaaatctccttaactattgcttccaaacatttttggataagaccatgagtattgaattccccgagatgttagctgaaatcatcaccaatcagataccaaaatattcaaatggaaatatcaaaaaacttctgtttcatcaaaagtgcccaactttcttgtacaaagtggttgatatcggtaagcctatccctaaccctctcctcggtctcgattctacgtagtaatgaactagtccgtaacttgaaagtatttcgatttcttggctttatatatcttgtggaaaggacgactcagccacgccaaaacgtattaa

SEQ ID NO: 3523 - DNA, 1329 bp, Homo sapiens
  source 1..1329: mol_type = genomic DNA
atcgattgatcaacaagtttgtacaaaaaagttggcatgtccgcctcggcccctgctgcggagggggagggaacccccacccagcccgcgtccgagaaagaacccgaaatgcccggtcccagagaggagagcgaggaggaagaggacgaggacgacgaggaggaggaggaggaggaaaaagaaaagagtctcatcgtggaaggcaagagggaaaagaaaaaagtagagaggttgacaatgcaagtctcttccttacagagagagccatttacaattgcacaaggaaaggggcagaaactttgtgaaattgagaggatacatttttttctaagtaagaagaaaaccgatgaacttagaaatctacacaaactgctttacaacaggccaggcactgtgtcctcattaaagaagaatgtgggtcagttcagtggctttccatttgaaaaaggaagtgtccaatataaaaagaaggaagaaatgttgaaaaaatttagaaatgccatgttaaagagcatctgtgaggttcttgatttggagagatcaggtgtaaatagtgaactagtgaagaggatcttgaatttcttaatgcatccaaagccttctggcaaaccattgccgaaatctaaaaaaacttgtagcaaaggcagtaaaaaggaacggaacagttctggaatggcaaggaaggctaagcgaaccaaatgtcctgaaattctgtcagatgaatctagtagtgatgaagatgaaaagaaaaacaaggaagagtcttcagatgatgaagataaagaaagtgaagaggagccaccaaaaaagacagccaaaagagaaaaacctaaacagaaagctacttctaaaagtaaaaaatctgtgaaaagtgccaatgttaagaaagcagatagcagcaccaccaagaagaatcaaaacagttccaaaaaagaaagtgagtctgaggatagttcagatgatgaacctttaattaaaaagttgaagaaaccccctacagatgaagagttaaaggaaacaataaagaaattactggccagtgctaacttggaagaagtcacaatgaaacagatttgcaaaaaggtctatgaaaattatcctacttatgatttaactgaaagaaaagatttcataaaaacaactgtaaaagagctaatttcgcccaacttccttgtacaaagtggttgatatcggtaagcctatccctaaccctctcctcggtctcgattctacgtagtaatgaactagtccgtaacttgaaagtatttcgatttcttggctttatatatcttgtggaaaggacgagttctacctatcggaggattcagc

SEQ ID NO: 3524 - DNA, 1889 bp, Homo sapiens
  source 1..1889: mol_type = genomic DNA
atcgattgatcaacaagtttgtacaaaaaagttggcatgatcacatcccagggatcagtgtcgtttagggatgtgactgtgggcttcactcaagaggagtggcagcatctggaccctgctcagaggaccctgtacagggatgtgatgctggagaactacagccaccttgtctcagtagggtattgcattcctaaaccagaagtgattctcaagttggagaaaggcgaggagccatggatattagaggaaaaatttccaagccagagtcatctggaattaattaataccagtagaaactattcaataatgaagttcaatgagtttaacaaaggtggaaaatgtttctgtgatgaaaagcatgaaataattcattctgaagaggaaccttctgaatataataaaaatgggaacagcttctggctgaatgaagacctcatttggcatcagaaaattaaaaattgggaacaatcttttgaatacaatgaatgtgggaaagctttccctgagaattcactcttccttgtacataagagaggttacacaggacagaaaacctgcaaatatactgaacatgggaaaacctgtgatatgtcatttttcatcactcatcagcaaacacatccaagagaaaaccactatggtaatgaatgtggagaaaatatctttgaggaatccattctccttgaacatcagagtgtttacccattcagccagaagttaaatctcactccaattcagagaacccactcaattaacaatattattgaatataatgagtgtggaacatttttcagtgaaaaattagtccttcatttacaacagagaacacatacaggagaaaaaccttatgaatgtcatgaatgtggaaaaaccttcacccagaagtcagcccacacaagacatcagagaacacacacagggggaaaaccctatgaatgtcatgaatgtgggaagaccttctataagaattcagacctcattaaacatcaaagaattcatacaggggagagaccttatggatgtcatgaatgtgggaaatccttcagtgaaaagtcaacccttactcaacatcaaagaacgcacacaggggagaaaccatatgaatgtcatgaatgtgggaaaaccttctcatttaagtcagtccttactgtgcatcagaaaacacacacaggggagaagccctatgaatgctatgcatgtgggaaagcctttctcagaaaatcagacctcattaaacatcaaagaatacacacaggtgaaaaaccttatgaatgtaatgaatgtgggaagtcattctctgagaagtcaacccttactaaacatctaagaactcacacaggtgagaaaccttatgaatgtattcagtgtggaaaatttttctgctactactccggtttcacagaacatctgagaagacacacaggggagaaaccttttggatgtaatgaatgtgggaaaaccttccgtcagaagtcggccctaattgttcaccagagaactcatataagacagaaaccctatggatgtaatcaatgtggaaaatcattctgtgtgaagtcaaaactcattgcacatcatagaacacacacaggggagaaaccctatgaatgtaatgtttgtggaaaatcattctatgttaagtcaaaactaactgtacatcagagaatacacttggggagaaaccctataaatgtagtaaacgagggaaattactctgggtgcccaactttcttgtacaaagtggttgatatcggtaagcctatccctaaccctctcctcggtctcgattctacgtagtaatgaactagtccgtaacttgaaagtatttcgatttcttggctttatatatcttgtggaaaggacgaccgctccctgaaggtccctatccc

SEQ ID NO: 3525 - DNA, 3467 bp, Homo sapiens
  source 1..3467: mol_type = genomic DNA
atcgattgatcaacaagtttgtacaaaaaagttggcatgtcggacagcgaggacagcaacttttccgaggaggaggacagcgagcgcagcagtgacggcgaggaggccgaggtagacgaagagcggcggagtgcagcgggcagtgagaaagaagaagagcctgaggacgaagaggaggaggaagaggaggaggaatatgatgaggaagaggaagaagaagatgatgaccgaccccccaagaaaccccgccatggaggcttcattctggacgaggctgatgttgacgatgagtatgaggacgaggaccagtgggaggatggagcagaggacattctagagaaagaagagattgaagcctccaatatcgataatgttgtcctggatgaagatcgttctggggctcgccgcctgcaaaacctctggagggaccagcgagaagaagaactgggcgagtattacatgaagaaatacgccaagtcatctgtgggagagacggtgtatggaggatctgatgagctctcagacgacatcacccagcagcagctgctcccaggagtcaaggatcccaatctgtggactgtcaaatgtaagattggggaggaacgggccacggccatttccttgatgcgcaagttcattgcctaccagttcacagacacgcccctgcagatcaagtcagtagtggcaccagagcatgtgaagggctacatctacgtggaggcctacaagcagacccacgtgaagcaggccattgagggggtgggcaacctgcggcttggctactggaaccagcagatggtgcccatcaaggagatgacagacgtgctcaaagtggtgaaggaggtggccaacctgaaaccaaagtcctgggtccgcctcaagcggggcatctacaaggatgacattgctcaggtggactacgtggagcccagccagaacaccatctccctgaagatgatcccacgcatcgactacgatcgcatcaaggcccgcatgagcttgaaagactggtttgccaaaaggaagaagtttaagcggcctccacagaggctgtttgatgctgagaagatcaggtccctggggggtgatgttgcctctgatggtgacttcctcatctttgaggggaaccgttacagccggaagggctttctgttcaagagcttcgccatgtctgctgtgatcacggagggtgtgaagccaacactctctgagctggaaaagtttgaggaccagccagagggcattgacctggaggtggtgactgagagcacagggaaggagcgggagcacaacttccaacctggggacaacgtggaggtctgtgagggtgagctcatcaacctgcagggcaagatcctcagcgtggatggcaacaagatcaccatcatgcccaagcatgaggacctcaaggacatgttggagttcccagcccaggaacttagaaaatacttcaagatgggggaccacgtgaaggtgattgctggccgattcgagggcgacacaggcctcattgtgcgggtggaggagaatttcgttatcctgttctctgacctcaccatgcatgagctgaaggtgctcccccgggacctgcagctctgctcagagacagcatcaggtgtggatgttgggggccagcatgaatggggcgagctggtgcagctggatccccagactgtgggtgtcatcgtgcgactagaacgggagaccttccaggtgctgaacatgtacgggaaggtggtgactgtcagacatcaggctgtgacccggaagaaggacaaccgctttgctgtggccttggactcagagcagaacaacatccatgtgaaagacatcgttaaggtcattgatggcccccactcaggccgagaaggggagattcgccatctcttccgaagcttcgccttcctacattgcaagaaactggtggagaacgggggcatgtttgtctgcaagacccgccacctggtgctggctgggggctcaaagccccgtgatgtgaccaacttcaccgtgggtggctttgcgcctatgagtccccggatcagcagccccatgcaccccagtgctggaggtcagcgtggcggctttggtagcccaggtggcggcagtggtggcatgagcaggggccggggccggagggacaacgaactcatcggccagaccgtgcgcatctcccaggggccctacaaaggctacatcggtgtggtgaaagatgccacagagtccacggcccgtgtggagctgcactccacctgccagaccatctctgtggaccgtcagcggctcaccacggtgggctcacggcgcccgggcggcatgacctcgacctatgggaggacgcccatgtatggctcccagacgcccatgtatggctctggctcccgaacacccatgtacggctcacagacacccctccaggatggtagccgcaccccacactacggctcacagacgcccctgcatgatggcagccgcactcctgcccagagtggggcctgggaccccaacaaccccaacacgccgtcacgggctgaggaagaatatgagtatgctttcgatgatgagcccaccccgtccccgcaggcctatgggggaacccccaatccccaaacacctggctacccagacccctcgtccccacaggtcaacccacaatacaacccgcagacgccagggacgccggccatgtacaacacagaccagttctctccctatgctgccccctccccacaaggttcctaccagcccagccccagcccccagagctaccaccaggtggcgccaagcccagcaggctaccagaatacccactccccagccagctaccaccctacaccgtcgcccatggcctatcaggctagccccagcccgagccccgttggctacagtcctatgacacctggagctccctcccctggtggctacaacccacacacgccaggctcaggcatcgagcagaactccagcgactgggtaaccactgacattcaggtgaaggtgcgggacacctacctggatacacaggtggtgggacagacaggtgtcatccgcagtgtcacggggggcatgtgctctgtgtacctgaaggacagtgagaaggttgtcagcatttccagtgagcacctggagcctatcacccccaccaagaacaacaaggtgaaagtgatcctgggcgaggatcgggaagccacgggcgtcctactgagcattgatggtgaggatggcattgtccgtatggaccttgatgagcagctcaagatcctcaacctccgcttcctggggaagctcctggaagcctgcccaactttcttgtacaaagtggttgatatcggtaagcctatccctaaccctctcctcggtctcgattctacgtagtaatgaactagtccgtaacttgaaagtatttcgatttcttggctttatatatcttgtggaaaggacgacttctgccctcgcccgttaaggca

SEQ ID NO: 3526 - DNA, 2069 bp, Homo sapiens
  source 1..2069: mol_type = genomic DNA
atcgattgatcaacaagtttgtacaaaaaagttggcatggagtttcccggaggaaatgacaattacctgacgatcacagggccttcgcaccccttcctgtcaggggccgagacattccatacaccaagcttgggtgatgaggaatttgaaatcccacctatctccttggattctgatccctcattggctgtctcagatgtggttggccactttgatgacctggcagacccttcctcttcacaggatggcagtttttcagcccagtatggggtccagacattggacatgcctgtgggcatgacccatggcttgatggagcagggcggggggctcctgagtgggggcttgaccatggacttggaccactctataggaactcagtatagtgccaacccacctgttacaattgatgtaccaatgacagacatgacatctggcttgatggggcatagccagttgaccaccattgatcagtcagaactgagttcccagctgggtttgagcctagggggtggcaccatcctgccacctgcccagtcacctgaagatcgtctttcaaccaccccttcacctactagttcacttcacgaggatggtgttgaggatttccggaggcaacttcccagccagaagacagtcgtggtggaagcagggaaaaagcagaaggccccaaagaagagaaaaaagaaagatcctaatgaacctcagaaaccagtttcagcatatgctttattctttcgtgatacacaggctgccatcaagggacagaatcctaatgccacttttggtgaggtttcaaaaattgtggcctccatgtgggatagtcttggagaggagcaaaaacaggtatataagaggaaaactgaggctgccaagaaagagtatctgaaggcactggctgcttacaaagacaaccaggagtgtcaggccactgtggaaacagtggaattggatccagcaccaccatcacaaactccttctccacctcctatggctactgttgacccagcatctccagcaccagcttcaatagagccccctgccctgtccccatccattgttgttaactccaccctctcatcctatgtggcaaaccaggcatcttctggagctgggggtcagcccaatatcaccaagttgattattaccaaacaaatgttgccctcttctattactatgtctcaaggagggatggttactgttatcccagccacagtggtgacctcccgagggctccaactaggccaaaccagtacagctactatccagcccagtcaacaagcccagattgtcactcggtcagtgttgcaggcagcagcagctgctgctgctgctgcttctatgcaactgcctccaccccgactacagccccctccattacaacagatgccacagcccccgactcagcagcaagttaccattctgcagcagcctcctccactccaggccatgcaacagcctccacctcagaaagttcgaatcaatttacagcaacagcctcctcctctgcagatcaagagtgtgcctctacccactttgaaaatgcagactaccttagtcccaccaactgtggaaagtagtcctgagcggcctatgaacaacagccctgaggcccatacagtggaggcaccttctcctgagactatctgtgagatgatcacagatgtagttcctgaggttgagtctccttctcagatggatgttgaattggtgagtgggtctcctgtggcactctcaccccagcctcgatgtgtgaggtctggttgtgagaaccctcccattgtgagtaaggactgggacaatgaatactgcagcaatgagtgtgtggtgaagcactgcagggatgtattcttggcctgggtagcctctagaaattcaaacacagtggtgtttgtgaaatacccaactttcttgtacaaagtggttgatatcggtaagcctatccctaaccctctcctcggtctcgattctacgtagtaatgaactagtccgtaacttgaaagtatttcgatttcttggctttatatatcttgtggaaaggacgactaaaagcttgagacccagttatg

SEQ ID NO: 3527 - DNA, 2351 bp, Homo sapiens
  source 1..2351: mol_type = genomic DNA
atcgattgatcaacaagtttgtacaaaaaagttggcaccatgaacacattgcaggggccagtgtcattcaaagatgtggctgtggatttcacccaggaggagtggcagcagctggaccctgatgagaagataacttacagggatgtgatgttggagaactatagccatctagtttctgtgggatatgataccaccaagccaaacgtcatcattaagttggagcagggagaggagccgtggataatgggaggtgaatttccatgtcaacatagtccagaagcctggagagttgatgacctgatagagagaatccaagaaaacgaagacaaacattcaaggcaagctgcttgtatcaatagcaaaaccctgactgaagagaaagagaatacatttagtcaaatttacatggaaacaagccttgttccttcaagcataatagctcataattgtgtctcatgtggaaagaatttagaatctatttcgcaattaattagtagtgatggaagctatgctaggacaaaacctgatgagtgtaatgaatgtgggaaaacatatcatggagagaaaatgtgtgaatttaatcaaaatggggatacctattctcacaatgaagaaaatattcttcagaaaattagtattttggagaaaccctttgaatataatgaatgcatggaagccttagacaatgaggctgtttttattgctcataagagagcttacataggggagaagccctatgagtggaatgattctggaccagacttcatacagatgtcaaattttaatgcatatcagagatcacaaatggaaatgaagccctttgaatgcagtgaatgtggaaaatccttctgtaaaaagtcaaaattcatcatccaccagagggctcacacaggagagaaaccttatgaatgtaatgtatgtgggaaatccttcagccaaaagggaaccctcactgtacatcggagatcacacttagaggagaagccctataaatgtaatgaatgtgggaaaaccttttgtcagaagttacacctcactcaacacctaagaactcattcaggagagaaaccctacgaatgtagcgaatgtgggaaaaccttctgccaaaagacacatctcaccctgcaccagaggaatcattcaggagagaggccctatccatgtaacgaatgtgggaaatccttctcccgcaagtctgctctcagtgaccatcagagaactcacacaggagagaagctttataaatgtaatgaatgtgggaaatcctactaccgaaagtctactctgattacacatcagagaacacacacaggagagaagccctatcagtgtagcgagtgtgggaaattcttttctcgggtgtcatacctcactatacattatagaagtcatttagaagagaaaccctatgaatgtaatgaatgtggcaaaaccttcaatttaaattcagccttcattagacatcggaaagtacacacagaagagaaatcccatgaatgtagtgaatgtggaaagttctctcagttgtatctcaccgaccatcatacagctcatttagaagagaaaccctatgaatgtaatgaatgtgggaaaaccttccttgtaaattcagccttcgatgggcaccagccacttccaaaaggggagaaatcctatgaatgtaatgtatgtggaaagttattcaatgagttgtcatactatactgaacattatagaagtcattcagaagagaaaccttatggatgtagcgaatgtgggaaaaccttttcccataattcatccctcttcagacatcaaagagtacacacaggcgagaaaccctatgaatgttacgaatgtggaaaattcttctctcagaaatcatatctcactatacatcatcgaattcattcaggagagaaaccctatgaatgtagtaaatgtggaaaagtcttctctcggatgtcaaacctcactgtccactacagaagccattcaggagagaaaccctatgaatgtaatgaatgtgggaaagtcttttctcagaagtcatacctcactgtacactatagaactcattcaggagagaaaccctatgaatgtaatgagtgtgggaaaaaattccaccacagatcagccttcaatagccatcagagaattcatagaagaggaaatatgaatgtacttgatgtggaaaatctcttgccaactttcttgtacaaagtggttgatatcggtaagcctatccctaaccctctcctcggtctcgattctacgtagtaatgaactagtccgtaacttgaaagtatttcgatttcttggctttatatatcttgtggaaaggacgactctgttgagccccagagcaggaa

SEQ ID NO: 3528 - DNA, 1517 bp, Homo sapiens
  source 1..1517: mol_type = genomic DNA
atcgattgatcaacaagtttgtacaaaaaagttggcaccatggaacctgacgactttgattctgaagacaaagagatattaagctgggatattaatgatgtgaaactgccacagaacgtgaaaaaaaccgactggttccaggagtggccagattcctatgccaaacacatctacagctcggaggacaagaatgcgcagcggcacctgagcagctgggccatgcgcaataccaacaaccacaactcccgcatcctcaagaagtcctgcctgggtgtggtggtgtgcggccgcgactgtctcgcagaggaggggcgcaagatctacctgagacctgccatctgtgacaaggcccggcagaagcagcagcggaaacgctgtcccaactgtgacgggcctctgaagctcatcccttgccgaggtcatgggggcttcccggtcaccaacttctggaggcacgacggacgctttatatttttccagtcaaagggagagcatgatcatccaaaaccagaaaccaagttagaagctgaggcaagaagagccatgaagaaagtgaacacagcaccttcctccgtctcattgagcctgaaggggagcacagagaccaggtctcttccaggtgaaacacaaagtcaggggagtttacctttaacttggtctttccaggaaggcgtccaattgcctggtagttacagtggacatttaatagctaacactcctcagcagaactcactaaatgattgcttttccttctccaagagttatggtctgggaggaatcacagatctgactgaccagacttccactgtggaccccatgaagctctatgaaaagcgcaaattgtccagtagcagaacctacagtagtggagacctgcttcctccttctgcctccggagtctactctgatcatggcgatctacaagcgtggagtaaaaatgctgctttggggagaaatcatcttgctgacaactgttattccaattatccttttcctctgaccagctggccttgcagcttctctccttcccaaaactcttcagaacccttttaccagcagcttccattggagccacctgcagccaaaactggctgtcccccattatggccaaatccagcgggtaatctttatgaagagaaagtacatgtggattttaacagctacgtccagtctcctgcataccattcacctcaagaagacccctttctcttcacctacgcctctcatcctcatcagcaatattcactgccaagcaagagcagcaaatgggattttgaggaagaaatgacatacttgggtttggatcactgcaacaatgatatgcttctgaacctgtgtcctttgagattgccaactttcttgtacaaagtggttgatatcggtaagcctatccctaaccctctcctcggtctcgattctacgtagtaatgaactagtccgtaacttgaaagtatttcgatttcttggctttatatatcttgtggaaaggacgaattcgagtttatctaagttactta

SEQ ID NO: 3529 - DNA, 1058 bp, Homo sapiens
  source 1..1058: mol_type = genomic DNA
atcgattgatcaacaagtttgtacaaaaaagttggcaccatgagctccttcgacctgccggcgccctccccacctcgctgcagcccccagttccccagcatcggccaggagccccccgagatgaacctctactatgagaacttcttccacccacagggcgtgcccagccctcagcggccctccttcgaggggggcggcgagtatggggccacccccaacccctacctctggttcaacgggcccaccatgaccccgccaccctacctgcccggccccaacgccagccccttcctgccccaggcctatggagtgcagaggccgctgctgcccagcgtgtcggggcttggggggagcgacctgggctggctgcccatcccctcgcaggaggagctgatgaagctggtgcggccaccctattcctactcggctctcatcgccatggccatccacggggcacccgacaagcgcctcactctcagccagatctaccagtacgtggccgacaacttccccttctacaacaagagcaaggccggctggcagaactccatccgccacaacctgtcgctcaacgactgcttcaagaaggtgccccgcgacgaggacgacccggcctatgtgagcggggggagccccacgagccaccccttggtcacaccaggactgagccctgagcccagtgacaagacggggcagaactcactgaccttcaactccttctccccgctcaccaacctcagcaaccacagcggtgggggtgactgggcgaaccccatgcccaccaacatgctcagctacggaggatctgtgctcagccaattcagccctcacttctacaacagtgtcaacaccagtggtgtcctctaccccagggagggcaccgaggtcttgccaactttcttgtacaaagtggttgatatcggtaagcctatccctaaccctctcctcggtctcgattctacgtagtaatgaactagtccgtaacttgaaagtatttcgatttcttggctttatatatcttgtggaaaggacgagtgacctcactatactgcggcaat

SEQ ID NO: 3530 - DNA, 1046 bp, Homo sapiens
  source 1..1046: mol_type = genomic DNA
atcgattgatcaacaagtttgtacaaaaaagttggcaccatgttgagtcctgccaacggggagcagctccacctggtgaactatgtggaggactacctggactccatcgagtccctgcctttcgacttgcagagaaatgtctcgctgatgcgggagatcgacgcgaaataccaagagatcctgaaggagctagacgagtgctacgagcgcttcagtcgcgagacagacggggcgcagaagcggcggatgctgcactgtgtgcagcgcgcgctgatccgcagccaggagctgggcgacgagaagatccagatcgtgagccagatggtggagctggtggagaaccgcacgcggcaggtggacagccacgtggagctgttcgaggcgcagcaggagctgggcgacacagcgggcaacagcggcaaggctggcgcggacaggcccaaaggcgaggcggcagcgcaggctgacaagcccaacagcaagcgctcacggcggcagcgcaacaacgagaaccgtgagaacgcgtccagcaaccacgaccacgacgacggcgcctcgggcacacccaaggagaagaaggccaagacctccaagaagaagaagcgctccaaggccaaggcggagcgagaggcgtcccctgccgacctccccatcgaccccaacgaacccacgtactgtctgtgcaaccaggtctcctatggggagatgatcggctgcgacaacgacgagtgccccatcgagtggttccacttctcgtgcgtggggctcaatcataaacccaagggcaagtggtactgtcccaagtgccggggggagaacgagaagaccatggacaaagccctggagaaatccaaaaaagagagggcttacaacaggttgccaactttcttgtacaaagtggttgatatcggtaagcctatccctaaccctctcctcggtctcgattctacgtagtaatgaactagtccgtaacttgaaagtatttcgatttcttggctttatatatcttgtggaaaggacgagtatctaactcttttttgaattcg

SEQ ID NO: 3531 - DNA, 1133 bp, Homo sapiens
  source 1..1133: mol_type = genomic DNA
atcgattgatcaacaagtttgtacaaaaaagttggcatggacgatcagggttgccctcggtgtaagaccaccaaatatcggaacccctccttgaagctgatggtgaatgtgtgcggacacactctctgtgaaagttgtgtagatttactgtttgtgagaggagctggaaactgccctgagtgtggtactccactcagaaagagcaacttcagggtacaactctttgaagatcccactgttgacaaggaggttgagatcaggaaaaaagtgctaaagatatacaataaaagggaagaagattttcctagtctaagagaatacaatgatttcttggaagaagtggaagaaattgttttcaacttgaccaacaatgtggatttggacaacaccaaaaagaaaatggagatataccaaaaggaaaacaaagatgttattcagaaaaataaattaaagctgactcgagaacaggaagaactggaagaagctttagaagtggaacgacaggaaaatgaacaaagaagattatttatacaaaaagaagaacaactgcagcagattctaaaaaggaagaataagcaggcttttttagatgagctggagagttctgatctccctgttgctctgcttttggctcagcataaagatagatctacccaattagaaatgcaacttgagaaacccaaacctgtaaaaccagtgacgttttccacaggcatcaaaatgggtcaacatatttcactggcacctattcacaagcttgaagaagctctgtatgaataccagccactgcagatagagacatatggaccacatgttcctgagcttgagatgctaggaagacttgggtatttaaaccatgtcagagctgcctcaccacaggaccttgctggaggctatacttcttctcttgcttgtcacagagcactacaggatgcattcagtgggcttttctggcagcccagttacccaactttcttgtacaaagtggttgatatcggtaagcctatccctaaccctctcctcggtctcgattctacgtagtaatgaactagtccgtaacttgaaagtatttcgatttcttggctttatatatcttgtggaaaggacgaaagcggaacgtctccgggccggcg

SEQ ID NO: 3532 - DNA, 1169 bp, Homo sapiens
  source 1..1169: mol_type = genomic DNA
atcgattgatcaacaagtttgtacaaaaaagttggcatggctgcagggtggctgacaacctggtcacagaactcagtaaccttccaggaagtggcagtggacttttcccaggaggagtgggcattgctggaccctgctcaaaaaaatctatacaaagatgtgatgctggagaactttaggaacctggcctcagtagggtatcagctctgcagacacagtctgatctccaaggtggatcaagaacagctgaagacagatgaaagaggaattttacaaggtgactgtgcagactgggaaactcaacttaaaccaaaagatacaattgctatgcagaacattcctgggggaaaaacatccaatggcataaacacgaactgtgtcagaactcactctggagagatgccctatgaatgcagtgactgtgggaaagccttcatttttcagtcttcccttaagaaacacatgagatctcatactggagagaagccttatgagtgtgatcactgtggaaaatcctttagccagagctctcatctgaatgtgcacaaaagaactcacactggagagaaaccctatgactgtaaggaatgtgggaaggctttcactgttccttcatcccttcagaaacatgtgagaacccacactggagagaaaccctatgaatgcagtgactgtggaaaagccttcatcgatcagtcatcccttaagaaacacacacgctctcacactggagagaagccttatgagtgtaaccagtgtggaaagtccttcagcacaggctcttaccttattgtgcacaagagaactcacactggtgagaaaacctatgagtgtaaagaatgtgggaaggcctttaggaattcctcttgcctgagggtacacgtgagaactcacactggagagaagccttataaatgtattcagtgtgaaaaagcctttagcacaagcactaaccttataatgcacaagcgaatccacaatggccagaaactccatgaatgcccaactttcttgtacaaagtggttgatatcggtaagcctatccctaaccctctcctcggtctcgattctacgtagtaatgaactagtccgtaacttgaaagtatttcgatttcttggctttatatatcttgtggaaaggacgaaaggccatttatgttgagaagcct

SEQ ID NO: 3533 - DNA, 2561 bp, Homo sapiens
  source 1..2561: mol_type = genomic DNA
atcgattgatcaacaagtttgtacaaaaaagttggcaccatgagcgatcagaagaaggaggaggaggaggaggcggcagcggcagcggcgatggctacagaaggagggaaaacctctgagccagagaataacaataaaaaacccaaaacctcaggctcccaggactctcagccctctcctctggctttactggcagctacttgcagcaaaatagggactcctggtgaaaatcaagcaactggacaacaacaaattattatagatccaagtcaaggattggtgcaacttcaaaatcaaccacaacagctagaactggtaacaacgcaacttgctggaaacgcttggcaacttgttgcctccactcctcctgcttcaaaagagaataacgtttctcaaccagcctctagttcgtctagttcttccagcagtaataacgggagtgcatctcctacaaaaactaaatcaggtaattcttccacccctggtcaatttcaagtcatacaagtacaaaatccaagtggtagtgtacagtaccaagtaattccacaacttcagacagtggaaggtcaacaaattcaaatcaatccaactagtagttcatctctacaggatttgcagggtcaaattcagctcatttctgcaggtaataatcaagctatactcacagctgctaacaggacagcttctgggaatattcttgctcaaaacctggcaaatcagacagttccggtccaaattagacctggtgtttcaataccactgcagttacagactcttcctggtactcaggctcaagttgtaacaaccctaccaattaacattggaggagtgactctagctttgccagtgataaacaacgtggctgccggaggagggactgggcaggttggccagcctgctgctactgctgatagtgggacttccaatgggaatcaattagtttccacacccaccaacaccactacttctgccagtactatgccagaatctccctcctcctccactacctgcacaaccactgcttcaacgtctttgacaagcagtgacacattagtgagctcagcagatactggccagtatgcaagcacatcagccagtagttctgaacgcaccattgaagaatctcaaacacctgctgctactgagtctgaagcccagagctccagtcagcttcagcctaatggaatgcagaatgcacaggatcaatcaaattctcttcagcaggtgcaaattgtaggccaacctatcttacagcagatccagatccaacagcctcagcaacagatcattcaggctattccaccacagtcgtttcaactccagtcagggcagacgattcagaccatccagcagcagcctttacagaatgttcaacttcaagcagtaaatccgactcaggtgcttatcagggctccaactttaacaccttcagggcaaatcagttggcaaactgtacaggttcagaatattcagagtctttcaaatttgcaagttcagaatgctgggttatcccaacaattaaccatcaccccagtgtcttcaagtggtggcacaactcttgctcagattgctcctgtggctgttgctggtgccccaataactttgaatactgcccagcttgcatcagtgcctaaccttcagacagtgagcgttgccaacctgggtgctgcaggtgttcaagtgcagggagttcccgttacaatcactagtgttgcaggtcagcagcaaggacaagatggagtaaaagtccagcaagctactatagctcctgtaactgtagcagttggaggaattgctaatgccacgataggtgctgttagtcctgaccaactcacacaagtgcatttgcagcaaggccagcagacttctgatcaagaggtacaacctggcaagaggcttcgaagagttgcctgttcctgtcctaattgtagggaaggagaaggaagaggcagtaatgaaccaggaaaaaagaagcagcatatctgtcatattgaaggatgtggtaaagtttatggcaaaacatctcatttacgagcacatcttcgctggcatactggagaaagaccttttatatgcaactggatgttttgtggcaaaagattcacacggagtgatgagctccagagacatagaagaacccatacaggtgaaaagagatttgaatgcccggaatgttctaaaaggtttatgcggagtgatcatctctccaaacatgtcaaaacgcaccagaataaaaaaggtggtgggacagctcttgccattgttacctcgggagaactggactcatctgttacagaggtgcttggctccccaagaattgtcacagttgcagccatttctcaagattcgaatccagcaactcccaatgtttcaaccaacatggaagaattcttgccaactttcttgtacaaagtggttgatatcggtaagcctatccctaaccctctcctcggtctcgattctacgtagtaatgaactagtccgtaacttgaaagtatttcgatttcttggctttatatatcttgtggaaaggacgacaaaatcacacaatagctgtaact

SEQ ID NO: 3534 - DNA, 962 bp, Homo sapiens
  source 1..962: mol_type = genomic DNA
atcgattgatcaacaagtttgtacaaaaaagttggcatgcggggccagggccgcaaggagagtttgtccgattcccgagacctggacggctcctacgaccagctcacgggccaccctccagggcccactaaaaaagcgctgaagcagcgattcctcaagctgctgccgtgctgcgggccccaagccctgccctcagtcagtgaaaacagcgtggacgatgaatttgaattgtccaccgtgtgtcaccggcctgagggtctggagcagctgcaggagcaaaccaaattcacgcgcaaggagttgcaggtcctgtaccggggcttcaagaacgaatgtcccagcggaattgtcaatgaggagaacttcaagcagatttactcccagttctttcctcaaggagactccagcacctatgccacttttctcttcaatgcctttgacaccaaccatgatggctcggtcagttttgaggactttgtggctggtttgtccgtgattcttcggggaactgtagatgacaggcttaattgggccttcaacctgtatgaccttaacaaggacggctgcatcaccaaggaggaaatgcttgacatcatgaagtccatctatgacatgatgggcaagtacacgtaccctgcactccgggaggaggccccaagggaacacgtggagagcttcttccagaagatggacagaaacaaggatggtgtggtgaccattgaggaattcattgagtcttgtcaaaaggatgagaacatcatgaggtccatgcagctctttgacaatgtcatctacccaactttcttgtacaaagtggttgatatcggtaagcctatccctaaccctctcctcggtctcgattctacgtagtaatgaactagtccgtaacttgaaagtatttcgatttcttggctttatatatcttgtggaaaggacgatccacaccaaatttcaataggcgc

SEQ ID NO: 3535 - DNA, 815 bp, Homo sapiens
  source 1..815: mol_type = genomic DNA
atcgattgatcaacaagtttgtacaaaaaagttggcaccatggctactctgatctatgttgataaggaaaatggagaaccaggcacccgtgtggttgctaaggatgggctgaagctggggtctggaccttcaatcaaagccttagatgggagatctcaagtttcaacaccacgttttggcaaaacgttcgatgccccaccagccttacctaaagctactagaaaggctttgggaactgtcaacagagctacagaaaagtctgtaaagaccaagggacccctcaaacaaaaacagccaagcttttctgccaaaaagatgactgagaagactgttaaagcaaaaagctctgttcctgcctcagatgatgcctatccagaaatagaaaaattctttcccttcaatcctctagactttgagagttttgacctgcctgaagagcaccagattgcgcacctccccttgagtggagtgcctctcatgatccttgacgaggagagagagcttgaaaagctgtttcagctgggccccccttcacctgtgaagatgccctctccaccatgggaatccaatctgttgcagtctccttcaagcattctgtcgaccctggatgttgaattgccacctgtttgctgtgacatagatattttgccaactttcttgtacaaagtggttgatatcggtaagcctatccctaaccctctcctcggtctcgattctacgtagtaatgaactagtccgtaacttgaaagtatttcgatttcttggctttatatatcttgtggaaaggacgagtaattagttacctcccgagtgac

SEQ ID NO: 3536 - DNA, 2555 bp, Homo sapiens
  source 1..2555: mol_type = genomic DNA
atcgattgatcaacaagtttgtacaaaaaagttggcaccatggcggagccgcctcggctacctctgacttttgaggatgttgctatttatttctccgagcaagaatggcaggatctagaggcatggcagaaggaactttacaagcatgtgatgagaagcaattatgagactctcgtctctctagatgatggacttccaaaaccagaactaatatcctggattgaacacgggggagagcccttcaggaaatggagagaatcacagaaatcaggaaacataatttgctcctctgttgatatgcattttgatccaggttttgaggaacagctgttttggggaagccagcaggctatgaattcaggaaaaactaaaagccatttccaattagatcctgaaagccagtgttcctttggatcctttgtttccttcaggcctgaccaaggcatcaccctcgggagcccacagagacacgacgccagggctcctccaccactagcctgcggccccagtgaatctaccctaaaagaaggaatcccaggtcccagaaatctggatcttcctggtttgtgggacgtccccgcctgggagagcacccagcacccttggcctgtctgcggggaaagctgttgggagaacaaccatttagtaatgcaccagagaggccactcaaaggaccggacacgtagggcctgggagaaattcaacaagagggcggagacgcagatgccgtggagcagccctcgggtacagaggcacttccggtgtggcgtgtgcggtaagagcttccgccggaagctgtgtctgctgcgccatctggcggcccacacggggaggggccccttccggaacgctgacggtgaaatgtgcttccgacacgagctgacccatcccagccaccgcctcccgcagcagggggagaagcctgcccagtgcaccccatgcggcaagcgctccctcccagtggacagcacgcaggctcgccggtgccagcacagccgggaggggccggcctcttggagagaaggccgcggggcctccagcagtgtgcactcgggacagaaaccaggctcgcgcctgccccaggaggggaacagccaccaggaaggggacacggaggcgctgcagcatggcgcagaggggccctgctcctgctcggagtgtggcgagcgctcccctatgagcgccaggctcgccagcccctgcagggcgcatactggagaaaagcccttccagtgtgcgcattgcaccaagcgcttccgcctgcgccgcctgctgcaggtccaccagcacgcgcacggtggggagagaccgttctcctgcaggaagtgtggcaagggcttcgccaagcagtgtaaactcacggagcacattcgagtccacagcggagagaagcctttccggtgtgccaagtgtggcaggaacttccgtcagaggggacagctgctgcggcaccagcggctgcacacggacgagaagccctttcagtgcccagagtgtgggctgagcttccgcctggagagcatgctgagagcccaccggctccggcacggtggggagaggccgttctcctgtagcgagtgtggcagaggcttcacccaccagtgcaagctccgtgagcacctgagagtgcacagcggggagaggcccttccagtgcctgaagtgcgacaagcgcttccgcctgaagggcatcctgaaggcccaccagcacacgcacagcaaggagaggccgttctcgtgcggggagtgtggcaagggcttcaccagacaatccaagctcacggagcacttgcgcgtgcacagcggggagagacccttccagtgcccagagtgcaacaggagcttccgcctgaaggggcagctgctcagccatcagcgcctgcacacgggagagaggcccttccagtgtccggagtgcgacaagcgctatcgcgtgaaggccgacatgaaggcccaccagctgctgcacagcggggagatgcctttctcctgtgagtgcggcaagggctttgtgaaacactcaaagctcatcgagcacatcagaacgcacacgggagagaagccttttcagtgtcccaagtgtgacaagagtttccgcctgaaggcgcagctgctcagccatcagggcctgcacacaggggagaggccttttcactgccctgagtgtgacaagaacttccgggaaaggggacacatgctgaggcaccagcgcatccacaggcccgagaggccctttgcctgtggcgattgtgggaagggcttcatttacaagtctaagcttgcggagcacatcagagtacacacaaaatcctgtcctgctccaaatgaactggacattaagaaaaggctcagccaactgtttgcaatgatagaggccgattggagtttgccaactttcttgtacaaagtggttgatatcggtaagcctatccctaaccctctcctcggtctcgattctacgtagtaatgaactagtccgtaacttgaaagtatttcgatttcttggctttatatatcttgtggaaaggacgattagtgcatctcgaataataacgt

SEQ ID NO: 3537 - DNA, 515 bp, Homo sapiens
  source 1..515: mol_type = genomic DNA
atcgattgatcaacaagtttgtacaaaaaagttggcatggcccattacaaagccgccgactcgaagcgtgagcagttccggaggtacttggagaagtcgggggtgctggacacgctgaccaaggtgttggtagccttatatgaagaaccagagaaacctaacagtgctttggattttttaaagcatcacttaggagctgctactccagaaaatccagaaatagagctgcttcgcctagaactggccgaaatgaaagagaagtatgaagctattgtagaagaaaataaaaaactgaaagcaaagcttgctcagtatgaaccacctcaggaggagaagcgtgctgaatacccaactttcttgtacaaagtggttgatatcggtaagcctatccctaaccctctcctcggtctcgattctacgtagtaatgaactagtccgtaacttgaaagtatttcgatttcttggctttatatatcttgtggaaaggacgaatctaaaatccatcacgacctctt

SEQ ID NO: 3538 - DNA, 2246 bp, Homo sapiens
  source 1..2246: mol_type = genomic DNA
atcgattgatcaacaagtttgtacaaaaaagttggcatgaattttgaaacttcacggtgtgccaccctacagtactgccctgacccttacatccagcgtttcgtagaaaccccagctcatttctcttggaaagaaagttattaccgatccaccatgtcccagagcacacagacaaatgaattcctcagtccagaggttttccagcatatctgggattttctggaacagcctatatgttcagttcagcccattgacttgaactttgtggatgaaccatcagaagatggtgcgacaaacaagattgagattagcatggactgtatccgcatgcaggactcggacctgagtgaccccatgtggccacagtacacgaacctggggctcctgaacagcatggaccagcagattcagaacggctcctcgtccaccagtccctataacacagaccacgcgcagaacagcgtcacggcgccctcgccctacgcacagcccagctccaccttcgatgctctctctccatcacccgccatcccctccaacaccgactacccaggcccgcacagtttcgacgtgtccttccagcagtcgagcaccgccaagtcggccacctggacgtattccactgaactgaagaaactctactgccaaattgcaaagacatgccccatccagatcaaggtgatgaccccacctcctcagggagctgttatccgcgccatgcctgtctacaaaaaagctgagcacgtcacggaggtggtgaagcggtgccccaaccatgagctgagccgtgaattcaacgagggacagattgcccctcctagtcatttgattcgagtagaggggaacagccatgcccagtatgtagaagatcccatcacaggaagacagagtgtgctggtaccttatgagccaccccaggttggcactgaattcacgacagtcttgtacaatttcatgtgtaacagcagttgtgttggagggatgaaccgccgtccaattttaatcattgttactctggaaaccagagatgggcaagtcctgggccgacgctgctttgaggcccggatctgtgcttgcccaggaagagacaggaaggcggatgaagatagcatcagaaagcagcaagtttcggacagtacaaagaacggtgatggtacgaagcgcccgtttcgtcagaacacacatggtatccagatgacatccatcaagaaacgaagatccccagatgatgaactgttatacttaccagtgaggggccgtgagacttatgaaatgctgttgaagatcaaagagtccctggaactcatgcagtaccttcctcagcacacaattgaaacgtacaggcaacagcaacagcagcagcaccagcacttacttcagaaacagacctcaatacagtctccatcttcatatggtaacagctccccacctctgaacaaaatgaacagcatgaacaagctgccttctgtgagccagcttatcaaccctcagcagcgcaacgccctcactcctacaaccattcctgatggcatgggagccaacattcccatgatgggcacccacatgccaatggctggagacatgaatggactcagccccacccaggcactccctcccccactctccatgccatccacctcccactgcacacccccacctccgtatcccacagattgcagcattgtcagtttcttagcgaggttgggctgttcatcatgtctggactatttcacgacccaggggctgaccaccatctatcagattgagcattactccatggatgatctggcaagtctgaaaatccctgagcaatttcgacatgcgatctggaagggcatcctggaccaccggcagctccacgaattctcctccccttctcatctcctgcggaccccaagcagtgcctctacagtcagtgtgggctccagtgagacccggggtgagcgtgttattgatgctgtgcgattcaccctccgccagaccatctctttcccaccccgagatgagtggaatgacttcaactttgacatggatgctcgccgcaataagcaacagcgcatcaaagaggagggggagtgcccaactttcttgtacaaagtggttgatatcggtaagcctatccctaaccctctcctcggtctcgattctacgtagtaatgaactagtccgtaacttgaaagtatttcgatttcttggctttatatatcttgtggaaaggacgagtgctgaacaccgtcgatatccgg

SEQ ID NO: 3539 - DNA, 1325 bp, Homo sapiens
  source 1..1325: mol_type = genomic DNA
atcgattgatcaacaagtttgtacaaaaaagttggcatgcccaacgacgaggcattcagcaagccctctacaccgtcggaagcccctcacgcccccggggtaccgccgcagggcagagccgggggctttggcaaagcgtctggggcgctagtgggggcggccagcggctcgagcgccgggggcagcagcagaggaggcggctccggctccggggcgtcggacctgggtgccgggagcaagaagtccccgcggctgcccaagtgcgcacgctgcaggaaccacggctacgcctcgccgctcaagggccacaagcgcttctgcatgtggcgcgactgccagtgcaagaagtgcaacctgatcgccgagaggcagcgcgtgatggccgcgcaggtggccctgagaaggcagcaggcccaggaggaggaattgggtatcagccaccccatcccactgcccagtgcggccgagctgcttgtcaaaagagagaacaatggcagtaacccgtgcctcatgactgagtgcagtggcacctctcagccaccgccggccagtgtccccaccactgcagcttcagagggacgtatggtcatccaggatattcctgctgtcaccagcagagggcatgtggagaacacacctgacctggtttcagactccacctactacagcagcttctaccagccgtctctgtttccttattacaacaatctatacaactgcccgcagtactccatggccttggctgctgattctgcttctggggaggtgggaaatcccctcgggggatcccctgtgaagaacagccttcggggcctccccggaccttatgtgcctggtcagacaggaaaccagtggcagatgaagaacatggagaaccgccatgcaatgagctcccagtacaggatgcattcttactacccgcctccctcttacctgggccagagcgtgccccagttcttcacttttgaggatgctccctcttacccggaagccagggcgagcgtattctcgccgcccagcagtcaagattctggcttggtttccctctcgagcagctctcctattagtaacaagagcacaaaggcagtgcttgaatgtgagcctgcgtcggagcccagcagcttcacagtcactcccgtcatcgaggaggacgagtgcccaactttcttgtacaaagtggttgatatcggtaagcctatccctaaccctctcctcggtctcgattctacgtagtaatgaactagtccgtaacttgaaagtatttcgatttcttggctttatatatcttgtggaaaggacgactgcccgatttttgccaaacaagc

SEQ ID NO: 3540 - DNA, 1490 bp, Homo sapiens
  source 1..1490: mol_type = genomic DNA
atcgattgatcaacaagtttgtacaaaaaagttggcatggacccatctgtgacgctgtggcagtttctgctgcagctgctgagagagcaaggcaatggccacatcatctcctggacttcacgggatggtggtgaattcaagctggtggatgcagaggaggtggcccggctgtgggggctacgcaagaacaagaccaacatgaattacgacaagctcagccgggccttgcggtactactatgacaagaacatcatccgcaaggtgagcggccagaagttcgtctacaagtttgtgtcctaccctgaggtcgcagggtgctccactgaggactgcccgccccagccagaggtgtctgttacctccaccatgccaaatgtggcccctgctgctatacatgccgccccaggggacactgtctctggaaagccaggcacacccaagggtgcaggaatggcaggcccaggcggtttggcacgcagcagccggaacgagtacatgcgctcgggcctctattccaccttcaccatccagtctctgcagccgcagccaccccctcatcctcggcctgctgtggtgctccccagtgcagctcctgcaggggcagcagcgcccccctcggggagcaggagcaccagtccaagccccttggaggcctgtctggaggctgaagaggccggcttgcctctgcaggtcatcctgaccccgcccgaggccccaaacctgaaatcggaagagcttaatgtggagccgggtttgggccgggctttgcccccagaagtgaaagtagaagggcccaaggaagagttggaagttgcgggggagagagggtttgtgccagaaaccaccaaggccgagccagaagtccctccacaggagggcgtgccagcccggctgcccgcggttgttatggacaccgcagggcaggcgggcggccatgcggcttccagccctgagatctcccagccgcagaagggccggaagccccgggacctagagcttccactcagcccgagcctgctaggtgggccgggacccgaacggaccccaggatcgggaagtggctccggcctccaggctccggggccggcgctgaccccatccctgcttcctacgcatacattgaccccggtgctgctgacacccagctcgctgcctcctagcattcacttctggagcaccctgagtcccattgcgccccgtagcccggccaagctctccttccagtttccatccagtggcagcgcccaggtgcacatcccttctatcagcgtggatggcctctcgacccccgtggtgctctccccagggccccagaagccatgcccaactttcttgtacaaagtggttgatatcggtaagcctatccctaaccctctcctcggtctcgattctacgtagtaatgaactagtccgtaacttgaaagtatttcgatttcttggctttatatatcttgtggaaaggacgaacatacctataactgctacctcat

SEQ ID NO: 3541 - DNA, 2441 bp, Homo sapiens
  source 1..2441: mol_type = genomic DNA
atcgattgatcaacaagtttgtacaaaaaagttggcaccatgcagaaggaaatgaagatgatcaaagacgaggatgtgcatttcgacttggctgtgaagaagaccccctcctttccccactgcctgcagccagtggcttctcggggaaaggctccccaaagacaccccttcccggaagctctccgagggccattttcccagtttcggtatgaacctcccccaggagacctagatgggttccccggggtcttcgaaggagcagggtctaggaaacggaagagcatgcccacaaagatgccctataaccaccctgcagaagaagtcaccctcgccctccactcagaggagaacaaaaaccacggccttcccaacctccctttgctgttcccgcagcccccgcgccccaagtatgactctcagatgatcgacctgtgcaacgtgggcttccaattctaccgcagcctggaacactttgggggcaagcccgtcaagcaggaacccattaagcccagcgccgtgtggccccagccaacgcccactccattcctgcccacgccctacccctactaccccaaagtccacccgggcctcatgttccccttcttcgtgccctcgtcctcgcccttccccttcagccggcacaccttcctgcccaagcagcccccggaacctctgctgccccggaaagccgagccccaggagagcgaggagaccaagcagaaggtggagagggtggacgtgaacgtgcagatcgatgacagctactacgtggacgtgggcggctcgcagaagcgctggcagtgccccacctgcgagaagtcctacacctccaagtacaacctggtcacccacatcctgggccacagtgggatcaagccgcacgcgtgcacgcactgcgggaagctcttcaagcagctcagccacctgcatacccacatgctgacccaccagggcacgcggccccacaagtgccaggtgtgccacaaggccttcacccagaccagccacctgaagcgccacatgatgcagcacagcgaggtgaagccgcacaactgccgcgtgtgcggccgcggctttgcctaccccagcgagctcaaggcccacgaagccaagcacgccagtgggcgcgagaacatctgtgtggagtgcggcctcgacttccccaccttggcccagctgaagagacacctcaccacgcaccggggccccatccagtacaactgctccgagtgcgacaagaccttccagtacccgagccagctgcagaaccacatgatgaagcacaaggacatccggccctacatctgctcagagtgtggcatggagtttgtgcagccgcaccacctcaagcagcactccctcacccacaagggtgtgaaggagcataagtgtgggatttgtgggcgggagttcaccctgctggccaacatgaagcgacacgtgctgatccacaccaacatccgcgcctaccagtgtcacctctgctacaagagcttcgtgcagaagcagaccctcaaggcacacatgatcgtccactctgacgtgaagcctttcaaatgcaagctttgtgggaaggaattcaaccggatgcacaacctgatgggccacatgcacctgcactcagacagcaaacccttcaagtgcctctattgcccaagcaaattcaccctgaaggggaacctgacacgccacatgaaagtcaagcatggagtcatggagcggggccttcattcccaaggtctgggaagggggagaatcgccctggcacagacagccggtgtcctgaggagtctggagcaggaggagccctttgacctctctcagaagcgccgggccaaggtgccggtgttccagtcagacggggagagtgcccagggcagccactgccacgaggaggaagaggaggataactgctacgaggtggagccctacagccctggcctggccccccagagccagcagctctgcacacccgaggatctgtccaccaagtcggagcacgcccccgaggtgctggaggaagcctgcaaggaggagaaggaggatgcatccaagggagaatgggagaagaggagcaagggtgaccttggggcagagggcggccaggagagagactgtgccggcagagatgagtgtctcagtctcagggcttttcagagtacccggcggggcccctctttttctgattacttatacttcaagcacagagatgagagtttgaaagaattactggagaggaaaatggaaaaacaagcagtgcttttaggtatcttgccaactttcttgtacaaagtggttgatatcggtaagcctatccctaaccctctcctcggtctcgattctacgtagtaatgaactagtccgtaacttgaaagtatttcgatttcttggctttatatatcttgtggaaaggacgactgtcgataagcgcggcatgaacc

SEQ ID NO: 3542 - DNA, 1895 bp, Homo sapiens
  source 1..1895: mol_type = genomic DNA
atcgattgatcaacaagtttgtacaaaaaagttggcaccatggcggcggcgtggatggctccggcgcaggagtctgtgaccttcgaggatgtggctgtgacatttacccaggaggagtgggggcagttggacgtgacccagagggccttgtacgtggaggtgatgctggagacctgtgggcttctggtcgcactgggtgacagcacaaaacctgagaccgtagagcctatcccttctcatctggccttgcctgaggaagtctcactccaggaacagctggcacagggagtcccaagatactcctatttggggcaggccatggatcaagatgggccatctgaaatgcaggaatactttttgagaccagggacagacccacagagtgagaaactccatgggaaaatgagccttgaacacgaaggtttggcgacagctgatggtatttgttcaatgatgatacagaaccaagtctcaccagaagatgctctctatggatttgactcatatggaccagttacagattccttgattcatgaaggggaaaattcctataaattcgaggaaatgtttaatgagaattgcttccttgttcagcatgagcagattctccctcgtgtgaagccctatgattgcccagaatgtgggaaagccttcggcaagagcaaacacctccttcagcatcacatcatccatactggggagaagccctataaatgcctggagtgtgggaaagacttcaaccgcaggtcacacctcacacggcaccagcggactcacaatggagataagccctttgtgtgcagtgaatgtggaaggaccttcaatcgcgggtcgcaccttacacggcaccagcgggttcacagtggagagaagccttttgtgtgcaatgaatgtggaaaggcctttacctaccgctccaattttgtcttgcataacaagagccacaatgagaagaaacccttcgcatgcagcgaatgtggaaaaggcttttatgagagtacagccctcattcaacacttcattatccatactggggagaggccctttaagtgccttgagtgtgggaaggccttcaactgcaggtcacacctcaagcagcatgagcggattcacactggtgagaagccctttgtgtgcagtcaatgtggaaaggccttcactcactattccacctatgtcctgcatgaaagagcccacactggagaaaagccttttgagtgcaaagaatgtgggaaagcctttagcattcgaaaagacctcattcgacacttcaacatccacactggagagaagccctatgagtgtttacagtgtggaaaggcttttacccgcatgtcagggctcacaaggcaccagtggattcatactggagagaagccgtatgtatgcatccaatgtgggaaagccttttgtcggaccacaaacctgattcgacactttagcatccacactggagagaagccctatgaatgcgtggagtgcgggaaggccttcaaccgcaggtcacccctcacaaggcaccagcggattcacactgcagagaagtcccacgaacccatccagagtgggaacgtttcttgtgagagcacagatctcattcaacactccatcatccacactgagagtagcccagtgagtgcagtgaatatggaaacgccttcaattgccgctcattcctcctcactcgacatcaacggattcatagtggaagaaaccctaccattgttgccaactttcttgtacaaagtggttgatatcggtaagcctatccctaaccctctcctcggtctcgattctacgtagtaatgaactagtccgtaacttgaaagtatttcgatttcttggctttatatatcttgtggaaaggacgagccgatatattggtttaagtgcgg

SEQ ID NO: 3543 - DNA, 1457 bp, Homo sapiens
  source 1..1457: mol_type = genomic DNA
atcgattgatcaacaagtttgtacaaaaaagttggcatgggccggcgccgggcgccagagctgtaccgggctccgttcccgttgtacgcgcttcaggtcgaccccagcactgggctgctcatcgctgcgggcggaggaggcgccgccaagacaggcataaagaatggcgtgcactttctgcagctagagctgattaatgggcgcttgagtgcctccttgctgcactcccatgacacagagacacgggccaccatgaacttggcactggctggtgacatccttgctgcagggcaggatgcccactgtcagctcctgcgcttccaggcacatcaacagcagggcaacaaggcagagaaggccggttccaaggagcaggggcctcgacaaaggaagggagcagccccagcagagaagaaatgtggagcggaaacccagcacgaggggctagaactcagggtagagaatttgcaggcggtgcagacagactttagctccgatccactgcagaaagttgtgtgcttcaaccacgataataccctgcttgccactggaggaacagatggctacgtccgtgtctggaaggtgcccagcctggagaaggttctggagttcaaagcccacgaaggggagattgaagacctggctttagggcctgatggcaagttggtaaccgtgggccgggaccttaaggcctctgtgtggcagaaggatcagctggtgacacagctgcactggcaagaaaatggacccaccttttccagcacaccttaccgctaccaggcctgcaggtttgggcaggttccagaccagcctgctggcctgcgactcttcacagtgcaaattccccacaagcgcctgcgccagccccctccctgctacctcacagcctgggatggctccaacttcttgccccttcggaccaagtcctgtggccatgaagtcgtctcctgcctcgatgtcagtgaatccggcaccttcctaggcctgggcacagtcactggctctgttgccatctacatagctttctctctccagtgcctctactacgtgagggaggcccatggcattgtggtgacggatgtggcctttctacctgagaagggtcgtggtccagagctccttgggtcccatgaaactgccctgttctctgtggctgtggacagtcgttgccagctgcatctgttgccctcacggcggagtgttcctgtgtggctcctgctcctgctgtgtgtcgggcttattattgtgaccatcctgctgctccagagtgcctttccaggtttcctttacccaactttcttgtacaaagtggttgatatcggtaagcctatccctaaccctctcctcggtctcgattctacgtagtaatgaactagtccgtaacttgaaagtatttcgatttcttggctttatatatcttgtggaaaggacgacttgccaccagacgttgaatcatc

SEQ ID NO: 3544 - DNA, 2050 bp, Homo sapiens
  source 1..2050: mol_type = genomic DNA
atcgattgatcaacaagtttgtacaaaaaagttggcatggcggagcgggcgctagagcccgaggcggaggcggaggctgaggcgggcgcgggcggggaggcagcagccgaggagggcgcagcgggccgaaaggcgcggggccggccgcgactcacggagtcggaccgggcccggcgacggctcgagtcccggaagaagtacgacgtgcggcgcgtgtacctgggcgaggcgcacgggccctgggtggacctgcggcgccgcagcggctggagcgacgccaagctcgccgcctacctcatctctctggagcgcggccagcggagcggccgccacgggaagccttgggagcaggtccccaaaaagccaaagcggaagaaaaggcggcgacgcaacgtgaactgcctgaagaacgtggtgatctggtacgaggaccacaagcaccgctgcccgtacgagccgcacctggcggagctagaccccacttttggcctgtacaccacggccgtgtggcagtgcgaagctggccaccgctacttccaggacctgcattcgcccctgaagcccctcagcgactcagaccctgacagtgacaaagtgggcaatgggctggtggctggcagctctgactcatccagctctggctctgcctctgactctgaggagtctcctgagggccagccggtcaaggctgcggcagcggcagcggcagcgacgcccaccagcccggtgggcagcagcgggctcatcactcaggagggcgtgcacattccctttgacgtccaccacgtggaaagcctggccgagcagggtaccccgctgtgctccaacccagcaggcaatgggcctgaagccctggagacagtggtgtgcgtgccggtgcctgtgcaagtgggtgcgggccccagcgccctctttgagaacgtgccccaggaggccctgggtgaggtggtggccagctgccccatgccaggcatggtgcccggctcacaggtgatcatcattgcgggccctggttacgacgctctcacggccgagggcattcacctcaacatggcagcaggcagcggtgtccccggcagtggactgggcgaggaggtgccctgtgccatgatggagggtgtggcagcctacacccagacagagcccgagggtagccagcctagcaccatggacgccaccgcagtagcaggcatcgagaccaagaaagagaaggaggacctgtgcttgctaaagaaggaggagaaggaggagccagtagccccggagctggcaacaacggtgcctgagagcgcagagcctgaggcagaggcggacggggaggagctggacggcagcgacatgtcagccatcatctatgaaatccccaaggagcctgagaagaggcggcggagcaagcggtcgcgggtgatggatgctgacggcctgctcgagatgttccactgcccatacgagggctgcagccaagtctacgtggccctcagcagcttccagaaccacgtcaatcttgtgcatcggaaaggaaagaccaaagtgtgccctcatcctggctgtggcaagaagttctatttatccaaccacctgcggcggcacatgatcatccattcaggtgtccgtgaattcacctgcgagacctgcggcaagtccttcaagaggaagaaccacctggaggtacatcggcgcacccacaccggcgagacccccctgcagtgcgagatctgtggctaccagtgccggcagcgcgcgtcgctcaactggcacatgaagaagcacactgcggaggtgcagtacaacttcacgtgcgatcgctgcgggaagcgcttcgagaagctggacagcgtcaagttccacacgctcaaaagccacccggatcacaagcccacctgcccaactttcttgtacaaagtggttgatatcggtaagcctatccctaaccctctcctcggtctcgattctacgtagtaatgaactagtccgtaacttgaaatatttcgatttcttggctttatatatcttgtggaaaggacgagtatgtgtgggcgctcacgcaacg

SEQ ID NO: 3545 - DNA, 1829 bp, Homo sapiens
  source 1..1829: mol_type = genomic DNA
atcgattgatcaacaagtttgtacaaaaaagttggcatgccccgaaggaagcaaagccacccgcagcccgtgaaatgcgagggggtcaaagtggatactgaagactccctcgacgaaggacccggggccctggtattggagagtgatttgctactaggccaggatctggagtttgaggaggaagaggaagaggaggaaggcgacggcaacagtgaccagctcatgggcttcgagagagactcggaaggagactctctgggggccaggcctgggcttccctatgggctgagcgacgatgagtctgggggcggccgggcactaagtgcggagagtgaagttgaggagccagccaggggtccaggggaggccaggggtgagaggccaggcccagcctgccagctgtgtggggggccgacaggtgaggggccgtgttgtggggcaggagggccgggtggggggcccctgctgcccccacggctactgtactcatgccgcctctgcaccttcgtgtcccactactcgagccacctgaagcggcacatgcagacacacagcggagagaagccgttccgctgtggccgctgcccctacgcctcagcccagctcgtcaacctgacacgacatacccgcacccacactggcgagaagccctaccgctgtccccactgcccctttgcctgcagcagcctgggcaacctgaggcggcatcagcgtacccacgcagggccccccactcctccctgcccgacctgtggcttccgctgctgtactccacgaccagcccggcctcccagtcccacagagcaggagggggcggtgccccggcgacctgaagatgctctgctccttccagatttgagcctccatgtgccaccaggtggtgccagtttcctgccagactgtgggcagctgcggggtgaaggggagggcctctgcgggactggatcagaaccactgccagagctgctattcccttggacctgccggggctgtggacaagagctggaggagggtgagggtagtcggctgggagctgccatgtgtgggcgctgcatgcgaggagaggctggagggggtgccagtggggggccccagggccccagtgacaaaggctttgcctgtagcctctgcccctttgccactcactatcccaaccacctggcccggcacatgaagacacacagtggtgagaagcccttccgctgcgcccgctgtccttatgcctctgctcatctggataacctgaaacggcaccagcgcgtccatacaggagagaagccctacaagtgccccctctgcccttatgcctgtggcaatctggccaacctcaagcgtcatggtcgcatccactctggtgacaaaccttttcggtgtagcctttgcaactacagctgcaaccagagcatgaacctcaaacgtcacatgctgcggcacacaggcgagaagcccttccgctgtgccacctgcgcctataccacgggccactgggacaactacaagcgccaccagaaggtgcatggccacggtggggcaggagggcctggtctctctgcctctgagggctgggccccacctcatagcccaccctctgttttgagctctcggggcccaccagccctggggactgctggcagccgggctgtccacacagactcatcctgcccaactttcttgtacaaagtggttgatatcggtaagcctatccctaaccctctcctcggtctcgattctacgtagtaatgaactagtccgtaacttgaaagtatttcgatttcttggctttatatatcttgtggaaaggacgactgttctcagcttgaacagatatt

SEQ ID NO: 3546 - DNA, 1868 bp, Homo sapiens
  source 1..1868: mol_type = genomic DNA
atcgattgatcaacaagtttgtacaaaaaagttggcatggcagctgctgatttgtcccatggacattatctttctggggacccagtttgccttcatgaagaaaagacaccagcaggaagaatagtggctgactgcctaacagattgttatcaggattcagtgacctttgacgatgtggctgtggacttcacccaggaggagtggactttactggactcaactcagagaagcctctacagtgacgtgatgctggagaactacaagaacctggccacagtaggaggtcagatcatcaaacccagtctaatctcttggttggaacaagaagagtcaaggacagttcagggaggagttctccaaggatgggaaatgcgacttgaaacccagtggtctatacttcagcaggactttttgaggggtcagacatccattgggatacaattggaaggaaaacacaatggaagggaactctgtgactgtgagcaatgtggagaagtcttcagtgaacactcatgccttaagacgcacgtgagaactcaaagtacagggaacactcatgactgtaatcagtatggaaaagatttccttaccctgtgtgagaaaacctctactggtgagaaactttctgagtttaatcagagtgaaaaaatcttcagcctgacaccaaatattgtataccagagaactagcacacaagaaaagtcatttgaatgtagtcactgtggaaaatccttcattaatgagtcataccttcaggcacatatgagaactcacaatggagaaaaactctacgaatggaggaattatgggccaggttttattgactctacaagcctttctgtgcttatagaaaccctcaatgcaaaaaagccctacaaatgtaaggaatgtggaaaaggctatagatacccagcctacctcagtattcacatgcgaacccacactggggagaaaccatatgaatgtaaggaatgtgggaaagccttcaattattccaactcatttcagatacatggaagaactcacactggagagaaaccctatgtatgtaaggaatgtgggaaagccttcactcagtactcgggccttagtatgcatgtacgatctcacagtggagacaagccctatgaatgtaaggaatgtgggaaatccttccttacatcctcacgccttattcaacatataagaactcacactggagagaagccttttgtatgtgttgaatgtgggaaagcctttgcagtttcctcaaatcttagtggacatttgagaactcacactgaagagaaggcctgtgagtgtaagatatgtgggaaagtatttgggtatccctcatgtcttaataatcacatgcgaacgcacagtgcccagaaaccatacacctgtaaggaatgtgggaaggcttttaactattccacccaccttaaaattcacatgcgaatccacactggagaaaaaccctatgagtgtaaacaatgtggaaaggccttcagtcattccagttcatttcaaatacatgaaaggactcacactggagagaaaccctatgaatgcaaggagtgtgggaaagccttcacgtgttccagttcctttagaattcatgaaaaaactcacacagaagagaaaccctataaatgtcagcaatgcgggaaagcttacagtcatccccgttcacttcgaagacatgaacaaattcactacccaactttcttgtacaaagtggttgatatcggtaagcctatccctaaccctctcctcggtctcgattctacgtagtaatgaactagtccgtaacttgaaagtatttcgatttcttggctttatatatcttgtggaaaggacgacgcaaacattctatcagcggacca

SEQ ID NO: 3547 - DNA, 1374 bp, Homo sapiens
  source 1..1374: mol_type = genomic DNA
atcgattgatcaacaagtttgtacaaaaaagttggcatggcatcaggcagggcacgctgcacccgaaaactccggaactgggtggtggagcaagtggagagtgggcagtttcccggagtgtgctgggatgatacagctaagaccatgttccggattccctggaaacatgcaggcaagcaggacttccgggaggaccaggatgctgccttcttcaaggcctgggcaatatttaagggaaagtataaggagggggacacaggaggtccagctgtctggaagactcgcctgcgctgtgcactcaacaagagttctgaatttaaggaggttcctgagaggggccgcatggatgttgctgagccctacaaggtgtatcagttgctgccaccaggaatcgtctctggccagccagggactcagaaagtaccatcaaagcgacagcacagttctgtgtcctctgagaggaaggaggaagaggatgccatgcagaactgcacactcagtccctctgtgctccaggactccctcaataatgaggaggagggggccagtgggggagcagtccattcagacattgggagcagcagcagcagcagcagccctgagccacaggaagttacagacacaactgaggccccctttcaaggggatcagaggtccctggagtttctgcttcctccagagccagactactcactgctgctcaccttcatctacaacgggcgcgtggtgggcgaggcccaggtgcaaagcctggattgccgccttgtggctgagccctcaggctctgagagcagcatggagcaggtgctgttccccaagcctggcccactggagcccacgcagcgcctgctgagccagcttgagaggggcatcctagtggccagcaacccccgaggcctcttcgtgcagcgcctttgccccatccccatctcctggaatgcaccccaggctccacctgggccaggcccgcatctgctgcccagcaacgagtgcgtggagctcttcagaaccgcctacttctgcagagacttggtcaggtactttcagggcctgggccccccaccgaagttccaggtaacactgaatttctgggaagagagccatggctccagccatactccacagaatcttatcacagtgaagatggagcaggcctttgcccgatacttgctggagcagactccagagcagcaggcagccattctgtccctggtgtacccaactttcttgtacaaagtggttgatatcggtaagcctatccctaaccctctcctcggtctcgattctacgtagtaatgaacttgaaagtatttcgatttcttggctttatatatcttgtggaaaggacgataagtccgagacgccggactgcca

SEQ ID NO: 3548 - DNA, 1571 bp, Homo sapiens
  source 1..1571: mol_type = genomic DNA
atcgattgatcaacaagtttgtacaaaaaagttggcatggacacagtggtctttgaagacgtggttgtggatttcacgctggaggagtgggccttgctgaatcctgctcagagaaaactctacagagatgtcatgctggagaccttcaagcacctggcctcagtagataatgaggctcagcttaaagccagtgggtctatttctcagcaggatacttctggagaaaaattatccctcaaacagaaaatagaaaagttcacaagaaagaatatatgggcctcccttttaggaaaaaattgggaagaacatagcgttaaagacaagcacaacaccaaggagagacatttgagaaatccaagggtggagagaccatgtaaaagcagtaaaggtaataaacgtggaagaaccttcagaaagactcgaaattgtaatcgtcatctgcgcaagaattgttgtactagtgtaagacggtacgaatgcagtcagtgtggaaaactcttcacccattcctcatccctgataaggcacaaaagagctcactctggacaaaaattatataaatgtaaggaatgtgggaaagccttcagtcgcccttcctacctacagacgcatgagaaaactcacagtggagagaaaccctatgcctgtcaatcttgcgggaagacatttcttcgttcccactctctcactgaacatgtaaggactcacactggagagaaaccctacgaatgtgggcagtgtgggaaaggcttcagttgtcccaaatcctttcgcgcacatgtgatgatgcacgccggagggagaccgtatgagtgcaagcactgtgggaaagccttcaggtgtcagaaatcctttcgagtccatatgatcatgcacgccggagggagaccgtatgagtgcaagcagtgtgggaaagcctactgctgggcaacatcctttcaacgacacgtgagaattcacaacggggagaaaccctataagtgtggaaaatgcgggaaagcattcggttggccctcatccttacacaaacacgcgagaacgcatgctaaaaagaaacctgtgagtgggggcagcgtgggaaagtcttccgcgaggcctcgcccctccacagatgtcaaatcacaaactagagagaaagtctataaatgtgaaacgtgtgggaaaacgtatggttggtcctcatctttacacaaacatgagagaaagcacactggggagaaacctgtaaatgcagccagtgtgggaaaaccttcaggcgggctttgctcttccaaaaatgtaagaacgcagattggacagaagcccagtaaatgcgaaaaatgtgggaaagctttcagttgtcccaaagcctttcaaggtcatgtgagaagtcacacaggaaagaaatcctgtacatctaagtacccaactttcttgtacaaagtggttgatatcggtaagcctatccctaaccctctcctcggtctcgattctacgtagtaatgaactagtccgtaacttgaaagtatttcgatttcttggctttatatatcttgtggaaaggacgagtttcaggaccacaataagccctc

SEQ ID NO: 3549 - DNA, 833 bp, Homo sapiens
  source 1..833: mol_type = genomic DNA
atcgattgatcaacaagtttgtacaaaaaagttggcatgggtaaaggagaccccaacaagccgcggggcaaaatgtcctcgtacgccttcttcgtgcagacctgccgggaagagcacaagaagaaacacccggactcttccgtcaatttcgcggaattctccaagaagtgttcggagagatggaagaccatgtctgcaaaggagaagtcgaagtttgaagatatggcaaaaagtgacaaagctcgctatgacagggagatgaaaaattacgttcctcccaaaggtgataagaaggggaagaaaaaggaccccaatgctcctaaaaggccaccatctgccttcttcctgttttgctctgaacatcgcccaaagatcaaaagtgaacaccctggcctatccattggggatactgcaaagaaattgggtgaaatgtggtctgagcagtcagccaaagataaacaaccatatgaacagaaagcagctaagctaaaggagaaatatgaaaaggatattgctgcatatcgtgccaagggcaaaagtgaagcaggaaagaagggccctggcaggccaacaggctcaaagaagaagaacgaaccagaagatgaggaggaggaggaggaagaagaagatgaagatgaggaggaagaggatgaagatgaagaatacccaactttcttgtacaaagtggttgatatcggtaagcctatccctaaccctctcctcggtctcgattctacgtagtaatgaactagtccgtaacttgaaagtatttcgatttcttggctttatatatcttgtggaaaggacgatcgtgcccacaaaacatgtaaagt

SEQ ID NO: 3550 - DNA, 929 bp, Homo sapiens
  source 1..929: mol_type = genomic DNA
atcgattgatcaacaagtttgtacaaaaaagttggcatgttgtcctctacagccatgtattcggctcctggcagagacttggggatggaaccgcacagagccgcgggccctttgcagctgcgattttcgccctacgttttcaacggaggtactatactggcaattgctggagaagattttgcaattgttgcttctgatactcgattgagtgaagggttttcaattcatacgcgggatagccccaaatgttacaaattaacagacaaaacagtcattggatgcagcggttttcatggagactgtcttacgctgacaaagattattgaagcaagactaaagatgtataagcattccaataataaggccatgactacgggggcaattgctgcaatgctgtctacaatcctgtattcaaggcgcttctttccatactatgtttacaacatcatcggtggacttgatgaagaaggaaagggggctgtatacagctttgatccagtagggtcttaccagagagactccttcaaggctggaggctcagcaagtgccatgctacagcccctgcttgacaaccaggttggttttaagaacatgcagaatgtggagcatgttccgctgtccttggacagagccatgcggctggtgaaagatgtcttcatttctgcggctgagagagatgtgtacactggggacgcactccggatctgcatagtgaccaaagagggcatcagggaggaaactgtttccttaaggaaggactgcccaactttcttgtacaaagtggttgatatcggtaagcctatccctaaccctctcctcggtctcgattctacgtagtaatgaactagtccgtaacttgaaagtatttcgatttcttggctttatatatcttgtggaaaggacgaagtgaaagaatcacccctatgaac

SEQ ID NO: 3551 - DNA, 1640 bp, Homo sapiens
  source 1..1640: mol_type = genomic DNA
atcgattgatcaacaagtttgtacaaaaaagttggcaccatggatggattttatgaccagcaagtgccttacatggtcaccaatagtcagcgtgggagaaattgtaacgagaaaccaacaaatgtcaggaaaagaaaattcattaacagagatctggctcatgattcagaagaactctttcaagatctaagtcaattacaggaaacatggcttgcagaagctcaggtacctgacaatgatgagcagtttgtaccagactatcaggctgaaagtttggcttttcatggcctgccactgaaaatcaagaaagaaccccacagtccatgttcagaaatcagctctgcctgcagtcaagaacagccctttaaattcagctatggagaaaagtgcctgtacaatgtcagtgcctatgatcagaagccacaagtgggaatgaggccctccaacccccccacaccatccagcacgccagtgtccccactgcatcatgcatctccaaactcaactcatacaccgaaacctgaccgggccttcccagctcacctccctccatcgcagtccataccagatagcagctaccccatggaccacagatttcgccgccagctttctgaaccctgtaactcctttcctcctttgccgacgatgccaagggaaggacgtcctatgtaccaacgccagatgtctgagccaaacatccccttcccaccacaaggctttaagcaggagtaccacgacccagtgtatgaacacaacaccatggttggcagtgcggccagccaaagctttccccctcctctgatgattaaacaggaacccagagattttgcatatgactcagaagtgcctagctgccactccatttatatgaggcaagaaggcttcctggctcatcccagcagaacagaaggctgtatgtttgaaaagggccccaggcagttttatgatgacacctgtgttgtcccagaaaaattcgatggagacatcaaacaagagccaggaatgtatcgggaaggacccacataccaacggcgaggatcacttcagctctggcagtttttggtagctcttctggatgacccttcaaattctcattttattgcctggactggtcgaggcatggaatttaaactgattgagcctgaagaggtggcccgacgttggggcattcagaaaaacaggccagctatgaactatgataaacttagccgttcactccgctattactatgagaaaggaattatgcaaaaggtggctggagagagatatgtctacaagtttgtgtgtgatccagaagcccttttctccatggcctttccagataatcagcgtccactgctgaagacagacatggaacgtcacatcaacgaggaggacacagtgcctctttctcactttgatgagagcatggcctacatgccggaagggggctgctgcaacccccacccctacaacgaaggctacgtgtatttgccaactttcttgtacaaagtggttgatatcggtaagcctatccctaaccctctcctcggtctcgattctacgtagtaatgaactagtccgtaacttgaaagtatttcgatttcttggctttatatatcttgtggaaaggacgacacaggttacagtggtgttcagcc

SEQ ID NO: 3552 - DNA, 3866 bp, Homo sapiens
  source 1..3866: mol_type = genomic DNA
atcgattgatcaacaagtttgtacaaaaaagttggcatgggggtggactttgatgtgaagactttctgccacaacttgcgggcgactaagccaccatacgagtgcccggtggagacctgccgaaaggtctacaagagttacagtggtattgagtaccacctgtaccactatgaccacgacaacccaccacccccacaacaaactccactccgcaagcacaagaaaaaggggcgccagtcacgcccagccaacaagcagtcacccagcccctcagaggtctcacagtcaccaggccgtgaggtgatgagctatgcacaggcccagcgcatggtggaggtggacttgcatggccgcgtccaccgcatcagcatctttgacaacctggatgtggtgtcagaggatgaggaagcccccgaggaggcccctgagaatggcagcaacaaggagaacactgagacaccagctgctactcccaagtcaggcaaacataagaacaaggagaagcgcaaggactccaaccatcatcaccaccacaatgtttctgcgagcaccactcccaagctgccagaggtggtctatcgggagctggaacaggacacccctgatgccccaccccggccaacttcctattaccggtacatcgagaagtctgcagaggagctggacgaggaagtagagtatgacatggacgaggaggactacatctggctggatatcatgaatgagcgtcggaagacagagggtgtaagtcccatcccgcaggagatctttgagtacctaatggaccgactggagaaggagtcgtactttgagagtcataataaaggcgaccctaatgcgctagtggacgaggatgctgtttgctgtatctgcaatgatggtgagtgccagaacagcaatgtcatcctcttctgtgacatgtgcaacctggccgtgcaccaggagtgctacggtgtcccctatatccctgagggccagtggctgtgccgccgttgcctgcagtcaccctctcgtgctgtggattgtgccctgtgccccaacaagggcggtgccttcaagcagacagatgacgggcgctgggcccatgtggtgtgtgccttgtggatccctgaggtctgcttcgccaacacggtcttcctagagcctattgacagcattgagcacatcccaccagctcgctggaagctcacctgctacatttgcaaacaacggggctcaggggcctgcatccagtgccacaaggccaactgttacacagctttccatgtgacatgcgcccagcaggctggcctttacatgaagatggagcctgtgcgggagacaggcgccaacggcacctctttcagtgtccgcaagacagcctactgcgacatccacacgcctccaggttcagcacgccgactgcctgccctgtcccacagcgagggtgaggaggatgaagatgaggaggaggatgagggtaagggctggagctcagagaaagtcaagaaggccaaggccaagtcccggatcaaaatgaagaaggcacggaagatcctggcagagaagcgggcagcagcacctgtggtgtcagtgccctgcatcccaccacacaggcttagtaaaatcaccaaccgcctgaccatccaaaggaagagccagttcatgcagaggctgcacagctactggacactgaagcggcagtcacggaatggggtcccattgctacgtcgcctgcagacacacctgcaatctcagaggaactgtgaccaagttgggagagattctgaggataagaactgggcccttaaagaacagctcaagtcatggcagcggctccggcatgacttggagcgagctcggctgctcgtggaattgatccgcaagcgggaaaaactcaaaagggagacgatcaaggttcagcagattgccatggagatgcagctgactcctttcctcatcctccttcgcaaaaccttggagcagctccaagagaaggacacaggcaacatcttcagcgagccggtccctctgtctgaggtaaccgaattggacgaagtacctgactacctagaccacatcaaaaagcccatggactttttcaccatgaagcagaacttggaggcttaccgctacctgaattttgatgattttgaggaggacttcaacctcatcgtcagcaactgcctcaagtataacgccaaggacaccatcttctaccgggcagcagtgcggcttcgtgagcagggtggtgctgtgctccgccaggcccggcgccaggcagaaaaaatgggcattgactttgagacgggcatgcatatcccccacagcctggctggagatgaggccacacaccacactgaagatgcagccgaggaagagcggctggtcttgctggagaaccagaagcacctgccagtggaagaacagctaaagctgcttctggagcggctggacgaagtgaatgccagcaagcagagtgtgggccgctcacggcgtgcaaagatgatcaagaaagagatgacggcactgcggcggaagcttgcccatcagcgagagacgggacgtgatggccctgagcggcatggcccctcgagccggggtagtctgacaccccacccggcagcctgtgacaaggatgggcagacagatagtgcggcagaggagagcagcagccaggagacaagcaaaggcctgggtcccaacatgtcctcaacccccgcacatgaggtgggcaggagaacctcagttctgttctccaaaaagaacccgaagacagctggaccgcccaagaggccgggccggccccccaaaaaccgggagagccagatgacccccagccacggaggcagtcctgtggggcccccccagctccccatcatgagttccctgcgtcagcgcaagcggggtaggagcccccggcccagttcgagctcagacagcgacagtgataagtccacagaagaccccccaatggacttaccagccaatggcttcagcggtggaaaccaaccagtgaagaagagtttcttggtataccgtaatgactgcagccttccccggagcagctcagactctgagtccagcagcagtagcagtagcagcgctgcttcagaccggaccagcacaacgccctcaaaacaaggccggggcaaaccctccttctctcggggcactttcccagaggacagcagtgaggatacctcaggcactgagaatgaggcctactccgtgggcactggccgcggcgtgggccacagcatggtaaggaagagtctgggccggggagctggctggctgtcagaggatgaggactccccgctggatgctctggacctcgtgtgggccaaatgccgaggctatccatcatacccagctctgatcattgatccaaagatgccccgagaaggtatgttccaccatggggttcccatccctgtgcccccactggaggtgctgaaacttggggagcagatgacccaggaagcccgagagcatctctacctcgtcctcttctttgacaacaaacgaacctggcagtggctgcccaggaccaagctggttcctctgggtgtgaaccaggacctagacaaggagaagatgctggagggccgcaagtccaacatccgcaagtcagtacagatcgcctaccacagggctctgcagcaccgcagcaaggtgcaaggcgagcagagcagtgagaccagtgatagtgattgcccaactttcttgtacaaagtggttgatatcggtaagcctatccctaaccctctcctcggtctcgattctacgtagtaatgaactagtccgtaacttgaaagtatttcgatttcttggctttatatatcttgtggaaaggacgactatgcaaatagttgcacttatta

SEQ ID NO: 3553 - DNA, 1229 bp, Homo sapiens
  source 1..1229: mol_type = genomic DNA
atcgattgatcaacaagtttgtacaaaaaagttggcatgcaggagggagaattggctatttctcctataagccctgtggcagccatgcctcccctaggcacccacgtgcaagccagatgtgaagctcaaattaacctgctgggtgaaggggggatctgcaagctgccaggaagactccgcatccagcccgcactgtggagcagggaggacgtgctgcactggctgcgctgggcagagcaggagtactctctgccatgcaccgcggagcacgggttcgagatgaacggacgcgccctctgcatcctcaccaaggacgacttccggcaccgtgcgcccagctcaggtgacgtcctgtatgagctgctccagtacatcaagacccagcggcgagccctggtgtgtggacccttttttggagggatcttcaggctgaagacgcccacccagcactctccagtccccccggaagaggtgactggcccctctcagatggacacccgaaggggccacctgctgcagccaccagacccagggcttaccagcaacttcggccacctggatgaccctggcctggcaaggtggacccctggcaaggaggagtccctcaacttatgtcactgtgcagagctcggctgcaggacccagggggtctgttccttccccgcgatgccgcaggcccccattgacggcaggatcgctgactgccgcctgctgtgggattacgtgtatcagctgctccttgatacccgatatgagccctacatcaagtgggaagacaaggacgccaagatcttccgagttgtggatccaaatgggctcgccagactctggggaaatcacaagaaccgggtgaacatgacctacgagaagatgtctcgtgccctgcgccactattataagcttaatatcattaagaaggaaccggggcagaaactcctgttcagatttctaaagactccgggaaagatggtccaggacaagcacagccacctggagccgctggagagccaggagcaggacagaatagagttcaaggacaagaggccagaaatctctccgtgcccaactttcttgtacaaagtggttgatatcggtaagcctatccctaaccctctcctcggtctcgattctacgtagtaatgaactagtccgtaacttgaaagtatttcgatttcttggctttatatatcttgtggaaaggacgatgaataaagtgcctttagtgcacg

SEQ ID NO: 3554 - DNA, 896 bp, Homo sapiens
  source 1..896: mol_type = genomic DNA
atcgattgatcaacaagtttgtacaaaaaagttggcatggacgtgttggctagttatagtatattccaggagctacaacttgtccacgacaccggctacttctcagctttaccatccctggaggagacctggcagcagacatgccttgaattggaacgctacctacagacggagccccggaggatctcagagacctttggtgaggacttggactgtttcctccacgcttcccctcccccgtgcattgaggaaagcttccgtcgcttagaccccctgctgctccccgtggaagcggccatctgtgagaagagctcggcagtggacatcttgctctctcgggacaagttgctatctgagacctgcctcagcctccagccggccagctcttctctagacagctacacagccgtcaaccaggcccagctcaacgcagtgacctcattaacgcccccatcgtcccctgagctcagccgccatctggtcaaaacctcacaaactctctctgccgtggatggcacggtgacgttgaaactggtggccaagaaggctgctctcagctccgtaaaggtgagaagccttataagtgctcatgggagggatgtgagtggcgttttgcacgaagcgatgagctcacgaggcactacaggaaacacacaggtgcaaagcccttcaaatgcaaccactgcgacaggtgtttttccaggtctgaccatcttgccctccacatgcccaactttcttgtacaaagtggttgatatcggtaagcctatccctaaccctctcctcggtctcgattctacgtagtaatgaactagtccgtaacttgaaagtatttcgatttcttggctttatatatcttgtggaaaggacgaccacttgttccccgaccccataag

SEQ ID NO: 3555 - DNA, 2270 bp, Homo sapiens
  source 1..2270: mol_type = genomic DNA
atcgattgatcaacaagtttgtacaaaaaagttggcatggacggctccttcgtccagcacagtgtgagggttctgcaggagctcaacaagcagcgggagaagggccagtactgcgacgccactctggacgtggggggcctggtgtttaaggcacactggagtgtccttgcctgctgcagtcactttttccagagcctctacggggatggctcagggggcagtgtcgtcctccctgctggcttcgctgagatctttggcctcttgttggactttttctacactggtcacctcgctctcacctcagggaaccgggatcaggtgctcctggcagccagggagttgcgagtgccagaggccgtagagctgtgccagagcttcaagcccaaaacttcagtgggacaggcagcaggtggccagagtgggctggggccccctgcctcccagaatgtgaacagccacgtcaaggagccggcaggcttggaagaagaggaagtttcgaggactctgggtctagtccccagggatcaggagcccagaggcagtcatagtcctcagaggccccagctccattccccagctcagagtgagggcccctcctccctctgtgggaaactgaagcaggccttgaagccttgtccccttgaggacaagaaacccgaggactgcaaagtgcccccaaggcccttagaggctgaaggtgcccagctgcagggcggcagtaatgagtgggaagtggtggttcaagtggaggatgatggggatggcgattacatgtctgagcctgaggctgtgctgaccaggaggaagtcaaatgtaatccgaaagccctgtgcagctgagccagccctgagcgcgggctccctagcagctgagcctgctgagaacagaaaaggtacagcggtgccggtcgaatgccccacatgtcataaaaagttcctcagcaaatattatctaaaagtccacaacaggaaacatactggggagaaaccctttgagtgtcccaaatgtgggaagtgttactttcggaaggagaacctcctggagcatgaagcccggaattgcatgaaccgctcggaacaggtcttcacgtgctctgtgtgccaggagacattccgccgaaggatggagctgcgggtgcacatggtgtctcacacaggggagatgccctacaagtgttcctcctgctcccagcagttcatgcagaagaaggacttgcagagccacatgatcaaacttcatggagcccccaagccccatgcatgccccacctgtgccaagtgcttcctgtctcggacagagctgcagctgcatgaagctttcaagcaccgtggtgagaagctgtttgtgtgtgaggagtgtgggcaccgggcctcgagccggaatggcctgcagatgcacatcaaggccaagcacaggaatgagaggccacacgtatgtgagttctgcagccacgccttcacccaaaaggccaatctcaacatgcacctgcgcacacacacgggtgagaagcccttccagtgccacctctgtggcaagaccttccgaacccaagccagcctggacaagcacaaccgcacccacaccggggaaaggcccttcagttgcgagttctgtgaacagcgcttcactgagaaggggcccctcctgaggcacgtggccagccgccatcaggagggccggccccacttctgccagatatgcggcaagaccttcaaagccgtggagcaactgcgtgtgcacgtcagacggcacaagggggtgaggaagtttgagtgcaccgagtgtggctacaagtttacccgacaggcccacctgcggaggcacatggagatccacgaccgggtagagaactacaacccgcggcagcgcaagctccgcaacctgatcatcgaggacgagaagatggtggtggtggcgctgcagccgcctgcagagctggaggtgggctcggcggaggtcattgtggagtccctggcccagggcggcctggcctcccagctccccggccagagactgtgtgcagaggagagcttcaccggcccaggtgtcctggagccctccctcatcatcacagctgctgtccccgaggactgtgacacatacccaactttcttgtacaaagtggttgatatcggtaagcctatccctaaccctctcctcggtctcgattctacgtagtaatgaactagtccgtaacttgaaagtatttcgatttcttggctttatatatcttgtggaaaggacgatgttagcaaacgtagtaaaaagtc

SEQ ID NO: 3556 - DNA, 1919 bp, Homo sapiens
  source 1..1919: mol_type = genomic DNA
atcgattgatcaacaagtttgtacaaaaaagttggcaccatgaaggagaagtccaagaatgcggccaagaccaggagggagaaggaaaatggcgagttttacgagcttgccaagctgctcccgctgccgtcggccatcacttcgcagctggacaaagcgtccatcatccgcctcaccacgagctacctgaagatgcgcgccgtcttccccgaaggtttaggagacgcgtggggacagccgagccgcgccgggcccctggacggcgtcgccaaggagctgggatcgcacttgctgcagactttggatggatttgtttttgtggtagcatctgatggcaaaatcatgtatatatccgagaccgcttctgtccatttaggcttatcccaggtggagctcacgggcaacagtatttatgaatacatccatccttctgaccacgatgagatgaccgctgtcctcacggcccaccagccgctgcaccaccacctgctccaagagtatgagatagagaggtcgttctttcttcgaatgaaatgtgtcttggcgaaaaggaacgcgggcctgacctgcagcggatacaaggtcatccactgcagtggctacttgaagatcaggcagtatatgctggacatgtccctgtacgactcctgctaccagattgtggggctggtggccgtgggccagtcgctgccacccagtgccatcaccgagatcaagctgtacagtaacatgttcatgttcagggccagccttgacctgaagctgatattcctggattccagggtgaccgaggtgacggggtacgagccgcaggacctgatcgagaagaccctataccatcacgtgcacggctgcgacgtgttccacctccgctacgcacaccacctcctgttggtgaagggccaggtcaccaccaagtactaccggctgctgtccaagcggggcggctgggtgtgggtgcagagctacgccaccgtggtgcacaacagccgctcgtcccggccccactgcatcgtgagtgtcaattatgtactcacggagattgaatacaaggaacttcagctgtccctggagcaggtgtccactgccaagtcccaggactcctggaggaccgccttgtctacctcacaagaaactaggaaattagtgaaacccaaaaataccaagatgaagacaaagctgagaacaaacccttaccccccacagcaatacagctcgttccaaatggacaaactggaatgcggccagctcggaaactggagagccagtccccctgcaagcgctgctgctcctccagaactgcagccccactcagaaagcagtgaccttctgtacacgccatcctacagcctgcccttctcctaccattacggacacttccctctggactctcacgtcttcagcagcaaaaagccaatgttgccggccaagttcgggcagccccaaggatccccttgtgaggtggcacgctttttcctgagcacactgccagccagcggtgaatgccagtggcattatgccaaccccctagtgcctagcagctcgtctccagctaaaaatcctccagagccaccggcgaacactgctaggcacagcctggtgccaagctacgaaggtgggtcaggtctgctcgtggggaaggtgggaggactgcgcacggccgggagccgaagcagccatggcggtgggtggcagatggagacagaaccctcacgctttgggcaaacttgccctctttctgcttctaagttgccaactttcttgtacaaagtggttgatatcggtaagcctatccctaaccctctcctcggtctcgattctacgtagtaatgaactagtccgtaacttgaaagtatttcgatttcttggctttatatatcttgtggaaaggacgactccgttccattcttgtagtaact

SEQ ID NO: 3557 - DNA, 557 bp, Homo sapiens
  source 1..557: mol_type = genomic DNA
atcgattgatcaacaagtttgtacaaaaaagttggcatggccctggagacggtgccgaaggacctgcggcatctgcgggcctgtttgctgtgttcgctggtcaagactatagaccagtttgaatatgatggttgtgacaattgtgatgcatatctacaaatgaagggtaaccgagagatggtatatgactgcactagctcttcctttgatggaatcattgcgatgatgagtccagaggacagctgggtctccaagtggcagcgagtcagtaactttaagccaggtgtatatgcggtgtcagtcactggtcgcctgccccaaggaatcgtgcgggagctgaaaagtcgaggagtggcctacaaatccagagacacagctataaagacctacccaactttcttgtacaaagtggttgatatcggtaagcctatccctaaccctctcctcggtctcgattctacgtagtaatgaactagtccgtaacttgaaagtatttcgatttcttggctttatatatcttgtggaaaggacgaacttacctaaagcctctccgccgc

SEQ ID NO: 3558 - DNA, 1514 bp, Homo sapiens
  source 1..1514: mol_type = genomic DNA
atcgattgatcaacaagtttgtacaaaaaagttggcatgatggctacacagacattaagtatagacagctatcaagatgggcaacagatgcaagtagtaacagagttaaagacagaacaagatccaaactgctctgaacccgatgcagaaggagtgagccctccccctgtggagtctcagaccccgatggatgtggacaagcaggccatttataggcatccactatttccattattagctttgttgtttgaaaaatgtgaacaatctacacagggctctgaaggcacaacttctgccagttttgatgtagacatcgaaaattttgtaagaaagcaagagaaggaagggaaacctttcttttgtgaagatccagaaaccgataatttaatggtaaaagcaatccaggttttgcgcattcatcttcttgagctggaaaaggttaacgaactctgcaaagatttctgcagtcgatacattgcttgtctgaaaacaaaaatgaacagtgaaactctgttgagtggagagcctggaagcccgtactcaccagtgcagtcccagcagattcaaagtgccatcacaggcaccatcagccctcagggaattgtggtgccggcgtccgcgctgcagcagggaaacgtagccatggcgacggtggcaggtggcacagtgtatcagcctgtcacggtcgtcactccccaaggccaagtggtcacacagacattgtcgcctgggacaattaggatccagaactcccagcttcagttacagttaaaccaagatctcagcatcttgcatcaagatgatggttcatctaagaacaagaggggcgtcctgccaaagcatgccacgaacgtgatgcggtcctggctcttccagcacatcgggcatccctacccaacagaggatgagaaaaaacagattgctgctcagacaaatttgacactactccaagtcaacaactggttcatcaatgccagaagacgaattcttcagccaatgttggattcaagttgttcagagacccccaaaacaaagaaaaaaactgctcagaaccggccagttcagaggttttggcctgattctattgcatcaggagtcgcacagccaccgccgagcgagctcaccatgtcggaaggagctgttgtcaccatcaccacgcccgtgaacatgaacgtggacagccttcagtctctgtcctcggacggggccaccctggcggtgcagcaggtcatgatggcagggcagagcgaggacgagtctgtggacagcacagaggaggatgcgggtgccctggcccctgcccacatcagcgggctggtcttggagaacagtgactccctgcagtacccaactttcttgtacaaagtggttgatatcggtaagcctatccctaaccctctcctcggtctcgattctacgtagtaatgaactagtccgtaacttgaaagtatttcgatttcttggctttatatatcttgtggaaaggacgaattctgagatcgggaagactgaca

SEQ ID NO: 3559 - DNA, 2693 bp, Homo sapiens
  source 1..2693: mol_type = genomic DNA
atcgattgatcaacaagtttgtacaaaaaagttggcaccatgcagaattctgtatcagtaccaccaaaagatgaaggtgaatcaaacatcccttctggaacaatacagagtaggaaaggtttgcagaataagagtcagtttaggaccattgcaccaaaaattgtgcccaaagtcctaacgtccagaatgctgccatgtcattcaccatcacgctctgatcaggtgaatctgggaccctccatcaactccaagctgctggggatgtccacccagaactatgccctgatgcaggttgctggccaggaggggacattttctcttgttgctctgccacatgttgcctcagctcagccaattcagaaacccagaatgtccctacctgaaaacctgaaacttcctattcctagatatcaaccccctagaaatagcaaagcatcaagaaagaaacccatcctgatctttcctaagagtggctgtagcaaagctcctgcccaaacccaaatgtgtcctcagatgtccccttccccacctcaccaccctgaactcctgtacaaacccagtccatttgaggaagtaccatcactagagcaagccccagccagcattagcacagctgcgctgaccaatggaagtgaccatggggacttgagaccaccagtgaccaacacccatggcagtctgaaccctcctgctaccccagcatcatccacaccagaggagcctgccaagcaggacctcacagctctttcagggaaagcacactttgtaagcaagataacatctagtaaaccttctgctgttgccagtgaaaaatttaaagaacaagttgatcttgcaaaaaccatgaccaatttatcaccaaccattcttggcaatgcagttcagttgatctcttcagtccccaaagggaaactgccaatcccaccctactcaagaatgaagacaatggaggtttacaaaatcaaatcagatgctaacattgcaggtttttctttaccaggacctaaggccgactgtgataagataccctccaccacagaaggctttaatgcagccaccaaggtggcaagcaggctacctgttccacaagtgtcacagcagagtgcctgtgaaagtgccttttgtccacccaccaaacttgatcttaaccacaaaacaaaactgaacagtggagcagcaaagagaaaaggaagaaaacggaaggtaccagatgaaattttggcatttcagggaaaaaggaggaaatatatcattaataagtgtagagatggtaaagaaagagtaaaaaatgatccccaagaattcagagaccaaaagctggggaccctgaaaaaataccgtagcattatgcccaaacctatcatggtcatacccactttggcctccctggcttctccaactacactacagtcccagatgcttgggggcctaggacaggatgttttgttaaataattcactcactcctaaatatcttggctgtaagcaagacaacagctcttcccctaagcccagctccgtgttcagaaatggattctctggcattaagaagccttggcacagatgtcacgtctgcaaccaccacttccagttcaaacagcaccttcgagaccacatgaatacacacaccaacagacgcccttacagttgtcggatttgtcgcaagtcctatgtacgtcctggcagcctgagcacacacatgaaacttcatcatggtgagaaccgtctgaagaaactcatgtgttgtgagttttgtgcaaaagtgtttggccacatccgagtctattttggccatctgaaagaagtgcatagggttgtgatcagcactgagcctgcgcccagtgaactgcagccaggagacataccaaagaacagagacatgagtgtgcgaggcatggagggatcattggagagggaaaacaagtccaacctggaagaagacttccttctaaaccaggcagacgaagtcaaattacaaatcaaatgtggtcgttgtcagattactgctcagtcttttgcggaaataaaatttcatttacttgatgttcatggagaggaaattgagggcaggctacaagaagggaccttcccaggaagcaaggggactcaggaagagttggtgcagcacgctagccccgactggaaaaggcatcctgagagagggaagccggagaaggttcattcctcctccgaggaatcacatgcatgtccaagactgaaaaggcagctccaccttcatcagaatggcgtggaaatgctcatggaaaatgaaggaccccagtcaggaaccaacaagccaagggaaacctgccagggccctgagtgtcctggcctccacacgtttctcttgtggtcccattcaggctttaactgcctgctttgtgcagagatgctgggacggaaagaggacctcctccaccactggaagcaccagcataactgtgaggacccttccaaactgtgggctattttaaatacggtctccaaccagggagtgatcgaactttccagtgaagctgagaaattgccaactttcttgtacaaagtggttgatatcggtaagcctatccctaaccctctcctcggtctcgattctacgtagtaatgaactagtccgtaacttgaaagtatttcgatttcttggctttatatatcttgtggaaaggacgagatccatgtggtaggcttagggcc

SEQ ID NO: 3560 - DNA, 440 bp, Homo sapiens
  source 1..440: mol_type = genomic DNA
atcgattgatcaacaagtttgtacaaaaaagttggcaccatgggactgttgacatttagggatgtggccatagaattctctctggaggagtggcagtgcctggacactgcacagaagaatttatataggaatgtgatgttagagaactacagaaacctggccttcctgggtattgctgtctctaagccagacctcatcatctgtcttgagaaagaaaaagagccctggaatatgaagcgagatgagatggtggatgaacccccaggtaggttgccaactttcttgtacaaagtggttgatatcggtaagcctatccctaaccctctcctcggtctcgattctacgtagtaatgaactagtccgtaacttgaaagtatttcgatttcttggctttatatatcttgtggaaaggacgaattcgcagcgagtttgtccgccgc

SEQ ID NO: 3561 - DNA, 1373 bp, Homo sapiens
  source 1..1373: mol_type = genomic DNA
atcgattgatcaacaagtttgtacaaaaaagttggcatggattcagtgtcatttgaagatgtggctgtggcctttactcaggaggagtgggctttgctggatccttctcaaaagaatctctacagagatgtgatgcaagaaatcttcaggaacctggcttctgtaggaaacaaatcagaagaccagaatatccaagatgacttcaaaaatcctgggagaaatctaagcagtcatgtggtagagagactgtttgaaattaaagaaggcagtcaatatggagaaaccttcagccaggattcaaatttgaatctgaataagaaagtttctactggagtaaagccatgtgaatgcagtgtgtgtggaaaagtcttcatatgtcattcagcccttcataggcacatcctgtctcacattggaaacaaactatttgagtgtgaggaatgtccagagaagttatatcattgcaaacaatgtgggaaagcctttatctctctcaccagtgttgacagacacatggtaacacacactagtaatgggccttataagggtccagtgtatgagaagccttttgattttcctagtgtatttcaaatgcctcagagcacttacactggagagaaaacatataaatgtaaacattgtgataaagccttcaattattcaagttatcttcgtgaacatgaaagaactcatactggagagaaaccctatgcatgtaagaaatgtggtaaatcattcactttttccagttctcttcgccaacatgaaagatctcatactggagagaaaccctatgaatgtaaggaatgtggcaaagccttcagtcgttccacttacttgggaatacatgaaagaacgcatactggagaaaaaccctatgaatgtataaaatgtggcaaagcctttagatgttccagagtcctcagagtccatgaaaggactcacagtggagaaaagccctatgaatgtaaacaatgtggtaaagccttcaaatattctagtaacctatgtgagcatgaaagaactcacactggagtgaaaccttatggatgtaaggaatgtggtaagtcgtttacttcttccagtgcccttcgaagccatgaaaggactcatactggagaaaaaccctatgaatgtaagaaatgtggtaaagccttcagttgttccagttcccttcgaaagcatgaaagagcttatatgtggtacccaactttcttgtacaaagtggttgatatcggtaagcctatccctaaccctctcctcggtctcgattctacgtagtaatgaactagtccgtaacttgaaagtatttcgatttcttggctttatatatcttgtggaaaggacgaatgcgcacagctccgacgcatcgc

SEQ ID NO: 3562 - DNA, 3431 bp, Homo sapiens
  source 1..3431: mol_type = genomic DNA
atcgattgatcaacaagtttgtacaaaaaagttggcatgactactgcaaactgtggcgcccacgacgagctcgacttcaaactcgtctttggcgaggacggggcgccggcgccgccgcccccgggctcgcggcctgcagatcttgagccagatgattgtgcatccatttacatctttaatgtagatccacctccatctactttaaccacaccactttgcttaccacatcatggattaccgtctcactcttctgttttgtcaccatcgtttcagctccaaagtcacaaaaactatgaaggaacttgtgagattcctgaatctaaatatagcccattaggtggtcccaaaccctttgagtgcccaagtattcaaattacatctatctctcctaactgtcatcaagaattagatgcacatgaagatgacctacagataaatgacccagaacgggaatttttggaaaggccttctagagatcatctctatcttcctcttgagccatcctaccgggagtcttctcttagtcctagtcctgccagcagcatctcttctaggagttggttctctgatgcatcttcttgtgaatcgctttcacatatttatgatgatgtggactcagagttgaatgaagctgcagcccgatttacccttggatcccctctgacttctcctggtggctctccagggggctgccctggagaagaaacttggcatcaacagtatggacttggacactcattatcacccaggcaatctccttgccactctcctagatccagtgtcactgatgagaattggctgagccccaggccagcctcaggaccctcatcaaggcccacatccccctgtgggaaacggaggcactccagtgctgaagtttgttatgctgggtccctttcaccccatcactcacctgttccttcacctggtcactcccccaggggaagtgtgacagaagatacgtggctcaatgcttctgtccatggtgggtcaggccttggccctgcagtttttccatttcagtactgtgtagagactgacatccctctcaaaacaaggaaaacttctgaagatcaagctgccatactaccaggaaaattagagctgtgttcagatgaccaagggagtttatcaccagcccgggagacttcaatagatgatggccttggatctcagtatcctttaaagaaagattcatgtggtgatcagtttctttcagttccttcaccctttacctggagcaaaccaaagcctggccacacccctatatttcgcacatcttcattacctccactagactggcctttaccagctcattttggacaatgtgaactgaaaatagaagtgcaacctaaaactcatcatcgagcccattatgaaactgaaggtagccgaggggcagtaaaagcatctactgggggacatcctgttgtgaagctcctgggctataacgaaaagccaataaatctacaaatgtttattgggacagcagatgatcgatatttacgacctcatgcattttaccaggtgcatcgaatcactgggaagacagtcgctactgcaagccaagagataataattgccagtacaaaagttctggaaattccacttcttcctgaaaataatatgtcagccagtattgattgtgcaggtattttgaaactccgcaattcagatatagaacttcgaaaaggagaaactgatattggcagaaagaatactagagtacgacttgtgtttcgtgtacacatcccacagcccagtggaaaagtcctttctctgcagatagcctctatacccgttgagtgctcccagcggtctgctcaagaacttcctcatattgagaagtacagtatcaacagttgttctgtaaatggaggtcatgaaatggttgtgactggatctaattttcttccagaatccaaaatcatttttcttgaaaaaggacaagatggacgacctcagtgggaggtagaagggaagataatcagggaaaaatgtcaaggggctcacattgtccttgaagttcctccatatcataacccagcagttacagctgcagtgcaggtgcacttttatctttgcaatggcaagaggaaaaaaagccagtctcaacgttttacttatacaccagttttgatgaagcaagaacacagagaagagattgatttgtcttcagttccatctttgcctgtgcctcatcctgctcagacccagaggccttcctctgattcagggtgttcacatgacagtgtactgtcaggacagagaagtttgatttgctccatcccacaaacatatgcatccatggtgacctcatcccatctgccacagttgcagtgtagagatgagagtgttagtaaagaacagcatatgattccttctccaattgtacaccagccttttcaagtcacaccaacacctcctgtggggtcttcctatcagcctatgcaaactaatgttgtgtacaatggaccaacttgtcttcctattaatgctgcctctagtcaagaatttgattcagttttgtttcagcaggatgcaactctttctggtttagtgaatcttggctgtcaaccactgtcatccataccatttcattcttcaaattcaggctcaacaggacatctcttagcccatacacctcattctgtgcataccctgcctcatctgcaatcaatgggatatcattgttcaaatacaggacaaagatctctttcttctccagtggctgaccagattacaggtcagccttcgtctcagttacaacctattacatatggtccttcacattcagggtctgctacaacagcttccccagcagcttctcatcccttggctagttcaccgctttctgggccaccatctcctcagcttcagcctatgccttaccaatctcctagctcaggaactgcctcatcaccgtctccagccaccagaatgcattctggacagcactcaactcaagcacaaagtacgggccaggggggtctttctgcaccttcatccttaatatgtcacagtttgtgtgatccagcgtcatttccacctgatggggcaactgtgagcattaaacctgaaccagaagatcgagagcctaactttgcaaccattggtctgcaggacatcactttagatgatgtgaacgagataattgggagagacatgtcccagatttctgtttcccaaggagcaggggtgagcaggcaggctcccctcccgagtcctgagtccctggatttaggaagatctgatgggctctacccaactttcttgtacaaagtggttgatatcggtaagcctatccctaaccctctcctcggtctcgattctacgtagtaatgaactagtccgtaacttgaaagtatttcgatttcttggctttatatatcttgtggaaaggacgactggggcatatcttgttacggacc

SEQ ID NO: 3563 - DNA, 1649 bp, Homo sapiens
  source 1..1649: mol_type = genomic DNA
atcgattgatcaacaagtttgtacaaaaaagttggcaccatggcttcagacagcatatttgagtcatttccttcgtacccacagtgcttcatgagagaatgcatacttggaatgaatccttctagagacgtccacgatgccagcacgagccgccgcttcacgccgccttccaccgcgctgagcccaggcaagatgagcgaggcgttgccgctgggcgccccggacgccggcgctgccctggccggcaagctgaggagcggcgaccgcagcatggtggaggtgctggccgaccacccgggcgagctggtgcgcaccgacagccccaacttcctctgctccgtgctgcctacgcactggcgctgcaacaagaccctgcccatcgctttcaaggtggtggccctaggggatgttccagatggcactctggtcactgtgatggctggcaatgatgaaaactactcggctgagctgagaaatgctaccgcagccatgaagaaccaggttgcaagatttaatgacctcaggtttgtcggtcgaagtggaagagggaaaagcttcactctgaccatcactgtcttcacaaacccaccgcaagtcgccacctaccacagagccatcaaaatcacagtggatgggccccgagaacctcgaagacatcggcagaaactagatgatcagaccaagcccgggagcttgtccttttccgagcggctcagtgaactggagcagctgcggcgcacagccatgagggtcagcccacaccacccagcccccacgcccaaccctcgtgcctccctgaaccactccactgcctttaaccctcagcctcagagtcagatgcaggatacaaggcagatccaaccatccccaccgtggtcctacgatcagtcctaccaatacctgggatccattgcctctccttctgtgcacccagcaacgcccatttcacctggacgtgccagcggcatgacaaccctctctgcagaactttccagtcgactctcaacggcacccgacctgacagcgttcagcgacccgcgccagttccccgcgctgccctccatctccgacccccgcatgcactatccaggcgccttcacctactccccgacgccggtcacctcgggcatcggcatcggcatgtcggccatgggctcggccacgcgctaccacacctacctgccgccgccctaccccggctcgtcgcaagcgcagggaggcccgttccaagccagctcgccctcctaccacctgtactacggcgcctcggccggctcctaccagttctccatggtgggcggcgagcgctcgccgccgcgcatcctgccgccctgcaccaacgcctccaccggctccgcgctgctcaaccccagcctcccgaaccagagcgacgtggtggaggccgagggcagccacagcaactcccccaccaacatggcgccctccgcgcgcctggaggaggccgtgtggaggccctacttgccaactttcttgtacaaagtggttgatatcggtaagcctatccctaaccctctcctcggtctcgattctacgtagtaatgaactagtccgtaacttgaaagtatttcgatttcttggctttatatatcttgtggaaaggacgaatttctaggccacctcgttgagca

SEQ ID NO: 3564 - DNA, 2543 bp, Homo sapiens
  source 1..2543: mol_type = genomic DNA
atcgattgatcaacaagtttgtacaaaaaagttggcatggcagctaatggggactctcccccatggtccccggccctggctgcagagggacgtggcagctcatgtgaggcttcagtgtcatttgaggacgtgactgtggacttcagcaaggaggagtggcagcacttggaccctgcccagagacgcctgtactgggatgtgacactagagaactacagccacctgctctcagtggggtaccaaattcccaagtcagaggctgccttcaagttggagcaaggagaggggccatggatgctggagggggaagccccacatcagagctgttcaggtgaggctattgggaaaatgcagcaacagggaattcctggaggaattttcttccactgtgagagatttgatcaacccataggagaagattcattatgttctattttagaagaactgtggcaagataatgaccagctagagcaacgtcaggaaaaccagaataaccttttaagtcatgtgaaagtattgattaaggagaggggctatgaacataaaaacattgaaaaaataattcatgtgactaccaagcttgttccttcaattaaaagactccataactgtgacacaattttgaagcatactttaaactcacataatcataatagaaacagtgcaacaaagaaccttggcaagatttttggaaatggtaacaatttcccccatagcccttcctctactaagaatgagaatgctaaaacaggagcaaattcctgtgaacatgaccactatgaaaaacatctcagccacaaacaagctcccacccaccatcagaaaattcatcctgaggagaagctttatgtgtgtactgaatgtgtaatgggcttcactcagaagtcacatctgtttgagcatcagagaattcatgctggagaaaagtcccgtgaatgtgacaaaagcaacaaagtcttcccccagaaaccccaggttgatgtacatccaagtgtttatacaggagaaaaaccctatctgtgtactcaatgtgggaaagtctttaccctcaaatcaaacctcattacacatcaaaaaattcataccgggcagaaaccctacaaatgcagtgaatgtggaaaagcctttttccagagatcagacctctttagacatctgagaattcatacaggagaaaaaccttatgaatgcagtgaatgtggaaaaggcttctcccagaactcagacctcagtatacatcagaaaactcataccggagagaaacactatgaatgcaatgaatgtgggaaggctttcacaagaaaatcagcactcaggatgcatcagagaatccacacgggagagaaaccttatgtatgcgctgactgtgggaaggccttcatccagaaatcacatttcaacacacatcagagaattcatactggagaaaagccgtatgaatgcagtgactgtgggaaatccttcactaagaagtcacaactccatgtgcatcaaagaattcacaccggagagaaaccctatatatgtacagaatgtggaaaggtcttcactcacaggacaaacctcaccacacatcagaaaactcatactggggaaaaaccctatatgtgtgctgaatgtggaaaggcttttactgaccagtcaaatctcattaaacaccagaaaactcacactggagagaaaccctataagtgcaatggctgtggaaaagccttcatatggaagtcgcgcctcaaaatacatcagaaatctcatattggagagagacactatgaatgcaaggactgcgggaaagccttcatccagaaatcaacactaagcgtgcatcagagaatccatacaggagagaaaccgtacgtttgtcctgaatgcgggaaggcctttatccagaaatcgcacttcattgcgcatcatagaatccatactggagagaagccttatgaatgcagcgactgtgggaaatgcttcactaagaagtcacaactccgtgtgcatcagaaaatccacacaggtgagaagcccaatatatgtgctgaatgtggaaaggccttcactgaccgatcaaatctcataacacatcagaaaatccacactagggagaaaccctatgaatgtggtgactgcgggaaaaccttcacctggaagtcacgcctcaatatacatcagaagtctcatactggagaaagacactatgaatgtagtaaatgtgggaaagctttcatccagaaagccacactaagtatgcatcagataattcatacaggaaagaaaccttatgcttgtacagaatgtcagaaggcctttactgacagatcgaatctcattaaacaccagaaaatgcatagtggagaaaaacgctataaagccagtgactgcccaactttcttgtacaaagtggttgatatcggtaagcctatccctaaccctctcctcggtctcgattctacgtagtaatgaactagtccgtaacttgaaagtatttcgatttcttggctttatatatcttgtggaaaggacgattgtaattagggatcaagcccagc

SEQ ID NO: 3565 - DNA, 785 bp, Homo sapiens
  source 1..785: mol_type = genomic DNA
atcgattgatcaacaagtttgtacaaaaaagttggcatggctgctgaaccagtagaagacaattgcatcaactttgtggcaatgaaatttattgacaatacgctttactttatagctgaagatgatgaaaacctggaatccgattactttggcaagcttgaatctaaattatcagtcataagaaatttgaatgaccaagttctcttcattgaccaaggaaatcggcctctatttgaagatatgactgattctgactgtagagataatgcaccccggaccatatttattataagtatgtataaagatagccagcctagaggtatggctgtaactatctctgtgaagtgtgagaaaatttcaactctctcctgtgagaacaaaattatttcctttaaggaaatgaatcctcctgataacatcaaggatacaaaaagtgacatcatattctttcagagaagtgtcccaggacatgataataagatgcaatttgaatcttcatcatacgaaggatactttctagcttgtgaaaaagagagagacctttttaaactcattttgaaaaaagaggatgaattgggggatagatctataatgttcactgttcaaaacgaagactacccaactttcttgtacaaagtggttgatatcggtaagcctatccctaaccctctcctcggtctcgattctacgtagtaatgaactagtccgtaacttgaaagtatttcgatttcttggctttatatatcttgtggaaaggacgaagctgttcgacaaaggcatcaaag

SEQ ID NO: 3566 - DNA, 998 bp, Homo sapiens
  source 1..998: mol_type = genomic DNA
atcgattgatcaacaagtttgtacaaaaaagttggcatgccgcgctctttcctcgtcaggaagccctccgaccccaatcggaagcctaactacagcgagctgcaggactctaatccagagtttaccttccagcagccctacgaccaggcccacctgctggcagccatcccacctccggagatcctcaaccccaccgcctcgctgccaatgctcatctgggactctgtcctggcgccccaagcccagccaattgcctgggcctcccttcggctccaggagagtcccagggtggcagagctgacctccctgtcagatgaggacagtgggaaaggctcccagccccccagcccaccctcaccggctccttcgtccttctcctctacttcagtctcttccttggaggccgaggcctatgctgccttcccaggcttgggccaagtgcccaagcagctggcccagctctctgaggccaaggatctccaggctcgaaaggccttcaactgcaaatactgcaacaaggaatacctcagcctgggtgccctcaagatgcacatccgaagccacacgctgccctgcgtctgcggaacctgcgggaaggccttctctaggccctggctgctacaaggccatgtccggacccacactggcgagaagcccttctcctgtccccactgcagccgtgccttcgctgaccgctccaacctgcgggcccacctccagacccactcagatgtcaagaagtaccagtgccaggcgtgtgctcggaccttctcccgaatgtccctgctccacaagcaccaagagtccggctgctcaggatgtccccgctgcccaactttcttgtacaaagtggttgatatcggtaagcctatccctaaccctctcctcggtctcgattctacgtagtaatgaactagtccgtaacttgaaagtatttcgatttcttggctttatatatcttgtggaaaggacgactgagtagttctcatactgttcga

SEQ ID NO: 3567 - DNA, 1289 bp, Homo sapiens
  source 1..1289: mol_type = genomic DNA
atcgattgatcaacaagtttgtacaaaaaagttggcaccatggcgggacacctggcttcagattttgccttctcgccccctccaggtggtggaggtgatgggccaggggggccggagccgggctgggttgatcctcggacctggctaagcttccaaggccctcctggagggccaggaatcgggccgggggttgggccaggctctgaggtgtgggggattcccccatgccccccgccgtatgagttctgtggggggatggcgtactgtgggccccaggttggagtggggctagtgccccaaggcggcttggagacctctcagcctgagggcgaagcaggagtcggggtggagagcaactccgatggggcctccccggagccctgcaccgtcacccctggtgccgtgaagctggagaaggagaagctggagcaaaacccggaggagtcccaggacatcaaagctctgcagaaagaactcgagcaatttgccaagctcctgaagcagaagaggatcaccctgggatatacacaggccgatgtggggctcaccctgggggttctatttgggaaggtattcagccaaacgaccatctgccgctttgaggctctgcagcttagcttcaagaacatgtgtaagctgcggcccttgctgcagaagtgggtggaggaagctgacaacaatgaaaatcttcaggagatatgcaaagcagaaaccctcgtgcaggcccgaaagagaaagcgaaccagtatcgagaaccgagtgagaggcaacctggagaatttgttcctgcagtgcccgaaacccacactgcagcagatcagccacatcgcccagcagcttgggctcgagaaggatgtggtccgagtgtggttctgtaaccggcgccagaagggcaagcgatcaagcagcgactatgcacaacgagaggattttgaggctgctgggtctcctttctcagggggaccagtgtcctttcctctggccccagggccccattttggtaccccaggctatgggagccctcacttcactgcactgtactcctcggtccctttccctgagggggaagcctttccccctgtctctgtcaccactctgggctctcccatgcattcaaacttgccaactttcttgtacaaagtggttgatatcggtaagcctatccctaaccctctcctcggtctcgattctacgtagtaatgaactagtccgtaacttgaaagtatttcgatttcttggctttatatatcttgtggaaaggacgacattgataaatccggttcgtagaa

SEQ ID NO: 3568 - DNA, 1526 bp, Homo sapiens
  source 1..1526: mol_type = genomic DNA
atcgattgatcaacaagtttgtacaaaaaagttggcaccatgaacttgccaagagctgagcgccttcgctccacaccgcagcgcagcctccgggactccgatggggaagacggtaaaatcgatgtcctgggagaggaggaagatgaagacgaggaggaggcggcgagccagcagttcctagagcagtcgctccagccggggctgcaggtggcccggtggggcggggttgcgcttccccgagagcacatcgagggcggcggcggcccgagcgacccctcagagtttggcaccgagttcagggcaccgccaaggtctgcggcggcctctgaagatgcccggcagccggcaaagcccccctcctcgtacatcgcgctcatcaccatggccatcctgcaaagcccgcacaagcgcctcacgctcagcggcatctgcgccttcattagtgaccgcttcccctactaccgccgcaagttccccgcctggcagaacagcatccgccacaacctctcgctgaacgactgcttcgtcaagatcccccgcgagccgggccgcccaggcaagggcaactactggagcctggaccccgcctcccaggacatgttcgacaatggcagctttctccggcgtaggaagcgtttccagcgccaccaaccgaccccgggagcccacctgccccaccccttccctctacctgctgcacacgccgccctgcacaacccccgcccaggccctctgcttggggcccctgccccgccgcagccagtcccgggggcctaccccaacaccggccccgggagacgcccttacgctctgctgcacccgcatcctcctcgctacctactgctctcggcccccgcctatgccggggcaccgaagaaagcagaaggcgcggacctggcgaccccggcacccttcccgtgctgcagccctcacttggtcctcagccttgggaggagggcaagggtctggcgtcgccaccgggaggcggatgcatctctttcagcattgagagtatcatgcaaggggtcaggggagcgggtacaggggctgcgcagagtttgtccccgaccgcgtggagctactgccccctgctccagcgaccgtcaagcctgtcggacaattttgcagcaacagcagcggcatcaggaggaggactgcgccaacggctgcgctcccaccaagggcgcggtgctgggcgggcacctgtcggccgcgtcggcgctgctgcggtatcaggcggtggcagagggctctgggctgacatcgctggccgcccctttgggcggagaggggacctcaccagtttttttagtatcgcccacgcccagttccctggccgagtccgcagggccctccttgccaactttcttgtacaaagtggttgatatcggtaagcctatccctaaccctctcctcggtctcgattctacgtagtaatgaactagtccgtaacttgaaagtatttcgatttcttggctttatatatcttgtggaaaggacgacccaccctaacgagctcgaatcca

SEQ ID NO: 3569 - DNA, 2327 bp, Homo sapiens
  source 1..2327: mol_type = genomic DNA
atcgattgatcaacaagtttgtacaaaaaagttggcaccatggccctgcccagcccacaggttctaatggggttgccagcgttgctgatgggcccggcgcagcatacttcttggccctgtggctcagctgtccccacattgaagagcatggtaacctttgaagatgtggctgtatacttctcccaagaggagtgggagctccttgatgcagcccagaggcacctgtaccacagtgtgatgctggaaaaccttgagcttgtgacctcacttggttcttggcatggagtagagggtgagggggcccatcccaagcagaatgtttctgtagaagtgttacaggtcaggatccctaatgcagatccttccaccaagaaagctaactcctgtgacatgtgtgggccattcttgaaagacattttgcacctggctgagcatcagggaacacagtctgaggagaaaccctacacatgtggagcatgtgggagagacttttggttgaatgcaaaccttcaccagcaccagaaggagcacagtggagggaagccctttagatggtacaaggacagggacgcacttatgaagagctctaaagtccacctgtcagagaaccccttcacttgcagggaaggtgggaaggtcatcctgggcagctgtgacctcctccagcttcaagctgttgacagtgggcagaagccatattccaatcttgggcagcttccagaagtctgtaccacacagaaactcttcgagtgcagcaactgtggaaaagccttcctgaagagctccactctccccaaccatctgagaactcactctgaagagataccatttacatgcccaacaggtggaaatttcttagaggagaaatcaatccttggtaataaaaaatttcacactggggaaataccccatgtgtgtaaggagtgtgggaaggcctttagtcactcatctaagctgaggaagcaccagaaatttcacactgaagtaaaatattatgagtgcattgcatgtgggaaaaccttcaaccacaaactcacatttgttcatcatcagagaattcactcaggagaaagaccttatgagtgtgatgaatgtgggaaagccttcagtaacagatcacacctcattcggcatgagaaagttcacactggagaaaggccttttgagtgcctgaaatgtggaagagccttcagccaaagctccaatttccttcggcatcagaaagttcacacacaggtaagaccttatgagtgcagtcaatgtggtaaatccttcagccgaagctctgctctcattcagcactggagagttcacactggagaaagaccgtatgaatgcagtgaatgtggaagagcttttaacaataactccaaccttgctcagcaccagaaagttcacaccggagaacggccttttgagtgcagtgaatgtggaagagacttcagccaaagctcccatctccttcgacatcagaaagttcacactggagaacggccttttgaatgctgtgattgtggtaaagccttcagtaatagctccaccctcatccagcaccagaaagtacatactgggcaaaggccttatgagtgcagcgaatgtaggaaatccttcagccgcagctccagcctgattcagcactggagaattcacactggagaaaagccttacgagtgtagtgagtgtgggaaagcctttgctcacagctccactctcattgaacactggagagttcacacaaaagaaaggccttatgagtgcaatgaatgtgggaaattctttagccaaaactccattctcattaagcatcagaaagttcatactggagaaaagccttataaatgcagtgaatgtgggaaattctttagccgaaaatccagccttatttgtcactggagagttcacactggagaaaggccttacgaatgcagtgaatgtgggagagcctttagcagtaactcccacctggttcgtcatcagagagttcacacacaagaaaggccctatgagtgcatccagtgtggaaaagcctttagtgaaagatctacacttgttcggcaccagaaagttcacaccagagaaaggacttatgagtgtagccagtgtgggaaactcttcagccatctttgtaaccttgcacagcataaaaagattcataccttgccaactttcttgtacaaagtggttgatatcggtaagcctatccctaaccctctcctcggtctcgattctacgtagtaatgaactagtccgtaacttgaaagtatttcgatttcttggctttatatatcttgtggaaaggacgaggttgccaaggagcttatcaccag

SEQ ID NO: 3570 - DNA, 1421 bp, Homo sapiens
  source 1..1421: mol_type = genomic DNA
atcgattgatcaacaagtttgtacaaaaaagttggcatggggccgcccctggcgccgcgcccggcccacgtacccggggaggccgggccccggaggacgagggaaagcaggccgggcgccgtgagcttcgcggacgtggccgtgtacttctctcccgaggagtgggaatgcctgcggccagcgcagagggccctgtaccgggacgtgatgcgggagaccttcggccacctgggcgcgctgggattttcagttcccaaacccgcttttatctcgtgggtggaaggagaagtggaggcgtggagcccggaggcccaggatcccgacggtgagagctctgcagctttcagcaggggccaaggacaggaagcaggatccagggatgggaatgaggagaaggaaaggctgaagaagtgtccaaaacaaaaagaggtggcgcatgaagtggctgtcaaggagtggtggcccagcgtcgcctgcccagagttctgcaaccctaggcagagccccatgaatccctggctcaaggacactctgacccgaagactgccccactcttgcccagactgtggccgcaacttcagctacccttccctcctggccagccaccagcgggtccactccggggagcggcccttctcctgcggccagtgtcaggcgcgtttctcccagcgcaggtacctgctccagcatcagttcatccacaccggcgagaagccctacccctgccccgactgcgggcgccgcttccgccagaggggttccctggctatccacaggcgggctcacaccggggagaagccttacgcgtgctcagactgcaagagtcgcttcacttacccctacctgctggccatccaccagcgcaagcacacgggcgagaagccctacagctgccccgattgcagcctccgtttcgcctacacctccctgctggccatccacaggcgcatacacaccggcgagaagccctacccctgtcctgactgcggccgccgcttcacctattcttccctcctcctcagtcaccggcgcattcactccgacagccggcccttcccctgcgtggagtgtgggaaaggcttcaagcgcaagaccgccctggaagcccatcggtggatccaccgctcctgcagcgagaggcgcgcgtggcagcaggccgtggtggggcgttcagagcccatccctgttttgggaggcaaggatcccccagttcacttccggcactttccagatatatttcaagagtgtgggtgcccaactttcttgtacaaagtggttgatatcggtaagcctatccctaaccctctcctcggtctcgattctacgtagtaatgaactagtccgtaacttgaaagtatttcgatttcttggctttatatatcttgtggaaaggacgaccagagtgtgtcacgttcctgagg

SEQ ID NO: 3571 - DNA, 1478 bp, Homo sapiens
  source 1..1478: mol_type = genomic DNA
atcgattgatcaacaagtttgtacaaaaaagttggcatggcgtccatgcccccgacgcccgaggcccagggaccaatactgtttgaggatctggctgtgtatttttctcaagaggagtgcgtgactctgcaccctgcccagaggtccctcagcaaagatggtacaaaagagtctttggaggatgcggctttgatgggagaggaaggcaagcctgagattaatcagcagttaagcctagagtctatggaacttgacgagcttgccttagaaaagtaccccattgctgcaccccttgtcccttacccagaaaaatcctctgaggatggagttggaaaccctgaagcgaaaatattaagtggaactcccacttacaagagaagggtcatcagccttttagttaccattgaaaaccacaccccattagtagaactctctgaatatttaggaaccaacacactttctgaaattcttgattctccctgggaaggagccaaaaatgtgtacaaatgtcctgagtgtgaccaaaacttcagcgatcattcatacctagttttgcatcagaaaattcattcaggagagaaaaaacataaatgtggtgactgtggaaagatcttcaatcatagagccaacctgaggacacacaggagaatccatactggtgagaaaccttataagtgtgccaagtgcagtgccagctttcgccagcactctcatctatcccgacacatgaatagccacgtaaaggagaagccctatacatgtagcatatgtggtagaggttttatgtggctcccaggattggcacagcatcagaaaagccacagtgctgaaaacacctacgaatctactaactgtgataaacattttaatgagaaaccaaatcttgctttgcctgaggaaacattcgtatcaggcccccagtaccagcacactaagtgcatgaagagcttcaggcagtccttatatcctgccctttccgagaagagccacgacgaggactctgaacgctgcagcgatgatggggacaatttcttctcattctcaaaattcaagcccttacagtgtcctgactgtgacatgacctttccttgtttctctgagcttatttcccatcagaacattcatacagaggaaaggccccataagtgcaaaacatgcgaggaaagttttgctttggactcagaacttgcatgccaccagaagagccacatgctagcggaaccttttaaatgtaccgtgtgtgggaaaactttcaagtcgaatttgcatctcattactcataagcgaactcacataaaaaacaccacgtacccaactttcttgtacaaagtggttgatatcggtaagcctatccctaaccctctcctcggtctcgattctacgtagtaatgaactagtccgtaacttgaaagtatttcgatttcttggctttatatatcttgtggaaaggacgattctaagcgctcgaaaaataaatt

SEQ ID NO: 3572 - DNA, 1157 bp, Homo sapiens
  source 1..1157: mol_type = genomic DNA
atcgattgatcaacaagtttgtacaaaaaagttggcatgtacaacatgatggagacggagctgaagccgccgggcccgcagcaaacttcggggggcggcggcggcaactccaccgcggcggcggccggcggcaaccagaaaaacagcccggaccgcgtcaagcggcccatgaatgccttcatggtgtggtcccgcgggcagcggcgcaagatggcccaggagaaccccaagatgcacaactcggagatcagcaagcgcctgggcgccgagtggaaacttttgtcggagacggagaagcggccgttcatcgacgaggctaagcggctgcgagcgctgcacatgaaggagcacccggattataaataccggccccggcggaaaaccaagacgctcatgaagaaggataagtacacgctgcccggcgggctgctggcccccggcggcaatagcatggcgagcggggtcggggtgggcgccggcctgggcgcgggcgtgaaccagcgcatggacagttacgcgcacatgaacggctggagcaacggcagctacagcatgatgcaggaccagctgggctacccgcagcacccgggcctcaatgcgcacggcgcagcgcagatgcagcccatgcaccgctacgacgtgagcgccctgcagtacaactccatgaccagctcgcagacctacatgaacggctcgcccacctacagcatgtcctactcgcagcagggcacccctggcatggctcttggctccatgggttcggtggtcaagtccgaggccagctccagcccccctgtggttacctcttcctcccactccagggcgccctgccaggccggggacctccgggacatgatcagcatgtatctccccggcgccgaggtgccggaacccgccgcccccagcagacttcacatgtcccagcactaccagagcggcccggtgcccggcacggccattaacggcacactgcccctctcacacatgtgcccaactttcttgtacaaagtggttgatatcggtaagcctatccctaaccctctcctcggtctcgattctacgtagtaatgaactagtccgtaacttgaaagtatttcgatttcttggctttatatatcttgtggaaaggacgagctgtgattaggcttcacaggatt

SEQ ID NO: 3573 - DNA, 1226 bp, Homo sapiens
  source 1..1226: mol_type = genomic DNA
accgccaccatggccgccccgccgcgccccgcgccatcgccccccgccccgcggcgcctcgacacgagcgacgtcctgcagcagatcatggccatcaccgaccagagcctggacgaggcacaggccagaaagcatgctctgaattgccatcggatgaagcctgctctgttcagcgtgctctgtgagatcaaggaaaagacagtggtaagcatccgtggcattcaagacgaagatccccctgacgcccagctcctgaggctggataacatgctgctggctgagggcgtgtgcaggcccgagaagagaggaagaggaggagcggtggccagggccggcacagcaacaccaggtggctgtccaaatgacaatagcattgagcactctgactacagggccaagctgtcccagatccgacagatttaccactctgagctagagaaatatgaacaggcctgtcgtgagttcaccacgcacgtcaccaacctcctccaggagcagagcaggatgaggcctgtctcccctaaggagattgagcgcatggtcggcgccattcacggcaagttcagcgccatccagatgcagttgaagcagagcacctgtgaggcagtgatgaccctgcgttcgcggctgctcgatgccaggcgcaagcggcggaatttcagcaagcaggcgacggaagtgctgaatgagtatttttactcccatctgaacaacccttaccccagcgaagaagccaaagaagagctggccaggaagggcggcctcaccatctcccaggtctctaactggtttggcaacaaaagaatccggtataaaaagaacatggggaagtttcaagaagaggctaccatttacacgggtaaaacggctgtggataccacggaagttggggtcccagggaaccacgccagctgcctgtcaacacctagctccggctcctctggacccttcccgctgcccagcgctggggacgccttcctcaccctgcggactctggcctctctccagcctcctcctgggggaggctgcctgcagtcccaggcccagggtagctggcagggggccaccccccaacctgcaactgcctcacctgctggagaccctggcagcatcaactccagtacatctaattagtaatgaactagtccgtaacttgaaagtatttcgatttcttggctttatatatcttgtggaaaggacgaaatgcgtgcgcaggaccctaggca

SEQ ID NO: 3574 - DNA, 2132 bp, Homo sapiens
  source 1..2132: mol_type = genomic DNA
atcgattgatcaacaagtttgtacaaaaaagttggcatggctgaggcggccccggccccgacatctgaatgggactccgagtgccttacatccctgcagccccttcctcttcctacacccccagcagcaaatgaggcacacctgcagacagcagctatctctctgtggacagtggtggccgccgtgcaggctatagagaggaaggtggagatccacagccggcgactcctacacctagaaggtcggacagggacagcagagaagaaactagccagctgtgaaaagacagttaccgagcttgggaaccagctggagggcaagtgggccgtgctgggaaccctgctgcaggagtacgggctgctgcagaggcggctggagaacttggagaacctgctgcgcaacaggaacttctggatcctgcggctccctccaggtattaagggagatatcccaaaggtgcctgtggcatttgatgatgtctccatctacttttccactccagagtgggaaaaattagaagaatggcaaaaggaactttacaagaatatcatgaagggcaactacgagtctctcatctccatggattatgctataaatcaacctgatgtcttatctcagattcaaccagaaggggaacataatacagaggaccaggcagggccagaggaaagtgagattcccacagaccccagtgaagagcctggtatttcaacatcagatattctgtcttggattaaacaagaagaagagcctcaggttggggccccaccggagtccaaggagagtgacgtgtacaaaagcacttatgctgatgaagagcttgtcatcaaagctgaaggccttgctagatcctcgttgtgccctgaggttccagtccctttctcttctccaccagcagcagcaaaggatgctttttcagatgtggctttcaaaagccagcagtctacatccatgacaccttttggacgtccagccactgacctgcctgaagcctctgagggacaagtgacttttactcagttgggtagctatcccctcccacctccagttggcgagcaggtgttctcatgccaccactgtggcaagaatctcagccaagacatgttgctgacccaccaatgtagccatgctactgagcaccccttaccctgtgcccagtgccctaagcactttactccacaggcggacctcagcagcacctcccaggaccatgccagcgagacaccccccacctgcccacactgtgccaggacttttactcacccatcaagacttacctaccatcttcgggtccataacagcactgagcgtcctttcccctgtcctgattgccccaagcgctttgctgaccaggctcgactcaccagccaccggagagctcatgcaagcgaaaggcccttccgctgtgcccagtgcggcaggagcttcagcttgaaaatcagcctcctgctccaccagcggggtcatgcacaagagcgccctttctcctgccctcagtgtggcattgacttcaacggccactcggccctgatccgccaccagatgatccacacaggcgagcgtccttacccctgcactgactgcagtaagagcttcatgcgcaaggagcacctgctgaaccaccggcggctgcacacaggcgagcggcccttcagttgtcctcactgtggcaagagcttcatccgcaagcaccacctaatgaaacaccagcgcatccacaccggggagcggccctacccctgctcctactgtggcaggagcttccgctacaaacagacactcaaggaccacctccgttcaggccacaatggaggctgtgggggtgatagtgacccatcaggtcagccacccaacccaccaggtcccctcataactgggcttgaaacttctggcctgggtgtcaacactgaaggtctagagaccaaccagtggtatggggaagggagtggagggggagttttgtacccaactttcttgtacaaagtggttgatatcggtaagcctatccctaaccctctcctcggtctcgattctacgtagtaatgaactagtccgtaacttgaaagtatttcgatttcttggctttatatatcttgtggaaaggacgatcactatttttatccgagatcagt

SEQ ID NO: 3575 - DNA, 1724 bp, Homo sapiens
  source 1..1724: mol_type = genomic DNA
atcgattgatcaacaagtttgtacaaaaaagttggcaccatgaaattcaagttacatgtgaattctgccaggcaatacaaggacctgtggaatatgagtgatgacaaaccctttctatgtactgcgcctggatgtggccagcgttttaccaacgaggatcatttggctgtccataaacataaacatgagatgacactgaaatttggtccagcacgtaatgacagtgtcattgtggctgatcagaccccaacaccaacaagattcttgaaaaactgtgaagaagtgggtttgtttaatgagttggcgagtccatttgagaatgaattcaagaaagcttcagaagatgacattaaaaaaatgcctctagatttatcccctcttgcaacacctatcataagaagcaaaattgaggagccttctgttgtagaaacaactcaccaggatagtcctttacctcacccagagtctactaccagtgatgagaaggaagtaccattggcacaaactgcacagcccacatcagctattgttcgtccagcatcattacaggttcccaatgtgctgcttacaagttctgactcaagtgtaattattcagcaggcagtaccttcaccaacctcaagtactgtaatcacccaggcaccatcctctaacaggccaattgtccctgtaccaggcccatttcctcttctgttacatcttcctaatggacaaaccatgcctgttgctattcctgcatcaattacaagttctaatgtgcatgttccagctgcagtcccactcgttcgaccagtcaccatggtgcctagtgttccaggaatcccaggtccttcctctccccaaccagtacagtcagaagcaaaaatgagattaaaagctgctttgacccagcaacatcctccagttaccaatggtgatactgtcaaaggtcatggtagcggattggttaggactcagtcagaggaatctcgaccgcagtcattacaacagccagccacatccactacagaaactccggcttctccagctcacacaactccacagacccaaagtacaagtggtcgtcggagaagagcagctaacgaagatcctgatgaaaaaaggagaaagtttttagagcgaaatagagcagcagcttcaagatgccgacaaaaaaggaaagtctgggttcagtctttagagaagaaagctgaagacttgagttcattaaatggtcagctgcagagtgaagtcaccctgctgagaaatgaagtggcacagctgaaacagcttcttctggctcataaagattgccctgtaaccgccatgcagaagaaatctggctatcatactgctgataaagatgatagttcagaagacatttcagtgccgagtagtccacatacagaagctatacagcatagttcggtcagcacatccaatggagtcagttcaacctccaaggcagaagctgtagccacttcagtcctcacccagatggcggaccagagtacagagcctgctctttcacagatcgttatggctccttcctcccagtcacagccctcaggaagtttgccaactttcttgtacaaagtggttgatatcggtaagcctatccctaaccctctcctcggtctcgattctacgtagtaatgaactagtccgtaacttgaaagtatttcgatttcttggctttatatatcttgtggaaaggacgatcgcttttgtcgagagagtttccg

SEQ ID NO: 3576 - DNA, 2282 bp, Homo sapiens
  source 1..2282: mol_type = genomic DNA
atcgattgatcaacaagtttgtacaaaaaagttggcaccatggaaaagatctattccagaggggagcttcaccacttcattgacggctttaatgaagagaaaagcaactggatgcgctatgtgaatccagcacactctccccgggagcaaaacctggctgcgtgtcagaacgggatgaacatctacttctacaccattaagcccatccctgccaaccaggaacttcttgtgtggtattgtcgggactttgcagaaaggcttcactacccttatcccggagagctgacaatgatgaatctcacacaaacacagagcagtctaaagcaaccgagcactgagaaaaatgaactctgcccaaagaatgtcccaaagagagagtacagcgtgaaagaaatcctaaaattggactccaacccctccaaaggaaaggacctctaccgttctaacatttcacccctcacatcagaaaaggacctcgatgactttagaagacgtgggagccccgaaatgcccttctaccctcgggtcgtttaccccatccgggcccctctgccagaagactttttgaaagcttccctggcctacgggatcgagagacccacgtacatcactcgctcccccattccatcctccaccactccaagcccctctgcaagaagcagccccgaccaaagcctcaagagctccagccctcacagcagccctgggaatacggtgtcccctgtgggccccggctctcaagagcaccgggactcctacgcttacttgaacgcgtcctacggcacggaaggtttgggctcctaccctggctacgcacccctgccccacctcccgccagctttcatcccctcgtacaacgctcactaccccaagttcctcttgcccccctacggcatgaattgtaatggcctgagcgctgtgagcagcatgaatggcatcaacaactttggcctcttcccgaggctgtgccctgtctacagcaatctcctcggtgggggcagcctgccccaccccatgctcaaccccacttctctcccgagctcgctgccctcagatggagcccggaggttgctccagccggagcatcccagggaggtgcttgtcccggcgccccacagtgccttctcctttaccggggccgccgccagcatgaaggacaaggcctgtagccccacaagcgggtctcccacggcgggaacagccgccacggcagaacatgtggtgcagcccaaagctacctcagcagcgatggcagcccccagcagcgacgaagccatgaatctcattaaaaacaaaagaaacatgaccggctacaagacccttccctacccgctgaagaagcagaacggcaagatcaagtacgaatgcaacgtttgcgccaagactttcggccagctctccaatctgaaggtccacctgagagtgcacagtggagaacggcctttcaaatgtcagacttgcaacaagggctttactcagctcgcccacctgcagaaacactacctggtacacacgggagaaaagccacatgaatgccaggtctgccacaagagatttagcagcaccagcaatctcaagacccacctgcgactccattctggagagaaaccataccaatgcaaggtgtgccctgccaagttcacccagtttgtgcacctgaaactgcacaagcgtctgcacacccgggagcggccccacaagtgctcccagtgccacaagaactacatccatctctgtagcctcaaggttcacctgaaagggaactgcgctgcggccccggcgcctgggctgcccttggaagatctgacccgaatcaatgaagaaatcgagaagtttgacatcagtgacaatgctgaccggctcgaggacgtggaggatgacatcagtgtgatctctgtagtggagaaggaaattctggccgtggtcagaaaagagaaagaagaaactggcctgaaagtgtctttgcaaagaaacatggggaatggactcctctcctcagggtgcagcctttatgagtcatcagatctacccctcatgaagttgcctcccagcaacccactacctctggtacctgtaaaggtcaaacaagaaacagttgaaccaatggatcctttgccaactttcttgtacaaagtggttgatatcggtaagcctatccctaaccctctcctcggtctcgattctacgtagtaatgaactagtccgtaacttgaaagtatttcgatttcttggctttatatatcttgtggaaaggacgacgtcgggtcctcgactctacatta

SEQ ID NO: 3577 - DNA, 2357 bp, Homo sapiens
  source 1..2357: mol_type = genomic DNA
atcgattgatcaacaagtttgtacaaaaaagttggcaccatgccaagcaccagctttccagtcccttccaagtttccacttggccctgcggctgcggtcttcgggagaggagaaactttggggcccgcgccgcgcgccggcggcaccatgaagtcagcggaggaagaacactatggctatgcatcctccaacgtcagccccgccctgccgctccccacggcgcactccaccctgccggccccgtgccacaaccttcagacctccacaccgggcatcatcccgccggcggatcacccctcggggtacggggcagctttggacggtgggcccgcgggctacttcctctcctccggccacaccaggcctgatggggcccctgccctggagagtcctcgcatcgagataacctcgtgcttgggcctgtaccacaacaataaccagtttttccacgatgtggaggtggaagacgtcctccctagctccaaacggtccccctccacggccacgctgagtctgcccagcctggaggcctacagagacccctcgtgcctgagcccggccagcagcctgtcctcccggagctgcaactcagaggcctcctcctacgagtccaactactcgtacccgtacgcgtccccccagacgtcgccatggcagtctccctgcgtgtctcccaagaccacggaccccgaggagggctttccccgcgggctgggggcctgcacactgctgggttccccgcggcactccccctccacctcgccccgcgccagcgtcactgaggagagctggctgggtgcccgctcctccagacccgcgtccccgtgcaacaagaggaagtacagcctcaacggccggcagccgccctactcaccccaccactcgcccacgccgtccccgcacggctccccgcgggtcagcgtgaccgacgactcgtggttgggcaacaccacccagtacaccagctcggccatcgtggccgccatcaacgcgctgaccaccgacagcagcctggacctgggagatggcgtccctgtcaagtcccgcaagaccaccctggagcagccgccctcagtggcgctcaaggtggagcccgtcggggaggacctgggcagccccccgcccccggccgacttcgcgcccgaagactactcctctttccagcacatcaggaagggcggcttctgcgaccagtacctggcggtgccgcagcacccctaccagtgggcgaagcccaagcccctgtcccctacgtcctacatgagcccgaccctgcccgccctggactggcagctgccgtcccactcaggcccgtatgagcttcggattgaggtgcagcccaagtcccaccaccgagcccactacgagacggagggcagccggggggccgtgaaggcgtcggccggaggacaccccatcgtgcagctgcatggctacttggagaatgagccgctgatgctgcagcttttcattgggacggcggacgaccgcctgctgcgcccgcacgccttctaccaggtgcaccgcatcacagggaagaccgtgtccaccaccagccacgaggccatcctctccaacaccaaagtcctggagatcccactcctgccggagaacagcatgcgagccgtcattgactgtgccggaatcctgaaactcagaaactccgacattgaacttcggaaaggagagacggacatcgggaggaagaacacacgggtacggctggtgttccgcgttcacgtcccgcaacccagcggccgcacgctgtccctgcaggtggcctccaaccccatcgaatgctcccagcgctcagctcaggagctgcctctggtggagaagcagagcacggacagctatccggtcgtgggcgggaagaagatggtcctgtctggccacaacttcctgcaggactccaaggtcattttcgtggagaaagccccagatggccaccatgtctgggagatggaagcgaaaactgaccgggacctgtgcaagccgaattctctggtggttgagatcccgccatttcggaatcagaggataaccagccccgttcacgtcagtttctacgtctgcaacgggaagagaaagcgaagccagtaccagcgtttcacctaccttcccgccaacggtaacgccatctttctaaccgtaagccgtgaacatgagcgcgtggggtgctttttcttgccaactttcttgtacaaagtggttgatatcggtaagcctatccctaaccctctcctcggtctcgattctacgtagtaatgaactagtccgtaacttgaaagtatttcgatttcttggctttatatatcttgtggaaaggacgataccgaaaatgaccatacattgcc

SEQ ID NO: 3578 - DNA, 1976 bp, Homo sapiens
  source 1..1976: mol_type = genomic DNA
atcgattgatcaacaagtttgtacaaaaaagttggcatggccttccgggatgtggctgtggccttcacccagaaggagtggaagctattgagttctgctcagaggaccctgtacagggaggtgatgctggagaactacagccatctggtctccctgggaattgcattttccaaaccaaaactcatcgaacagctggagcaaggcgacgaaccttggagagaggagaacgaacatcttctggacctttgtccagagcctagaacagaattccagccaagttttccccacctggtggccttttctagctcgcagctcctcagacaatatgcgctaagtggccatcccacacagatcttcccaagctcatctgcaggaggtgacttccaactagaagctccaagatgctctagtgaaaaaggagaaagtggagagacagaaggccccgacagctcattaagaaagaggccaagcagaatttctaggacattcttcagcccacatcaaggtgacccagtagaatgggtagaagggaacagagaaggaggaacagaccttcgcctggcccaaaggatgagtcttggggggtcagacacaatgttgaagggagcagacacttcagaatctggagcagtcatacgtggaaactatagactgggacttagcaaaaagtcaagcctgttcagccaccagaagcatcatgtgtgccctgaatgcgggagaggcttttgccagagatcagaccttatcaagcaccagaggacacacaccggggagaagccatacctgtgtcctgagtgtgggcgtcggtttagccagaaggcctccctctccatacaccagaggaagcactcgggggagaagccgtatgtgtgcagggaatgtgggcgacacttcaggtatacatcctctctcactaatcacaagaggattcactccggggagaggccctttgtatgtcaggagtgtgggcgaggctttcgccagaagatagccctccttctacaccagaggacgcacttggaggagaagcccttcgtgtgtcctgagtgtgggagaggcttttgccagaaggcatcactcctccagcaccagagctcacacacaggggagaggcccttcctgtgccttgagtgtgggcgtagcttcaggcagcagtcactcctccttagtcaccaggtcacacactcaggagagaagccttatgtctgtgctgagtgtgggcacagctttcgccaaaaggtcactctcatcaggcaccagaggacacacacaggggagaagccttacctgtgcccccagtgtgggcggggttttagccagaaggtcaccctcattggacaccagaggacacacacaggggagaagccctacctgtgccctgattgtgggcgtggctttggtcagaaggtcaccctcatcagacaccagaggacacacacaggggagaagccttatctgtgccccaagtgtgggcgtgcatttggctttaagtcgctcctcacccgacaccagaggacacactcagaggaggagctttacgtagacagggtgtgtggacaaggacttggccagaagtcacaccttatctctgaccaaaggacacactcaggagagaagccctgcatttgcgatgaatgtgggcgcggctttggctttaagtctgccctcatccgacatcagcggacccattctggggagaagccgtatgtctgcagggagtgtgggcgtggctttagccagaagtctcacttgcatagacacaggaggaccaagtctggtcatcagctcctaccccaagaggtcttctgcccaactttcttgtacaaagtggttgatatcggtaagcctatccctaaccctctcctcggtctcgattctacgtagtaatgaactagtccgtaacttgaaagtatttcgatttcttggctttatatatcttgtggaaaggacgacggtaaaaccactatttggcccgc

SEQ ID NO: 3579 - DNA, 1637 bp, Homo sapiens
  source 1..1637: mol_type = genomic DNA
atcgattgatcaacaagtttgtacaaaaaagttggcatggatgctgatgagggtcaagacatgtcccaagtttcagggaaggaaagcccccctgtaagcgatactccagatgagggcgatgagcccatgccgatccccgaggacctctccaccacctcgggaggacagcaaagctccaagagtgacagagtcgtggccagtaatgttaaagtagagactcagagtgatgaagagaatgggcgtgcctgtgaaatgaatggggaagaatgtgcggaggatttacgaatgcttgatgcctcgggagagaaaatgaatggctcccacagggaccaaggcagctcggctttgtcgggagttggaggcattcgacttcctaacggaaaactaaagtgtgatatctgtgggatcatttgcatcgggcccaatgtgctcatggttcacaaaagaagccacactggagaacggcccttccagtgcaatcagtgcggggcctcattcacccagaagggcaacctgctccggcacatcaagctgcattccggggagaagcccttcaaatgccacctctgcaactacgcctgccgccggagggacgccctcactggccacctgaggacgcactccgtcattaaagaagaaactaatcacagtgaaatggcagaagacctgtgcaagataggatcagagagatctctcgtgctggacagactagcaagtaacgtcgccaaacgtaagagctctatgcctcagaaatttcttggggacaagggcctgtccgacacgccctacgacagcagcgccagctacgagaaggagaacgaaatgatgaagtcccacgtgatggaccaagccatcaacaacgccatcaactacctgggggccgagtccctgcgcccgctggtgcagacgcccccgggcggttccgaggtggtcccggtcatcagcccgatgtaccagctgcacaagccgctcgcggagggcaccccgcgctccaaccactcggcccaggacagcgccgtggagaacctgctgctgctctccaaggccaagttggtgccctcggagcgcgaggcgtccccgagcaacagctgccaagactccacggacaccgagagcaacaacgaggagcagcgcagcggtctcatctacctgaccaaccacatcgccccgcacgcgcgcaacgggctgtcgctcaaggaggagcaccgcgcctacgacctgctgcgcgccgcctccgagaactcgcaggacgcgctccgcgtggtcagcaccagcggggagcagatgaaggtgtacaagtgcgaacactgccgggtgctcttcctggatcacgtcatgtacaccatccacatgggctgccacggcttccgtgatccttttgagtgcaacatgtgcggctaccacagccaggaccggtacgagttctcgtcgcacataacgcgaggggagcaccgcttccacatgagctacccaactttcttgtacaaagtggttgatatcggtaagcctatccctaaccctctcctcggtctcgattctacgtagtaatgaactagtccgtaacttgaaagtatttcgatttcttggctttatatatcttgtggaaaggacgactgcacaggtgaagtgagacaatt

SEQ ID NO: 3580 - DNA, 851 bp, Homo sapiens
  source 1..851: mol_type = genomic DNA
atcgattgatcaacaagtttgtacaaaaaagttggcaccatgtcacagaggaaggccagagggccaccagccatgccaggggtggggcatagccagactcaggccaaagcacggttgctgccaggcgctgacaggaagaggagccgcctcagcaggacaaggcaggacccgtgggaagaaagaagctggagcaaccagagatggagcagagctacccctggccctcgagggaccagggctgggggcctggctcttggcaggagcgaggccagtcctgagaatgccgcgcgggagcggagccgggtcaggacgctgcgccaggccttcttggccttgcaggctgctctgcctgccgtgccgcccgacaccaagctctccaagttggacgtgctggtgctcgccgccagctacatagcccacctcacccgcacactcggccacgagttgcctggccctgcctggccgcccttcctgcgtggactccgctacttgcaccctctcaagaagtggccgatgcgatctcgtctctatgctggaggcctggggtactccgatcttgactccaccacagccagcacccccagccaaagaacaagagatgcagaggtggggtcccaagtccctggagaggcagatgctctcctttccaccacaccactctcaccagctcttggtgacaaattgccaactttcttgtacaaagtggttgatatcggtaagcctatccctaaccctctcctcggtctcgattctacgtagtaatgaactagtccgtaacttgaaagtatttcgatttcttggctttatatatcttgtggaaaggacgagactgctaaacttcaaattactgc

SEQ ID NO: 3581 - DNA, 1283 bp, Homo sapiens
  source 1..1283: mol_type = genomic DNA
atcgattgatcaacaagtttgtacaaaaaagcaggcttcgaattcaccatggccagtagggaagatgagctgaggaactgtgtggtatgtggggaccaagccacaggctaccactttaatgcgctgacttgtgagggctgcaagggtttcttcaggagaacagtcagcaaaagcattggtcccacctgcccctttgctggaagctgtgaagtcagcaagactcagaggcgccactgcccagcctgcaggttgcagaagtgcttagatgctggcatgaggaaagacatgatactgtcggcagaagccctggcattgcggcgagcaaagcaggcccagcggcgggcacagcaaacacctgtgcaactgagtaaggagcaagaagagctgatccggacactcctgggggcccacacccgccacatgggcaccatgtttgaacagtttgtgcagtttaggcctccagctcatctgttcatccatcaccagcccttgcccaccctggcccctgtgctgcctctggtcacacacttcgcagacatcaacactttcatggtactgcaagtcatcaagtttactaaggacctgcctgtcttccgttccctgcccattgaagaccagatctcccttctcaagggagcagctgtggaaatctgtcacatcgtactcaataccactttctgtctccaaacacaaaacttcctctgcgggcctcttcgctacacaattgaagatggagcccgtgtatctcccacagtggggttccaggtagagtttttggagttgctctttcacttccatggaacactacgaaaactgcagctccaagagcctgagtatgtgctcttggctgccatggccctcttctctcctgaccgacctggagttacccagagagatgagattgatcagctgcaagaggagatggcactgactctgcaaagctacatcaagggccagcagcgaaggccccgggatcggtttctgtatgcgaagttgctaggcctgctggctgagctccggagcattaatgaggcctacgggtaccaaatccagcacatccagggcctgtctgccatgatgccgctgctccaggagatctgcagctgaaagcttgacccagctttcttgtacaaagtggttgatatcggtaagcctatccctaaccctctcctcggtctcgattctacgtagtaatgaactagtccgtaacttgaaagtatttcgatttcttggctttatatatcttgtggaaaggacgaggagttccgcctcctagatctggt

SEQ ID NO: 3582 - DNA, 1943 bp, Homo sapiens
  source 1..1943: mol_type = genomic DNA
atcgattgatcaacaagtttgtacaaaaaagttggcatgcttcggtctgggccagcctctgggccgtccgtccccactggccgggccatgccgagtcgccgcgtcgccagaccgccggctgcgccggagctgggggccttagggtcccccgacctctcctcactctcgctcgccgtttccaggagcacagatgaattggagatcatcgacgagtacatcaaggagaacggcttcggcctggacgggggacagccgggcccgggcgaggggctgccacgcctggtgtctcgcggggctgcgtccctgagcacggtcaccctgggccctgtggcgcccccagccacgccgccgccttggggctgccccctgggccgactagtgtccccagcgccgggcccgggcccgcagccgcacctggtcatcacggagcagcccaagcagcgcggcatgcgcttccgctacgagtgcgagggccgctcggccggcagcatccttggggagagcagcaccgaggccagcaagacgctgcccgccatcgagctccgggattgtggagggctgcgggaggtggaggtgactgcctgcctggtgtggaaggactggcctcaccgagtccacccccacagcctcgtggggaaagactgcaccgacggcatctgcagggtgcggctccggcctcacgtcagcccccggcacagttttaacaacctgggcatccagtgtgtgaggaagaaggagattgaggctgccattgagcggaagattcaactgggcattgacccctacaacgctgggtccctgaagaaccatcaggaagtagacatgaatgtggtgaggatctgcttccaggcctcatatcgggaccagcagggacagatgcgccggatggatcctgtgctttccgagcccgtctatgacaagaaatccacaaacacatcagagctgcggatttgccgaattaacaaggaaagcgggccgtgcaccggtggcgaggagctctacttgctctgcgacaaggtgcagaaagaggacatatcagtggtgttcagcagggcctcctgggaaggtcgggctgacttctcccaggccgacgtgcaccgccagattgccattgtgttcaagacgccgccctacgaggacctggagattgtcgagcccgtgacagtcaacgtcttcctgcagcggctcaccgatggggtctgcagcgagccattgcctttcacgtacctgcctcgcgaccatgacagctacggcgtggacaagaagcggaaacgggggatgcccgacgtccttggggagctgaacagctctgacccccatggcatcgagagcaaacggcggaagaaaaagccggccatcctggaccacttcctgcccaaccacggctcaggcccgttcctcccgccgtcagccctgctgccagaccctgacttcttctctggcaccgtgtccctgcccggcctggagccccctggcgggcctgacctcctggacgatggctttgcctacgaccctacggcccccacactcttcaccatgctggacctgctgcccccggcaccgccacacgctagcgctgttgtgtgcagcggaggtgccggggccgtggttggggagacccccggccctgaaccactgacactggactcgtaccaggccccgggccccggggatggaggcaccgccagccttgtgggcagcaacatgttccccaatcattaccgcgaggcggcctttgggggcggcctcctatccccggggcctgaagccacgtacccaactttcttgtacaaagtggttgatatcggtaagcctatccctaaccctctcctcggtctcgattctacgtagtaatgaactagtccgtaacttgaaagtatttcgatttcttggctttatatatcttgtggaaaggacgaccatgcatccattaagtatcgtta

SEQ ID NO: 3583 - DNA, 1937 bp, Homo sapiens
  source 1..1937: mol_type = genomic DNA
atcgattgatcaacaagtttgtacaaaaaagttggcaccatggactcagtggcttttgaggatgtgtctgtgagcttcagccaggaggagtgggctctgctggctccttcacagaagaaactctacagagatgtgatgcaggaaacattcaagaacctggcatctataggggaaaaatgggaagacccgaatgttgaagatcaacacaaaaaccaaggacgaaatctaagaagccatacgggagagagactctgtgaaggtaaagaaggtagtcaatgtgcagaaaacttcagtcccaatctcagtgtgacgaagaagactgccggagtaaaaccatatgagtgtactatctgtggaaaagccttcatgcgtctctcatcccttactagacacatgaggtctcacactggatacgagctatttgagaagccatataaatgtaaggagtgtgagaaagcctttagttatctcaaatcctttcaaagacatgaaaggagtcacactggagaaaaaccctataaatgtaaacaatgtggaaaaaccttcatatatcaccagccctttcaaagacatgagcggactcacattggagaaaaaccctatgaatgtaagcaatgtggaaaagctcttagttgttccagttcgcttcgagttcatgaaaggattcacactggagaaaagccctatgaatgtaaacaatgtgggaaagccttcagttgttccagttctattcgagtacacgaaagaactcacactggagagaaaccctatgcatgtaaggaatgtgggaaagccttcatttcccacacaagtgttctaacacacatgataacacacaacggagatagaccttataaatgcaaagaatgtggaaaggcattcatttttcccagttttttacgagtacatgaaagaattcacactggagagaaaccctataaatgtaaacaatgtggtaaagccttcagatgttccacctccattcaaattcatgaaagaattcatactggagagaagccctataaatgtaaagaatgtgggaaatctttcagtgcacgcccagcctttcgagtacacgtgagagtgcatactggagagaaaccctataagtgtaaagaatgtgggaaagcctttagtagaatcagttactttcgaatacatgaaaggactcacactggagagaaaccctacgaatgtaaaaaatgtgggaaaactttcaattatcctctagatttgaaaatccacaagagaaatcacactggagaaaaaccctatgagtgtaaggaatgtgcaaaaaccttcatttctcttgagaactttcgaagacacatgatcacccacactggagacggaccttataaatgtagggactgtgggaaggtgttcatttttcctagtgcgttacgaacacatgaaagaactcacactggagagaaaccctatgaatgtaaacaatgtggaaaagcctttagttgttctagttacattcggatacataaaagaactcacactggggagaaaccttatgaatgtaaggaatgcgggaaggcctttatttatcccacaagctttcaaggacacatgagaatgcatactggagagaaaccctataaatgtaaagaatgtgggaaggcctttagtcttcacagttcctttcaaagacatacaagaattcacaattatgagaaacctcttgaatgtaagcaatgtggaaaagccttcagtgtgtccacatccttaaaaaaacatatgagaatgcacaatcgattgccaactttcttgtacaaagtggttgatatcggtaagcctatccctaaccctctcctcggtctcgattctacgtagtaatgaactagtccgtaacttgaaagtatttcgatttcttggctttatatatcttgtggaaaggacgatattcaactataccgaccttggtg

SEQ ID NO: 3584 - DNA, 1034 bp, Homo sapiens
  source 1..1034: mol_type = genomic DNA
atcgattgatcaacaagtttgtacaaaaaagttggcatggggagcaaggctctgccagcgcccatcccgctccacccgtcgctgcagctcaccaattactccttcctgcaggccgtgaacaccttcccggccacggtggaccacctgcagggcctgtacggtctcagcgcggtacagaccatgcacatgaaccactggacgctggggtatcccaatgtgcacgagatcacccgctccaccatcacggagatggcggcggcgcagggcctcgtggacgcgcgcttccccttcccggccctgccttttaccacccacctattccaccccaagcagggggccattgcccacgtcctcccagccctgcacaaggaccggccccgttttgactttgccaatttggcggtggctgccacgcaagaggatccgcctaagatgggagacctgagcaagctgagcccaggactgggtagccccatctcgggcctcagtaaattgactccggacagaaagccctctcgaggaaggttgccctccaaaacgaaaaaagagtttatctgcaagttttgcggcagacactttaccaaatcctacaatttgctcatccatgagaggacccacacggacgagaggccgtacacgtgtgacatctgccacaaggccttccggaggcaagatcacctgcgggatcacagatacatccattccaaagaaaaacccttcaaatgtcaggagtgtgggaaaggattttgtcagtctagaactctagcagttcacaaaactttacacatgcagacatcaagccctacagctgcgagcagtgcggcaaagtgttcaggcgaaactgtgatctgcggcggcacagcctgtccaactttcttgtacaaagtggttgatatcggtaagcctatccctaaccctctcctcggtctcgattctacgtagtaatgaactagtccgtaacttgaaagtatttcgatttcttggctttatatatcttgtggaaaggacgagactacataagctgtagtgccggc

SEQ ID NO: 3585 - DNA, 2747 bp, Homo sapiens
  source 1..2747: mol_type = genomic DNA
atcgattgatcaacaagtttgtacaaaaaagttggcaccatgttgtttaccgtaagctgtagtaaaatgagctcgattgttgacagagatgacagtagtatttttgatgggttggtggaagaagatgacaaggacaaagcgaaaagagtatctagaaacaaatctgaaaagaaacgtagagatcaatttaatgttctcattaaagaactgggatccatgcttcctggtaatgctagaaagatggacaaatctactgttctgcagaaaagcattgattttttacgaaaacataaagaaatcactgcacagtcagatgctagtgaaattcgacaggactggaaacctacattccttagtaatgaagagtttacacaattaatgttagaggctcttgatggtttttttttagcaatcatgacagatggaagcataatatatgtgtctgagagtgtaacttcattacttgaacatttaccatctgatcttgtggatcaaagtatatttaattttatcccagaaggggaacattcagaggtttataaaatactctctactcatctgctggaaagtgattcattaaccccagaatatttaaaatcaaaaaatcagttagaattctgttgtcacatgctgcgaggaacaatagacccaaaggagccatctacctatgaatatgtaaaatttataggaaatttcaaatctttaaacagtgtatcctcttcagcacacaatggttttgaaggaactatacaacgcacacataggccatcttatgaagatagagtttgttttgtagctactgtcaggttagctacacctcagttcatcaaggaaatgtgcactgttgaagaacccaatgaagagtttacatctagacatagtttagaatggaagtttctgtttctagatcacagggcaccacccataatagggtatttgccatttgaagttctgggaacatcaggctatgattactatcatgtggatgacctagaaaatttggcaaaatgtcatgagcacttaatgcaatatgggaaaggcaaatcatgttattataggttcctgactaaggggcaacagtggatttggcttcagactcattattatatcacttaccatcagtggaattcaaggccagagtttattgtttgtactcacactgtagtaagttatgcagaagttagggctgaaagacgacgagaacttggcattgaagagtctcttcctgagacagctgctgacaaaagccaagattctgggtcagataatcgtataaacacagtcagtctcaaggaagcattggaaaggtttgatcacagcccaaccccttctgcctcttctcggagttcaagaaaatcatctcacacggccgtctcagacccttcctcaacaccaaccaagatcccgacggatacgagcactccacccaggcagcatttaccagctcatgagaagatggtgcaaagaaggtcatcatttagtagtcagtccataaattcccagtctgttggttcatcattaacacagccagtgatgtctcaagctacaaatttaccaattccacaaggcatgtcccagtttcagttttcagctcaattaggagccatgcaacatctgaaagaccaattggaacaacggacacgcatgatagaagcaaatattcatcggcaacaagaagaactaagaaaaattcaagaacaacttcagatggtccatggtcaggggctgcagatgtttttgcaacaatcaaatcctgggttgaattttggttccgttcaactttcttctggaaattcatctaacatccagcaacttgcacctataaatatgcaaggccaagttgttcctactaaccagattcaaagtggaatgaatactggacacattggcacaactcagcacatgatacaacaacagactttacagagtacatcaactcagagtcaacaaaatgtactgagtgggcacagtcagcaaacatctctacccagtcagacacagagcactcttacagccccactgtataacactatggtgatttctcagcctgcagccggaagcatggtccagattccatctagtatgccacaaaacagcacccagagtgctgcagtaactacattcactcaggacaggcagataagattttctcaaggtcaacaacttgtgaccaaattagtgactgctcctgtagcttgtggggcagtcatggtacctagtactatgcttatgggccaggtggtgactgcatatcctacttttgctacacaacagcaacagtcacagacattgtcagtaacgcagcagcagcagcagcagagctcccaggagcagcagctcacttcagttcagcaaccatctcaggctcagctgacccagccaccgcaacaatttttacagacttctaggttgctccatgggaatccctcaactcaactcattctctctgctgcatttcctctacaacagagcaccttccctcagtcacatcaccagcaacatcagtctcagcaacagcagcaactcagccggcacaggactgacagcttgcccgacccttccaaggttcaaccacagttgccaactttcttgtacaaagtggttgatatcggtaagcctatccctaaccctctcctcggtctcgattctacgtagtaatgaactagtccgtaacttgaaagtatttcgatttcttggctttatatatcttgtggaaaggacgagtcaaccaaaaggacttgcgatct

SEQ ID NO: 3586 - DNA, 1970 bp, Homo sapiens
  source 1..1970: mol_type = genomic DNA
atcgattgatcaacaagtttgtacaaaaaagttggcaccatggcctccggtgcgtataacccgtatatagagataattgaacaacccaggcagaggggaatgcgttttagatacaaatgtgaagggcgatcagcaggcagcattccaggggagcacagcacagacaacaaccgaacatacccttctatccagattatgaactattatggaaaaggaaaagtgagaattacattagtaacaaagaatgacccatataaacctcatcctcatgatttagttggaaaagactgcagagacggctactatgaagcagaatttggacaagaacgcagacctttgtttttccaaaatttgggtattcgatgtgtgaagaaaaaagaagtaaaagaagctattattacaagaataaaggcaggaatcaatccattcaatgtccctgaaaaacagctgaatgatattgaagattgtgacctcaatgtggtgagactgtgttttcaagtttttctccctgatgaacatggtaatttgacgactgctcttcctcctgttgtctcgaacccaatttatgacaaccgtgctccaaatactgcagaattaaggatttgtcgtgtaaacaagaattgtggaagtgtcagaggaggagatgaaatatttctactttgtgacaaagttcagaaagatgacatagaagttcgttttgtgttgaacgattgggaagcaaaaggcatcttttcacaagctgatgtacaccgtcaagtagccattgttttcaaaactccaccatattgcaaagctatcacagaacccgtaacagtaaaaatgcagttgcggagaccttctgaccaggaagttagtgaatctatggattttagatatctgccagatgaaaaagatacttacggcaataaagcaaagaaacaaaagacaactctgcttttccagaaactgtgccaggatcacgttaattttcctgagagaccaagacctggtctcctcggttcaattggagaaggaagatacttcaaaaaagaaccaaacttgttttctcatgatgcagttgtgagagaaatgcctacaggggtttcaagtcaagcagaatcctactatccctcacctgggcccatctcaagtggattgtcacatcatgcctcaatggcacctctgccttcttcaagctggtcatcagtggcccaccccaccccacgctcaggcaatacaaacccactgagtagtttttcaacaaggacacttccttctaattcgcaaggtatcccaccattcctgagaatacctgttgggaatgatttaaatgcttctaatgcttgcatttacaacaatgccgatgacatagtcggaatggaagcgtcatccatgccatcagcagatttatatggtatttctgatcccaacatgctgtctaattgttctgtgaatatgatgacaaccagcagtgacagcatgggagagactgataatccaagacttctgagcatgaatcttgaaaacccctcatgtaattcagtgttagacccaagagacttgagacagctccatcagatgtcctcttccagtatgtcagcaggcgccaattccaatactactgtttttgtttcacaatcagatgcatttgagggatctgacttcagttgtgcagataacagcatgataaatgagtcgggaccatcaaacagtactaatccaaacagtcatggttttgttcaagatagtcagtattcaggtattggcagtatgcaaaatgagcaattgagtgactcctttccatatgaattttttcaagtattgccaactttcttgtacaaagtggttgatatcggtaagcctatccctaaccctctcctcggtctcgattctacgtagtaatgaactagtccgtaacttgaaagtatttcgatttcttggctttatatatcttgtggaaaggacgacgcaccacacatagactcaagccc

SEQ ID NO: 3587 - DNA, 2417 bp, Homo sapiens
  source 1..2417: mol_type = genomic DNA
atcgattgatcaacaagtttgtacaaaaaagttggcatggatgacgacaaaccttttcaaccaaaaaacatttcaaaaatggcagaactctttatggaatgtgaagaagaagagctagagccatggcagaagaaagtagaagaaactcaggatgaggatgacgatgaactgatctttgttggagagatatcaagttcaaaaccagccatttcaaatattttgaacagaggccactccagctcatcttcaaaaggaataaagagtgagccacacagtccaggtattcctgaaatattcaggactgcaagtcaacgctgcagagacccaccatcaaatccagtggctgcctcgcctagatttcatcttgtatctaaatcttcacaaagctctgttactgttgagaatgcgtctaaacctgattttacaaagaattcacaagttggatcggataattcttcaattttactgtttgactcgacccaggaatcactaccaccatcccaagacataccagcaatttttagagaaggtatgaaaaatacttcatatgtgttgaaacatccttctacttctaaagtaaacagtgttactccaaaaaaaccaaagaccagtgaagatgttcctcagataaatccctccacttcattgcctttaattggctctcctccagtgacatcctcccaagttatgctgtcaaaaggtacaaatacctcatctccatatgatgctggagcagattacctaagagcttgtccaaagtgcaatgttcagttcaatcttttggatcctttgaaataccacatgaagcattgttgtccagacatgataactaaatttttgggagtaattgttaaatcagaacgtccatgtgatgaagacaagactgattcagagacaggaaagttgatcatgttagtcaatgagttttattatggaaggcatgaaggagtcactgagaaagagccaaagacttacacaacctttaaatgcttcagttgctcgaaagttcttaaaaataatattaggtttatgaaccacatgaaacatcacttggaacttgagaagcagaacaatgaaagctgggaaaaccacaccacctgccagcactgttaccggcaatatcccacacccttccaactgcagtgccacattgagagtacacacactccccatgagttttctactatttgcaaaatctgtgaattatcatttgaaacagagcatattcttttacaacatatgaaggacacccataaacctggtgaaatgccatatgtttgccaggtttgccagtttagatcatcaacattttctgatgtagaagctcattttagagcagcccatgaaaacactaagaacttgctatgtccattttgcctcaaagttagtaaaatggcaaccccctacatgaatcattacatgaagcatcagaaaaaaggagttcatcgttgcccaaaatgcagactacaatttttgaccagcaaggagaaagctgaacataaggcgcagcatcgtacatttataaagcctaaagaactagaaggattgcctcctggagcaaaagttactattcgagcttcacttggacctctccagtcaaaattaccaactgcacctttcggttgcgctccaggcacttcttttcttcaggtcacacctccgacatctcaaaatacaactgctagaaatcctagaaaatctaatgccagtagatctaagacaagtaagcttcatgcaactacatccactgcaagtaaagttaatacaagtaagccaaggggacgtatagctaagtccaaagcaaaaccctcttacaagcaaaagcgacagcgcaacagaaaaaataaaatgagccttgctttgaagaacataaggtgtcgtcggggcattcacaagtgcattgaatgtcattccaaaataaaagattttgcaagccacttttctatatacatccactgcagtttttgcaagtacaatactaactgtaacaaagcctttgtaaatcatatgatgagctctcatagcaaccatccaggtaaacggttttgtattttcaagaagcattcaggaactctcaggggcattactctagtgtgccttaaatgtgatttcctagctgattcttccggcttagatcgtatggctaaacacttaagtcaacgtaaaactcatacttgccaagttataatagagaatgtttccaaaagtacctcaacttctgaacccactactggctgctcattgaaatacccaactttcttgtacaaagtggttgatatcggtaagcctatccctaaccctctcctcggtctcgattctacgtagtaatgaactagtccgtaacttgaaagtatttcgatttcttggctttatatatcttgtggaaaggacgatagaaagacccttccttctaccca

SEQ ID NO: 3588 - DNA, 1160 bp, Homo sapiens
  source 1..1160: mol_type = genomic DNA
atcgattgatcaacaagtttgtacaaaaaagttggcatgccgaagcgtgggaaaaagggagcggtggcggaagacggggatgagctcaggacagagccagaggccaagaagagtaagacggccgcaaagaaaaatgacaaagaggcagcaggagagggcccagccctgtatgaggaccccccagatcagaaaacctcacccagtggcaaacctgccacactcaagatctgctcttggaatgtggatgggcttcgagcctggattaagaagaaaggattagattgggtaaaggaagaagccccagatatactgtgccttcaagagaccaaatgttcagagaacaaactaccagctgaacttcaggagctgcctggactctctcatcaatactggtcagctccttcggacaaggaagggtacagtggcgtgggcctgctttcccgccagtgcccactcaaagtttcttacggcataggcgatgaggagcatgatcaggaaggccgggtgattgtggctgaatttgactcgtttgtgctggtaacagcatatgtacctaatgcaggccgaggtctggtacgactggagtaccggcagcgctgggatgaagcctttcgcaagttcctgaagggcctggcttcccgaaagccccttgtgctgtgtggagacctcaatgtggcacatgaagaaattgaccttcgcaaccccaaggggaacaaaaagaatgctggcttcacgccacaagagcgccaaggcttcggggaattactgcaggctgtgccactggctgacagctttaggcacctctaccccaacacaccctatgcctacaccttttggacttatatgatgaatgctcgatccaagaatgttggttggcgccttgattactttttgttgtcccactctctgttacctgcattgtgtgacagcaagatccgttccaaggccctcggcagtgatcactgtcctatcaccctatacctagcactgtgcccaactttcttgtacaaagtggttgatatcggtaagcctatccctaaccctctcctcggtctcgattctacgtagtaatgaactagtccgtaacttgaaagtatttcgatttcttggctttatatatcttgtggaaaggacgatctatgagacgtcatcgcggcctg

SEQ ID NO: 3589 - DNA, 1592 bp, Homo sapiens
  source 1..1592: mol_type = genomic DNA
atcgattgatcaacaagtttgtacaaaaaagttggcatggccagcaacagcagctcctgcccgacacctgggggcgggcacctcaatgggtacccggtgcctccctacgccttcttcttcccccctatgctgggtggactctccccgccaggcgctctgaccactctccagcaccagcttccagttagtggatatagcacaccatccccagccaccattgagacccagagcagcagttctgaagagatagtgcccagccctccctcgccaccccctctaccccgcatctacaagccttgctttgtctgtcaggacaagtcctcaggctaccactatggggtcagcgcctgtgagggctgcaagggcttcttccgccgcagcatccagaagaacatggtgtacacgtgtcaccgggacaagaactgcatcatcaacaaggtgacccggaaccgctgccagtactgccgactgcagaagtgctttgaagtgggcatgtccaaggagtctgtgagaaacgaccgaaacaagaagaagaaggaggtgcccaagcccgagtgctctgagagctacacgctgacgccggaggtgggggagctcattgagaaggtgcgcaaagcgcaccaggaaaccttccctgccctctgccagctgggcaaatacactacgaacaacagctcagaacaacgtgtctctctggacattgacctctgggacaagttcagtgaactctccaccaagtgcatcattaagactgtggagttcgccaagcagctgcccggcttcaccaccctcaccatcgccgaccagatcaccctcctcaaggctgcctgcctggacatcctgatcctgcggatctgcacgcggtacacgcccgagcaggacaccatgaccttctcggacgggctgaccctgaaccggacccagatgcacaacgctggcttcggccccctcaccgacctggtctttgccttcgccaaccagctgctgcccctggagatggatgatgcggagacggggctgctcagcgccatctgcctcatctgcggagaccgccaggacctggagcagccggaccgggtggacatgctgcaggagccgctgctggaggcgctaaaggtctacgtgcggaagcggaggcccagccgcccccacatgttccccaagatgctaatgaagattactgacctgcgaagcatcagcgccaagggggctgagcgggtgatcacgctgaagatggagatcccgggctccatgccgcctctcatccaggaaatgttggagaactcagagggcctggacactctgagcggacagccggggggtggggggcgggacgggggtggcctggcccccccgccaggcagctgtagccccagcctcagccccagctccaacagaagcagcccggccacccactccccgtgcccaactttcttgtacaaagtggttgatatcggtaagcctatccctaaccctctcctcggtctcgattctacgtagtaatgaactagtccgtaacttgaaagtatttcgatttcttggctttatatatcttgtggaaaggacgatttggtgccccttcgcagccgacc

SEQ ID NO: 3590 - DNA, 590 bp, Homo sapiens
  source 1..590: mol_type = genomic DNA
atcgattgatcaacaagtttgtacaaaaaagttggcaccatgtcgcaagggctcccggccgccggcagcgtcctgcagaggagcgtcgcggcgcccgggaaccagccgcagccgcagccgcagcagcagagccctgaggatgatgacaggaaggtccgaaggagagaaaaaaaccgagttgctgctcagagaagtcggaagaagcagacccagaaggctgacaagctccatgaggaatatgagagcctggagcaagaaaacaccatgctgcggagagagatcgggaagctgacagaggagctgaagcacctgacagaggcactgaaggagcacgagaagatgtgcccgctgctgctctgccctatgaactttgtgccagtgcctccccggccggaccctgtggccggctgcttgccccgattgccaactttcttgtacaaagtggttgatatcggtaagcctatccctaaccctctcctcggtctcgattctacgtagtaatgaactagtccgtaacttgaaagtatttcgatttcttggctttatatatcttgtggaaaggacgatctgccaaatagagttcgccggca

SEQ ID NO: 3591 - DNA, 1385 bp, Homo sapiens
  source 1..1385: mol_type = genomic DNA
atcgattgatcaacaagtttgtacaaaaaagttggcaccatggcagggatcttagcctggttctggaacgagaggttttggctcccgcacaatgtcacctgggcggacctgaagaacacggaggaggccaccttcccgcaggctgaggacctctatctcgcttttcccctggccttctgtatcttcatggtgcggctcatcttcgagagatttgtagccaaaccgtgcgccatagccctcaacattcaggccaatggaccacaaattgctccgcccaatgccattctggaaaaggtcttcactgcaattacaaagcatcctgatgaaaagagattggaaggcctctccaagcaactggactgggatgttcgaagcattcagcgctggtttcgacaaagacgcaatcaggagaagccaagcacgctgacgaggttctgtgagagcatgtggagattttcattttacctttatgtatttacctacggagtcagattcctgaaaaagaccccctggttgtggaatacgaggcattgctggtacaactacccctatcagccactcacaactgaccttcactactattacatcctggagctgtcgttttattggtctttgatgttttctcagttcactgatatcaaaagaaaggactttggcattatgttcctgcaccaccttgtatctattttcttgattaccttttcatatgtcaacaatatggcccgagtaggaacgctggtcctttgtcttcatgattcagctgatgctcttctggaggctgccaaaatggcaaattatgccaagtttcagaaaatgtgtgatctcctgtttgttatgtttgccgtggtttttatcaccacacgactgggtatatttcctctctgggtgttaaataccacattatttgaaagctgggagatcgttggaccttacccttcctggtgggtttttaacctactgctattgctagtacaagggttgaactgcttctggtcttacttgattgtgaaaatagcttgcaaagctgtttcaagaggcaaggctgggaagtggaaccctttacatgtgtccaaggatgatcgaagtgatattgagtctagctcagatgaggaggactcagaacctccgggaaagaatccccacactgcgacaaccaccaatgggaccagtggtaccaacgggtatctcctgactggctcctgctccatggatgatttgccaactttcttgtacaaagtggttgatatcggtaagcctatccctaaccctctcctcggtctcgattctacgtagtaatgaactagtccgtaacttgaaagtatttcgatttcttggctttatatatcttgtggaaaggacgatgaagacctggacacgggatgatg

SEQ ID NO: 3592 - DNA, 983 bp, Homo sapiens
  source 1..983: mol_type = genomic DNA
atcgattgatcaacaagtttgtacaaaaaagttggcaccatgcgcctctcctcctccccacctcgtggcccgcagcagctctccagctttggctccgtggactggctctcccagagcagctgctcagggccgacccacacccccaggcctgccgacttctccctggggagcctccctggcccgggccagacatccggcgccagggagccccctcaggccgtcagcatcaaggaggccgccgggtcctcaaatctgcctgcgccggagaggaccatggccgggttgagtaaggagccaaataccttgcgggccccccgtgtccgcacagccttcaccatggagcaggtccgcaccttggagggcgtcttccagcaccaccagtacctgagccctctggagcggaagaggctggccagggagatgcagctctcagaggtccagataaaaacctggtttcagaatcgccgcatgaaacacaaacggcaaatgcaggacccccagctgcacagccccttctcggggtctctccatgcgcccccagctttctactcaacgtcttctggccttgccaatggcctgcagctgctgtgcccttgggcacccctgtccgggccccaggctctgatgctgccccctggctccttctggggtctctgccaagtggcacaagaggccctggcatctgcgggagcttcctgctgcgggcagcctctggcgtcccacccccctaccccaggccggccttcgctgggaccagccctgtccacggggccccggggcctgtgtgctatgccacagacgggggatgcatttttgccaactttcttgtacaaagtggttgatatcggtaagcctatccctaaccctctcctcggtctcgattctacgtagtaatgaactagtccgtaacttgaaagtatttcgatttcttggctttatatatcttgtggaaaggacgatcacaacacctcttctcgccaacg

SEQ ID NO: 3593 - DNA, 1244 bp, Homo sapiens
  source 1..1244: mol_type = genomic DNA
atcgattgatcaacaagtttgtacaaaaaagttggcatggctctggacgtgaagtctcgggcaaagcgttatgagaagctggacttccttggggagggacagtttgccaccgtttacaaggccagagataagaacaccaaccaaattgtcgccattaagaaaatcaaacttggacatagatcagaagctaaagatggtataaatagaaccgccttaagagagataaaattattacaggagctaagtcatccaaatataattggtctccttgatgcttttggacataaatctaatattagccttgtctttgattttatggaaactgatctagaggttataataaaggataatagtcttgtgctgacaccatcacacatcaaagcctacatgttgatgactcttcaaggattagaatatttacatcaacattggatcctacatagggatctgaaaccaaacaacttgttgctagatgaaaatggagttctaaaactggcagattttggcctggccaaatcttttgggagccccaatagagcttatacacatcaggttgtaaccaggtggtatcgggcccccgagttactatttggagctaggatgtatggtgtaggtgtggacatgtgggctgttggctgtatattagcagagttacttctaagggttccttttttgccaggagattcagaccttgatcagctaacaagaatatttgaaactttgggcacaccaactgaggaacagtggccggacatgtgtagtcttccagattatgtgacatttaagagtttccctggaatacctttgcatcacatcttcagtgcagcaggagacgacttactagatctcatacaaggcttattcttatttaatccatgtgctcgaattacggccacacaggcactgaaaatgaagtatttcagtaatcggccagggccaacacctggatgtcagctgccaagaccaaactgtccagtggaaaccttaaaggagcaatcaaatccagctttggcaataaaaaggaaaagaacagaggccttagaacaaggaggattgcccaagaaactaattttttacccaactttcttgtacaaagtggttgatatcggtaagcctatccctaaccctctcctcggtctcgattctacgtagtaatgaactagtccgtaacttgaaagtatttcgatttcttggctttatatatcttgtggaaaggacgatgcgactagactgatggcacgatt

SEQ ID NO: 3594 - DNA, 2009 bp, Homo sapiens
  source 1..2009: mol_type = genomic DNA
atcgattgatcaacaagtttgtacaaaaaagttggcaccatggcagcctcggcgcaggtgtctgtgacctttgaggatgtggctgtgacattcacccaggaggagtggggacagttggatgcagcccagagaaccttgtatcaggaggtgatgctggagacctgcggacttctcatgtctctgggctgtcctttgttcaaaccagagctgatctaccagttggatcacagacaggagctatggatggctacaaaagacctctcccaaagctcctatccaggtgacaacacaaaacccaagaccacagagcctaccttttctcacctggccttgcctgaggaagtcttactccaggaacaactgacacaaggagcctcaaagaactcccaattagggcaatccaaggatcaggatgggccatctgaaatgcaagaagtccacttgaaaatagggataggcccccagcgggggaagctgctggagaaaatgagttctgaacgtgatggtttggggtcagatgatggtgtatgtacaaagattacacagaaacaagtttcaacagaaggtgatctctatgaatgtgattcacatggaccagttacagatgccttgattcgcgaagagaaaaattcctataaatgtgaggaatgcgggaaagtgtttaaaaagaatgccctccttgttcagcatgaacggattcacactcaagtgaagccctatgaatgcacagagtgtgggaaaacctttagcaagagcactcatcttcttcagcacctcatcatccacactggggagaagccctataagtgcatggagtgtgggaaggcttttaaccgcaggtcacacctcacacggcaccagcggattcacagtggagagaagccttataagtgcagtgaatgtggaaaggccttcacccaccgctccacttttgtcttgcatcacaggagccacactggagaaaaaccctttgtgtgcaaagagtgtggcaaagcctttcgagataggccaggtttcattcgacactacatcatccacacgggagagaagccctatgagtgcattgagtgtgggaaggccttcaaccgccggtcatacctcacgtggcaccaacagattcacactggagtgaaaccctttgaatgcaacgagtgtggaaaagctttttgcgagagtgcagacctcattcaacactacattatccacactggggagaagccctataagtgcatggagtgtgggaaggcgttcaaccgtaggtcacacctcaagcagcatcaacggattcacactggggagaagccttatgaatgcagtgaatgtggaaaggccttcacccactgctccacttttgtcttgcataaaaggacccacacaggagaaaaaccctatgaatgcaaagaatgtggaaaagcctttagtgatagggcagacctcattcgccacttcagcatccacactggagagaaaccctatgagtgcgtggagtgtggaaaggccttcaaccgcagctcacacctcacgaggcaccaacagattcacactggagagaaaccctatgaatgcatccagtgtgggaaagccttttgccggagcgcaaaccttattcgacactccatcattcacactggagagaagccgtatgaatgcagtgagtgtggaaaggcttttaatcgcggctcatccctcacacatcatcaaaggattcatactgggagaaaccctaccattgtaacagatgtgggaagaccttttatgactgcacagacttcagtcaacatccaggaacttttattagggaaagagtttttgaatatcaccactgaagaaaatctgtggttgccaactttcttgtacaaagtggttgatatcggtaagcctatccctaaccctctcctcggtctcgattctacgtagtaatgaactagtccgtaacttgaaagtatttcgatttcttggctttatatatcttgtggaaaggacgaggccttagcgaagaggtgacagac

SEQ ID NO: 3595 - DNA, 1412 bp, Homo sapiens
  source 1..1412: mol_type = genomic DNA
atcgattgatcaacaagtttgtacaaaaaagttggcatgaatatccatatgaagagaaaaacaataaagaatatcaacacctttgagaacagaatgttaatgcttgatgggatgccggcagtcagagtcaaaacagagcttttggaatctgaacaagggtctccaaacgtccacaactatcccgatatggaagccgttcccctgttgctaaataatgtgaaaggggagcccccggaggactcgttatctgtagatcacttccaaacacaaactgagccagtggacttgtcaataaacaaagccaggacgtcccctactgccgtttcatcctccccagtttccatgacagcatctgcctcctcaccttcttcaacttcaacctcttcatcgtcttctagtcgtctagcctcatccccaactgttatcacatcagtatcttcagcgtcatcttcgtcaacagtattaactccagggccccttgtggcctctgcatctggtgttggaggccagcagtttttgcacattatccatcccgtaccgccttcaagtcccatgaatttacagtctaacaaactgagtcatgttcaccgcatccccgtggtggtacagtcggtgcctgttgtctacacagctgtaaggtcacctggaaatgtgaacaacactattgtcgtgccgcttttggaggatgggagaggccatggcaaagcacaaatggacccccgaggcctatctcccagacaaagtaaaagtgacagtgatgatgatgacctgccaaatgtgaccttagatagcgttaatgaaactggatctacggccctttccatagccagagcagtacaagaggtacatccgtccccagtatcaagggtccggggaaatcgaatgaataatcaaaagtttccttgttcaatttcaccatttagtattgagagcacaagacgccagagacggtctgaatccccagactccagaaaacggcgtatccacagatgtgattttgagggatgcaacaaagtgtacacaaaaagttctcacctgaaggctcaccggaggacacatacaggagagaaaccttacaagtgtacctgggaaggctgcacctggaagttcgctcgttcagatgaactgacgaggcattaccgcaaacatacgggagtgaagccattcaagtgcgcggactgtgatcgcagcttttcccggtcagatcatttggccctgcaccgccggaggcatatgttggtgtgcccaactttcttgtacaaagtggttgatatcggtaagcctatccctaaccctctcctcggtctcgattctacgtagtaatgaactagtccgtaacttgaaagtatttcgatttcttggctttatatatcttgtggaaaggacgagaaattcaatctagggcccatttg

SEQ ID NO: 3596 - DNA, 1424 bp, Homo sapiens
  source 1..1424: mol_type = genomic DNA
atcgattgatcaacaagtttgtacaaaaaagttggcatgcagcgaatgatccaacaatttgctgctgaatatacctcaaaaaatagctctactcaggaccccagccagcccaatagcacaaagaaccaaagcctgccgaaagcatctccagtcaccacctctcccacggctgcaactactcagaaccctgtgctcagcaaacttctcatggctgaccaagactcacctctggaccttactgtcagaaagtctcagtcagaacctagcgaacaagacggtgtacttgatctgtccactaagaaaagtccatgtgctggcagcacttccctgagccactctccaggctgctccagtactcaagggaacgggcgacctgggagacccagccagtaccgcccagacggacttcggagtggtgatggggtacctccaagaagcttacaggatggaaccagggaaggttttggacactccacatcactcaaagttccactggctcgatccctgcagattagtgaagaactactgagcagaaaccaattgtccacagctgccagccttgggccatctggattacagaatcatggacaacacttaatattatccagggaagcctcttgggcaaaaccacattacgagttcaacctcagccgtatgaagttcaggggaaatggtgcactcagcaacatcagtgaccttccttttcttgcagaaaactctgcctttccaaaaatggcacttcaagcaaaacaagatggaaaaaaggatgtgagccattcatctcctgtagatttaaagataccacaagttcgaggaatggatctttcttgggagtctcgcactggtgatcagtacagctatagctctttggtaatgggttcacaaacggagagcgcgcttagtaaaaaattaagggctattcttccaaaacaaagtagaaaaagcatgttagatgctggacccgattcttggggctcagatgctgagcagtctacctctggacagccatatcccacatcggatcaagaaggagaccctggctccaagcagcctcggaagaaaagagggcgttacagacagtacaacagtgagatactggaggaagcaatctcagtggttatgagtggaaaaatgagtgtttccaaagctcagagtatttatgggattccccacagtacactggagtacaaagtaaaggagaggctgggcactttgaaaaaccctccaaagaaaaagatgaaattaatgagtggatgcccaactttcttgtacaaagtggttgatatcggtaagcctatccctaaccctctcctcggtctcgattctacgtagtaatgaactagtccgtaacttgaaagtatttcgatttcttggctttatatatcttgtggaaaggacgagcatggccaggcaatccaatatcg

SEQ ID NO: 3597 - DNA, 1502 bp, Homo sapiens
  source 1..1502: mol_type = genomic DNA
atcgattgatcaacaagtttgtacaaaaaagttggcaccatgtttcatagtccgcggcggctctgctcggccctgctgcagagggacgcgcccggcctgcgccgcctgcccgccccagggctgcgccgcccgttgtccccgccggctgctgttcccaggcccgcatccccccggctgctggcggcggcctcggcggcctcgggcgccgcgaggtcgtgttcccgaacagtgtgttccatgggaaccggtacaagcagactctatagtgctctcgccaagacactgaacagcagcgctgcctcccagcacccagagtatttggtgtcacctgacccagagcatctggagcccattgatcctaaagagcttcttgaggaatgcagggccgtcctgcacacccgacctccccggttccagagggattttgtggatctgaggacagattgccctagtacccacccacctatcagggttatgcaatggaacatcctcgcccaagctcttggagaaggcaaagacaactttgtacagtgccctgttgaagcactcaaatgggaagaaaggaaatgtctcatcctggaagaaatcctggcctaccagcctgatatattgtgcctccaagaggtggaccactattttgacaccttccagccactcctcagtagactaggctatcaaggcacgtttttccccaaaccctggtcaccttgtctagatgtagaacacaacaatggaccagatggttgtgccttattttttcttcaaaaccgattcaagctagtcaacagtgccaatattaggctgacagccatgacattgaaaaccaaccaggtggccattgcacagaccctggagtgcaaggagtcaggccgacagttctgcatcgctgttacccatctaaaagcacgcactggctgggagcggtttcgatcagctcaaggctgtgacctccttcagaacctgcaaaacatcacccaaggagccaagattccccttattgtgtgtggggacttcaatgcagagccaacagaagaggtctacaaacactttgcttcctccagcctcaacctgaacagcgcctacaagctgctgagtgctgatgggcagtcagaacccccatacactacctggaagatccggacctcaggggagtgcaggcacaccctggattacatctggtattctaaacatgctctaaatgtaaggtcagctctcgatctgctcactgaagaacagattggacccaacaggttaccttccttcaattatccttcagaccacctgtctctagtgtgtgacttcagctttactgaggaatctgatggactttcattgccaactttcttgtacaaagtggttgatatcggtaagcctatccctaaccctctcctcggtctcgattctacgtagtaatgaactagtccgtaacttgaaagtatttcgatttcttggctttatatatcttgtggaaaggacgaatctgccgagggcgagatcctctt

SEQ ID NO: 3598 - DNA, 1490 bp, Homo sapiens
  source 1..1490: mol_type = genomic DNA
atcgattgatcaacaagtttgtacaaaaaagttggcaccatgactctagtcacagcaggaggggcttggacaggccctggttgttggcatgaagtgaaggatgaagagtcatcttctgaacagagcatttctatagcagtgtcacatgttaatacttccaaggcaggtttgcccgcacagacggctctcccttgtgacatatgtggccccatcttgaaagatattttgcacctggatgaacaccagggtacacaccatggactgaaacttcacacatgtggggcatgtgggagacaattctggttcagtgcaaaccttcatcagtaccagaagtgttacagtatagagcaacccttaagaagggataaaagtgaggcctcaattgtgaagaactgcacagttagcaaagaacctcatccgtcagagaagccctttacgtgtaaggaggagcagaaaaacttccaggctactttgggtggctgccaacaaaaggccatccacagtaagaggaagacacacaggagcactgagagtggggatgcatttcatggtgaacaaatgcattacaagtgcagtgaatgtgggaaagctttcagccgcaaagacacacttgtccagcaccagagaattcatagtggagagaagccttatgagtgcagcgaatgtgggaaagccttcagccgcaaagctacacttgtccagcatcagagaatccatactggagaaaggccttatgaatgcagcgaatgtggaaaaaccttcagtcgaaaagacaaccttactcagcacaagagaatccacactggagaaatgccttataagtgcaatgaatgtgggaaatattttagccatcactccaatctaattgtacaccagagagttcacaatggagcaaggccttataagtgcagtgattgtgggaaagtcttcagacacaaatctacacttgttcagcatgagagtattcacactggagaaaatccttatgattgcagtgattgtgggaaatcctttggccacaaatacaccctcattaaacatcagcgaattcacactgagtcaaagccgtttgagtgcattgaatgcgggaaattctttagtcgaagttctgactatattgcacaccagagggttcacactggtgaaaggccttttgtgtgcagtaaatgtgggaaagactttatcagaacctcccaccttgttcgacaccaaagagttcacactggagaaaggccatatgagtgcagtgaatgtgggaaggcctacagcttaagctcccacctcaatcggcaccagaaagttcacactgcaggcaggcttttgccaactttcttgtacaaagtggttgatatcggtaagcctatccctaaccctctcctcggtctcgattctacgtagtaatgaactagtccgtaacttgaaagtatttcgatttcttggctttatatatcttgtggaaaggacgagccgtgatggtttatgcccatgtt

SEQ ID NO: 3599 - DNA, 1985 bp, Homo sapiens
  source 1..1985: mol_type = genomic DNA
atcgattgatcaacaagtttgtacaaaaaagttggcatggatagaatgacagaagatgctcttcgcttgaatctgttgaagcggagcttggacccagcagatgagcgagatgatgtcctggcaaagcgactcaaaatggaggggcatgaggccatggaacgtctgaaaatgttggcattgctcaaaaggaaggatttggcaaatcttgaggtgccacatgagttacccaccaaacaggatggcagtggtgtcaagggctatgaagaaaaacttaacgggaatctcaggcctcatggagacaacaggactgctggaaggccaggcaaagaaaacatcaatgatgagcctgtggatatgagtgctagacggagtgagccagagcgaggaaggctaactccctcaccagacatcattgttttgtctgacaatgaggcttccagtccccgttccagttccagaatggaagaaagactcaaagcagccaacttagagatgtttaaggggaaaggcattgaggagcggcagcagcttatcaagcagctgagggatgagctacgattggaagaagcccgactggtcctgttaaagaaactgagacagagtcagctacagaaagagaatgtggtccagaagactccagttgtacagaatgcagcatctattgttcagccatctcctgcccatgtgggacagcagggcctatctaagcttccctctcggcctggggcccaaggggttgaacctcaaaatttgagaacattacagggtcacagtgtcatccgttcagctaccaataccacccttccacacatgttgatgtctcaacgtgttattgcaccaaacccagcccagctacagggtcagcggggcccgcctaagcctggccttgtacgcaccacaacacccaacatgaatcccgccatcaattatcaaccgcagtcaagttcttctgttccatgtcagcgtacaacatcctctgccatctatatgaaccttgcttctcatatccagccagggacggtgaacagagtgtcctcgccacttcctagccccagcgccatgactgatgctgccaactcacaggctgcagccaaattggctcttcgcaaacagctggaaaagacactcctggagatcccaccccctaaacctcctgctcccttacttcatttcttgcctagtgcagccaatagcgagttcatctacatggtaggcttggaagaagtcgtacagagtgtcattgacagccaaggcaaaagctgtgcctcacttctgcgggttgaaccctttgtatgtgcccagtgccgcacagatttcacccctcactggaagcaagaaaagaatggtaagattctatgtgagcagtgtatgacctccaaccagaaaaaggctctaaaagctgaacacaccaaccggctgaaaaatgcatttgtgaaagccctacagcaggaacaggaaattgaacagcgattacagcagcaggcagccctctcccccactacggctccagctgtgtccagtgtcagtaaacaagagaccatcatgagacatcatacgcttcggcaggctccacagccccagagcagcctccagcgtggcatacccacatctgcccgctccatgctttcaaactttgcacaggcaccccagttgtctgtgccaggtggcctccttggtatgccaggtgtcaacattgcatacttgaatactggcatcggaggacacaaaggccccagtttggcagaccgacagcgtgaataccttttagacatgatccctccccggtctatatcgcagtccatcagtggacagaaatacccaactttcttgtacaaagtggttgatatcggtaagcctatccctaaccctctcctcggtctcgattctacgtagtaatgaactagtccgtaacttgaaagtatttcgatttcttggctttatatatcttgtggaaaggacgactctttctggggtgagcagcatgt

SEQ ID NO: 3600 - DNA, 2234 bp, Homo sapiens
  source 1..2234: mol_type = genomic DNA
atcgattgatcaacaagtttgtacaaaaaagttggcatgtcgcgccgggccctccggaggctgaggggggaacagcgcggccaggagcccctcgggcccggcgccttgcatttcgatctccgtgatgacgatgacgcggaagaagaagggcccaagcgggagcttggtgtccggcgtcccgggggcgcagggaaggagggcgtccgagtcaacaaccgcttcgagctgataaacattgacgatcttgaggatgaccctgtggtgaacggggagaggtctggctgtgcgctcacagacgctgtggcaccagggaacaaaggaaggggtcagcgtggaaacacagagagcaagacggatggagatgacaccgagacagtgccctcagagcagtctcatgcaagtggcaaactccggaagaagaaaaaaaaacagaaaaacaagaaaagcagcacgggagaagcatcggaaaacggactagaagatatcgatcgcatcctagagaggattgaggacagcactgggttgaaccgtcccggcccagctcccctgagctccaggaagcacgttctctacgtggagcacagacacttgaatccagacacagaactgaaaaggtattttggtgcccgggcaatcctgggggagcaaaggccacggcagagacaacgtgtgtaccccaagtgcacatggctgaccacccctaaaagcacctggccccgctacagcaaaccaggtctgtccatgcggctgctggaatcaaaaaaaggcctctccttctttgcgtttgagcacagtgaggagtaccagcaggctcagcacaagttcctggtggccgtggagtctatggagccgaacaacatcgtggttctgctccagacgagcccttaccacgttgactcactcctgcagctcagcgatgcctgccgctttcaagaggatcaggagatggctcgagacctcgtagagagagcgctgtacagcatggaatgtgcgttccaccccctgttcagtctcaccagtggggcctgccggctggattaccgcagacccgagaacaggagcttctacctggccctctacaagcagatgagcttcctggagaagcgaggctgcccgcgcacggcgctggagtactgcaagctcatcctgagtctcgagccggatgaggaccccctctgcatgctgctgctcatcgaccacctggccttgcgggcccggaactacgagtacctgatccgcctcttccaggagtgggaggctcatcggaacctgtcccagctccctaattttgccttctctgttccactggcgtatttcctgctgagccagcagacagacctccctgagtgtgagcagagctctgccaggcagaaggcctctctcctgatacagcaggcgctcaccatgttccctggagtcctcctgcccctgctcgagtcttgcagtgtgcggcccgacgccagcgtttccagtcaccgcttctttggacccaatgctgaaataagccagccccctgccctgagccagctggtgaacctgtaccttgggaggtcacactttctctggaaagagcccgccaccatgagctggctggaggagaacgtccacgaggttctgcaagcagtggacgccggggacccagccgtggaagcctgtgagaaccggcggaaggtgctctaccagcgtgcacccaggaatatccaccgccatgtgatcctctctgagatcaaggaagccgtcgctgccctgcccccggacgtgaccacgcagtctgtgatggggtttgatcctctgcctccttcggacacaatctactcctacgtcaggccagagaggctaagtcctatcagccatggaaacaccattgctctcttcttccggtcactgttgccaaactataccatggagggggagaggcccgaggaaggagtggctgggggtctgaaccgcaaccagggcctgaacaggctgatgctggctgtgcgcgacatgatggccaacttccacctcaacgacctggaggcaccgcacgaggacgacgctgagggggagggggagtgggactgcccaactttcttgtacaaagtggttgatatcggtaagcctatccctaaccctctcctcggtctcgattctacgtagtaatgaactagtccgtaacttgaaagtatttcgatttcttggctttatatatcttgtggaaaggacgaactatagatactgaggttacatct

SEQ ID NO: 3601 - DNA, 929 bp, Homo sapiens
  source 1..929: mol_type = genomic DNA
atcgattgatcaacaagtttgtacaaaaaagttggcaccatgtccaaaccttcagaccacatcaagcggcccatgaacgccttcatggtatggtcccggggccagcggcgcaagatggcccaggaaaaccccaagatgcacaactcggagatcagcaaacgcctaggtgccgaatggaagcttctgtccgaggcagagaagcggccatacatcgatgaagccaagcggctacgcgcccagcacatgaaggagcaccctgactacaagtaccgacctcggcgcaagcccaagaacctgctcaagaaggacaggtatgtcttccccttgccctacctgggcgacacggacccgctcaaggcggctggcctgcccgtgggggcctccgacggcctcctgagcgcgcccgagaaagcccgggccttcttgccgccggcctcggcgccctactccctgctggaccccgcgcagtttagctcgagcgccatccagaagatgggcgaagtgccccacaccttggctaccggcgctctgccctacgcgtccaccctgggctaccagaacggcgccttcggcagcctcagctgccccagccagcacacgcacacgcacccgtcccccaccaaccctggctacgtggtgccctgtaactgtaccgcctggtctgcctccaccctgcagccccccgtcgcctacatcctcttcccaggcatgaccaagactggcatagacccttattcgtcagcccacgctacggccatgttgccaactttcttgtacaaagtggttgatatcggtaagcctatccctaaccctctcctcggtctcgattctacgtagtaatgaactagtccgtaacttgaaagtatttcgatttcttggctttatatatcttgtggaaaggacgaatgacaactaaataggtccataga

SEQ ID NO: 3602 - DNA, 929 bp, Homo sapiens
  source 1..929: mol_type = genomic DNA
atcgattgatcaacaagtttgtacaaaaaagttggcaccatgtccaaaccttcagaccacatcaagcggcccatgaacgccttcatggtatggtcccggggccagcggcgcaagatggcccaggaaaaccccaagatgcacaactcggagatcagcaaacgcctaggtgccgaatggaagcttctgtccgaggcagagaagcggccatacatcgatgaagccaagcggctacgcgcccagcacatgaaggagcaccctgactacaagtaccgacctcggcgcaagcccaagaacctgctcaagaaggacaggtatgtcttccccttgccctacctgggcgacacggacccgctcaaggcggctggcctgcccgtgggggcctctgacggcctcctgagcgcgcccgagaaagcccgggccttcttgccgccggcctcggcgccctactccctgctggaccccgcgcagtttagctcgagcgccatccagaagatgggcgaagtgccccacaccttggctaccggcgctctgccctacgcgtccaccctgggctaccagaacggcgccttcggcagcctcagctgccccagccagcacacgcacacgcacccgtcccccaccaaccctggctacgtggtgccctgtaactgtaccgcctggtctgcctccaccctgcagccccccgtcgcctacatcctcttcccaggcatgaccaagactggcatagacccttattcgtcagcccacgctacggccatgttgccaactttcttgtacaaagtggttgatatcggtaagcctatccctaaccctctcctcggtctcgattctacgtagtaatgaactagtccgtaacttgaaagtatttcgatttcttggctttatatatcttgtggaaaggacgatcattaaaggctgggcttccgaat

SEQ ID NO: 3603 - DNA, 1424 bp, Homo sapiens
  source 1..1424: mol_type = genomic DNA
atcgattgatcaacaagtttgtacaaaaaagttggcatgcgcggctctgtggagtgcacctggggttgggggcactgtgcccccagccccctgctcctttggactctacttctgtttgcagccccatttggcctgctgggggagaagacccgccaggtgtctctggaggtcatccctaactggctgggccccctgcagaacctgcttcatatacgggcagtgggcaccaattccacactgcactatgtgtggagcagcctggggcctctggcagtggtaatggtggccaccaacaccccccacagcaccctgagcgtcaactggagcctcctgctatcccctgagcccgatgggggcctgatggtgctccctaaggacagcattcagttttcttctgcccttgtttttaccaggctgcttgagtttgacagcaccaacgtgtccgatacggcagcaaagcctttgggaagaccatatcctccatactccttggccgatttctcttggaacaacatcactgattcattggatcctgccaccctgagtgccacatttcaaggccaccccatgaacgaccctaccaggacttttgccaatggcagcctggccttcagggtccaggccttttccaggtccagccgaccagcccaaccccctcgcctcctgcacacagcagacacctgtcagctagaggtggccctgattggagcctctccccggggaaaccgttccctgtttgggctggaggtagccacattgggccagggccctgactgcccctcaatgcaggagcagcactccatcgacgatgaatatgcaccggccgtcttccagttggaccagctactgtggggctccctcccatcaggctttgcacagtggcgaccagtggcttactcccagaagccggggggccgagaatcagccctgccctgccaagcttcccctcttcatcctgccttagcatactctcttccccagtcacccattgtccgagccttctttgggtcccagaataacttctgtgccttcaatctgacgttcggggcttccacaggccctggctattgggaccaacactacctcagctggtcgatgctcctgggtgtgggcttccctccagtggacggcttgtccccactagtcctgggcatcatggcagtggccctgggtgccccagggctcatgctgctagggggcggcttggttctgctgctgcaccacaagaagtactcagagtaccagtccataaattacccaactttcttgtacaaagtggttgatatcggtaagcctatccctaaccctctcctcggtctcgattctacgtagtaatgaactagtccgtaacttgaaagtatttcgatttcttggctttatatatcttgtggaaaggacgaacccaagggtcggaagctccaact

SEQ ID NO: 3604 - DNA, 1145 bp, Homo sapiens
  source 1..1145: mol_type = genomic DNA
atcgattgatcaacaagtttgtacaaaaaagttggcaccatggcggacggcgacagcggcagcgagcgcggcggcggcggtgggccgtgcgggttccagcccgcgtcccgcggcggcggcgagcaagagacgcaggagctggcctcgaagcggctggacatccagaacaagcgcttctacttagatgtgaagcagaacgccaagggccgcttcctcaagatcgccgaggtgggcgcgggcggttccaagagccgcctcacgctgtccatggcggtggccgccgagttccgcgactcgctgggcgacttcatagaacactacgcgcagctgggccctagcagccccgagcagctggcggcgggcgccgaggagggcggcgggccgcggcgcgcgctcaagagcgaattcttggtgcgtgagaaccgcaagtactacctggacctcaaggagaaccagcgcggccgcttcctgcgcatccgccaaacggtcaaccgcggcggtggcggcttcggcgcgggccccgggccgggcggcttgcagagcggccagaccatcgcgctgcctgcgcagggcctcatcgagttccgcgacgcgctggcgaagctcatagacgactacggaggcgaggacgacgagctggcaggcggcccgggaggcggcgccgggggcccagggggcggcctgtatggagagctcccggagggcacctccatcaccgtggactccaagcgcttcttcttcgatgtgggctgcaacaaatacggggtgtttctgcgagtgagcgaggtgaagccgtcctaccgcaatgccatcaccgtacccttcaaagcctggggcaagttcggaggcgccttttgccggtatgcggatgagatgaaagaaatccaggaacgacagagggataagctttatgagcgacgtggtgggggcagcggcggcggcgaagagtcagagggtgaggaggtggatgaggatttgccaactttcttgtacaaagtggttgatatcggtaagcctatccctaaccctctcctcggtctcgattctacgtagtaatgaactagtccgtaacttgaaagtatttcgatttcttggctttatatatcttgtggaaaggacgagtacttactactcccaccagcaac

SEQ ID NO: 3605 - DNA, 926 bp, Homo sapiens
  source 1..926: mol_type = genomic DNA
atcgattgatcaacaagtttgtacaaaaaagttggcatgtcgcgatccaaccggcagaaggagtacaaatgcggggacctggtgttcgccaagatgaagggctacccacactggccggcccggattgacgagatgcctgaggctgccgtgaaatcaacagccaacaaataccaagtcttttttttcgggacccacgagacggcattcctgggccccaaagacctcttcccttacgaggaatccaaggagaagtttggcaagcccaacaagaggaaagggttcagcgaggggctgtgggagatcgaaaacaaccctactgtcaaggcttccggctatcagtcctcccagaaaaagagctgtgtggaagagcctgaaccagagcccgaagctgcagagggtgacggtgataagaaggggaatgcagagggcagcagcgacgaggaagggaagctggtcattgatgagccagccaaggagaagaacgagaaaggagcgttgaagaggagagcaggggacttgctggaggactctcctaaacgtcccaaggaggcagaaaaccctgaaggagaggagaaggaggcagccaccttggaggttgagaggccccttcctatggaggtggaaaagaatagcaccccctctgagcccggctctggccgggggcctccccaagaggaagaagaagaggaggatgaagaggaagaggctaccaaggaagatgctgaggccccaggcatcagagatcatgagagcctgtacccaactttcttgtacaaagtggttgatatcggtaagcctatccctaaccctctcctcggtctcgattctacgtagtaatgaactagtccgtaacttgaaagtatttcgatttcttggctttatatatcttgtggaaaggacgaattgactaataatctatttacctc

SEQ ID NO: 3606 - DNA, 941 bp, Homo sapiens
  source 1..941: mol_type = genomic DNA
atcgattgatcaacaagtttgtacaaaaaagttggcatggccgaggacctctctgcggccacgtcctacaccgaagatgatttctactgccccgtctgtcaggaggtgctcaaaacgcccgtgcggaccacggcctgtcagcacgttttctgtagaaaatgtttcctgactgcaatgagggaaagcggagcacattgtcccctatgtcgtggaaatgtgactagaagagagagagcatgtcctgaacgggccttagaccttgaaaatataatgaggaagttttctggtagctgcagatgctgtgcaaaacagattaaattctatcgcatgagacatcattacaaatcttgtaagaagtatcaggatgaatatggtgtttcttctatcattccaaactttcagatctctcaagattcagtagggaacagcaataggagtgaaacatccacatctgataacacagaaacttaccaagagaatacaagttcttctggtcatcctacttttaagtgtcccctgtgtcaagaatcaaattttaccagacagcgtttactggatcactgtaacagtaatcacctatttcagatagttcctgtgacatgtcctatttgtgtgtctcttccttggggagatcctagccagattaccagaaatttcgttagtcatctaaatcagagacatcaatttgattatggagaatttgtgaatcttcagctagatgaagaaacccaataccaaactgctgttgaagaatcttttcaagtaaacatctgcccaactttcttgtacaaagtggttgatatcggtaagcctatccctaaccctctcctcggtctcgattctacgtagtaatgaactagtccgtaacttgaaagtatttcgatttcttggctttatatatcttgtggaaaggacgaaacggcggtgctaggcggggccca

SEQ ID NO: 3607 - DNA, 1154 bp, Homo sapiens
  source 1..1154: mol_type = genomic DNA
atcgattgatcaacaagtttgtacaaaaaagttggcaccatggtgcagcagcggggcgcgagggccaagcgggacggcgggccgccgcccccgggacccgggccggccgaggagggggcgcgcgagcccggctggtgcaagaccccgagcggccacatcaagaggccgatgaacgcattcatggtgtggtcgcagcacgaacggcggaagatcatggaccagtggcccgacatgcacaacgccgagatctccaagcgcctgggccgccgctggcagctgctgcaggactcggagaagatcccgttcgtgcgggaggcggagcggctgcggctcaagcacatggcggattacccggactacaagtaccggccgcgcaaaaagagcaagggggcgcccgccaaggcgcggccccgcccccccggtggtagcggtggcggcagccggctcaagcccgggccgcagctgcctggccgcgggggccgccgagcagcgggagggcctttggggggcggggcggcggcgcccgaggacgacgatgaagacgacgacgaggagctgctggaagtgcgcctggtcgagaccccggggcgggagctgtggaggatggtcccggcgggacgggccgctcggggacaagcggagcgcgcccaagggccgtcgggcgagggggcggccgccgccgccgccgcctccccgacaccgtcggaggacgaggagccggaggaagaggaggaggaggcggcagcggctgaggaaggtgaagaggagacggtggcgtcgggggaggagtcgctgggctttctgtccaggctgccccctggcccggccggcctggactgcagcgccctggatcgcgacccggacctgcagcctccctcgggcacgtcgcacttcgagttcccggactactgcacccccgaggttaccgagatgatcgcgggggactggcgcccgtctagcatcgcagacctggttttcacctacttgccaactttcttgtacaaagtggttgatatcggtaagcctatccctaaccctctcctcggtctcgattctacgtagtaatgaactagtccgtaacttgaaagtatttcgatttcttggctttatatatcttgtggaaaggacgaataagtggcggtgattaattacaa

SEQ ID NO: 3608 - DNA, 614 bp, Homo sapiens
  source 1..614: mol_type = genomic DNA
atcgattgatcaacaagtttgtacaaaaaagttggcaccatgatgctgagtccggaccaagcagcagattcggaccatcccagctcggcgcactcggatccggagtccctgggcggcacggacaccaaggtgctcggcagcgtgtcggacctggagccggtggaggaggccgagggcgacggcaagggcggcagccgagccgcgctctacccgcacccgcagcagctgagccgcgaggagaagcgccgccgccggcgcgccacggccaagtaccgctcggcccacgccacccgcgagcgcatccgcgtggaagccttcaacttggccttcgccgagctccgcaaattgctgcccacgctgcccccggacaagaagctctccaagatcgagatcctgcgcctggccatctgctacatctcctatctcaaccacgtcctggacgtgttgccaactttcttgtacaaagtggttgatatcggtaagcctatccctaaccctctcctcggtctcgattctacgtagtaatgaactagtccgtaacttgaaagtatttcgatttcttggctttatatatcttgtggaaaggacgatccatcaacgtttcggacattggt

SEQ ID NO: 3609 - DNA, 2213 bp, Homo sapiens
  source 1..2213: mol_type = genomic DNA
atcgattgatcaacaagtttgtacaaaaaagcaggcaccatgcatcaccaacagcgaatggctgccttagggacggacaaagagctgagtgatttactggatttcagtgcgatgttttcacctcctgtgagcagtgggaaaaatggaccaacttctttggcaagtggacattttactggctcaaatgtagaagacagaagtagctcagggtcctgggggaatggaggacatccaagcccgtccaggaactatggagatgggactccctatgaccacatgaccagcagggaccttgggtcacatgacaatctctctccaccttttgtcaattccagaatacaaagtaaaacagaaaggggctcatactcatcttatgggagagaatcaaacttacagggttgccaccagcagagtctccttggaggtgacatggatatgggcaacccaggaaccctttcgcccaccaaacctggttcccagtactatcagtattctagcaataatccccgaaggaggcctcttcacagtagtgccatggaggtacagacaaagaaagttcgaaaagttcctccaggtttgccatcttcagtctatgctccatcagcaagcactgccgactacaatagggactcgccaggctatccttcctccaaaccagcaaccagcactttccctagctccttcttcatgcaagatggccatcacagcagtgacccttggagctcctccagtgggatgaatcagcctggctatgcaggaatgttgggcaactcttctcatattccacagtccagcagctactgtagcctgcatccacatgaacgtttgagctatccatcacactcctcagcagacatcaattccagtcttcctccgatgtccactttccatcgtagtggtacaaaccattacagcacctcttcctgtacgcctcctgccaacgggacagacagtataatggcaaatagaggaagcggggcagccggcagctcccagactggagatgctctggggaaagcacttgcttcgatctattctccagatcacactaacaacagcttttcatcaaacccttcaactcctgttggctctcctccatctctctcagcaggcacagctgtttggtctagaaatggaggacaggcctcatcgtctcctaattatgaaggacccttacactctttgcaaagccgaattgaagatcgtttagaaagactggatgatgctattcatgttctccggaaccatgcagtgggcccatccacagctatgcctggtggtcatggggacatgcatggaatcattggaccttctcataatggagccatgggtggtctgggctcagggtatggaaccggccttctttcagccaacagacattcactcatggtggggacccatcgtgaagatggcgtggccctgagaggcagccattctcttctgccaaaccaggttccggttccacagcttcctgtccagtctgcgacttcccctgacctgaacccaccccaggacccttacagaggcatgccaccaggactacaggggcagagtgtctcctctggcagctctgagatcaaatccgatgacgagggtgatgagaacctgcaagacacgaaatcttcggaggacaagaaattagatgacgacaagaaggatatcaaatcaattactagcaataatgacgatgaggacctgacaccagagcagaaggcagagcgtgagaaggagcggaggatggccaacaatgcccgagagcgtctgcgggtccgtgacatcaacgaggctttcaaagagctcggccgcatggtgcagctccacctcaagagtgacaagccccagaccaagctcctgatcctccaccaggcggtggccgtcatcctcagtctggagcagcaagtccgagaaaggaatctgaatccgaaagctgcgtgtctgaaaagaagggaggaagagaaggtgtcctcagagcctccccctctctccttggccggcccacaccctggaatgggagacgcatcgaatcacatgggacagatgtaagacccagctttcttgtacaaagtggttgatatcggtaagcctatccctaaccctctcctcggtctcgattctacgtagtaatgaactagtccgtaacttgaaagtatttcgatttcttggctttatatatcttgtggaaaggacgagacccctactccgctaggagtacc

SEQ ID NO: 3610 - DNA, 2222 bp, Homo sapiens
  source 1..2222: mol_type = genomic DNA
atcgattgatcaacaagtttgtacaaaaaagttggcaccatgcatcaccaacagcgaatggctgccttagggacggacaaagagctgagtgatttactggatttcagtgcgatgttttcacctcctgtgagcagtgggaaaaatggaccaacttctttggcaagtggacattttactggctcaaatgtagaagacagaagtagctcagggtcctgggggaatggaggacatccaagcccgtccaggaactatggagatgggactccctatgaccacatgaccagcagggaccttgggtcacatgacaatctctctccaccttttgtcaattccagaatacaaagtaaaacagaaaggggctcatactcatcttatgggagagaatcaaacttacagggttgccaccagcagagtctccttggaggtgacatggatatgggcaacccaggaaccctttcgcccaccaaacctggttcccagtactatcagtattctagcaataatccccgaaggaggcctcttcacagtagtgccatggaggtacagacaaagaaagttcgaaaagttcctccaggtttgccatcttcagtctatgctccatcagcaagcactgccgactacaatagggactcgccaggctatccttcctccaaaccagcaaccagcactttccctagctccttcttcatgcaagatggccatcacagcagtgacccttggagctcctccagtgggatgaatcagcctggctatgcaggaatgttgggcaactcttctcatattccacagtccagcagctactgtagcctgcatccacatgaacgtttgagctatccatcacactcctcagcagacatcaattccagtcttcctccgatgtccactttccatcgtagtggtacaaaccattacagcacctcttcctgtacgcctcctgccaacgggacagacagtataatggcaaatagaggaagcggggcagccggcagctcccagactggagatgctctggggaaagcacttgcttcgatctattctccagatcacactaacaacagcttttcatcaaacccttcaactcctgttggctctcctccatctctctcagcaggcacagctgtttggtctagaaatggaggacaggcctcatcgtctcctaattatgaaggacccttacactctttgcaaagccgaattgaagatcgtttagaaagactggatgatgctattcatgttctccggaaccatgcagtgggcccatccacagctatgcctggtggtcatggggacatgcatggaatcattggaccttctcataatggagccatgggtggtctgggctcagggtatggaaccggccttctttcagccaacagacattcactcatggtggggacccatcgtgaagatggcgtggccctgagaggcagccattctcttctgccaaaccaggttccggttccacagcttcctgtccagtctgcgacttcccctgacctgaacccaccccaggacccttacagaggcatgccaccaggactacaggggcagagtgtctcctctggcagctctgagatcaaatccgatgacgagggtgatgagaacctgcaagacacgaaatcttcggaggacaagaaattagatgacgacaagaaggatatcaaatcaattactaggtcaagatctagcaataatgacgatgaggacctgacaccagagcagaaggcagagcgtgagaaggagcggaggatggccaacaatgcccgagagcgtctgcgggtccgtgacatcaacgaggctttcaaagagctcggccgcatggtgcagctccacctcaagagtgacaagccccagaccaagctcctgatcctccaccaggcggtggccgtcatcctcagtctggagcagcaagtccgagaaaggaatctgaatccgaaagctgcgtgtctgaaaagaagggaggaagagaaggtgtcctcggagcctccccctctctccttggccggcccacaccctggaatgggagacgcatcgaatcacatgggacagatgttgccaactttcttgtacaaagtggttgatatcggtaagcctatccctaaccctctcctcggtctcgattctacgtagtaatgaactagtccgtaacttgaaagtatttcgatttcttggctttatatatcttgtggaaaggacgagactcggagtcttctaggcaacct

SEQ ID NO: 3611 - DNA, 1028 bp, Homo sapiens
  source 1..1028: mol_type = genomic DNA
atcgattgatcaacaagtttgtacaaaaaagttggcatgcccaagtactgcagggcgccgaactgctccaacactgcgggccgcctgggtgcagacaaccgccctgtgagcttctacaagttcccactgaaggatggtccccggctgcaggcctggctgcagcacatgggctgtgagcactgggtgcccagctgccaccagcacttgtgcagcgagcacttcacaccctcctgcttccagtggcgctggggtgtgcgctacctgcggcctgatgcagtgccctccatcttctcccggggaccacctgccaagagtcagcggaggacccgaagcacccagaagccagtctcgccgccgcctcccctacagaagaatacacccctgccccagagccctgccatcccagtctctggcccagtgcgcctagtggtgctgggccccacatcggggagccccaagactgtggccaccatgctcctgacccccctggcccctgcgccaactcctgagcggtcacaacctgaagtccctgcccaacaggcccagaccgggctgggcccagtgctgggagcactgcaacgccgggtgcggaggctgcaacggtgccaggagcggcaccaggcgcagctgcaggccctggaacggctggcacagcagctacacggggagagcctgctggcacgggcacgccggggtctgcagcgcctgacaacagcccagacccttggacctgaggaatcccaaaccttcaccatcatctgtggagggcctgacatagccatggtccttgcccaggaccctgcacctgccacagtggatgccaagccggagctcctggacactcggatccccagtgcatacccaactttcttgtacaaagtggttgatatcggtaagcctatccctaaccctctcctcggtctcgattctacgtagtaatgaactagtccgtaacttgaaagtatttcgatttcttggctttatatatcttgtggaaaggacgaagatatcttatccttttctttaag

SEQ ID NO: 3612 - DNA, 1112 bp, Homo sapiens
  source 1..1112: mol_type = genomic DNA
atcgattgatcaacaagtttgtacaaaaaagttggcaccatgccagggatcagcagtcagatcctcaccaatgctcagggacaggttattggaacccttccatgggtagtgaactcagctagtgtggcggccccagcaccagcccaaagcctgcaggtccaggccgtgaccccccagctgttgttgaacgcccagggccaggtgattgcgaccctggctagcagccccctgcctccacctgtggctgtccggaagccaagcacacctgagtcccctgctaagagtgaggtgcagcccatccagcccacaccaaccgtgccccagcctgctgtggtcattgccagcccagctccagccgccaagccatctgcctctgctcctatcccaattacctgctcagagacccccaccgtcagccagttggtgtccaagccacatactccaagtctggatgaggatgggatcaacttagaagagatccgggagtttgccaagaactttaagatccggcggctctcgctgggccttacacagacccaggtgggtcaggctctgactgcaacggaaggtccagcctacagccagtcagccatctgccggttcgagaagctagacatcacacccaagagtgcccagaagctaaagccggtgctggaaaagtggctaaacgaagctgaactgcggaaccaggaaggccagcagaacctgatggagtttgtgggaggcgagccctccaagaaacgcaaacgccgcacctccttcaccccccaggccatagaggctctcaatgcctattttgagaagaacccactgcccacaggccaggagatcactgaaattgctaaggagctcaactacgaccgtgaggtagtgcgggtctggttctgcaatcggcgccagacgctcaagaacaccagcaagctgaacgtctttcagatccctttgccaactttcttgtacaaagtggttgatatcggtaagcctatccctaaccctctcctcggtctcgattctacgtagtaatgaactagtccgtaacttgaaagtatttcgatttcttggctttatatatcttgtggaaaggacgagtcactgttagttgagaaccacag

SEQ ID NO: 3613 - DNA, 2819 bp, Homo sapiens
  source 1..2819: mol_type = genomic DNA
atcgattgatcaacaagtttgtacaaaaaagttggcatggctgaggaatttgtgaccctcaaggatgtcggcatggacttcaccttgggagactgggagcagctcgggctggaacagggggacacgttctgggacacagcgttggacaattgccaggacctcttcctgctggaccccccaagacccaacctgacctcccacccagatggcagtgaagatctggagcctctggcaggaggaagcccagaagcaacaagccctgatgtgactgagaccaagaactctcctctgatggaggatttcttcgaagaaggattctcccaggagattatagagatgttatccaaggatggcttctggaactccaatttcggagaagcctgtatagaggacacctggttagatagtttgctaggcgatccagaaagtcttctgaggtctgatattgccaccaacggggaaagtcccacggaatgcaagagtcatgaattaaagagaggactcagtcctgtgtccaccgtttccacgggagaagattccatggtgcataatgtttctgaaaagaccctcacaccagctaagtctaaggaatataggggtgagtttttctcctactccgaccacagccagcaggattctgttcaggaaggggagaaaccatatcaatgtagtgaatgtgggaaaagcttcagtgggagttaccgtcttacccagcactggatcactcatactagggagaaacccactgtccatcaagagtgtgagcaaggttttgaccggaatgcttccctttctgtgtatccgaaaactcacacgggctacaaattctatgtgtgtaatgaatatgggacaacttttagtcagagtacatacctgtggcatcagaaaactcacactggagaaaaaccatgtaagagtcaagatagtgaccacccacccagtcatgacacacagcctggtgagcatcagaaaactcacacagatagtaagtcctacaactgtaacgaatgcggcaaggcttttacccggatcttccaccttactcggcaccagaagatccacactcggaaacgctatgagtgttccaagtgccaggcgaccttcaacttgagaaaacacctcatccaacatcagaaaactcacgctgcaaaaactacctctgagtgtcaggagtgtgggaagatttttaggcacagttcgctgctcattgaacaccaggctcttcatgctggagaggagccttataagtgtaacgaacgtgggaaatccttcaggcataactctaccctaaagatccatcagagggttcacagtggagagaagccttacaaatgcagtgagtgtgggaaggccttccaccggcacactcaccttaatgaacatcggcgaattcatacaggctacagaccccacaaatgtcaggaatgcgtcaggagtttcagccggccctcacatctgatgcgacatcaggccattcacaccgcagaaaagccctatagctgtgctgaatgcaaggagactttcagcgataacaatcgccttgtgcaacaccagaaaatgcacactgtcaaaaccccatatgaatgtcaggagtgcggagaacgcttcatttgcggctcaaccctgaagtgccacgagagtgttcacgccagagaaaaacaaggattttttgtgagtgggaagatcttggatcagaacccagaacagaaagagaagtgctttaagtgtaacaaatgtgagaaaacctttagctgcagcaaatacctaactcagcacgagaggattcacaccaggggagtgaagccctttgaatgtgaccagtgtgggaaagcctttggccaaagtactcggctcattcaccatcaaagaatccactctagagtgaggctgtataaatggggtgagcaagggaaagccatcagcagtgcctcccttatcaaacttcagtccttccacacaaaggagcacccttttaaatgtaacgaatgcggaaagaccttcagccacagtgcacacctctcaaaacatcagttaattcacgctggagagaatccctttaaatgtagtaagtgtgacagagtcttcacccagagaaactaccttgttcagcatgagcgaactcatgccagaaagaagccgttggtgtgtaacgaatgcgggaaaacgttccgtcagagctcatgcctttctaagcatcagagaattcactcaggtgagaagccctatgtatgtgattactgcgggaaggccttcggcctgagtgctgagcttgtccgccaccagagaattcacactggagaaaagccttatgtttgtcaggaatgcgggaaagccttcacccagagctcatgcctttctattcaccggagagttcacactggggagaagccctacagatgtggtgaatgtgggaaagcctttgcccagaaagcaaatctaacacagcaccagagaattcacacaggggagaagccttactcctgtaatgtgtgtggcaaagcttttgtcctcagtgcccatctcaaccagcacctgagagttcacacccaggagacactttatcagtgtcaacgttgccagaaagcctttcggtgccactcgagcctcagccgccatcagcgtgtacacaacaagcagcaatactgcctgtacccaactttcttgtacaaagtggttgatatcggtaagcctatccctaaccctctcctcggtctcgattctacgtagtaatgaactagtccgtaacttgaaagtatttcgatttcttggctttatatatcttgtggaaaggacgaatccgagggcgaacaccgcacggc

SEQ ID NO: 3614 - DNA, 1508 bp, Homo sapiens
  source 1..1508: mol_type = genomic DNA
atcgattgatcaacaagtttgtacaaaaaagttggcatgccgaaccgtaaggccagccggaatgcttactatttcttcgtgcaggagaagatccccgaactacggcgacgaggcctgcctgtggctcgcgttgctgatgccatcccttactgctcctcagactgggcgcttctgagggaggaagaaaaggagaaatacgcagaaatggctcgagaatggagggccgctcagggaaaggaccctgggccctcagagaagcagaaacctgttttcacaccactgaggaggccaggcatgcttgtaccaaagcagaatgtttcacctccagatatgtcagctttgtctttaaaaggtgatcaagctctccttggaggcattttttattttttgaacatttttagccatggcgagctacctcctcattgtgaacagcgcttcctcccttgtgaaattggctgtgttaagtattctctccaagaaggtattatggcagatttccacagttttataaatcctggtgaaattccacgaggatttcgatttcattgtcaggctgcaagtgattctagtcacaagattcctatttcaaattttgaacgtgggcataaccaagcaactgtgttacaaaacctttatagatttattcatcccaacccagggaactggccacctatctactgcaagtctgatgatagaaccagagtcaactggtgtttgaagcatatggcaaaggcatcagaaatcaggcaagatctacaacttctcactgtagaggaccttgtagtggggatctaccaacaaaaatttctcaaggagccctctaagacttggattcgaagcctcctagatgtggccatgtgggattattctagcaacacaaggtgcaagtggcatgaagaaaatgatattctcttctgtgctttagctgtttgcaagaagattgcgtactgcatcagtaattctctggccactctctttggaatccagctcacagaggctcatgtaccactacaagattatgaggccagcaatagtgtgacacccaaaatggttgtattggatgcagggcgttaccagaagctaagggttgggagttcaggattctctcatttcaactcttctaatgaggaacaaagatcaaacacacccattggtgactacccatctagggcaaaaatttctggccaaaacagcagcgttcggggaagaggaattacccgcttactagagagcatttccaattcttccagcaatatccacaaattctccaactgtgacacttcactctcaccttacatgtcccaaaaagatggatacaaatctttctcttccttatcttacccaactttcttgtacaaagtggttgatatcggtaagcctatccctaaccctctcctcggtctcgattctacgtagtaatgaactagtccgtaacttgaaagtatttcgatttcttggctttatatatcttgtggaaaggacgacagaccacattccgaagattatta

SEQ ID NO: 3615 - DNA, 890 bp, Homo sapiens
  source 1..890: mol_type = genomic DNA
atcgattgatcaacaagtttgtacaaaaaagttggcatgccgaccaattgcgctgcggcgggctgtgccactacctacaacaagcacattaacatcagcttccacaggtttcctttggatcctaaaagaagaaaagaatgggttcgcctggttaggcgcaaaaattttgtgccaggaaaacacacttttctttgttcaaagcactttgaagcctcctgttttgacctaacaggacaaactcgacgacttaaaatggatgctgttccaaccatttttgatttttgtacccatataaagtctatgaaactcaagtcaaggaatcttttgaagaaaaacaacagttgttctccagctggaccatctaatttaaaatcaaacattagtagtcagcaagtactacttgaacacagctatgcctttaggaatcctatggaggcaaaaaagaggatcattaaactggaaaaagaaatagcaagcttaagaagaaaaatgaaaacttgcctacaaaaggaacgcagagcaactcgaagatggatcaaagccacgtgtttggtaaagaatttagaagcaaatagtgtattacctaaaggtacatcagaacacatgttaccaactgccttaagcagtcttcctttggaagattttaagatccttgaacaagatcaacaagataaaacactgctaagtctaaatctaaaacagaccaagagtaccttcatttacccaactttcttgtacaaagtggttgatatcggtaagcctatccctaaccctctcctcggtctcgattctacgtagtaatgaactagtccgtaacttgaaagtatttcgatttcttggctttatatatcttgtggaaaggacgagcctactccgcggcaaccgcggtg

SEQ ID NO: 3616 - DNA, 2492 bp, Homo sapiens
  source 1..2492: mol_type = genomic DNA
atcgattgatcaacaagtttgtacaaaaaagttggcaccatgccgaacttctgcgctgcccccaactgcacgcggaagagcacgcagtccgacttggccttcttcaggttcccgcgggaccctgccagatgccagaagtgggtggagaactgtaggagagcagacttagaagataaaacacctgatcagctaaataaacattatcgattatgtgccaaacattttgagacctctatgatctgtagaactagtccttataggacagttcttcgagataatgcaataccaacaatatttgatcttaccagtcatttgaacaacccacatagtagacacagaaaacgaataaaagaactgagtgaagatgaaatcaggacactgaaacagaaaaaaattgatgaaacttctgagcaggaacaaaaacataaagaaaccaacaatagcaatgctcagaaccccagcgaagaagagggtgaagggcaagatgaggacattttacctctaacccttgaagagaaggaaaacaaagaatacctaaaatctctatttgaaatcttgattctgatgggaaagcaaaacatacctctggatggacatgaggctgatgaaatcccagaaggtctctttactccagataactttcaggcactgctggagtgtcggataaattctggtgaagaggttctgagaaagcggtttgagacaacagcagttaacacgttgttttgttcaaaaacacagcagaggcagatgctagagatctgtgagagctgtattcgagaagaaactctcagggaagtgagagactcacacttcttttccattatcactgacgatgtagtggacatagcaggggaagagcacctacctgtgttggtgaggtttgttgatgaatctcataacctaagagaggaatttataggcttcctgccttatgaagccgatgcagaaattttggctgtgaaatttcacactatgataactgagaagtggggattaaatatggagtattgtcgtggccaggcttacattgtctctagtggattttcttccaaaatgaaagttgttgcttctagacttttagagaaatatccccaagctatctacacactctgctcttcctgtgccttaaatatgtggttggcaaaatcagtacctgttatgggagtatctgttgcattaggaacaattgaggaagtttgttcttttttccatcgatcaccacaactgcttttagaacttgacaacgtaatttctgttctttttcagaacagtaaagaaaggggtaaagaactgaaggaaatctgccattctcagtggacaggcaggcatgatgcttttgaaattttagtggaactcctgcaagcacttgttttatgtttagatggtataaatagtgacacaaatattagatggaataactatatagctggccgagcatttgtactctgcagtgcagtgtcagattttgatttcattgttactattgttgttcttaaaaatgtcctatcttttacaagagcctttgggaaaaacctccaggggcaaacctctgatgtcttctttgcggccggtagcttgactgcagtactgcattcactcaacgaagtgatggaaaatattgaagtttatcatgaattttggtttgaggaagccacaaatttggcaaccaaacttgatattcaaatgaaactccctgggaaattccgcagagctcaccagggtaacttggaatctcagctaacctctgagagttactataaagaaaccctaagtgtcccaacagtggagcacattattcaggaacttaaagatatattctcagaacagcacctcaaagctcttaaatgcttatctctggtaccctcagtcatgggacaactcaaattcaatacgtcggaggaacaccatgctgacatgtatagaagtgacttacccaatcctgacacgctgtcagctgagcttcattgttggagaatcaaatggaaacacagggggaaagatatagagcttccgtccaccatctatgaagccctccacctgcctgacatcaagttttttcctaatgtgtatgcattgctgaaggtcctgtgtattcttcctgtgatgaaggttgagaatgagcggtatgaaaatggacgaaagcgtcttaaagcatatttgaggaacactttgacagaccaaaggtcaagtaacttggctttgcttaacataaattttgatataaaacacgacctggatttaatggtggacacatatattaaactctatacaagtaagtcagagcttcctacagataattccgaaactgtggaaaataccttgccaactttcttgtacaaagtggttgatatcggtaagcctatccctaaccctctcctcggtctcgattctacgtagtaatgaactagtccgtaacttgaaagtatttcgatttcttggctttatatatcttgtggaaaggacgaggcggtgttcccagctcggccgtg

SEQ ID NO: 3617 - DNA, 1850 bp, Homo sapiens
  source 1..1850: mol_type = genomic DNA
atcgattgatcaacaagtttgtacaaaaaagttggcatgaagaccccggcggacacagggtttgccttcccggattgggcctacaagccagagtcgtcccctggctcaaggcagatccagctgtggcactttatcctggagctgctgcggaaggaggagtaccagggcgtcattgcctggcagggggactacggggaattcgtcatcaaagaccctgatgaggtggcccggctgtggggcgttcgcaagtgcaagccccagatgaattacgacaagctgagccgggccctgcgctattactataacaagcgcattctgcacaagaccaaggggaaacggttcacctacaagttcaatttcaacaaactggtgctggtcaattacccattcattgatgtggggttggctgggggtgcagtgccccagagtgccccgccagtgccgtcgggtggtagccacttccgcttccctccctcaacgccctccgaggtgctgtcccccaccgaggacccccgctcaccaccagcctgctcttcatcttcatcttccctcttctcggctgtggtggcccgccgcctgggccgaggctcagtcagtgactgtagtgatggcacgtcagagctggaggaaccgctgggagaggatccccgcgcccgaccacccggccctccggatctgggtgccttccgagggcccccgctggcccgcctgccccatgaccctggtgtcttccgagtctatccccggcctcggggtggccctgaacccctcagccccttccctgtgtcgcctctggccggtcctggatccctgctgccccctcagctctccccggctctgcccatgacgcccacccacctggcctacactccctcgcccacgctgagcccgatgtaccccagtggtggcggggggcccagcggctcagggggaggctcccacttctccttcagccctgaggacatgaaacggtacctgcaggcccacacccaaagcgtctacaactaccacctcagcccccgcgccttcctgcactaccctgggctggtggtgccccagccccagcgccctgacaagtgcccgctgccgcccatggcacccgagaccccaccggtcccctcctcggcctcgtcatcctcttcttcttcttcctccccattcaagtttaagctccagccgcccccactcggacgccggcagcgggcagctggggagaaggccgtagccggtgctgacaagagcggtggcagtgcaggcgggctggctgagggggcaggggcgctagccccaccgcccccgccaccacagatcaaggtggagcccatctcggaaggcgagtcggaggaggtagaggtgactgacatcagtgatgaggatgaggaagacggggaggtgttcaagacgccccgtgccccacctgcaccccctaagcctgagcccggcgaggcacccggggcatcccagtgcatgcccctcaagctacgctttaagcggcgctggagtgaagactgtcgcctcgaagggggtgggggccccgctgggggctttgaggatgagggtgaggacaagaaggtgcgtggggaggggcctggggaggctggggggcccctcaccccaaggcgggtgagctctgacctccagcatgccacggcccagctctccctggagcaccgagactcctgcccaactttcttgtacaaagtggttgatatcggtaagcctatccctaaccctctcctcggtctcgattctacgtagtaatgaactagtccgtaacttgaaagtatttcgatttcttggctttatatatcttgtggaaaggacgaccagtcctcggcgcacgaataggt

SEQ ID NO: 3618 - DNA, 665 bp, Homo sapiens
  source 1..665: mol_type = genomic DNA
atcgattgatcaacaagtttgtacaaaaaagttggcaccatggccaacctggagcgcaccttcatcgccatcaagccggacggcgtgcagcgcggcctggtgggcgagatcatcaagcgcttcgagcagaagggattccgcctcgtggccatgaagttcctccgggcctctgaagaacacctgaagcagcactacattgacctgaaagaccgaccattcttccctgggctggtgaagtacatgaactcagggccggttgtggccatggtctgggaggggctgaacgtggtgaagacaggccgagtgatgcttggggagaccaatccagcagattcaaagccaggcaccattcgtggggacttctgcattcaggttggcaggaacatcattcatggcagtgattcagtaaaaagtgctgaaaaagaaatcagcctatggtttaagcctgaagaactggttgactacaagtcttgtgctcatgactgggtctatgaattgccaactttcttgtacaaagtggttgatatcggtaagcctatccctaaccctctcctcggtctcgattctacgtagtaatgaactagtccgtaacttgaaagtatttcgatttcttggctttatatatcttgtggaaaggacgaccaaggcatcgcgtctcaaagtaa

SEQ ID NO: 3619 - DNA, 1487 bp, Homo sapiens
  source 1..1487: mol_type = genomic DNA
atcgattgatcaacaagtttgtacaaaaaagttggcatggaggcaatggcggccagcacttccctgcctgaccctggagactttgaccggaacgtgccccggatctgtggggtgtgtggagaccgagccactggctttcacttcaatgctatgacctgtgaaggctgcaaaggcttcttcaggcgaagcatgaagcggaaggcactattcacctgccccttcaacggggactgccgcatcaccaaggacaaccgacgccactgccaggcctgccggctcaaacgctgtgtggacatcggcatgatgaaggagttcattctgacagatgaggaagtgcagaggaagcgggagatgatcctgaagcggaaggaggaggaggccttgaaggacagtctgcggcccaagctgtctgaggagcagcagcgcatcattgccatactgctggacgcccaccataagacctacgaccccacctactccgacttctgccagttccggcctccagttcgtgtgaatgatggtggagggagccatccttccaggcccaactccagacacactcccagcttctctggggactcctcctcctcctgctcagatcactgtatcacctcttcagacatgatggactcgtccagcttctccaatctggatctgagtgaagaagattcagatgacccttctgtgaccctagagctgtcccagctctccatgctgccccacctggctgacctggtcagttacagcatccaaaaggtcattggctttgctaagatgataccaggattcagagacctcacctctgaggaccagatcgtactgctgaagtcaagtgccattgaggtcatcatgttgcgctccaatgagtccttcaccatggacgacatgtcctggacctgtggcaaccaagactacaagtaccgcgtcagtgacgtgaccaaagccggacacagcctggagctgattgagcccctcatcaagttccaggtgggactgaagaagctgaacttgcatgaggaggagcatgtcctgctcatggccatctgcatcgtctccccagatcgtcctggggtgcaggacgccgcgctgattgaggccatccaggaccgcctgtccaacacactgcagacgtacatccgctgccgccacccgcccccgggcagccacctgctctatgccaagatgatccagaagctagccgacctgcgcagcctcaatgaggagcactccaagcagtaccgctgcctctccttccagcctgagtgcagcatgaagctaacgccccttgtgctcgaagtgtttggcaatgagatctcctgcccaactttcttgtacaaagtggttgatatcggtaagcctatccctaaccctctcctcggtctcgattctacgtagtaatgaactagcccgtaacttgaaagtatttcgatttcttggctttatatatcttgtggaaaggacgagtttcttcaagctgcgcttccaat

SEQ ID NO: 3620 - DNA, 2333 bp, Homo sapiens
  source 1..2333: mol_type = genomic DNA
atcgattgatcaacaagtttgtacaaaaaagttggcatggcagagacactggagttcaacgacgtctatcaggaggtgaaaggttccatgaatgatggtcgactgaggttgagccgtcagggcatcatcttcaagaatagcaagacaggcaaagtggacaacatccaggctggggagttaacagaaggtatctggcgccgtgttgctctgggccatggacttaaactgcttacaaagaatggccatgtctacaagtatgatggcttccgagaatcggagtttgagaaactctctgatttcttcaaaactcactatcgccttgagctaatggagaaggacctttgtgtgaagggctggaactgggggacagtgaaatttggtgggcagctgctttcctttgacattggtgaccagccagtctttgagatacccctcagcaatgtgtcccagtgcaccacaggcaagaatgaggtgacactggaattccaccaaaacgatgacgcagaggtgtctctcatggaggtgcgcttctacgtcccacccacccaggaggatggtgtggaccctgttgaggcctttgcccagaatgtgttgtcaaaggcggatgtaatccaggccacgggagatgccatctgcatcttccgggagctgcagtgtctgactcctcgtggtcgttatgacattcggatctaccccacctttctgcacctgcatggcaagacctttgactacaagatcccctacaccacagtactgcgtctgtttttgttaccccacaaggaccagcgccagatgttctttgtgatcagcctggatcccccaatcaagcaaggccaaactcgctaccacttcctgatcctcctcttctccaaggacgaggacatttcgttgactctgaacatgaacgaggaagaagtggagaagcgctttgagggtcggctcaccaagaacatgtcaggatccctctatgagatggtcagccgggtcatgaaagcactggtaaaccgcaagatcacagtgccaggcaacttccaagggcactcaggggcccagtgcattacctgttcctacaaggcaagctcaggactgctctacccgctggagcggggcttcatctacgtccacaagccacctgtgcacatccgcttcgatgagatctcctttgtcaactttgctcgtggtaccactactactcgttcctttgactttgaaattgagaccaagcagggcactcagtataccttcagcagcattgagagggaggagtacgggaaactgtttgattttgtcaacgcgaaaaagctcaacatcaaaaaccgaggattgaaagagggcatgaacccaagctacgatgaatatgctgactctgatgaggaccagcatgatgcctacttggagaggatgaaggaggaaggcaagatccgggaggagaatgccaatgacagcagcgatgactcaggagaagaaaccgatgagtcattcaacccaggtgaagaggaggaagatgtggcagaggagtttgacagcaacgcctctgccagctcctccagtaatgagggtgacagtgaccgggatgagaagaagcggaaacagctcaaaaaggccaagatggccaaggaccgcaagagccgcaagaagcctgtggaggtgaagaagggcaaagaccccaatgcccccaagaggcccatgtctgcatacatgctgtggctcaatgccagccgagagaagatcaagtcagaccatcctggcatcagcatcacggatctttccaagaaggcaggcgagatctggaagggaatgtccaaagagaagaaagaggagtgggatcgcaaggctgaggatgccaggagggactatgaaaaagccatgaaagaatatgaagggggccgaggcgagtcttctaagagggacaagtcaaagaagaagaagaaagtaaaggtaaagatggaaaagaaatccacgccctctaggggctcatcatccaagtcgtcctcaaggcagctaagcgagagcttcaagagcaaagagtttgtgtctagtgatgagagctcttcgggagagaacaagagcaaaaagaagaggaggaggagcgaggactctgaagaagaagaactagccagtactccccccagctcagaggactcagcgtcaggatccgatgagtacccaactttcttgtacaaagtggttgatatcggtaagcctatccctaaccctctcctcggtctcgattctacgtagtaatgaactagtccgtaacttgaaagtatttcgatttcttggctttatatatcttgtggaaaggacgaagctctgtatgcgtacgataacaa

SEQ ID NO: 3621 - DNA, 437 bp, Homo sapiens
  source 1..437: mol_type = genomic DNA
atcgattgatcaacaagtttgtacaaaaaagttggcatgccgaagagaaagtctccagagaatacagagggcaaagatggatccaaagtaactaaacaggagcccacaagacggtctgccagattgtcagcgaaacctgctccaccaaaacctgaacccaaaccaagaaaaacatctgctaagaaagaacctggagcaaagattagcagaggtgctaaagggaagaaggaggaaaagcaggaagctggaaaggaaggcacagaaaactgcccaactttcttgtacaaagtggttgatatcggtaagcctatccctaaccctctcctcggtctcgattctacgtagtaatgaactagtccgtaacttgaaagtatttcgatttcttggctttatatatcttgtggaaaggacgagatacaagtagcggccggctatgc

SEQ ID NO: 3622 - DNA, 959 bp, Homo sapiens
  source 1..959: mol_type = genomic DNA
atcgattgatcaacaagtttgtacaaaaaagttggcaccatggccgaaggcggggctagcaaaggtggtggagaagagcccgggaagctgccggagccggcagaggaggaatcccaggttttgcgcggaactggccactgtaagtggttcaatgtgcgcatgggatttggattcatctccatgataaaccgagagggaagccccttggatattccagtcgatgtatttgtacaccaaagcaaactattcatggaaggatttagaagcctaaaagaaggagaaccagtggaattcacatttaaaaaatcttccaaaggccttgagtcaatacgggtaacaggacctggtgggagcccctgtttaggaagtgaaagaagacccaaagggaagacactacagaaaagaaaaccaaagggagatagatgctacaactgtggtggccttgatcatcatgctaaggaatgtagtctacctcctcagccaaagaagtgccattactgtcagagcatcatgcacatggtggcaaactgcccacataaaaatgttgcacagccacccgcgagttctcagggaagacaggaagcagaatcccagccatgcacttcaactctccctcgagaagtgggaggcgggcatggctgtacatcaccaccgtttcctcaggaggctagggcagagatctcagaacggtcaggcaggtcacctcaagaagcttcctccacgaagtcatctatagcaccagaagagcaaagcaaaaaggggccttcagttcaaaaaaggaaaaagacattgccaactttcttgtacaaagtggttgatatcggtaagcctatccctaaccctctcctcggtctcgattctacgtagtaatgaactagtccgtaacttgaaagtatttcgatttcttggctttatatatcttgtggaaaggacgagatacgtcattcgaaatcctgcag

SEQ ID NO: 3623 - DNA, 830 bp, Homo sapiens
  source 1..830: mol_type = genomic DNA
atcgattgatcaacaagtttgtacaaaaaagttggcatgtccagcgagcctccccctccttatcctgggggccccacagccccacttctggaagagaaaagtggagccccgcccaccccaggccgttcctccccagctgtgatgcagccccctccaggcatgccactgccccctgcggacattggccccccaccctatgagccgccgggtcacccaatgccccagcctggcttcatcccaccacacatgagtgcagatggcacctacatgcctccgggtttctaccctcctccaggcccccacccacccatgggctactaccccccagggccctacacgccagggccctaccctggccctgggggccacacagccacagtcctggtcccttcaggagctgccaccacggtgacagtgctgcagggagagatctttgagggagcgcctgtgcagacggtgtgtccccactgccagcaggccatcaccaccaagatctcctacgagattggcttgatgaatttcgtgctgggtttcttctgttgcttcatgggatgtgatctgggctgctgcctgatcccctgcctcatcaatgacttcaaggatgtgacgcacacatgccccagctgcaaagcctacatctacacgtacaagcgcctgtgctagccaactttcttgtacaaagtggttgatatcggtaagcctatccctaaccctctcctcggtctcgattctacgtagtaatgaactagtccgtaacttgaaagtatttcgatttcttggctttatatatcttgtggaaaggacgagtcttggccgagatcgtttgctgc

SEQ ID NO: 3624 - DNA, 1304 bp, Homo sapiens
  source 1..1304: mol_type = genomic DNA
atcgattgatcaacaagtttgtacaaaaaagttggcaccatggggaggaaaaaaatccagatctcccgcatcctggaccaaaggaatcggcaggtgacgttcaccaagcggaagttcgggctgatgaagaaggcctatgagctgagcgtgctctgtgactgtgagatagccctcatcatcttcaacagcgccaaccgcctcttccagtatgccagcacggacatggaccgtgtgctgctgaagtacacagagtacagcgagccccacgagagccgcaccaacactgacatcctcgagacgctgaagcggaggggcattggcctcgatgggccagagctggagccggatgaagggcctgaggagccaggagagaagtttcggaggctggcaggcgaagggggtgatccggccttgccccgaccccggctgtatcctgcagctcctgctatgcccagcccagatgtggtatacggggccttaccgccaccaggctgtgaccccagtgggcttggggaagcactgcccgcccagagccgcccatctcccttccgaccagcagcccccaaagccgggcccccaggcctggtgcaccctctcttctcaccaagccacctcaccagcaagacaccacccccactgtacctgccgacggaagggcggaggtcagacctgcctggtggcctggctgggccccgagggggactaaacacctccagaagcctctacagtggcctgcagaacccctgctccactgcaactcccggacccccactggggagcttccccttcctccccggaggccccccagtgggggccgaagcctgggcgaggagggtcccccaacccgcggcgcctccccgccgacccccccagtcagcatcaagtctgagcgcctctctccggcccccgggggccccggcgactttcctaagaccttcccctatcccttgctcctcgcccggtccctggcagagcctctgcggcctgggcccgccctgcgccggctgcccttggccgacggctggccccggtaggagatcacccggtggcaccagcccagagcgctcgccaggtacggcgagggcacgtggggaccccacctccctccaggcctcttcagagaagacccaacagttgccaactttcttgtacaaagtggttgatatcggtaagcctatccctaaccctctcctcggtctcgattctacgtagtaatgaactagtccgtaacttgaaagtatttcgatttcttggctttatatatcttgtggaaaggacgagatgttccgccacacgctgctaag

SEQ ID NO: 3625 - DNA, 584 bp, Homo sapiens
  source 1..584: mol_type = genomic DNA
atcgattgatcaacaagtttgtacaaaaaagttggcatggtctctagcgaccggcccgtgtcactggaggacgaggtctcccatagtatgaaggagatgattggaggctgttgcgtttgctcagacgagagaggctgggccgagaacccgctggtttattgcgacgggcacggctgcagcgtcgcggtgcatcaagcttgctatggcattgttcaagtacccactggaccgtggttttgcaggaaatgtgaatctcaggagagagcagccagagtggcagagtctcgctctgttgcccaggctaaagtgcagtggtgtgatctcagcccactgcaacctctgctccccgggttcaagcgattctcctgcctcagcctcccaaatggtatgcaattcctgttggttagcctcatctgcccaactttcttgtacaaagtggttgatatcggtaagcctatccctaaccctctcctcggtctcgattctacgtagtaatgaactagtccgtaacttgaaagtatttcgatttcttggctttatatatcttgtggaaaggacgacccttaactcaagaatggtatgtg

SEQ ID NO: 3626 - DNA, 971 bp, Homo sapiens
  source 1..971: mol_type = genomic DNA
atcgattgatcaacaagtttgtacaaaaaagttggcatggtcatgagttcgtatatggtgaactccaagtatgtggaccccaagttccctccgtgcgaggagtatttgcagggcggctacctaggcgagcagggcgccgactactacggcggcggcgcgcagggcgcagacttccagcccccggggctctacccacggcccgacttcggtgagcagcctttcggaggcagcggccccgggcctggctcggcgctgcctgcgcggggtcacggacaagagccaggcggccccggcggtcactacgccgctccaggagagccttgcccagctcccccggcgcctccgccggcgcccctgcctggcgcccgggcctacagtcagtccgaccccaagcagccgccctccgggacggcactcaagcagccggccgtggtctacccctggatgaagaaggtgcacgtgaattcggtgaaccccaactacaccggtggggaacccaagcggtcccgaacggcctacacccggcagcaagtcctagaactggaaaaagaatttcattttaacaggtatctgacaaggcgccgtcggattgaaatcgctcacaccctgtgtctgtcggagcgccagatcaagatctggttccagaaccggaggatgaagtggaaaaaagatcataagctgcccaacactaaaggcaggtcatcgtcctcatcttcctcctcatcttgctcctcctcagtcgcccccagccagcatttacagccgatggccaaagaccaccacacggacctgacgaccttatacccaactttcttgtacaaagtggttgatatcggtaagcctatccctaaccctctcctcggtctcgattctacgtagtaatgaactagtccgtaacttgaaagtatttcgatttcttggctttatatatcttgtggaaaggacgacggtactgctatataagctatttt

SEQ ID NO: 3627 - DNA, 1391 bp, Homo sapiens
  source 1..1391: mol_type = genomic DNA
atcgattgatcaacaagtttgtacaaaaaagttggcatgagcgggggcaagaagaagagtagtttccaaatcaccagcgtcaccacggactatgagggccctgggagcccaggggcttcggatccccctaccccacagcccccaaccgggcccccgccccgcctgcccaatggggagcccagccccgatccggggggcaagggcaccccccggaatggctccccaccacctggggccccttcctcccgtttccgggtggtgaagctgccccacggcctgggagagccttatcgccgcggtcgctggacgtgtgtggatgtttatgagcgagacctggagccccacagcttcggcggactcctggagggaattcgaggggcctcagggggcgccgggggcagatctttggattccaggttggagctggccagcctcggcctgggcgcccccaccccaccgtcaggcctgtctcagggccccacctcctggctccgtccaccccccacctctcctggacctcaggcccgctccttcactgggggactgggccagctggtggtgcccagcaaagccaaggcagagaaacccccactgtcggcctcctcaccccagcagcgccccccagagcctgagaccggtgagagtgcgggcacatcccgggctgccacgcccctgccctctctgagggtggaagcggaggctgggggctcaggggccaggacccctccactgtcccggaggaaagctgtagacatgcggctgcggatggagttgggtgctccagaagagatggggcaggtgcccccacttgactctcgccccagctccccggccctctacttcacccacgatgccagcctggttcacaaatctccagaccccttcggagcagtagcagctcagaagttcagcctggcccactccatgttggccatcagtggtcacctagacagcgacgatgatagtggctccggaagcctggttggcattgacaacaaaatcgagcaagccatggacttggtgaagtcccacctcatgtttgcggtccgggaggaggtggaggtgctgaaggagcagatccgggaactggcggagcggaacgctgcgctggagcaggagaatgggctgctgcgcgccctggccagcccggagcagctggctcagctgccctcctcgggggtcccacggcttgggccccctgcgcccaatgggccctccgtctgcccgactttcttgtacaaagtggttgatatcggtaagcctatccctaaccctctcctcggtctcgattctacgtagtaatgaactagtccgtaacttgaaagtatttcgatttcttggctttatatatcttgtggaaaggacgatttagcgagagcccccgcgacacc

SEQ ID NO: 3628 - DNA, 1226 bp, Homo sapiens
  source 1..1226: mol_type = genomic DNA
atcgattgatcaacaagtttgtacaaaaaagttggcatgtcctttcccaacagctctcctgctgctaatacttttttagtagattccttgatcagtgcctgcaggagtgacagtttttattccagcagcgccagcatgtacatgccaccacctagcgcagacatggggacctatggaatgcaaacctgtggactgctcccgtctctggccaaaagagaagtgaaccaccaaaatatgggtatgaatgtgcatccttatatacctcaagtagacagttggacagatccgaacagatcttgtcgaatagagcaacctgttacacagcaagtccccacttgctccttcaccaccaacattaaggaagaatccaattgctgcatgtattctgataagcgcaacaaactcatttcggccgaggtcccttcgtaccagaggctggtccctgagtcttgtcccgttgagaaccctgaggttcccgtccctggatattttagactgagtcagacctacgccaccgggaaaacccaagagtacaataatagccccgaaggcagctccactgtcatgctccagctcaaccctcgtggcgcggccaagccgcagctctccgctgcccagctgcagatggaaaagaagatgaacgagcccgtgagcggccaggagcccaccaaagtctcccaggtggagagccccgaggccaaaggcggccttcccgaagagaggagctgcctggctgaggtctccgtgtccagtcccgaagtgcaggagaaggaaagcaaagaggaaatcaagtctgatacaccaaccagcaattggctcactgcaaagagtggcagaaagaagaggtgcccttacactaagcaccaaacgctggaattagaaaaagagttcttgttcaatatgtacctcacccgcgagcgccgcctagagatcagtaagagcgttaacctcaccgacaggcaggtcaagatttggtttcaaaaccgccgaatgaaactcaagaagatgagccgagagaaccggatccgagaactgaccgccaacctcacgttttcttacccaactttcttgtacaaagtggttgatatcggtaagcctatccctaaccctctcctcggtctcgattctacgtagtaatgaactagtccgtaacttgaaagtatttcgatttcttggctttatatatcttgtggaaaggacgacaactcatgcggccacgattcagc

SEQ ID NO: 3629 - DNA, 779 bp, Homo sapiens
  source 1..779: mol_type = genomic DNA
atcgattgatcaacaagtttgtacaaaaaagttggcatgaccgatccgtcgctggggctgacagtccccatggcgccgcctctggccccgctccctccccgggacccaaacggggcgggatccgagtggagaaagcccggggccgtgagcttcgccgacgtggccgtgtacttctcccgggaggagtggggctgcctgcggcccgcgcagagggccctgtaccgggacgtgatgcgggagacctacggccacctgggcgcgctcggtgagagccccacctgcttgcctgggccctgcgcctccacaggccctgccgcgcctctgggagctgcgtgtggagttgggggccccggggccgggcaggcggcctcctcgcagcgtggggtttgcgttcttctcccccaggagtcggaggcagcaagccggcgctcatctcctgggtggaggagaaggccgaactgtgggatccggctgcccaggatccggaggtggcgaagtgtccgacagaagcggacccagcagattccagaaacaaggaagaggaaagacaaagggaagggacgggagccctggagaagcccgaccctgtggccgccgggtctcctgggctgcccaactttcttgtacaaagtggttgatatcggtaagcctatccctaaccctctcctcggtctcgattctacgtagtaatgaactagtccgtaacttgaaagtatttcgatttcttggctttatatatcttgtggaaaggacgaatgtttatacccagtgggaccttg

SEQ ID NO: 3630 - DNA, 533 bp, Homo sapiens
  source 1..533: mol_type = genomic DNA
atcgattgatcaacaagtttgtacaaaaaagttggcaccatgaccaggaagatcttcacaaataccagggagcggtggaggcagcagaatgtcaacagcgcctttgccaagctgaggaagctcatccccactcaccctccagacaaaaagctgagcaaaaatgaaacgcttcgcctggcaatgaggtatatcaacttcttggtcaaggtcttgggggagcaaagcctgcaacaaacgggagtggctgctcaggggaacattctggggctcttccctcaaggaccccacctgccaggcctggaggacagaactctgcttgagaactaccaggttccttcacctggtccaagccaccacattcctttgccaactttcttgtacaaagtggttgatatcggtaagcctatccctaaccctctcctcggtctcgattctacgtagtaatgaactagtccgtaacttgaaagtatttcgatttcttggctttatatatcttgtggaaaggacgaaggatcctgtaccctagtgacaac

SEQ ID NO: 3631 - DNA, 872 bp, Homo sapiens
  source 1..872: mol_type = genomic DNA
atcgattgatcaacaagtttgtacaaaaaagttggcatggtgaaatgctgctccgccattggatgtgcttctcgctgcttgccaaattcgaagttaaaaggactgacatttcacgtattccccacagatgaaaacatcaaaaggaaatgggtattagcaatgaaaagacttgatgtgaatgcagccggcatttgggagcctaaaaaaggagatgtgttgtgttcgaggcactttaagaagacagattttgacagaagtgctccaaatattaaactgaaacctggagtcataccttctatctttgattctccatatcacctacaggggaaaagagaaaaacttcattgtagaaaaaacttcaccctcaaaaccgttccagccactaactacaatcaccatcttgttggtgcttcctcatgtattgaagaattccaatcccagttcatttttgaacatagctacagtgtaatggacagtccaaagaaacttaagcataaattagatcatgtgatcggcgagctagaggatacaaaggaaagtctacggaatgttttagaccgagaaaaacgttttcagaaatcattgaggaagacaatcagggaattaaaggatgaatgtctgatcagccaagaaacagcaaatagactggacactttctgttgggactgttgtcaggagagcatagaacaggactatatttcatgcccaactttcttgtacaaagtggttgatatcggtaagcctatccctaaccctctcctcggtctcgattctacgtagtaatgaactagtccgtaacttgaaagtatttcgatttcttggctttatatatcttgtggaaaggacgactttgaggatataggcccgcggcc

SEQ ID NO: 3632 - DNA, 584 bp, Homo sapiens
  source 1..584: mol_type = genomic DNA
atcgattgatcaacaagtttgtacaaaaaagttggcatgggactgttgacattcagggatgtggccatagaattctctcgggaggagtgggaacacctggactcagatcagaagcttttatatggggatgtgatgttagagaactacggaaacctggtctctctgggtctcgctgtctctaagccggacctgatcacctttttggagcaaaggaaagagccctggaatgtgaagagtgcagagacagtagccatccagccagatatcttttctcatgatactcaaggcctcttaagaaagaagcttatagaagcatcattccaaaaagtgatattggatggatatgggagctgtggccctcagaatttaaacttaaggaaagagtgggaaagtgagggcaaaataatcctatggtgcccaactttcttgtacaaagtggttgatatcggtaagcctatccctaaccctctcctcggtctcgattctacgtagtaatgaactagtccgtaacttgaaagtatttcgatttcttggctttatatatcttgtggaaaggacgatgccggggtacgcactagccgata

SEQ ID NO: 3633 - DNA, 665 bp, Homo sapiens
  source 1..665: mol_type = genomic DNA
atcgattgatcaacaagtttgtacaaaaaagttggcatgacttcagagtcgacgtcacccccagttgtgcccccgctccactcccccaagtccccagtctggcccaccttccccttccacagggagggcagcagggtctgggagcggggtggtgtcccacctcgggacctacccagccctctgcccaccaagcggaccaggacctattcagcgacagcccgggcctcagctggccccgtgttcaagggcgtctgtaagcagttctcacgctcacagggccatggcttcatcacccccgagaacgggtccgaggacatcttcgtacatgtgtctgacatcgagggggagtacgtgccagtggagggcgacgaggtgacctacaagatgtgccctatccctcccaagaaccagaagttccaggccgtggaggtggtgctcactcagctggccccccacactccccacgagacgtggtctggccaggtcgtgggctcctacccaactttcttgtacaaagtggttgatatcggtaagcctatccctaaccctctcctcggtctcgattctacgtagtaatgaactagtccgtaacttgaaagtatttcgatttcttggctttatatatcttgtggaaaggacgacccaatactacgttttattgcgat

SEQ ID NO: 3634 - DNA, 1361 bp, Homo sapiens
  source 1..1361: mol_type = genomic DNA
atcgattgatcaacaagtttgtacaaaaaagttggcatgagcaagccagccggatcaacaagccgcattttagatatcccctgcaaagtgtgtggcgaccgcagctcggggaagcactacggggtctacgcctgcgacggctgctcaggttttttcaaacggagcatccgaaggaataggacctatgtctgcaaatctggaaaccagggaggctgtccggtggacaagacgcacagaaaccagtgcagggcgtgtcggctgaagaagtgtttggaagtcaacatgaacaaagacgccgtgcagcacgagcgggggcctcggacgtccaccatccgcaagcaagtggccctctacttccgtggacacaaggaggagaacggggccgccgcgcactttccctcggcggcgctccctgcgccggccttcttcaccgcggtcacgcagctggagccgcacggcctggagctggccgcggtgtccaccactccagagcggcagaccctcgtgagcctggctcagcccacgcccaagtacccccatgaagtgaatgggaccccaatgtatctctatgaagtggccacggagtcggtgtgtgaatcagctgccagacttctcttcatgagcatcaagtgggctaagagtgtgccagccttctccacgctgtctttgcaagaccagctgatgcttttggaagatgcttggagagaactgtttgttctaggaatagcacaatgggccattccggttgatgctaacactctactggctgtatctggcatgaacggtgacaacacagattcccagaagctgaacaagatcatatctgaaatacaggctttacaagaggtggtggctcgatttagacaactccggttagatgctactgaatttgcctgtctaaaatgcatcgtcactttcaaagccgttcctacacatagtggttctgaactgagaagtttccggaatgctgccgccattgcagcccttcaagatgaggctcagctaacgctcaacagctacatccataccagatatcccactcaaccctgtcgctttggaaaactcctgttgcttttgccagctttacgttctattagcccatcaactatagaagaagtgtttttcaaaaaaaccatcggcaatgtgccaattacaagactgctttcagatatgtacaaatccagtgatatctacccaactttcttgtacaaagtggttgatatcggtaagcctatccctaaccctctcctcggtctcgattctacgtagtaatgaactagtccgtaacttgaaagtatttcgatttcttggctttatatatcttgtggaaaggacgataacccgggtcgacaggctacggg

SEQ ID NO: 3635 - DNA, 2162 bp, Homo sapiens
  source 1..2162: mol_type = genomic DNA
atcgattgatcaacaagtttgtacaaaaaagttggcaccatggcggacagtgcggaactaaagcaaatggttatgagccttagagtttctgaactccaagtactgttgggctacgccgggagaaacaagcacggacgcaaacacgaacttctcacaaaagccctgcatttgctaaaggctggctgtagtcctgctgtgcaaatgaaaattaaggaactctataggcggcggttcccacagaaaatcatgacgcctgcagacttgtccatccccaacgtacattcaagtcctatgccagcaactttgtctccatctaccattccacaactcacttacgatggtcaccctgcatcatcgccattactccctgtttctcttctgggacctaaacatgaactggaactcccacatcttacatcagctcttcacccagtccatccggatataaaacttcaaaaattaccattttatgatttactggatgaactgataaaacccaccagtctagcatcagacaacagtcagcgctttcgagaaacctgttttgcatttgccttgacaccacaacaagtgcagcaaatcagtagttccatggatatttctgggaccaaatgtgacttcacagtacaggtccagttaaggttttgtttatcagaaaccagttgtccacaagaagatcacttcccacccaatctttgtgtgaaagtgaatacaaaaccttgcagccttccaggttaccttccacctacaaaaaatggcgtggaaccaaagcgacccagccgaccaattaatatcacctcacttgtccgactgtccacaacagtaccaaacacgattgttgtttcttggactgcagaaattggaagaaactattccatggcagtatatcttgtaaaacagttgtcctcaacagttcttcttcagaggttacgagcaaagggaataaggaatccggatcattctagagctttaattaaagagaagttgactgcggatccagacagtgaaatagctacaaccagcctaagggtttctctactatgtccacttggtaaaatgcggctgacaattccgtgtcgggcccttacatgttctcatctacaatgttttgacgcaactctttacattcagatgaatgagaaaaaaccaacctgggtttgtcctgtctgtgataagaaggctccatatgaacaccttattattgatggcttgtttatggaaatcctaaagtactgtacagactgtgatgaaatacaatttaaggaggatggcacttgggcaccgatgagatcaaaaaaggaagtacaggaagtttctgcctcttacaatggagtcgatggatgcttgagctccacattggagcatcaggtagcgtctcaccaccagtcctcaaataaaaacaagaaagtagaagtgattgacctaaccatagacagttcatctgatgaagaggaagaagagccatctgccaagaggacctgtccttccctatctcccacatcaccactaaataataaaggcattttaagtcttccacatcaagcatctccagtatcccgcaccccaagccttcctgctgtagacacaagctacattaatacctccctcatccaagactataggcatcctttccacatgacacccatgccttacgacttacaaggattagatttctttcctttcttatcaggagacaatcagcattacaacacctccttgcttgccgctgcagcagcagcagtttcagatgatcaagacctcctacactcgtctcggtttttcccgtatacctcctcacagatgtttcttgatcagttaagtgcaggaggcagtacttctctgccaaccaccaatggaagcagtagtggcagtaacagcagcctggtttcttccaacagcctaagggaaagccatagccacaccgtcacaaacaggagcagcacggacacggcatccatctttggcatcataccagacattatttcattggacttgccaactttcttgtacaaagtggttgatatcggtaagcctatccctaaccctctcctcggtctcgattctacgtagtaatgaactagtccgtaacttgaaagtatttcgatttcttggctttatatatcttgtggaaaggacgaatcaaatctgactgtcacggcagc

SEQ ID NO: 3636 - DNA, 437 bp, Homo sapiens
  source 1..437: mol_type = genomic DNA
atcgattgatcaacaagtttgtacaaaaaagtgggcatggatctggtgaagaatcatctgatgtatgctgtgagagaggaggtggagatcctgaaggagcagatccgagagctggtggagaagaactcccagctagagcgtgagaacaccctgttgaagaccctggcaagcccagagcagctggagaagttccagtcctgtctgagccctgaagagccagctcccgaatccccacaagtgcccgaggcccctggtggttctgcggtctacccaactttcttgtacaaagtggttgatatcggtaagcctatccctaaccctctcctcggtctcgattctacgtagtaatgaactagtccgtaacttgaaagtatttcgatttcttggctttatatatcttgtggaaaggacgacgcgcgatgtagttttctgcacta

SEQ ID NO: 3637 - DNA, 752 bp, Homo sapiens
  source 1..752: mol_type = genomic DNA
atcgattgatcaacaagtttgtacaaaaaagttggcatgccgcgcgtcgtgcccgaccagagaagcaagttcgagaacgaggagttttttaggaagctgagccgcgagtgtgagattaagtacacgggcttcagggaccggccccacgaggaacgccaggcacgcttccagaacgcctgccgcgacggccgctcggaaatcgcttttgtggccacaggaaccaatctgtctctccagttttttccggccagctggcagggagaacagcgacaaacacctagccgagagtatgtcgacttagaaagagaagcaggcaaggtatatttgaaggctcccatgattctgaatggagtctgtgttatctggaaaggctggattgatctccaaagactggatggtatgggctgtctggagtttgatgaggagcgagcccagcaggaggatgcattagcacaacaggcctttgaagaggctcggagaaggacacgcgaatttgaagatagagacaggtctcatcgggaggaaatggaggtgagagtttcacagctgctggcagtaactggcaagaagacaacaagaccctacccaactttcttgtacaaagtggttgatatcggtaagcctatccctaaccctctcctcggtctcgattctacgtagtaatgaactagtccgtaacttgaaagtatttcgatttcttggctttatatatcttgtggaaaggacgaacccgatcctgggattccctatcg

SEQ ID NO: 3638 - DNA, 977 bp, Homo sapiens
  source 1..977: mol_type = genomic DNA
atcgattgatcaacaagtttgtacaaaaaagttggcatgccggcccgttgtgtggccgcccactgcggcaacaccaccaagtctgggaagtcgctgttccgctttcccaaggaccgggccgtgcggctgctctgggaccgcttcgtgcggggttgccgcgccgactggtacggaggcaatgaccgctcggtcatctgctctgaccactttgccccagcctgttttgacgtctcttcggttatccagaagaacctgcgcttctcccagcgcctgaggctggtggcaggcgccgtgcccaccctgcaccgggtgcccgccccggcacctaagaggggagaggagggagaccaagcaggccgcctggacacgcgaggagagctccaggcagccaggcattctgaggctgccccaggtccagtctcctgtacacgcccccgagctgggaagcaggctgcagcttcacagattacgtgtgaaaatgaacttgtgcaaacccaaccccatgctgataatccatctaatactgtcacttcagtacctactcactgtgaagaaggcccagtgcataaaagtacacaaatttctttgaaaaggccccgtcaccgtagtgtgggtattcaagccaaagtgaaagcgtttggaaaaagactgtgtaatgcaactactcagacagaggaattgtggtctagaacttcctctctctttgacatttactccagtgattcagaaacagatacagactgggatatcaagagtgaacagagtgatttgtcttatatggctgtacaggtgaaagaagaaacatgttacccaactttcttgtacaaagtggttgatatcggtaagcctatccctaaccctctcctcggtctcgattctacgtagtaatgaactagtccgtaacttgaaagtatttcgatttcttggctttatatatcttgtggaaaggacgacttctatcagcctatctctggggc

SEQ ID NO: 3639 - DNA, 824 bp, Homo sapiens
  source 1..824: mol_type = genomic DNA
accgccaccatggtgagcaagggcgaggagctgttcaccggggtggtgcccatcctggtcgagctggacggcgacgtaaacggccacaagttcagcgtgtctggcgagggcgagggcgatgccacctacggcaagctgaccctgaagttcatctgcaccaccggcaagctgcccgtgccctggcccaccctcgtgaccaccctgacctacggcgtgcagtgcttcagccgctaccccgaccacatgaagcagcacgacttcttcaagtccgccatgcccgaaggctacgtccaggagcgcaccatcttcttcaaggacgacggcaactacaagacccgcgccgaggtgaagttcgagggcgacaccctggtgaaccgcatcgagctgaagggcatcgacttcaaggaggacggcaacatcctggggcacaagctggagtacaactacaacagccacaacgtctatatcatggccgacaagcagaagaacggcatcaaggcgaacttcaagatccgccacaacatcgaggacggcagcgtgcagctcgccgaccactaccagcagaacacccccatcggcgacggccccgtgctgctgcccgacaaccactacctgagcacccagtccgccctgagcaaagaccccaacgagaagcgcgatcacatggtcctgctggagttcgtgaccgccgccgggatcactctcggcatggacgagctgtacaagtcctagtaatgaactagtccgtaacttgaaagtatttcgatttcttggctttatatatcttgtggaaaggacgagctgactccttcttgggaatctgc

SEQ ID NO: 3640 - DNA, 812 bp, Homo sapiens
  source 1..812: mol_type = genomic DNA
accgccaccatggtgagcaagggcgaggaggataacatggccatcatcaaggagttcatgcgcttcaaggtgcacatggagggctccgtgaacggccacgagttcgagatcgagggcgagggcgagggccgcccctacgagggcacccagaccgccaagctgaaggtgaccaagggtggccccctgcccttcgcctgggacatcctgtcccctcagttcatgtacggctccaaggcctacgtgaagcaccccgccgacatccccgactacttgaagctgtccttccccgagggcttcaagtgggagcgcgtgatgaacttcgaggacggcggcgtggtgaccgtgacccaggactcctccctgcaggacggcgagttcatctacaaggtgaagctgcgcggcaccaacttcccctccgacggccccgtaatgcagaagaagaccatgggctgggaggcctcctccgagcggatgtaccccgaggacggcgccctgaagggcgagatcaagcagaggctgaagctgaaggacggcggccactacgacgctgaggtcaagaccacctacaaggccaagaagcccgtgcagctgcccggcgcctacaacgtcaacatcaagttggacatcacctcccacaacgaggactacaccatcgtggaacagtacgaacgcgccgagggccgccactccaccggcggcatggacgagctgtacaagtagtaatgaactagtccgtaacttgaaagtatttcgatttcttggctttatatatcttgtggaaaggacgaagagaatatcacgtccgtgcaaag

SEQ ID NO: 3641 - DNA, 1800 bp, Homo sapiens
  source 1..1800: mol_type = genomic DNA
atgcggcccgcagccggcgcagccaggagaccgaggtgctgtaccagctggctcacacgctgcccttcgcccgcggcgtcagcgcccacctggacaaggcctctatcatgcgcctcaccatcagctacctgcgcatgcaccgcctctgcgccgcagctggagctcattggacacagcatctttgatttcatccacccctgtgaccaagaggagcttcaggacgccctgaccccccagcagaccctgtccaggaggaaggtggaggcccccacggagcggtgcttctccttgcgcatgaagagtacactcaccagccgcgggcgcaccctcaacctcaaggcggccacctggaaggtgctgaactgctctggacatatgagggcctacaagccacctgcgcagacttctccagctgggagccctgactcagagcccccgctgcagtgcctggtgctcatctgcgaagccatcccccacccaggcagcctggagcccccactgggccgaggggccttcctcagccgccacagcctggacatgaagttcacctactgtgacgacaggattgcagaagtggctggctatagtcccgatgacctgatcggctgttccgcctacgagtacatccacgcgctggactccgatgcggtcagcaagagcatccacaccttgctgagcaagggccaggcagtaacagggcagtatcgcttcctggcccggagtggtggctacctgtggacccagacccaggccacagtggtgtcagggggacggggcccccagtcggagagtatcgtctgtgtccattttttaatcagccaggtggaagagaccggagtggtgctgtccctggagcaaacggagcaacactctcgcagacccattcagcggggcgccccctctcagaaggacacccctaaccctggggacagccttgacacccctggcccccggatccttgccttcctgcacccgccttccctgagcgaggctgccctggccgctgacccccgccgtttctgcagccctgacctccgtcgcctcctgggacccatcctggatggggcttcagtagcagccactcccagcaccccgctggccacacggcacccccaaagtcctctttcggctgatctcccagatgaactacctgtgggcaccgagaatgtgcacagactcttcacctccgggaaagacactgaggcagtggagacagatttagatatagctcaggatgctgatgctctggatttggagatgctggccccctacatctccatggatgatgacttccagctcaacgccagcgagcagctacccagggcctaccacagacctctgggggctgtcccccggccccgtgctcggagcttccatggcctgtcacctccagcccttgagccctccctgctaccccgctgggggagtgacccccggctgagctgctccagcccttccagaggggacccctcagcatcctctcccatggctggggctcggaagaggaccctggcccagagctcagaggacgaggacgagggagtggagctgctgggagtgagacctcccaaaaggtcccccagcccagaacacgaaaactttctgctctttcctctcagcctgagtttccttctgacaggaggaccagccccagggagcctgcaggaccccagcaccccactcctgaacctgaatgagcccctgggcctgggcccctcactgctctctccgtactcagacgaggacactacccagcccgggggccccttccagccaagggcaggctcagcccaggctgac

SEQ ID NO: 3642 - DNA, 1350 bp, Homo sapiens
  source 1..1350: mol_type = genomic DNA
atgcggcccgcagccggcgcagccaggagaccgaggtgctgtaccagctggctcacacgctgcccttcgcccgcggcgtcagcgcccacctggacaaggcctctatcatgcgcctcaccatcagctacctgcgcatgcaccgcctctgcgccgcagctggagctcattggacacagcatctttgatttcatccacccctgtgaccaagaggagcttcaggacgccctgaccccccagcagaccctgtccaggaggaaggtggaggcccccacggagcggtgcttctccttgcgcatgaagagtacactcaccagccgcgggcgcaccctcaacctcaaggcggccacctggaaggtgctgaactgctctggacatatgagggcctacaagccacctgcgcagacttctccagctgggagccctgactcagagcccccgctgcagtgcctggtgctcatctgcgaagccatcccccacccaggcagcctggagcccccactgggccgaggggccttcctcagccgccacagcctggacatgaagttcacctactgtgacgacaggattgcagaagtggctggctatagtcccgatgacctgatcggctgttccgcctacgagtacatccacgcgctggactccgatgcggtcagcaagagcatccacaccttgctgagcaagggccaggcagtaacagggcagtatcgcttcctggcccggagtggtggctacctgtggacccagacccaggccacagtggtgtcagggggacggggcccccagtcggagagtatcgtctgtgtccattttttaatcagccaggtggaagagaccggagtggtgctgtccctggagcaaacggagcaacactctcgcagacccattcagcggggcgccccctctcagaaggacacccctaaccctggggacagccttgacacccctggcccccggatccttgccttcctgcacccgccttccctgagcgaggctgccctggccgctgacccccgccgtttctgcagccctgacctccgtcgcctcctgggacccatcctggatggggcttcagtagcagccactcccagcaccccgctggccacacggcacccccaaagtcctctttcggctgatctcccagatgaactacctgtgggcaccgagaatgtgcacagactcttcacctccgggaaagacactgaggcagtggagacagatttagatatagctcaggaccccagcaccccactcctgaacctgaatgagcccctgggttttcactttgtcacccagtctggagtgcagtggcacaaacacagctcaccgcagcctcgacctcctgggctcaag

SEQ ID NO: 3643 - DNA, 2001 bp, Homo sapiens
  source 1..2001: mol_type = genomic DNA
atggactggcaagaccacaggtcgaccacggagctgcgcaaggaaaagtcccgggatgcggcccgcagccggcgcagccaggagaccgaggtgctgtaccagctggctcacacgctgcccttcgcccgcggcgtcagcgcccacctggacaaggcctctatcatgcgcctcaccatcagctacctgcgcatgcaccgcctctgcgccgcaggggagtggaaccaggtgggagcagggggagaaccactggatgcctgctacctgaaggccctggagggcttcgtcatggtgctcaccgccgagggagacatggcttacctgtcggagaatgtcagcaaacacctgggcctcagtcagctggagctcattggacacagcatctttgatttcatccacccctgtgaccaagaggagcttcaggacgccctgaccccccagcagaccctgtccaggaggaaggtggaggcccccacggagcggtgcttctccttgcgcatgaagagtacactcaccagccgcgggcgcaccctcaacctcaaggcggccacctggaaggtgctgaactgctctggacatatgagggcctacaagccacctgcgcagacttctccagctgggagccctgactcagagcccccgctgcagtgcctggtgctcatctgcgaagccatcccccacccaggcagcctggagcccccactgggccgaggggccttcctcagccgccacagcctggacatgaagttcacctactgtgacgacaggattgcagaagtggctggctatagtcccgatgacctgatcggctgttccgcctacgagtacatccacgcgctggactccgatgcggtcagcaagagcatccacaccttgctgagcaagggccaggcagtaacagggcagtatcgcttcctggcccggagtggtggctacctgtggacccagacccaggccacagtggtgtcagggggacggggcccccagtcggagagtatcgtctgtgtccattttttaatcagccaggtggaagagaccggagtggtgctgtccctggagcaaacggagcaacactctcgcagacccattcagcggggcgccccctctcagaaggacacccctaaccctggggacagccttgacacccctggcccccggatccttgccttcctgcacccgccttccctgagcgaggctgccctggccgctgacccccgccgtttctgcagccctgacctccgtcgcctcctgggacccatcctggatggggcttcagtagcagccactcccagcaccccgctggccacacggcacccccaaagtcctctttcggctgatctcccagatgaactacctgtgggcaccgagaatgtgcacagactcttcacctccgggaaagacactgaggcagtggagacagatttagatatagctcaggatgctgatgctctggatttggagatgctggccccctacatctccatggatgatgacttccagctcaacgccagcgagcagctacccagggcctaccacagacctctgggggctgtcccccggccccgtgctcggagcttccatggcctgtcacctccagcccttgagccctccctgctaccccgctgggggagtgacccccggctgagctgctccagcccttccagaggggacccctcagcatcctctcccatggctggggctcggaagaggaccctggcccagagctcagaggacgaggacgagggagtggagctgctgggagtgagacctcccaaaaggtcccccagcccagaacacgaaaactttctgctctttcctctcagcctgagtttccttctgacaggaggaccagccccagggagcctgcaggaccccagcaccccactcctgaacctgaatgagcccctgggcctgggcccctcactgctctctccgtactcagacgaggacactacccagcccgggggccccttccagccaagggcaggctcagcccaggctgac

SEQ ID NO: 3644 - DNA, 1782 bp, Homo sapiens
  source 1..1782: mol_type = genomic DNA
atgcggcccgcagccggcgcagccaggagaccgaggtgctgtaccagctggctcacacgctgcccttcgcccgcggcgtcagcgcccacctggacaaggcctctatcatgcgcctcaccatcagctacctgcgcatgcaccgcctctgcgccgcagctggagctcattggacacagcatctttgatttcatccacccctgtgaccaagaggagcttcaggacgccctgaccccccagcagaccctgtccaggaggaaggtggaggcccccacggagcggtgcttctccttgcgcatgaagagtacactcaccagccgcgggcgcaccctcaacctcaaggcggccacctggaaggtgctgaactgctctggacatatgagggcctacaagccacctgcgcagacttctccagctgggagccctgactcagagcccccgctgcagtgcctggtgctcatctgcgaagccatcccccacccaggcagcctggagcccccactgggccgaggggccttcctcagccgccacagcctggacatgaagttcacctactgtgacgacaggattgcagaagtggctggctatagtcccgatgacctgatcggctgttccgcctacgagtacatccacgcgctggactccgatgcggtcagcaagagcatccacaccttgctgagcaagggccaggcagtaacagggcagtatcgcttcctggcccggagtggtggctacctgtggacccagacccaggccacagtggtgtcagggggacggggcccccagtcggagagtatcgtctgtgtccattttttaatcagccaggtggaagagaccggagtggtgctgtccctggagcaaacggagcaacactctcgcagacccattcagcggggcgccccctctcagaaggacacccctaaccctggggacagccttgacacccctggcccccggatccttgccttcctgcacccgccttccctgagcgaggctgccctggccgctgacccccgccgtttctgcagccctgacctccgtcgcctcctgggacccatcctggatggggcttcagtagcagccactcccagcaccccgctggccacacggcacccccaaagtcctctttcggctgatctcccagatgaactacctgtgggcaccgagaatgtgcacagactcttcacctccgggaaagacactgaggcagtggagacagatttagatatagctcaggatgctgatgctctggatttggagatgctggccccctacatctccatggatgatgacttccagctcaacgccagcgagcagctacccagggcctaccacagacctctgggggctgtcccccggccccgtgctcggagcttccatggcctgtcacctccagcccttgagccctccctgctaccccgctgggggagtgacccccggctgagctgctccagcccttccagaggggacccctcagcatcctctcccatggctggggctcggaagaggaccctggcccagagctcagaggacgaggacgagggagtggagctgctgggagtgagacctcccaaaaggtcccccagcccagaacacgaaaactttctgctctttcctctcagcctgagtttccttctgacaggaggaccagccccagggagcctgcaggaccccagcaccccactcctgaacctgaatgagcccctgggttttcactttgtcacccagtctggagtgcagtggcacaaacacagctcaccgcagcctcgacctcctgggctcaag

SEQ ID NO: 3645 - DNA, 2007 bp, Homo sapiens
  source 1..2007: mol_type = genomic DNA
atggcgctggggctgcagcgcgcaaggtcgaccacggagctgcgcaaggaaaagtcccgggatgcggcccgcagccggcgcagccaggagaccgaggtgctgtaccagctggctcacacgctgcccttcgcccgcggcgtcagcgcccacctggacaaggcctctatcatgcgcctcaccatcagctacctgcgcatgcaccgcctctgcgccgcaggggagtggaaccaggtgggagcagggggagaaccactggatgcctgctacctgaaggccctggagggcttcgtcatggtgctcaccgccgagggagacatggcttacctgtcggagaatgtcagcaaacacctgggcctcagtcagctggagctcattggacacagcatctttgatttcatccacccctgtgaccaagaggagcttcaggacgccctgaccccccagcagaccctgtccaggaggaaggtggaggcccccacggagcggtgcttctccttgcgcatgaagagtacactcaccagccgcgggcgcaccctcaacctcaaggcggccacctggaaggtgctgaactgctctggacatatgagggcctacaagccacctgcgcagacttctccagctgggagccctgactcagagcccccgctgcagtgcctggtgctcatctgcgaagccatcccccacccaggcagcctggagcccccactgggccgaggggccttcctcagccgccacagcctggacatgaagttcacctactgtgacgacaggattgcagaagtggctggctatagtcccgatgacctgatcggctgttccgcctacgagtacatccacgcgctggactccgatgcggtcagcaagagcatccacaccttgctgagcaagggccaggcagtaacagggcagtatcgcttcctggcccggagtggtggctacctgtggacccagacccaggccacagtggtgtcagggggacggggcccccagtcggagagtatcgtctgtgtccattttttaatcagccaggtggaagagaccggagtggtgctgtccctggagcaaacggagcaacactctcgcagacccattcagcggggcgccccctctcagaaggacacccctaaccctggggacagccttgacacccctggcccccggatccttgccttcctgcacccgccttccctgagcgaggctgccctggccgctgacccccgccgtttctgcagccctgacctccgtcgcctcctgggacccatcctggatggggcttcagtagcagccactcccagcaccccgctggccacacggcacccccaaagtcctctttcggctgatctcccagatgaactacctgtgggcaccgagaatgtgcacagactcttcacctccgggaaagacactgaggcagtggagacagatttagatatagctcaggatgctgatgctctggatttggagatgctggccccctacatctccatggatgatgacttccagctcaacgccagcgagcagctacccagggcctaccacagacctctgggggctgtcccccggccccgtgctcggagcttccatggcctgtcacctccagcccttgagccctccctgctaccccgctgggggagtgacccccggctgagctgctccagcccttccagaggggacccctcagcatcctctcccatggctggggctcggaagaggaccctggcccagagctcagaggacgaggacgagggagtggagctgctgggagtgagacctcccaaaaggtcccccagcccagaacacgaaaactttctgctctttcctctcagcctgagtttccttctgacaggaggaccagccccagggagcctgcaggaccccagcaccccactcctgaacctgaatgagcccctgggcctgggcccctcactgctctctccgtactcagacgaggacactacccagcccgggggccccttccagccaagggcaggctcagcccaggctgac

SEQ ID NO: 3646 - DNA, 4629 bp, Homo sapiens
  source 1..4629: mol_type = genomic DNA
atgtatgcagcagtggaacatgggcctgtgctttgcagcgattccaacatcctgtgcctgtcctggaaggggcgtgtccccaagagtgagaaggagaagcctgtgtgcaggagacgctactatgaggaaggctggctggccacgggcaacgggcgaggagtggttggggtgactttcacctctagtcactgtcgcagggacaggagtactccacagaggataaatttcaacctccggggccacaatagcgaggttgtgctggtgaggtggaatgagccctaccagaaactggccacgtgcgatgcggacggaggcatattcgtgtggattcagtacgagggcaggtggtctgtggagctggtcaacgaccgcggggcgcaggtgagtgatttcacgtggagccatgatggaactcaagcacttatttcctatcgagatgggtttgtcctggttgggtctgtcagtggacaaagacactggtcatccgaaatcaacttggaaagtcaaattacgtgtggcatatggactcctgacgaccaacaggtgctgtttggcacggccgatgggcaggtgattgtcatggattgccacggcagaatgctggcccacgtcctcttgcacgagtcagacggtgtcctcggcatgtcctggaactacccgatcttcctggtggaggacagcagcgagagcgacacggactcagatgactacgcccctccccaagatggtccggcagcatatcccatcccagtgcagaacatcaagcctctgctcaccgtcagcttcacctcgggagacatcagcttaatgaacaactacgatgacttgtctcccacggtcatccgctcagggctgaaagaggtggtagcccagtggtgcacacagggggacttgctggcagtcgctgggatggaacggcagacccagcttggtgagcttcccaatggtccccttctgaagagtgccatggtcaagttctacaatgttcgtggggagcacatcttcacactggacactctcgtgcagcgccccatcatctccatctgctggggtcaccgggattcgaggctgttgatggcatcaggaccagccctgtacgtggtgcgtgtggagcaccgggtgtccagcctgcagctgctgtgccagcaggccatcgccagcaccttgcgtgaggacaaggacgtcagcaagctgactctgcccccccgcctctgctcctacctctccactgccttcatccccaccatcaagcccccaattccagatccgaacaacatgagagactttgtcagctacccatcagccggcaacgagcggctgcactgcaccatgaagcgcacagaggacgacccggaggtgggcggcccgtgctacacgctctacctggagtacctgggcgggcttgtgcccatcctcaaagggcggcgcatcagcaagctgcggccagagttcgtcatcatggacccgcggacagatagcaaaccagatgaaatctatgggaacagcttgatttctactgtgatcgacagctgcaactgctcagactccagtgacattgagctgagtgatgactgggctgccaagaaatctcccaaaatctccagagctagcaaatcacccaaactcccaaggatcagcattgaggcccgcaagtcacccaagctgccccgggctgctcaggagctctcccggtccccacggttgcccctgcgcaagccctctgtgggctcgcccagcctgactcggagagagtttccttttgaagacatcactcagcacaactatcttgctcaggtcacgtctaatatctggggaaccaaatttaagattgtgggcttggctgctttcctgccaaccaacctcggtgcagtaatctataaaaccagcctcctgcatctccagccgcggcagatgaccatttatctcccagaagttcggaaaatttccatggactatattaatttacctgtcttcaacccaaatgttttcagtgaagatgaagatgatttaccagtgacaggagcatctggtgtccctgagaacagcccaccttgtaccgtgaacatccctattgcaccgatccacagctcggctcaggctatgtcccccacgcagagcatagggctggtgcagtccctactggccaatcagaatgtgcagctagatgtcctgaccaaccagacgacagctgtagggacagcagaacatgcaggtgacagtgccacccagtacccagtctccaaccggtactccaatcctggacaggtgattttcggaagcgtggaaatgggccgcatcattcagaacccccctccactgtccctgcctcccccgccgcaggggcccatgcagctgtccacggtgggccatggagaccgagaccacgaacacctgcagaagtcagccaaggccctgcggccaacaccgcagctggcagctgagggggacgcagtggtctttagtgccccccaggaggtccaggtgacgaagataaaccctccacccccgtacccaggaaccatccccgctgcccccaccacagcagcacccccgccccctctgccgcccccacagcccccagtggatgtgtgcttgaagaagggcgacttctccctctaccccacgtcagtgcactaccagacccccctgggctatgagaggatcaccaccttcgacagcagtggcaacgtggaggaggtgtgccggccccgcacccggatgctgtgctcccagaacacgtacaccctccccggcccgggtagctctgccaccttgaggctcacggccactgagaagaaggtccctcagccctgcagcagtgccaccctgaaccgcctgaccgtccctcgctactccatccccaccggggacccacccccgtatcctgaaattgccagccagctggcccaggggcggggggctgcccagaggtccgacaatagcctcatccacgctaccctgcggaggaacaaccgtgaggctacgctcaagatggcccagctggccgacagcccgcgggcccccctgcagcccctggccaagtccaagggcgggcccgggggggtggtgacacagctcccagcgcggcccccacctgccctgtacacctgcagtcagtgcagtggcacagggcccagctcacagcccggagcctccctggcccataccgccagcgcctccccgttggcctcccagtcctcctacagcctcctgagcccacccgacagcgcccgcgaccgcaccgactacgtcaactcggccttcacggaggacgaggccctgtcccagcactgtcagcttgagaagcccttgaggcaccctcccctgcctgaagctgctgtcaccctgaaacggccacccccttaccagtgggaccccatgctgggtgaggatgtttgggttcctcaagaaaggacagcacagacttcagggcccaaccccttaaaactgtcctctctgatgctgagtcagggccagcacctggacgtgtcccgactgcccttcatctcccccaagtctcctgccagccccactgccactttccaaacaggctatgggatgggagtgccatatccaggaagctataacaacccccctttgcctggagtgcaggctccctgctctcccaaagatgccctgtccccaacgcagtttgcacaacaggagcctgctgtggtccttcagccgctgtacccacccagcctctcctattgcaccctgccccccatgtacccaggaagcagcacgtgctctagtttacagctgccacctgtcgccttgcatccatggagttcctacagcgcctgcccgcccatgcagaacccccagggcactctccccccaaagccacacttggtggtggagaagccccttgtgtccccaccacctgccgacctccaaagccacttgggcacagaggtgatggtagagactgcagacaacttccaggaagtcctctccctgaccgaaagcccagtcccccagcggacagaaaaatttggaaagaagaaccggaagcgcctggacagccgagcagaagaaggcagcgttcaggccatcactgagggcaaagtgaagaaggaggctaggactttgagtgactttaattccctaatctccagcccacacctggggagagagaagaagaaagtgaagagtcagaaagaccaactgaagtcaaagaagttgaataagacaaacgagttccaggacagctccgagagcgagcctgagctgttcatcagcggggatgagctcatgaaccagagccagggcagcagaaagggctggaaaagcaagcgctccccacgggccgccggcgagctggaggaggccaagtgccggcgggccagtgagaaggaggacgggcggctgggcagccaaggcttcgtgtacgtgatggccaacaagcagccgctgtggaacgaggccacccaggtctaccagctggacttcggggggcgggtgacccaggagtccgccaagaacttccagattgagttagaggggcggcaggtgatgcagtttggacggattgatggcagtgcgtacattctagacttccagtatccgttctcagccgtgcaggcctttgcagttgccctggccaacgtgactcagcgcctcaaa

SEQ ID NO: 3647 - DNA, 2034 bp, Homo sapiens
  source 1..2034: mol_type = genomic DNA
atgtatgcagcagtggaacatgggcctgtgctttgcagcgattccaacatcctgtgcctgtcctggaaggggcgtgtccccaagagtgagaaggagaagcctgtgtgcaggagacgctactatgaggaaggctggctggccacgggcaacgggcgaggagtggttggggtgactttcacctctagtcactgtcgcagggacaggagtactccacagaggataaatttcaacctccggggccacaatagcgaggttgtgctggtgaggtggaatgagccctaccagaaactggccacgtgcgatgcggacggaggcatattcgtgtggattcagtacgagggcaggtggtctgtggagctggtcaacgaccgcggggcgcaggtgagtgatttcacgtggagccatgatggaactcaagcacttatttcctatcgagatgggtttgtcctggttgggtctgtcagtggacaaagacactggtcatccgaaatcaacttggaaagtcaaattacgtgtggcatatggactcctgacgaccaacaggtgctgtttggcacggccgatgggcaggtgattgtcatggattgccacggcagaatgctggcccacgtcctcttgcacgagtcagacggtgtcctcggcatgtcctggaactacccgatcttcctggtggaggacagcagcgagagcgacacggactcagatgactacgcccctccccaagatggtccggcagcatatcccatcccagtgcagaacatcaagcctctgctcaccgtcagcttcacctcgggagacatcagcttaatgaacaactacgatgacttgtctcccacggtcatccgctcagggctgaaagaggtggtagcccagtggtgcacacagggggacttgctggcagtcgctgggatggaacggcagacccagcttggtgagcttcccaatggtccccttctgaagagtgccatggtcaagttctacaatgttcgtggggagcacatcttcacactggacactctcgtgcagcgccccatcatctccatctgctggggtcaccgggattcgaggctgttgatggcatcaggaccagccctgtacgtggtgcgtgtggagcaccgggtgtccagcctgcagctgctgtgccagcaggccatcgccagcaccttgcgtgaggacaaggacgtcagcaagctgactctgcccccccgcctctgctcctacctctccactgccttcatccccaccatcaagcccccaattccagatccgaacaacatgagagactttgtcagctacccatcagccggcaacgagcggctgcactgcaccatgaagcgcacagaggacgacccggaggtgggcggcccgtgctacacgctctacctggagtacctgggcgggcttgtgcccatcctcaaagggcggcgcatcagcaagctgcggccagagttcgtcatcatggacccgcggacagatagcaaaccagatgaaatctatgggaacagcttgatttctactgtgatcgacagctgcaactgctcagactccagtgacattgagctgagtgatgactgggctgccaagaaatctcccaaaatctccagagctagcaaatcacccaaactcccaaggatcagcattgaggcccgcaagtcacccaagctgccccgggctgctcaggagctctcccggtccccacggttgcccctgcgcaagccctctgtgggctcgcccagcctgactcggagagagtttccttttgaagacatcactcagcacaactatcttgctcaggtcacgtctaatatctggggaaccaaatttaagattgtgggcttggctgctttcctgccaaccaacctcggtgcagtaatctataaaaccagcctcctgcatctccagccgcggcagatgaccatttatctcccagaagttcggaaaatttccatggactatattaatttacctgtcttcaacccaaatgttttcagtgaagatgaagatgatttaccaggtgatgcagtttggacggat

SEQ ID NO: 3648 - DNA, 1923 bp, Homo sapiens
  source 1..1923: mol_type = genomic DNA
atggactcagtggtctttgaggatgtggctgtgaacttcacccaggaggagtgggctttgctgggtccctctcagaagaaactctacagagatgtgatgcaagaaacctttgttaacttggcctctataggggaaaactgggaggagaagaacattgaagatcacaaaaatcaggggagaaagctaagaagtcatatggtagagaggctctgtgaaaggaaagaaggtagtcagtttggagaaaccatcagtcagactccaaatcctaaaccaaacaagaaaacttttactagagtaaaaccatatgaatgtagtgtgtgtggaaaggactatatgtgtcattcatctcttaataggcacatgagatctcatactgaacatagatcatatgaatatcacaaatatggagagaaatcatatgaatgtaaggaatgtgggaaaagattcagctttcgaagttcatttcgaatacatgaaagaactcacactggagagaaaccctataaatgtaaacagtgtggtaaggctttcagttggcccagttcctttcaaatacatgaaagaactcatactggagagaaaccttatgaatgtaaggaatgtgggaaggccttcatttatcacacaacctttcgaggacacatgagaatgcacacaggggagaaaccctataaatgtaaagaatgcgggaaaacgttcagtcatcccagttcttttcgaaatcatgaaagaactcactctggagagaaaccctatgaatgtaaacaatgtggaaaagctttcagatattaccaaacttttcaaatacatgaaaggactcacactggggaaaaaccctatcagtgtaagcaatgtggtaaagctcttagttgtcccacatcctttcgaagtcatgaaaggattcacactggagaaaaaccctataaatgtaaaaaatgtgggaaagccttcagttttcctagttcctttagaaaacatgaaagaattcatacaggagagaaaccctatgattgtaaggaatgtgggaaagcattcatttctcttccaagctatcgaagacatatgataatgcacactggaaatggaccttataaatgcaaggaatgtgggaaagcctttgattgtcctagttcttttcaaatccatgaacgaactcacactggagagaaaccctatgaatgtaaacagtgtggtaaagccttcagttgttccagttcctttcgaatgcatgaaagaactcacactggagagaaaccccatgaatgtaaacaatgtggtaaagccttcagttgttccagttctgttcgaatacatgaaaggactcacactggagagaaaccctatgaatgtaaacagtgtggtaaagccttcagttgttccagttcctttcgaatgcatgaaagaattcacactggagagaaaccctatgaatgtaaacagtgtggtaaagcctttagtttttctagttcctttcggatgcatgaaaggactcacactggagagaaaccctatgaatgtaaacaatgtggtaaagccttcagttgttccagttcctttcgaatgcatgaaaggactcacactggggagaaaccctatgaatgtaaacagtgtggtaaggcgtttagttgttccagttccattcgaatacatgaaaggactcacactggagagaaaccttatgagtgtaaacaatgtggtaaggccttcagttgttctagttctgttcgaatgcatgaaaggactcacactggagtgaaaccctatgaatgtaaacaatgtgacaaagccttcagttgctcacgttcctttcgaatccatgaacgaactcacactggagagaaaccctatgcatgtcaacaatgtggtaaagccttcaagtgttcccgttcctttcgaatacatgaaagagttcatagtggagag

SEQ ID NO: 3649 - DNA, 1689 bp, Homo sapiens
  source 1..1689: mol_type = genomic DNA
atgggaccattgacatttatggatgtggccatagaattctctctggaggagtggcagtgcctggacacagcacagcagaatttatataggaatgtcatgttagagaattatagaaacctggtattcctgggtattgctgtgtctaatttagacctgatcacctgtctggagcaaggaaaagagccctggaatatgaagagacacgagatggcagccaaacccccagctatgtgttctcattttgccaaagaccttaggccagagcaatatataaaaaattctttccaacaagtgatactgagaagatatggaaaatgtggatatcagaaaggctgtaaaagtgtggatgagcataagttgcacaaaggaggtcacaagggacttaaccggtgtgtgacaactacccagagcaaaatagttcagtgtgacaaatacgtgaaagtctttcataaatattcaaatgcaaagagacataagataagacatactggaaaaaatcctttcaaatgtaaagaatgtggcaaatcattttgcatgctttcacaactaactcaacatgagataattcatactggagaaaaaccctacaaatgtgaagaatgtggcaaagcttttaaaaagtcctcaaaccttacgaatcataagataattcatactggagagaaaccctacaaatgtgaagaatgtggaaaagcttttaaccagtcctcaactcttactagacataagataattcatactggagagaaactctacaaatgtgaagaatgtggcaaagcttttaaccggtcctcaaaccttactaaacataagatagttcatactggagagaaaccctacaaatgtgaagaatgtggcaaagcttttaaacagtcctcaaaccttactaatcacaagaaaattcatactggagagaaaccctacaaatgtggagaatgtggcaaagcctttaccctatcttcacaccttactacacataagaggattcatactggtgagaaaccctacaaatgtgaagaatgtggcaaagcttttagtgtattttcaacccttactaaacataagataattcatactgaagagaaaccctacaaatgtgaagaatgtggcaaagcttttaaccggtcctcacaccttactaatcataaggtaattcatactggagagaaaccctacaaatgtgaagaatgtggtaaagcctttaccaagtcctcaactcttacttatcataaggtaattcatactggaaagaaaccctacaaatgtgaagaatgtggtaaagcctttagtatattctcaatccttactaaacataaagtaattcatactgaagacaaaccctacaaatgtgaagaatgtggcaaaacttttaactactcctcaaattttactaatcataaaaaaattcatactggagagaaaccctataagtgtgaagaatgtggcaaaagctttattctgtcctctcatcttactacacataagataattcatactggagagaaaccctacaaatgtaaagaatgtggcaaagcttttaaccagtcctcaacccttatgaaacataagataattcatactggagagaaaccctacaaatgtgaagaatgtggcaaagcctttaaccagtccccaaaccttactaaacataagagaattcataccaaagagaaaccctacaaatgtaaa

SEQ ID NO: 3650 - DNA, 1689 bp, Homo sapiens
  source 1..1689: mol_type = genomic DNA
atggcaaggaggttgctgccagcccatgtacaggagtccgtgacgttcagggatgtggccgtgttcttcagccaggacgagtggttgcacctggactctgcccagagagccttgtaccgggaggtgatgctggagaactacagcatcctggtctcactggggattctcttttccaagccaaaggtcatctcccagttagagcaaggagaagacccctggatggtggagagtggagttccccaaggcgcacatctcggatgggaaagcttgtttggaaccatagtttctaaagaagaaaatcaggaagtcatgaaaaaactcataattgatggcacatttgacttcaagttggagaagacctacataaatgaagataagttagagaagcaacaaggcaaaaagaacagacttttcagtaaagtgttagttaccatcaaaaaagtctacatgaaggagaggagctttaaaggtgttgaatttgggaaaaatcttggtctaaaatcatcgcttattagaaaaccgagaatagtttccagaggaaggagaccccgttcacagcagtattcagttctctttaaacaactgggggtcaacacagtgcgtaaatgttataaatgtaatatctgtgggaaaatcttcctccacagttcctccctgagtaaacaccagagaatccacactggagagaagctctataaatgtaaggaatgtaggaaagccttcagccaaagctcatccctaactcagcacttgagggttcatacaggagagaaaccttatatatgtagtgaatgtggaaaagccttcagtttcaccacatctcttattggacaccagagaatgcatactggagagagaccttataaatgcaaggaatgtggaaaaacatttaaaggtagttcatctcttaataatcaccagcgaattcacacaggagagaagccctataagtgtaatgaatgtgggagggccttcagtcagtgctcatctctcattcagcaccacagaattcatactggggagaaaccgtatgaatgtactcagtgtgggaaagccttcacttcaatatcgcggctaagtaggcaccatcgaattcatactggagagaaaccctttcattgtaacgagtgtggaaaagtattcagctatcactcagcccttatcatacatcagagaattcacactggtgagaaaccatatgcatgcaaagaatgtgggaaagccttcagccaaagctcagctctcatacaacatcaaagaattcacactggagaaaaaccctacaaatgtaatgaatgtgggaaagccttctcttggatttcacggcttaatatacatcacagaattcacactggagagaaaccatataattgtaaggaatgtggaaaagccttcagttcccactcaggcgttaatactcatcgaaaaattcatactggagaaaaaccttataaatgtaatgactgtgagaaagccttcaaccaaagctcagctctaattcagcaccagagaattcatactggagagaaaccatataattgtaaagtgtgtgggaaagccttcagacagagttcatcccttatgacacacatgagaattcatacaggggaaaaaccttataaatgtaaagaatgtgggaaggcttttagtcagagctcatctcttactaatcatcaaaggactcataat

SEQ ID NO: 3651 - DNA, 1593 bp, Homo sapiens
  source 1..1593: mol_type = genomic DNA
atggattcggtggcctttgaggatgtggctgtgaacttcacccaggaggagtgggctttgctggatccttcccagaaaaatctctacagggaagtgatgcaggaaaccttgaggaacctgacctccataggaaaaaaatggaacaaccagtacattgaagatgagcaccaaaatcctaggagaaacctaagaagacttataggggagagactctctgaaagtaaagaaagtcatcagcatggagaagttttgacacaggttccagatgacacactgaagaagaaaactcctggagtacaatcatatgaaagcagtgtgtgtggagaaatcggcataggtctttcatcccttaataggcacctcagagcctttagttattccagtagccttgcaatacatggaagaactcacactggggaaaagccttatgaatgtaaggaatgtgggaaagcattcaggtttcccagttctgttcgtagacatgaaagaatccactctgcaaaaaaaccctatgaatgtaagcagtgtgggaaagcattcagttttcccagttctgttcgtagacatgaaagaatccactctgcaaaaaaaccctatgaatgtaagcagtgtgggaaagcattatcttatcttgtaagctttcagacacacatgagaatgcacactggagagagacctcataaatgtaacatatgtgggaaagcctttttttctcccagttcgttaaaaagacacgagaaaagtcacactggagagaaacgctataaatgcaagcaatgtgataaagccttcaattgtcccagttcctttcaatatcatgaaaggactcacagtggagagaaaccctatgagtgtacacaatgtaggaaagccttcagatctgtcaagtacctgcgagtacatgaaagaaaacacactggagagaaaccctatgagtgtaagctatgtggtaagggatttatttcttccacttcctttcgctatcatgaaaagactcacactggagagaaaccttatgaatgtaaaaaatgtgtgaaagccttcagttttgtcaaggatcttcgaatacatgaaaggacacacactggagagaaaccctttgaatgtaaacaatgtgggaaaaccttcacttcttccaattcctttcactatcatgaaaggactcacactggagagaaaccctatgagtgtaagcaatgtgggaaagccttcagatctgcctcagtccttcaaaagcacatacgaactcacacaggagagaaaccctatggatgtaagcaatgtggtaaagtctttagagttgcctcacaacttaaaatgcatgaaaggactcacacaggagagaaaccctatgagtgtaagcaatgtggaaaagccttcatttcttctaattctattcgctatcataaaaggactcacactggagagaaaccctataaatgtaaacagtgtgggaaagccttcatttcttccaactcttttctctaccatgaaaggattcatactggagagaaaccctatgagtgtaagcaatgtggtaaagcctttagatctgcctcaatccttcaaaagcatgtaaggactcacgctggc

SEQ ID NO: 3652 - DNA, 2235 bp, Homo sapiens
  source 1..2235: mol_type = genomic DNA
atgccctgctgtagtcacaggagctgtagagaggaccccggtacatctgaaagccgggaaatgatgtttcaggacccagtggcctttgaggatgtggctgtgaacttcacccaggaagagtggacattgctggatatttcccagaagaatctcttcagggaagtgatgctggaaactttcaggaacctgacctctataggaaaaaaatggagtgaccagaacattgaatatgagtaccaaaaccccagaagaagcttcaggagtctcatagaagagaaagtcaatgaaattaaagaagacagtcattgtggagaaacttttacccaggttccagatgacagactgaacttccaggagaagaaagcttctcctgaagtaaaatcatgtgacagctttgtgtgtgcagaagttggcataggtaactcatcttttaatatgagcatcagaggtgacactggacacaaggcatatgagtatcaggaatatggaccaaagccatataagtgtcaacaacctaaaaataagaaagccttcaggtatcgcccatccattagaacacaagaaagggatcacactggagagaaaccctatgcttgtaaagtctgtggaaaaacctttattttccattcaagcattcgaagacacatggtaatgcacagtggggatggaacttataaatgtaaattttgtgggaaagccttccattctttcagtttatatcttatccatgaaagaactcacactggagagaaaccatatgaatgtaaacaatgtggtaaatcctttacttattctgctacccttcaaatacatgaaagaactcacactggggagaagccctatgaatgtagcaaatgtgataaagcatttcatagttctagttcctatcatagacatgaaagaagtcacatgggagagaagccttatcaatgcaaagaatgtggaaaagcatttgcatataccagttctcttcgtagacatgaaaggacccactctgggaaaaaaccgtatgaatgtaagcaatatggggaaggcttatcctatcttataagttttcaaacacacataagaatgaactctggagaaagaccttataaatgtaagatatgtgggaaaggcttttattctgccaagtcatttcaaacacatgaaaaaactcacactggagagaaacgctataaatgcaagcaatgtggtaaagccttcaatctttccagttcctttcgatatcatgaaaggattcacactggagagaaaccctatgagtgtaagcagtgtgggaaagccttcagatctgcctcacagcttcgagtgcacggtgggactcacactggagagaaaccctatgaatgtaaggaatgtgggaaagccttcagatctacctcacaccttcgagtgcatggtaggactcatactggagagaaaccctatgaatgtaaggaatgtgggaaagccttcagatatgtgaagcaccttcaaattcatgaaaggacagaaaaacacataagaatgccctctggagaaagaccttataaatgtagtatatgtgagaaaggcttttattctgccaagtcatttcaaacacatgaaaaaactcacactggagagaaaccctatgaatgcaaccaatgtggtaaagccttcagatgttgcaattcccttcgatatcatgaaaggactcacactggagagaaaccctatgagtgtaagcaatgtgggaaagccttcagatctgcctcacaccttcgaatgcatgaaaggactcacactggagagaaaccctatgagtgtaagcaatgtgggaaagccttcagttgtgcctcaaaccttcgaaagcatggtaggactcacactggagagaaaccctatgagtgtaagcaatgtgggaaagccttcagatctgcctcaaaccttcagatgcatgaaaggactcacactggagagaaaccctatgaatgtaaggaatgcgaaaaagcattctgtaaattctcttcttttcaaatacatgaaaggaagcacagaggagagaagccctatgaatgtaagcattgtgggaatggattcacatctgccaagattcttcaaatacatgcaagaacacacattggagagaaacactatgaatgtaaggaatgcggaaaagcattcaattatttttcttccttgcatatacacgcaaggactcatatgggagagaagccatatgaatgtaaggattgtgggaaagcattcagc

SEQ ID NO: 3653 - DNA, 2226 bp, Homo sapiens
  source 1..2226: mol_type = genomic DNA
atgccctgctgtagtcacaggagctgtagagaggaccccggtacatctgaaagccgggaaatggacccagtggcctttgaggatgtggctgtgaacttcacccaggaagagtggacattgctggatatttcccagaagaatctcttcagggaagtgatgctggaaactttcaggaacctgacctctataggaaaaaaatggagtgaccagaacattgaatatgagtaccaaaaccccagaagaagcttcaggagtctcatagaagagaaagtcaatgaaattaaagaagacagtcattgtggagaaacttttacccaggttccagatgacagactgaacttccaggagaagaaagcttctcctgaagtaaaatcatgtgacagctttgtgtgtgcagaagttggcataggtaactcatcttttaatatgagcatcagaggtgacactggacacaaggcatatgagtatcaggaatatggaccaaagccatataagtgtcaacaacctaaaaataagaaagccttcaggtatcgcccatccattagaacacaagaaagggatcacactggagagaaaccctatgcttgtaaagtctgtggaaaaacctttattttccattcaagcattcgaagacacatggtaatgcacagtggggatggaacttataaatgtaaattttgtgggaaagccttccattctttcagtttatatcttatccatgaaagaactcacactggagagaaaccatatgaatgtaaacaatgtggtaaatcctttacttattctgctacccttcaaatacatgaaagaactcacactggggagaagccctatgaatgtagcaaatgtgataaagcatttcatagttctagttcctatcatagacatgaaagaagtcacatgggagagaagccttatcaatgcaaagaatgtggaaaagcatttgcatataccagttctcttcgtagacatgaaaggacccactctgggaaaaaaccgtatgaatgtaagcaatatggggaaggcttatcctatcttataagttttcaaacacacataagaatgaactctggagaaagaccttataaatgtaagatatgtgggaaaggcttttattctgccaagtcatttcaaacacatgaaaaaactcacactggagagaaacgctataaatgcaagcaatgtggtaaagccttcaatctttccagttcctttcgatatcatgaaaggattcacactggagagaaaccctatgagtgtaagcagtgtgggaaagccttcagatctgcctcacagcttcgagtgcacggtgggactcacactggagagaaaccctatgaatgtaaggaatgtgggaaagccttcagatctacctcacaccttcgagtgcatggtaggactcatactggagagaaaccctatgaatgtaaggaatgtgggaaagccttcagatatgtgaagcaccttcaaattcatgaaaggacagaaaaacacataagaatgccctctggagaaagaccttataaatgtagtatatgtgagaaaggcttttattctgccaagtcatttcaaacacatgaaaaaactcacactggagagaaaccctatgaatgcaaccaatgtggtaaagccttcagatgttgcaattcccttcgatatcatgaaaggactcacactggagagaaaccctatgagtgtaagcaatgtgggaaagccttcagatctgcctcacaccttcgaatgcatgaaaggactcacactggagagaaaccctatgagtgtaagcaatgtgggaaagccttcagttgtgcctcaaaccttcgaaagcatggtaggactcacactggagagaaaccctatgagtgtaagcaatgtgggaaagccttcagatctgcctcaaaccttcagatgcatgaaaggactcacactggagagaaaccctatgaatgtaaggaatgcgaaaaagcattctgtaaattctcttcttttcaaatacatgaaaggaagcacagaggagagaagccctatgaatgtaagcattgtgggaatggattcacatctgccaagattcttcaaatacatgcaagaacacacattggagagaaacactatgaatgtaaggaatgcggaaaagcattcaattatttttcttccttgcatatacacgcaaggactcatatgggagagaagccatatgaatgtaaggattgtgggaaagcattcagc

SEQ ID NO: 3654 - DNA, 1113 bp, Homo sapiens
  source 1..1113: mol_type = genomic DNA
atggacatggcccaggagccagtgaccttcagggacgtggccatctacttctcaagggaggagtgggcgtgtctggaacccagccagagggccctctaccgggacgtgatgctggacaacttcagcagtgtggctgctctgggattttgcagccccagaccagacctcgtctctcgcctggaacagtgggaggagccgtgggttgaagaccgggagagacctgagttccaggcagtgcagaggggaccccggccaggggcaaggaagtctgcagaccccaagagaccttgtgatcatccagcttgggctcacaagaaaacccacgtgcggcgagaaagagccagggaaggaagcagctttaggaagggcttcaggctggacacggatgacgggcagcttcccagagctgctccagaaaggacagacgccaagcccacggctttcccgtgtcaggtgctcacgcagcgttgtgggcggcggccgggccgcagagagcgccggaagcagcgcgcagtagagctgtcattcatctgcggcacgtgcgggaaggcgctcagctgccacagccggctgctcgctcaccagacggtgcacacgggaaccaaggccttcgagtgccccgagtgcggccagaccttccggtgggcttcaaacctgcagcgccaccagaagaaccacacgcgcgagaagcccttctgctgcgaggcctgcgggcaggcgttcagcctgaaggaccgcctggctcagcaccgcaaggtccacaccgagcacaggccctactcgtgtggcgactgtgggaaagccttcaagcagaagtccaaccttctcagacaccagctggtgcacaccggggagcggccgttctactgcgcggactgcggcaaagccttccggaccaaggagaacctcagccaccaccagagggtccacagcggggagaagccctacacctgtgccgagtgcggcaagtccttccggtggcccaagggcttcagcatccaccggaggctgcacctgacgaagaggttctacgagtgcggccactgtgggaaaggcttccgtcacctggggttcttcacgcggcatcagaggactcacaggcacggggaggtg

SEQ ID NO: 3655 - DNA, 615 bp, Homo sapiens
  source 1..615: mol_type = genomic DNA
atgccgagcaagaagaagaagtacaacgcgcggttcccgccggcgcggatcaagaagatcatgcagacggacgaagagattgggaaggtggcggcggcggtgcctgtcatcatctcccgggcgctcgagctcttcctagagtcgctgttgaagaaggcctgccaggtgacccagtcgcggaacgcgaagaccatgaccacatcccacctgaagcagtgcatcgagctggagcagcagtttgacttcttgaaggacctggtggcatctgttcccgacatgcagggggacggggaagacaaccacatggatggggacaagggcgcccgcaggggccggaagccaggcagcggcggccggaagaacggtgggatgggaacgaaaagcaaggacaagaagctgtccgggacagactcggagcaggaggatgaatctgaggacacagatactgatggggaagaggagacatcacaacccccaccccaggccagccacccctctgcccactttcagagccccccgacacccttcctgcccttcgcctctactctgcctttgcccccagcgcccccgggcccctcagcacctgatgaagaggacgaagaagattacgactcc

SEQ ID NO: 3656 - DNA, 1449 bp, Homo sapiens
  source 1..1449: mol_type = genomic DNA
atgtcctatccgcagggctacttgtaccagccgtccgcctcgctggcgctctactcgtgcccggcgtacagcaccagcgtcatttcggggccccgcacggatgagctcggccgctcttcttcgggctccgcgttctcgccctacgctggctcgactgccttcacggcgccctcgccgggctacaactcgcacctccagtacggcgccgaccccgcggccgccgccgccgccgccttctcctcgtacgtgggctctccctacgaccacacacccggcatggcgggctccttggggtaccatccttacgcggcgcccctgggatcgtacccttacggggacccagcgtaccggaagaacgccacaagggacgccacggctaccctcaaggcctggctcaacgagcaccgcaagaacccctaccccaccaagggcgagaagatcatgctggccatcatcaccaagatgaccctcacccaggtgtccacctggttcgccaacgcgcgccggcgcctcaagaaagagaataaaatgacgtggacgccgcggaaccgcagcgaggacgaggaagaggaggagaacattgacctggagaagaacgacgaggacgagccccagaagcccgaggacaagggcgaccccgagggccccgaagcaggaggagctgagcagaaggcggcttcgggctgcgaacggcttcagggaccacccacccctgcaggcaaggagacggagggcagcctcagcgactcggattttaaggagccgccctcggagggccgcctcgacgcgctgcagggccccccccgcaccggcgggccctccccggctgggccagcggcggcgcggctggcggaggacccggcccctcactaccccgccggagcgccggcgcccggcccgcatccagccgcgggcgaggtgcctccgggtcccggcgggccctcggttatccattcgccgcctccgccgccgcctcctgcggtgctcgccaagcccaaactgtggtctttggcagagatcgccacatcgtcggacaaggtcaaggacgggggcggcgggaacgagggctctccatgcccaccgtgtcccgggcccatagccgggcaagccctaggaggcagccgggcgtcgccggccccggcgccgtcacgctcgccctcggcgcagtgtccttttccaggcgggacggtgctgtcccggcctctctactacaccgcgcccttctatcccggctacacgaactatggctccttcggacaccttcatggccacccggggcccgggccaggccccacaaccggtccggggtctcatttcaatggattaaaccagaccgtgttgaaccgagcggacgctttggctaaagacccgaaaatgttgcggagccagtctcagctagacctgtgcaaagactctccctatgaattgaagaaaggtatgtccgacatt

SEQ ID NO: 3657 - DNA, 1446 bp, Homo sapiens
  source 1..1446: mol_type = genomic DNA
atgtcctatccgcagggctacttgtaccagccgtccgcctcgctggcgctctactcgtgcccggcgtacagcaccagcgtcatttcggggccccgcacggatgagctcggccgctcttcttcgggctccgcgttctcgccctacgctggctcgactgccttcacggcgccctcgccgggctacaactcgcacctccagtacggcgccgaccccgcggccgccgccgccgccgccttctcctcgtacgtgggctctccctacgaccacacacccggcatggcgggctccttggggtaccatccttacgcggcgcccctgggatcgtacccttacggggacccagcgtaccggaagaacgccacaagggacgccacggctaccctcaaggcctggctcaacgagcaccgcaagaacccctaccccaccaagggcgagaagatcatgctggccatcatcaccaagatgaccctcacccaggtgtccacctggttcgccaacgcgcgccggcgcctcaagaaagagaataaaatgacgtggacgccgcggaaccgcagcgaggacgaggaagaggaggagaacattgacctggagaagaacgacgaggacgagccccagaagcccgaggacaagggcgaccccgagggccccgaagcaggagctgagcagaaggcggcttcgggctgcgaacggcttcagggaccacccacccctgcaggcaaggagacggagggcagcctcagcgactcggattttaaggagccgccctcggagggccgcctcgacgcgctgcagggccccccccgcaccggcgggccctccccggctgggccagcggcggcgcggctggcggaggacccggcccctcactaccccgccggagcgccggcgcccggcccgcatccagccgcgggcgaggtgcctccgggtcccggcgggccctcggttatccattcgccgcctccgccgccgcctcctgcggtgctcgccaagcccaaactgtggtctttggcagagatcgccacatcgtcggacaaggtcaaggacgggggcggcgggaacgagggctctccatgcccaccgtgtcccgggcccatagccgggcaagccctaggaggcagccgggcgtcgccggccccggcgccgtcacgctcgccctcggcgcagtgtccttttccaggcgggacggtgctgtcccggcctctctactacaccgcgcccttctatcccggctacacgaactatggctccttcggacaccttcatggccacccggggcccgggccaggccccacaaccggtccggggtctcatttcaatggattaaaccagaccgtgttgaaccgagcggacgctttggctaaagacccgaaaatgttgcggagccagtctcagctagacctgtgcaaagactctccctatgaattgaagaaaggtatgtccgacatt

SEQ ID NO: 3658 - DNA, 1635 bp, Homo sapiens
  source 1..1635: mol_type = genomic DNA
atgtcctacccgcagtttggatacccctactcctcggctccccagttcttgatggccaccaactccctgagcacgtgctgcgagtccggaggccgcacgctggcggactccgggcccgccgcctcggcccaggcgccggtctactgcccggtctacgagagccggctgctggccaccgcgcgccacgagctcaactcggccgcggcgctgggcgtctatgggggtccctatggcggatcgcagggctatggcaactacgtgacctacggctcggaggcgtccgccttctactcgctgaacagctttgattccaaggatggttcgggatctgcgcatgggggcctggcaccagccgctgccgcctactacccttacgagccagctctgggccagtacccctatgacaggatcaaacggctaggcggtcatccccataaaggaattggcctggacctctctggcttgggaaggagcccaggctccctgtatggaaccatggacagcggcacgcggcgcaagaacgccacgcgcgagaccaccagcacgctcaaggcctggctgcaggagcaccgcaagaacccctaccccaccaagggcgagaagatcatgctggccatcatcaccaagatgaccctcacacaggtctccacctggttcgccaacgcgcgccggcgcctcaagaaggagaacaagatgacgtggccgccgcggaacaagtgcgcagacgagaagcggccctacgcggagggcgaggaggaggaggggggcgaggaggaggcgcgggaggagcccctcaagagctccaagaacgcagagcccgtgggcaaagaggagaaggagctggagcttagtgacttggacgacttcgacccgctggaagcagagccgccggcgtgcgagctgaagccgcccttccactccctggacggcggtctggagcgcgtccccgccgcgcccgacggcccggtcaaggaggcctcaggcgcgctccggatgtctctggccgcgggtggcggagctgctctggacgaggacctggagagggcccggagctgtctccgcagcgcggcggccgggccggagccactgccgggcgcagagggcggccctcaggtctgcgaggccaagctggggtttgtgccggcgggggcgtcggcaggcctggaggctaagccgcgcatctggtccctggcccacacagccaccgccgccgccgccgccgccacctccctgagccagactgagtttccgtcgtgcatgctcaagcgccaaggtcccgcggcccctgcggctgtgtcctccgcgcccgccacgtccccgtctgtggcccttccccactctggcgccctggacaggcaccaggactccccggtaaccagtctcagaaactgggtggacggggtcttccacgaccccatcctcaggcacagcactttgaaccaggcctgggccaccgccaagggcgccctcctggaccccgggcctctgggacgctcgctgggggcgggcgcgaacgtgctgactgcacccctggcccgcgcctttccgcctgccgtgccccaggacgccccagctgcaggcgccgccagggagctgctcgccctgcccaaggccggcggcaaacccttctgcgcc

SEQ ID NO: 3659 - DNA, 1557 bp, Homo sapiens
  source 1..1557: mol_type = genomic DNA
atgtcctacccgcagtttggatacccctactcctcggctccccagttcttgatggccaccaactccctgagcacgtgctgcgagtccggaggccgcacgctggcggactccgggcccgccgcctcggcccaggcgccggtctactgcccggtctacgagagccggctgctggccaccgcgcgccacgagctcaactcggccgcggcgctgggcgtctatgggggtccctatggcggatcgcagggctatggcaactacgtgacctacggctcggaggcgtccgccttctactcgctgaacagctttgattccaaggatggttcgggatctgcgcatgggggcctggcaccagccgctgccgcctactacccttacgagccagctctgggccagtacccctatgacaggtatggaaccatggacagcggcacgcggcgcaagaacgccacgcgcgagaccaccagcacgctcaaggcctggctgcaggagcaccgcaagaacccctaccccaccaagggcgagaagatcatgctggccatcatcaccaagatgaccctcacacaggtctccacctggttcgccaacgcgcgccggcgcctcaagaaggagaacaagatgacgtggccgccgcggaacaagtgcgcagacgagaagcggccctacgcggagggcgaggaggaggaggggggcgaggaggaggcgcgggaggagcccctcaagagctccaagaacgcagagcccgtgggcaaagaggagaaggagctggagcttagtgacttggacgacttcgacccgctggaagcagagccgccggcgtgcgagctgaagccgcccttccactccctggacggcggtctggagcgcgtccccgccgcgcccgacggcccggtcaaggaggcctcaggcgcgctccggatgtctctggccgcgggtggcggagctgctctggacgaggacctggagagggcccggagctgtctccgcagcgcggcggccgggccggagccactgccgggcgcagagggcggccctcaggtctgcgaggccaagctggggtttgtgccggcgggggcgtcggcaggcctggaggctaagccgcgcatctggtccctggcccacacagccaccgccgccgccgccgccgccacctccctgagccagactgagtttccgtcgtgcatgctcaagcgccaaggtcccgcggcccctgcggctgtgtcctccgcgcccgccacgtccccgtctgtggcccttccccactctggcgccctggacaggcaccaggactccccggtaaccagtctcagaaactgggtggacggggtcttccacgaccccatcctcaggcacagcactttgaaccaggcctgggccaccgccaagggcgccctcctggaccccgggcctctgggacgctcgctgggggcgggcgcgaacgtgctgactgcacccctggcccgcgcctttccgcctgccgtgccccaggacgccccagctgcaggcgccgccagggagctgctcgccctgcccaaggccggcggcaaacccttctgcgcc

SEQ ID NO: 3660 - DNA, 1338 bp, Homo sapiens
  source 1..1338: mol_type = genomic DNA
atgtccttcccacactttggacacccgtaccgcggcgcttcccagtttctggcgtcggcaagttccagcaccacatgctgcgaatctacccaacgctctgtctcagatgtggcatcaggctccaccccagcgcccgctctctgctgcgcaccctacgatagtcgactgctgggcagtgcgcgaccggagctgggcgccgccttgggcatctatggagcaccctatgcggccgctgcagctgcccagagctaccctggctacctgccctatagcccagagcccccctcactgtatggggcactgaatccacagtatgaatttaaggaggctgcagggagttttacatccagcctggcacaaccaggagcctattatccctatgagcggactctggggcagtaccaatatgaacggtatggcgcagtggaattgagtggcgccggtcgccgaaagaacgcgacccgggagaccaccagtacactcaaggcctggctcaacgagcaccgcaaaaacccctaccccactaagggtgagaagatcatgctggccatcatcaccaagatgaccctcacccaggtgtccacctggttcgccaacgcacgccggcgcctcaagaaagagaacaaaatgacatgggcgcccaagaacaaaggtggggaggagaggaaggcagagggaggagaggaggactcactaggctgcctaactgctgacaccaaagaagttactgctagccaggaggcccgggggctccggctgagtgacctggaagacctggaggaagaggaggaggaggaggaggaagctgaagacgaggaggtagtggccacagctggggacaggctgacggagttccgaaagggcgcgcagtcactgcctgggccgtgcgctgcagctcgagagggccgattggagcgcagggagtgcggcctggctgcgccccgcttctccttcaatgacccttccggatcggaagaagctgacttcctctcggcggagacaggcagccctaggttgaccatgcactacccatgcttggagaaaccgcgcatctggtctctggcgcacaccgcgacagccagcgctgttgaaggtgcacccccagcccggcctaggccacgaagtcctgagtgccgtatgattcctggacagcctcctgcctctgcccggcgactctcagtccccagagactccgcgtgcgacgagtcttcctgcatacccaaagcctttggaaaccccaagtttgccctgcagggactaccgctgaactgtgcgccgtgcccgcggaggagcgagcctgtagtgcagtgccagtacccgtctggagcagaagcaggt

SEQ ID NO: 3661 - DNA, 1440 bp, Homo sapiens
  source 1..1440: mol_type = genomic DNA
atgtccttcccgcagctgggctacccgcagtacctgagcgccgcggggccgggcgcctacggcggcgagcgcccgggggtgctggccgcggccgctgcggcggctgccgccgcctcgtcgggccgaccgggggccgcggagctgggcggcggggcaggcgcggctgcagtcacctcggtgctgggcatgtacgcggcggcggggccgtacgcgggcgcgcccaactacagcgccttcctgccctacgccgcggatctcagcctcttctcgcagatgggctcgcagtatgaactgaaggacaaccctggggtgcaccccgccaccttcgcagcccacacggcgccggcttattacccctacggccagttccaatacggggaccccgggcggcccaagaacgccacccgcgagagcaccagcacgctcaaggcctggctcaacgagcaccgcaagaatccctaccccaccaagggcgagaagatcatgctggccatcatcaccaagatgaccctcacgcaggtctccacctggttcgccaacgcgcgccggcgcctcaagaaggagaacaaggtgacatggggagcgcgcagcaaggaccaggaagatggagcgctcttcggcagcgacaccgagggcgacccggagaaggccgaggacgacgaggagatcgacctggaaagcatcgacattgacaagatcgacgagcacgatggcgaccagagcaacgaggatgacgaggacaaggccgaggctccgcacgcgcccgcagccccttctgctcttgcccgggaccaaggctcgccgctggcagcagccgacgttctcaagccccaggactcgcccttgggcctggcaaaggaggccccagagccgggcagcacgcgcctgctgagccccggcgctgcagcgggcggcctgcagggtgcgccgcacggcaagcccaagatctggtcgctggcggagacagccacgagccccgacggtgcgcccaaggcttcgccaccaccacccgcgggccaccccggcgcgcacgggccctccgccggggcgccgctgcaacaccccgccttcctgcctagccacggactgtacacctgccacatcggcaagttctccaactggaccaacagcgcattcctcgcacagggctccctgctcaacatgcgctccttcctgggcgttggcgctccccacgccgcgccccatggccctcaccttcctgcacctccaccaccgcagccgccggtcgctattgccccgggggcactcaatggagacaaggcctcggtccgcagcagccccacgctcccagagagagacctcgtccccaggccagattcgccggcacagcagttaaagtcgcccttccagccggtacgcgacaactctctggccccgcaggagggaacgccgcggatcctagcagccctcccgtccgcc

SEQ ID NO: 3662 - DNA, 1503 bp, Homo sapiens
  source 1..1503: mol_type = genomic DNA
atgtccttcccccagctgggataccaatacatccgcccgctttacccgtccgagcgcccgggggccgctggcggcagcggcggcagcgcgggggcccggggcggcctgggtgccggagcctcggagctgaacgcctcggggtccctgtccaacgtgctctcgtccgtgtacggggcgccctacgccgcggccgctgcggccgccgccgcccaaggctacggcgccttcctgccctacgccgcggagctgcccatcttcccgcagctgggcgcgcagtatgagctgaaggacagccccggggtgcagcatccggccgcggctgccgcgtttccgcacccgcaccccgccttctacccgtatggccagtaccagttcggggacccgtcccgtcccaagaacgccaccagggagagcaccagcacgctgaaggcctggctcaacgagcaccgcaagaacccctaccccaccaagggcgagaagatcatgctggccatcatcaccaagatgaccctcacccaggtgtccacctggttcgccaacgcgcgccggcgcctcaagaaggagaataagatgacttgggcgcctcgcagccgcactgacgaggagggaaacgcttatgggagcgagcgcgaggaggaagacgaagaggaggacgaggaggacggcaaacgcgagctagagctggaggaggaggagctcgggggggaggaggaggacacggggggcgagggcctggctgacgacgacgaggacgaggagatcgatttggagaacttagacggcgcggccaccgagcctgagctgtccctggctggggcggcgcgcagggatggcgacctaggcctgggacccatttcggactccaaaaatagcgactcggaagatagctctgagggcttagaggaccggccactaccggtcctgagtctggctccagcgccaccaccagtggccgtggcctcgccgtctctgccgtcgccccccgtgagcctggacccctgcgctcccgcaccagcccccgcctccgccctgcagaagcccaagatctggtccctcgcggagactgccacaagcccggacaacccgcgccgctcgcctcccggcgcgggggggtctccaccgggggcagcggtcgcgccttccgccctgcagctctctccggccgccgccgccgccgccgctcacagactggtctcagcgccgctgggcaagttcccggcttggaccaaccggccgtttccaggcccaccgcccggcccccgcctgcacccgctctccctgctgggctctgcccctccgcacctgctgggacttcccggagccgcgggccacccggctgccgccgccgccttcgctcggccagcggagcccgaaggcggaacagatcgctgtagtgccttggaagtggagaaaaagttactcaagacagctttccagcccgtgcccaggcggccccagaaccatctggacgccgccctggtcttatcggctctctcctcatcc

SEQ ID NO: 3663 - DNA, 1413 bp, Homo sapiens
  source 1..1413: mol_type = genomic DNA
atgtcctacccgcagggctacctgtaccaggcgcccggctcgctggcgctctactcgtgcccggcctacggcgcgtcggctttggcggctccgcgcagcgaggagctggcgcgctcggcgtcgggctcggcgttcagcccctacccgggctcggcggccttcacggcgcaggcggccaccggcttcgggagcccgctgcagtactcggccgacgccgccgccgccgccgccggcttcccgtcctacatgggcgcaccctacgacgcgcacaccaccggcatgaccggcgccatcagctaccacccgtacggcagcgcggcctacccgtaccagctcaacgaccccgcgtaccgcaagaacgccacgcgggacgccacggccactctcaaggcctggctcaacgagcaccgcaagaacccctaccccaccaagggcgagaagatcatgctagccatcatcaccaagatgaccctcacccaggtctccacctggttcgccaacgcgcgccggcgcctcaagaaggagaacaagatgacctgggccccgagaaacaaaagcgaagatgaggacgaggacgagggcgacgctaccagaagcaaggacgagagtcccgacaaggcgcaggagggcacggagacctcggcagaggacgaagggatcagcctgcacgtggactcgctcacggatcactcgtgctcggccgagtcggacggggagaagcttccgtgccgcgccggggaccccctgtgcgaatcgggctcggagtgcaaggacaagtatgacgacctggaggacgacgaggacgacgacgaggagggcgagcggggcctggcgccgcccaagcccgtgacctcgtcgccgcttaccggcttggaggcgccgctgctgagccccccgcccgaggccgcgccccgcggtggccgcaagacgccccagggcagccggacgtctccgggcgcgccgccccccgccagcaagcccaagctgtggtcgctggccgagatcgccacgtcggacctcaagcagccgagcctgggcccgggctgcgggccaccggggctgcccgcggccgccgcgccggcctcaaccggggcaccgccaggaggctcgccctaccctgcctcgccgctgctgggccgccccctctactacacgtcgcccttctacggcaactacacaaactacgggaacttgaacgcggcgctgcagggccagggtctcctgcggtacaactctgcggccgcggcccccggcgaggccctgcacaccgcgccaaaggcggccagcgacgcgggcaaggcgggcgcgcacccgctcgagtcccactaccggtccccgggcggcggctacgagcccaagaaagatgccagcgagggctgcaccgtggttggcgggggcgtccagccctaccta

SEQ ID NO: 3664 - DNA, 1209 bp, Homo sapiens
  source 1..1209: mol_type = genomic DNA
atgaagttggaggtgttcgtccctcgcgcggcccacggggacaagcagggcagtgacctggagggcgcgggcggcagcgacgcgccgtccccgctgtcggcggcgggagacgactccctgggctcagatggggactgcgcggccaacagcccggccgcgggcggcggcgccagagatacgcagggcgacggcgaacagagtgcgggaggcgggccgggcgcggaggaggcgatcccggcagcagctgctgcagcggtggtggcggagggcgcggaggccggggcggcggggccaggcgcgggcggcgcggggagcggcgagggtgcacgcagcaagccatatacgcggcggcccaagcccccctactcgtacatcgcgctcatcgccatggccatccgcgactcggcgggcgggcgcttgacgctggcggagatcaacgagtacctcatgggcaagttcccctttttccgcggcagctacacgggctggcgcaactccgtgcgccacaacctttcgctcaacgactgcttcgtcaaggtgctgcgcgacccctcgcggccctggggcaaggacaactactggatgctcaaccccaacagcgagtacaccttcgccgacggggtcttccgccgccgccgcaagcgcctcagccaccgcgcgccggtccccgcgcccgggctgcggcccgaggaggccccgggcctccccgccgccccgccgcccgcgcccgccgccccggcctcgccccgcatgcgctcgcccgcccgccaggaggagcgcgccagccccgcgggcaagttctccagctccttcgccatcgacagcatcctgcgcaagcccttccgcagccgccgcctcagggacacggcccccgggacgacgcttcagtggggcgccgcgccctgcccgccgctgcccgcgttccccgcgctcctccccgcggcgccctgcagggccctgctgccgctctgcgcgtacggcgcgggcgagccggcgcggctgggcgcgcgcgaggccgaggtgccaccgaccgcgccgcccctcctgcttgcacctctcccggcggcggcccccgccaagccactccgaggcccggcggccggcggcgcgcacctgtactgccccctgcggctgcccgcagccctgcaggcggcctcagtccgccgccctggcccgcacctgccgtacccggtggagacgctcctagcc

SEQ ID NO: 3665 - DNA, 3810 bp, Homo sapiens
  source 1..3810: mol_type = genomic DNA
atgggtgacgttaaaaattttctgtatgcctggtgtggcaaaaggaagatgaccccatcctatgaaattagagcagtggggaacaaaaacaggcagaaattcatgtgtgaggttcaggtggaaggttataattacactggcatgggaaattccaccaataaaaaagatgcacaaagcaatgctgccagagactttgttaactatttggttcgaataaatgaaataaagagtgaagaagttccagcttttggggtagcatctccgcccccacttactgatactcctgacactacagcaaatgctgaaggagatttaccaacaaccatgggaggacctcttcctccacatctggctctcaaagcagaaaataattctgaggtaggggcctctggctatggtgttcctgggcccacctgggaccgaggagccaacttgaaggattactactcaagaaaggaagaacaagaagtgcaagcgactctagaatcagaagaagtggatttaaatgctgggcttcatggaaactggaccttggaaaatgctaaagctcgtctaaaccaatattttcagaaagaaaagatccaaggagaatataagtacacccaagtgggtcctgatcacaacaggagctttattgcagaaatgaccatttatatcaagcagctgggcagaaggatttttgcacgagaacatggatcaaataagaaattggcagcacagtcctgtgccctgtcacttgtcagacaactgtaccatcttggagtggttgaagcttactccggacttacaaagaagaaggaaggagagacagtggagccttacaaagtaaacctctctcaagatttagagcatcagctgcaaaacatcattcaagagctaaatcttgagattttgcccccgcctgaagatccttctgtgccagttgcactcaacattggcaaattggctcagttcgaaccatctcagcgacaaaaccaagtgggtgtggttccttggtcacctccacaatccaactggaatccttggactagtagcaacattgatgaggggcctctggcttttgctactccagagcaaataagcatggacctcaagaatgaattgatgtaccagttggaacaggatcatgatttgcaagcaatcttgcaggagagagagttactgcctgtgaagaaatttgaaagtgagattctggaagcaatcagccaaaattcagttgtcattattagaggggctactggatgtgggaaaaccacacaggttccccagttcattctagatgactttatccagaatgaccgagcagcagagtgtaacatcgtagtaactcagcccagaagaatcagtgcggtttctgtggcagagcgagttgcatttgaaagaggagaagagcctggaaaaagctgtggctacagcgttcgatttgagtctatacttcctcgtcctcatgccagtataatgttttgtactgtaggtgtgctcctgagaaaattagaagcaggcattcgaggaatcagtcatgtaattgtagatgaaatacatgaaagagatattaatactgacttccttttggtagtactgcgtgatgttgttcaggcttatcctgaagttcgcattgttcttatgtctgctactattgataccagcatgttttgtgaatatttcttcaattgccccatcattgaagtttatgggaggacttacccagttcaagaatattttctggaagactgcattcagatgacccactttgttcctccaccaaaagacaaaaagaagaaggataaggatgatgatggtggtgaggatgatgatgcaaattgcaacttgatctgtggtgatgaatatggtccagaaacaaggttgagcatgtctcaattgaacgaaaaggaaactccttttgaactcatcgaggctctacttaagtacattgaaacccttaatgttcctggagctgtgttggtttttttgcctggctggaatctgatttatactatgcagaagcatttggaaatgaatccacattttggaagccatcggtatcagattctacccctgcattctcagattcctcgagaggaacagcgcaaagtgtttgatccagtaccagttggagtaaccaaggttattttgtccacaaatattgctgaaacaagcattaccataaacgatgttgtttatgtcattgactcctgcaagcagaaagtgaaactcttcactgctcacaacaatatgaccaactatgctaccgtatgggcatcaaaaacaaaccttgagcaacggaaagggcgagctggccgagtacggcctggattctgctttcacctgtgcagccgagctcgttttgagagacttgaaacccacatgacaccagagatgttccgaacaccattgcatgaaattgctcttagcataaaacttctgcgtctaggaggaattggccaatttctggccaaagcaattgaacctccccctttggatgctgtgattgaagcagaacacactcttagagagcttgatgcattagatgccaatgatgagttgactcctttgggacgaatcctggctaaactccccattgagcctcgttttggcaaaatgatgataatggggtgtattttctacgtgggagatgctatctgtaccattgctgctgctacctgctttccagagcctttcatcaatgaaggaaagcggctgggctatatccatcgaaattttgctggaaacagattttctgatcacgtagcccttttatcagtattccaagcctgggatgatgctagaatgggtggagaagaagcagagatacgtttttgtgagcacaaaagacttaatatggctacactaagaatgacttgggaagccaaagttcagctcaaagagattttgattaattctgggtttccagaagattgtttgttgacacaagtgtttactaacactggaccagataataatttggatgttgttatctccctcctggcctttggtgtgtaccccaatgtatgctatcataaggaaaagaggaagattctcaccactgaagggcgtaatgcacttatccacaaatcatctgttaattgtccttttagtagccaagacatgaagtacccatctcccttctttgtatttggtgaaaagattcgaactcgagccatctctgctaaaggcatgactttagtcacccccctgcagttgcttctctttgcctccaagaaagtccaatctgatgggcagattgtgcttgtagatgactggattaaactgcaaatatctcatgaagctgctgcctgtatcactggtctccgggcagccatggaggctttggttgttgaagtaaccaaacaacctgctatcatcagccagttggaccccgtaaatgaacgtatgctgaacatgatccgtcagatctctagaccctcagctgctggtatcaaccttatgattggcagtacacggtatggagatggtccacgtcctcccaagatggcccgatacgacaatggaagcggatatagaaggggaggttctagttacagtggtggaggctatggcggtggctatagcagtggaggctatggtagcggaggctatggtggcagcgccaactcctttcgggcaggatatggtgcaggtgttggtggaggctatagaggagtttcccgaggtggctttagaggcaactctggaggagactacagagggcctagtggaggctacagaggatctgggggattccagcgaggaggtggtaggggggcctatggaactggctactttggacagggaagaggaggtggcggctat

SEQ ID NO: 3666 - DNA, 2046 bp, Homo sapiens
  source 1..2046: mol_type = genomic DNA
atgacgaagtctaaggaggcagtgacattcaaggacgtggctgtggtcttctctgaggaggagctgcaactgctggaccttgcccagaggaagctgtaccgagatgtgatgctggagaacttcaggaatgtggtctcagtggggcatcagtccacaccagatggcctaccacagttagagagagaagaaaagctgtggatgatgaagatggcaacccagagagataactcctcaggagccaagaatctaaaagagatggagactcttcaagaagtaggattaaggtacctgcctcatgaagagcttttctgctcccagatctggcaacagattacaagagagttaatcaagtatcaagattctgtggtaaatattcaaagaacaggctgccagttggaaaaacgagatgatttgcactataaagatgagggattcagtaatcagagttcccatcttcaagttcacagagtccacactggtgaaaaaccctacaaaggagaacattgtgtgaaaagtttcagctggagctctcatcttcaaattaaccaaagggctcatgcaggagagaagccctacaaatgtgaaaaatgtgataatgccttccgtcggttttcaagtcttcaagcccatcagagagtccacagtagagcaaaatcatacacaaatgatgcaagttacaggagttttagtcagaggtcacatcttccccatcatcagagagttcccactggagagaatccatacaaatatgaagagtgtgggaggaatgttgggaaaagctcacattgtcaagctcctctgatagttcatacgggagagaaaccctataaatgtgaggagtgtggggtgggcttcagtcagagatcatatcttcaagttcatctgaaagttcacactggaaagaaaccatataagtgtgaagagtgtgggaagagcttcagttggcgttcacgactgcaggctcatgagcgaatccacactggcgagaaaccatacaaatgcaatgcatgtggcaagagctttagttacagctcacaccttaatattcattgtagaatccacacaggagagaaaccctataagtgtgaggagtgtgggaaaggtttcagtgtgggttcacaccttcaggcccatcagataagccacactggagagaagccatacaaatgtgaggagtgtgggaaaggcttctgccgggcctcaaatctgctggaccatcaaagaggccatactggagagaaaccgtatcagtgtgatgcatgtggtaagggcttcagtcgtagctcagattttaacattcattttagagtccatacaggggaaaaaccctataaatgtgaggagtgtggcaagggcttcagccaggcctcaaatcttctggcccatcaaagaggccacactggagagaaaccctacaaatgtggtacatgtgggaagggcttcagtcggagctcagatcttaatgtacactgtagaatccacacaggagagaaaccctataaatgcgagaggtgtggtaaggccttcagtcagttctccagccttcaggtgcatcagagagttcacactggagagaaaccatatcagtgtgcagagtgtgggaagggcttcagtgtaggttcacagcttcaagcccatcagaggtgccacactggagagaaaccctatcaatgtgaggagtgtgggaagggcttctgtcgggcctccaattttctggcacatcgtggagtccacacaggagaaaaaccataccgatgtgatgtgtgtggtaagcgcttcagacagagatcctaccttcaagcccaccagagggtccacacaggagagagaccatacaaatgtgaggaatgtgggaaagtcttcagctggagctcataccttcaagcccatcaaagagttcacaccggagaaaaaccatacaaatgtgaggagtgtgggaagggcttcagttggagctcaagtcttatcattcatcagcgagtccatgctgatgatgagggtgacaaggactttccttcatcagaggattcacacaggaaaactcga

SEQ ID NO: 3667 - DNA, 1989 bp, Homo sapiens
  source 1..1989: mol_type = genomic DNA
atggccctgtgttatggaactttctggggctaccctaagatgctggaagctgccaatctcatggagggcctagtggatatcggcccttgggtcactcttcccagaggacagcctgaggtgttggagtggggcctcccaaaggatcaggactcagtggcctttgaggatgtggctgtgaacttcacccatgaggagtgggctttgctgggtccatcacagaagaatctctacagagatgtgatgcgagaaaccattaggaacctgaactgtataggaatgaaatgggaaaaccagaacattgatgatcagcaccaaaatctcaggagaaatccaaggtgtgatgtggtagagagatttggtaaaagtaaagatggtagtcagtgtggagaaaccttaagccagattcgaaatagtattgtaaacaagaacactcccgccagagtagatgcatgtggaagcagtgtgaatggagaagtcataatgggtcattcatccctgaattgctacatcagagttgatactggacacaaacaccgggagtgtcatgaatatgcagagaagtcatatacacataagcagtgtgggaaaggcttaagttatcgccactcctttcaaacatgtgaaaggcctcacactggaaagaaaccctatgattgtaaggaatgtggaaaaaccttcagttctcctggaaaccttcgaagacatatggtagtaaaaggtggagatggaccttataaatgtgaattgtgtgggaaagcctttttttggcccagtttattacgtatgcatgaaagaactcacactggagagaaaccatatgaatgtaagcagtgttctaaagccttccctgtttacagttcctatctaagacatgaaaaaatacacactggggagaaaccgtatgaatgtaagcagtgttctaaagccttccctgattacagttcatatctaagacatgaaagaactcacactggagagaaaccctacaaatgtaaacaatgtgggaaagccttcagtgtttccggttcccttcgagtacatgaaagaattcacactggagagaaaccctatacatgtaaacagtgtgggaaagcgttttgtcatcttggaagctttcaaagacacatgataatgcacagtggagatggacctcataaatgtaagatatgtgggaaaggctttgattttcctggttcagcacgaattcatgaaggaactcacactctagagaaaccctatgaatgtaagcaatgtgggaaattgttatctcatcgctcaagctttcgaagacacatgatggcacacactggagatggccctcataaatgcacagtatgtgggaaagcctttgattctcctagtgtatttcaaagacatgaaaggactcacactggagagaaaccctatgaatgcaagcaatgtgggaaagccttccgtacttccagttcccttcgaaaacatgaaacaacacacactggagagcaaccctataaatgtaaatgtggaaaagcttttagtgatttattttcctttcaaagtcatgaaacaacacacagtgaagaggagccttatgaatgtaaggagtgtgggaaagcatttagttcttttaaatacttttgtcgccatgaaaggactcacagtgaagaaaaatcttatgagtgtcaaatttgtggcaaagccttcagtcgtttcagttacttaaaaactcatgaaaggactcacacggcagagaagccatatgaatgtaagcaatgcaggaaagcattcttttggccctctttccttctaagacatgaaaggactcacactggagaaagaccctatgaatgtaaacactgtggtaaagccttcagtcgttccagtttctgtcgagaacatgaaagaactcacactggagagaagccctatgaatgtaaggaatgtgggaaagccttcagttctctcagttcctttaatagacataaaaggacacactggaaggatattcta

SEQ ID NO: 3668 - DNA, 1845 bp, Homo sapiens
  source 1..1845: mol_type = genomic DNA
atggactcagtggcctttgaggatgtggctgtgaacttcacccatgaggagtgggctttgctgggtccatcacagaagaatctctacagagatgtgatgcgagaaaccattaggaacctgaactgtataggaatgaaatgggaaaaccagaacattgatgatcagcaccaaaatctcaggagaaatccaaggtgtgatgtggtagagagatttggtaaaagtaaagatggtagtcagtgtggagaaaccttaagccagattcgaaatagtattgtaaacaagaacactcccgccagagtagatgcatgtggaagcagtgtgaatggagaagtcataatgggtcattcatccctgaattgctacatcagagttgatactggacacaaacaccgggagtgtcatgaatatgcagagaagtcatatacacataagcagtgtgggaaaggcttaagttatcgccactcctttcaaacatgtgaaaggcctcacactggaaagaaaccctatgattgtaaggaatgtggaaaaaccttcagttctcctggaaaccttcgaagacatatggtagtaaaaggtggagatggaccttataaatgtgaattgtgtgggaaagcctttttttggcccagtttattacgtatgcatgaaagaactcacactggagagaaaccatatgaatgtaagcagtgttctaaagccttccctgtttacagttcctatctaagacatgaaaaaatacacactggggagaaaccgtatgaatgtaagcagtgttctaaagccttccctgattacagttcatatctaagacatgaaagaactcacactggagagaaaccctacaaatgtaaacaatgtgggaaagccttcagtgtttccggttcccttcgagtacatgaaagaattcacactggagagaaaccctatacatgtaaacagtgtgggaaagcgttttgtcatcttggaagctttcaaagacacatgataatgcacagtggagatggacctcataaatgtaagatatgtgggaaaggctttgattttcctggttcagcacgaattcatgaaggaactcacactctagagaaaccctatgaatgtaagcaatgtgggaaattgttatctcatcgctcaagctttcgaagacacatgatggcacacactggagatggccctcataaatgcacagtatgtgggaaagcctttgattctcctagtgtatttcaaagacatgaaaggactcacactggagagaaaccctatgaatgcaagcaatgtgggaaagccttccgtacttccagttcccttcgaaaacatgaaacaacacacactggagagcaaccctataaatgtaaatgtggaaaagcttttagtgatttattttcctttcaaagtcatgaaacaacacacagtgaagaggagccttatgaatgtaaggagtgtgggaaagcatttagttcttttaaatacttttgtcgccatgaaaggactcacagtgaagaaaaatcttatgagtgtcaaatttgtggcaaagccttcagtcgtttcagttacttaaaaactcatgaaaggactcacacggcagagaagccatatgaatgtaagcaatgcaggaaagcattcttttggccctctttccttctaagacatgaaaggactcacactggagaaagaccctatgaatgtaaacactgtggtaaagccttcagtcgttccagtttctgtcgagaacatgaaagaactcacactggagagaagccctatgaatgtaaggaatgtgggaaagccttcagttctctcagttcctttaatagacataaaaggacacactggaaggatattcta

SEQ ID NO: 3669 - DNA, 2454 bp, Homo sapiens
  source 1..2454: mol_type = genomic DNA
atgcccggacatcctggaagctgggaaatgggaccattgacatttatggatgtggccatagaattctgtctggaggagtggcaatgcctggacattgcacagcagaatttatataggaatgtgatgttagagaactacagaaacctggtcttcctgggtattgctgtctctaagccagacctgatcacctgtctggagcaagaaaaagagccttgggagcctatgaggagacatgaaatggtagccaaacccccagttatgtgttctcattttacccaagacttttggccagagcagcatataaaagatcctttccaaaaagcgacactgagaagatataaaaactgtgaacataaaaatgtacatttaaaaaaagaccataaaagtgtggatgagtgtaaggtgcacagaggaggttataatggatttaaccaatgtttgccagctacccagagcaaaatatttctatttgataaatgtgtgaaagcctttcataaattttcaaattcaaacagacataagataagccatactgaaaaaaaacttttcaaatgcaaagaatgtggcaaatcattttgcatgcttccacatctagctcaacataaaataattcataccagagtgaatttctgcaaatgtgaaaaatgtggaaaagcttttaactgcccttcaatcatcactaaacataagagaattaatactggagagaaaccctacacatgtgaagaatgtggcaaagtctttaattggtcctcacgccttactacacataaaaaaaattatactagatacaaactctacaaatgtgaagaatgtggcaaagcttttaacaagtcctcaatccttactacccataagataattcgcactggagagaaattctacaaatgtaaagaatgtgccaaagcttttaaccaatcctcaaaccttactgaacataagaaaattcatcctggagagaaaccttacaaatgtgaagaatgtggcaaagcctttaactggccctcaactcttactaaacataagagaattcatactggagagaaaccctacacatgtgaagaatgtggcaaagcctttaaccagttctcaaaccttactacacataagagaatccatactgcagagaaattctataaatgtacagaatgtggtgaagcttttagccggtcctcaaaccttactaaacataagaaaattcatactgaaaagaaaccctacaaatgtgaagaatgtggcaaagcttttaagtggtcctcaaagcttactgaacataagttaactcatactggagagaaaccctacaaatgtgaagaatgtggcaaagcctttaactggccctcaacccttactaaacataacagaattcatactggagagaaaccctacaaatgtgaagtatgtggcaaagcctttaaccagttctcaaaccttactacacataagagaattcatactgcagaaaaaccgtacaaatgtgaagaatgtggcaaagcttttagccggtcctcaaaccttactaaacataagaaaattcacattgaaaagaaaccctacaaatgtgaagaatgtggcaaagcttttaagtggtcctcaaagcttactgaacataagataactcatactggagagaaaccctacaaatgtgaagaatgtggcaaagcttttaaccatttctcaatccttaccaaacataagaggattcatactggagagaaaccctacaagtgtgaagaatgtggcaaagcttttacccaatcctcaaaccttactacacataagaaaattcatactggagagaaattctacaaatgtgaagaatgtggcaaagcttttacccaatcttcaaaccttactacacataaaaaaattcatactggaggaaaaccctacaaatgtgaagaatgtggcaaagcttttaaccagttctcaactcttactaaacataagataattcacactgaggagaaaccctacaaatgtgaagaatgtggcaaagcctttaagtggtcctcaacccttactaaacataagataattcatactggagagaaaccctacaaatgtgaagaatgtggcaaagcttttaaactgtcctcaaccctttctacacataagattattcatactggagagaaaccctacaaatgtgaaaaatgtggcaaagcttttaaccgatcctcaaaccttattgaacataagaaaattcatactggagagcaaccctacaaatgtgaagaatgtggcaaagcatttaactattcctcacaccttaatacacataagagaattcatactaaagagcaaccctacaaatgtaaagaatgtggcaaagctttcaaccaatattcaaaccttactacacataacaaaattcatactggagagaaactctacaaacctgaagatgtgacagtgattttgacaacacctcaaactttttcaaacataaaa

SEQ ID NO: 3670 - DNA, 2427 bp, Homo sapiens
  source 1..2427: mol_type = genomic DNA
atgggaccattgacatttatggatgtggccatagaattctgtctggaggagtggcaatgcctggacattgcacagcagaatttatataggaatgtgatgttagagaactacagaaacctggtcttcctgggtattgctgtctctaagccagacctgatcacctgtctggagcaagaaaaagagccttgggagcctatgaggagacatgaaatggtagccaaacccccagttatgtgttctcattttacccaagacttttggccagagcagcatataaaagatcctttccaaaaagcgacactgagaagatataaaaactgtgaacataaaaatgtacatttaaaaaaagaccataaaagtgtggatgagtgtaaggtgcacagaggaggttataatggatttaaccaatgtttgccagctacccagagcaaaatatttctatttgataaatgtgtgaaagcctttcataaattttcaaattcaaacagacataagataagccatactgaaaaaaaacttttcaaatgcaaagaatgtggcaaatcattttgcatgcttccacatctagctcaacataaaataattcataccagagtgaatttctgcaaatgtgaaaaatgtggaaaagcttttaactgcccttcaatcatcactaaacataagagaattaatactggagagaaaccctacacatgtgaagaatgtggcaaagtctttaattggtcctcacgccttactacacataaaaaaaattatactagatacaaactctacaaatgtgaagaatgtggcaaagcttttaacaagtcctcaatccttactacccataagataattcgcactggagagaaattctacaaatgtaaagaatgtgccaaagcttttaaccaatcctcaaaccttactgaacataagaaaattcatcctggagagaaaccttacaaatgtgaagaatgtggcaaagcctttaactggccctcaactcttactaaacataagagaattcatactggagagaaaccctacacatgtgaagaatgtggcaaagcctttaaccagttctcaaaccttactacacataagagaatccatactgcagagaaattctataaatgtacagaatgtggtgaagcttttagccggtcctcaaaccttactaaacataagaaaattcatactgaaaagaaaccctacaaatgtgaagaatgtggcaaagcttttaagtggtcctcaaagcttactgaacataagttaactcatactggagagaaaccctacaaatgtgaagaatgtggcaaagcctttaactggccctcaacccttactaaacataacagaattcatactggagagaaaccctacaaatgtgaagtatgtggcaaagcctttaaccagttctcaaaccttactacacataagagaattcatactgcagaaaaaccgtacaaatgtgaagaatgtggcaaagcttttagccggtcctcaaaccttactaaacataagaaaattcacattgaaaagaaaccctacaaatgtgaagaatgtggcaaagcttttaagtggtcctcaaagcttactgaacataagataactcatactggagagaaaccctacaaatgtgaagaatgtggcaaagcttttaaccatttctcaatccttaccaaacataagaggattcatactggagagaaaccctacaagtgtgaagaatgtggcaaagcttttacccaatcctcaaaccttactacacataagaaaattcatactggagagaaattctacaaatgtgaagaatgtggcaaagcttttacccaatcttcaaaccttactacacataaaaaaattcatactggaggaaaaccctacaaatgtgaagaatgtggcaaagcttttaaccagttctcaactcttactaaacataagataattcacactgaggagaaaccctacaaatgtgaagaatgtggcaaagcctttaagtggtcctcaacccttactaaacataagataattcatactggagagaaaccctacaaatgtgaagaatgtggcaaagcttttaaactgtcctcaaccctttctacacataagattattcatactggagagaaaccctacaaatgtgaaaaatgtggcaaagcttttaaccgatcctcaaaccttattgaacataagaaaattcatactggagagcaaccctacaaatgtgaagaatgtggcaaagcatttaactattcctcacaccttaatacacataagagaattcatactaaagagcaaccctacaaatgtaaagaatgtggcaaagctttcaaccaatattcaaaccttactacacataacaaaattcatactggagagaaactctacaaacctgaagatgtgacagtgattttgacaacacctcaaactttttcaaacataaaa

SEQ ID NO: 3671 - DNA, 2409 bp, Homo sapiens
  source 1..2409: mol_type = genomic DNA
atggatgtggccatagaattctgtctggaggagtggcaatgcctggacattgcacagcagaatttatataggaatgtgatgttagagaactacagaaacctggtcttcctgggtattgctgtctctaagccagacctgatcacctgtctggagcaagaaaaagagccttgggagcctatgaggagacatgaaatggtagccaaacccccagttatgtgttctcattttacccaagacttttggccagagcagcatataaaagatcctttccaaaaagcgacactgagaagatataaaaactgtgaacataaaaatgtacatttaaaaaaagaccataaaagtgtggatgagtgtaaggtgcacagaggaggttataatggatttaaccaatgtttgccagctacccagagcaaaatatttctatttgataaatgtgtgaaagcctttcataaattttcaaattcaaacagacataagataagccatactgaaaaaaaacttttcaaatgcaaagaatgtggcaaatcattttgcatgcttccacatctagctcaacataaaataattcataccagagtgaatttctgcaaatgtgaaaaatgtggaaaagcttttaactgcccttcaatcatcactaaacataagagaattaatactggagagaaaccctacacatgtgaagaatgtggcaaagtctttaattggtcctcacgccttactacacataaaaaaaattatactagatacaaactctacaaatgtgaagaatgtggcaaagcttttaacaagtcctcaatccttactacccataagataattcgcactggagagaaattctacaaatgtaaagaatgtgccaaagcttttaaccaatcctcaaaccttactgaacataagaaaattcatcctggagagaaaccttacaaatgtgaagaatgtggcaaagcctttaactggccctcaactcttactaaacataagagaattcatactggagagaaaccctacacatgtgaagaatgtggcaaagcctttaaccagttctcaaaccttactacacataagagaatccatactgcagagaaattctataaatgtacagaatgtggtgaagcttttagccggtcctcaaaccttactaaacataagaaaattcatactgaaaagaaaccctacaaatgtgaagaatgtggcaaagcttttaagtggtcctcaaagcttactgaacataagttaactcatactggagagaaaccctacaaatgtgaagaatgtggcaaagcctttaactggccctcaacccttactaaacataacagaattcatactggagagaaaccctacaaatgtgaagtatgtggcaaagcctttaaccagttctcaaaccttactacacataagagaattcatactgcagaaaaaccgtacaaatgtgaagaatgtggcaaagcttttagccggtcctcaaaccttactaaacataagaaaattcacattgaaaagaaaccctacaaatgtgaagaatgtggcaaagcttttaagtggtcctcaaagcttactgaacataagataactcatactggagagaaaccctacaaatgtgaagaatgtggcaaagcttttaaccatttctcaatccttaccaaacataagaggattcatactggagagaaaccctacaagtgtgaagaatgtggcaaagcttttacccaatcctcaaaccttactacacataagaaaattcatactggagagaaattctacaaatgtgaagaatgtggcaaagcttttacccaatcttcaaaccttactacacataaaaaaattcatactggaggaaaaccctacaaatgtgaagaatgtggcaaagcttttaaccagttctcaactcttactaaacataagataattcacactgaggagaaaccctacaaatgtgaagaatgtggcaaagcctttaagtggtcctcaacccttactaaacataagataattcatactggagagaaaccctacaaatgtgaagaatgtggcaaagcttttaaactgtcctcaaccctttctacacataagattattcatactggagagaaaccctacaaatgtgaaaaatgtggcaaagcttttaaccgatcctcaaaccttattgaacataagaaaattcatactggagagcaaccctacaaatgtgaagaatgtggcaaagcatttaactattcctcacaccttaatacacataagagaattcatactaaagagcaaccctacaaatgtaaagaatgtggcaaagctttcaaccaatattcaaaccttactacacataacaaaattcatactggagagaaactctacaaacctgaagatgtgacagtgattttgacaacacctcaaactttttcaaacataaaa

SEQ ID NO: 3672 - DNA, 615 bp, Homo sapiens
  source 1..615: mol_type = genomic DNA
atggcggcagcggctgggggcgcggcgagccgccggggtgccgggcggccctgccccttctccatcgagcacatcctctccagcctgcccgagcggagcctcccggcccgggccgcctgcccaccgcagcccgccggtcgccagagccccgcgaagccagaggagcccggggcgcccgaggctgcgccctgcgcctgctgctgctgctgcggcccccgcgcggcgccctgcgggcccccagaggcggccgccgggctgggcgctcgtctggcgtggccgctgaggctgggaccggcggtgcccttgtctctgggtgcgccagccggaggttccggggcgctcccgggcgcggtcggcccgggttcgcagcggcgcacgaggcgccaccgcaccatcttcagcgaagagcagctgcaggcgctcgaggcgcttttcgtgcagaaccagtatcctgacgtgagtacgcgcgagcgcctggccggccgcatccgccttcgcgaggagcgcgtggaggtctggttcaagaaccgccgggccaaatggcgacaccagaagcgcgcgtcggcttccgcgaggctcctgcccggcgtcaagaagtccccgaaggggagctgc

SEQ ID NO: 3673 - DNA, 2334 bp, Homo sapiens
  source 1..2334: mol_type = genomic DNA
atggatgaaatgacagctgtggtgaaaattgaaaaaggagttggtggcaataatgggggcaatggtaatggtggtggtgccttttcacaggctcgaagtagcagcacaggcagtagcagcagcactggaggaggagggcaggagtcccagccatcccctttggctctgctggcagcaacttgcagcagaattgagtcacccaatgagaacagcaacaactcccagggcccgagtcagtcagggggaacaggtgagcttgacctcacagccacacaactttcacagggtgccaatggctggcagatcatctcttcctcctctggggctacccctacctcaaaggaacagagtggcagcagtaccaatggcagcaatggcagtgagtcttccaagaatcgcacagtctctggtgggcagtatgttgtggctgccgctcccaacttacagaaccagcaagttctgacaggactacctggagtgatgcctaatattcagtatcaagtaatcccacagttccagaccgttgatgggcaacagctgcagtttgctgccactggggcccaagtgcagcaggatggttctggtcaaatacagatcataccaggtgcaaaccaacagattatcacaaatcgaggaagtggaggcaacatcattgctgctatgccaaacctactccagcaggctgtccccctccaaggcctggctaataatgtactctcaggacagactcagtatgtgaccaatgtaccagtggccctgaatgggaacatcaccttgctacctgtcaacagcgtttctgcagctaccttgactcccagctctcaggcagtcacgatcagcagctctgggtcccaggagagtggctcacagcctgtcacctcagggactaccatcagttctgccagcttggtatcatcacaagccagttccagctcctttttcaccaatgccaatagctactcaactactactaccaccagcaacatgggaattatgaactttactaccagtggatcatcagggaccaactctcaaggccagacaccccagagggtcagtgggctacaggggtctgatgctctgaacatccagcaaaaccagacatctggaggctcattgcaagcaggccagcaaaaagaaggagagcaaaaccagcagacacagcagcaacaaattcttatccagcctcagctagttcaagggggacaggccctccaggccctccaagcagcaccattgtcagggcagacctttacaactcaagccatctcccaggaaaccctccagaacctccagcttcaggctgttccaaactctggtcccatcatcatccggacaccaacagtggggcccaatggacaggtcagttggcagactctacagctgcagaacctccaagttcagaacccacaagcccaaacaatcaccttagccccaatgcagggtgtttccttggggcagaccagcagcagcaacaccactctcacacccattgcctcagctgcttccattcctgctggcacagtcactgtgaatgctgctcaactctcctccatgccaggcctccagaccattaacctcagtgcattgggtacttcaggaatccaggtgcacccaattcaaggcctgccgttggctatagcaaatgccccaggtgatcatggagctcagcttggtctccatggggctggtggtgatggaatacatgatgacacagcaggtggagaggaaggagaaaacagcccagatgcccaaccccaagccggtcggaggacccggcgggaagcatgcacctgcccctactgtaaagacagtgaaggaaggggctcgggggatcctggcaaaaagaaacagcatatttgccacatccaaggctgtgggaaagtgtatggcaagacctctcacctgcgggcacacttgcgctggcatacaggcgagaggccatttatgtgtacctggtcatactgtgggaaacgcttcacacgttcggatgagctacagaggcacaaacgtacacacacaggtgagaagaaatttgcctgccctgagtgtcctaagcgcttcatgaggagtgaccacctgtcaaaacatatcaagacccaccagaataagaagggaggcccaggtgtagctctgagtgtgggcactttgcccctggacagtggggcaggttcagaaggcagtggcactgccactccttcagcccttattaccaccaatatggtagccatggaggccatctgtccagagggcattgcccgtcttgccaacagtggcatcaacgtcatgcaggtggcagatctgcagtccattaatatcagtggcaatggcttc

SEQ ID NO: 3674 - DNA, 1839 bp, Homo sapiens
  source 1..1839: mol_type = genomic DNA
atgagcgatccacagaccagcatggctgccactgctgctgtgagtcccagtgactacctgcagcctgccgcctccaccacccaggactcccagccatctcccttagccctgcttgctgcaacatgtagcaaaattggccctccagcagttgaagctgctgtgacacctcctgctcccccacagcccacaccgcggaaacttgtccctatcaaacctgcccctctccctctcagccccggcaagaatagctttggaatcttgtcctccaaaggaaatatacttcagattcaggggtcacaactgagcgcctcctatcctggagggcagctggtgttcgctatccagaatcccaccatgatcaacaaagggacccgatcaaatgccaatatccagtaccaggcggtccctcagattcaggcaagcaattcccaaaccatccaagtacagcccaatctcaccaaccagatccagatcatccctggcaccaaccaagccatcatcaccccctcaccgtccagtcacaagcctgtccccatcaagccagcccccatccagaagtcgagtacgaccaccacccccgtgcagagcggggccaatgtggtgaagctgacaggtgggggcggcaatgtgacgctcactctgcccgtcaacaaccttgtgaacgccagtgacaccggggcccctactcagctcctcactgaaagccccccaaccccgctgtctaagactaacaagaaagcaaggaagaagagccttcctgcctcccagccccctgtggctgtggctgagcaggtggagacggtgctgatcgagaccaccgcggacaacatcatccaggcaggaaataacctgctcattgttcagagccctggtgggggccagccagctgtggtccagcaggtccaggtggtgccccccaaggccgagcagcagcaggtggtacagatcccccagcaggctctgcgggtggtgcaggcggcatctgccaccctccccactgtaccccagaagccctcccagaactttcagatccaggcagctgagccgacacctactcaggtctacatccgcacgccttccggtgaggtgcagacagtccttgtccaggacagccccccagcaacagctgcagccacctctaacaccacctgtagcagccctgcatcccgtgctccccatctgagtgggaccagcaaaaagcactcagctgcaattctccgaaaagagcgtcccctgccaaagattgccccagccgggagcatcatcagcctgaatgcagcccagttggcggcagctgcccaggcaatgcagaccatcaacatcaatggtgtccaggtccagggcgtgcctgtcaccatcaccaacacaggcgggcagcagcagctgacagtgcagaatgtttctgggaacaacctgaccatcagtgggctgagccccacccagatccagctgcaaatggaacaagccctggccggagagacccagcccggggagaagcggcgccgcatggcctgcacgtgtcccaactgcaaggatggggagaagaggtctggagagcagggcaagaagaagcacgtgtgccacatccccgactgtggcaagacgttccgtaagacgtccttgctgcgtgcccatgtgcgcctgcacactggcgagcggccctttgtctgcaactggttcttctgtgggaagaggttcacacggagtgacgagctccaacggcatgctcgcacccacacaggggacaaacgcttcgagtgcgcccagtgtcagaagcgcttcatgaggagtgaccacctcaccaagcattacaagacccacctggtcacgaagaacttg

SEQ ID NO: 3675 - DNA, 2343 bp, Homo sapiens
  source 1..2343: mol_type = genomic DNA
atgaccgctcccgaaaagcccgtgaaacaagaggaaatggctgccttggacgtggatagcggcggcggcggtggcggcggcggcggccacggcgagtatctgcagcagcagcaacagcacggaaacggtgcggtggcggcggcagcggcggcccaggacactcagccgtcaccgctcgctctgctggccgctacctgcagcaagatagggccgccatcgccgggcgacgacgaggaggaggcggccgccgcagccggggcccccgccgccgccggagcgacaggtgatttggcttctgcacagttaggaggagcaccaaaccgatgggaggttttgtcagccacacctacaactataaaagatgaagctggtaatctagtccagattccaagtgctgctacttcaagtgggcagtatgttcttccccttcagaatttgcagaatcaacaaatattttccgttgcaccaggatcagattcatcaaatggtacagtgtccagtgttcaatatcaagtgataccacagatccagtcagcagatggtcagcaggttcaaattggtttcacaggctcttcagataatgggggtataaatcaagaaagcagtcaaattcagatcattcctggctctaatcaaaccttacttgcctctggaacaccttctgctaacatccagaatctcataccacagactggtcaagtccaggttcagggagttgcaattggtggttcatcttttcctggtcaaacccaagtagttgctaatgtgcctcttggtctgccaggaaatattacgtttgtaccaatcaatagtgtcgatctagattctttgggactctcgggcagttctcagacaatgactgcaggcattaatgccgacggacatttgataaacacaggacaagctatggatagttcagacaattcagaaaggactggtgagcgggtttctcctgatattaatgaaactaatactgatacagatttatttgtgccaacatcctcttcatcacagttgcctgttacgatagatagtacaggtatattacaacaaaacacaaatagcttgactacatctagtgggcaggttcattcttcagatcttcagggaaattatatccagtcgcctgtttctgaagagacacaggcacagaatattcaggtttctacagcacagcctgttgtacagcatctacaacttcaagagtctcagcagccaaccagtcaagcccaaattgtgcaaggtattacaccacagacaatccatggtgtgcaagccagtggtcaaaatatatcacaacaggctttgcaaaatcttcagttgcagctgaatcctggaacctttttaattcaggcacagacagtgaccccttctggacaggtaacttggcaaacgtttcaagtacaaggggtccagaacttgcagaatttgcaaatacagaatactgctgcccaacaaataactttgacgcctgttcaaaccctcacacttggtcaagttgcggcaggtggagccttcacttcaactccagttagtctaagcactggtcagttgccaaatctacaaacagttacagtgaactctatagattctgctggtatacagctacatccaggagagaatgctgacagtcctgcagatattaggatcaaggaagaagaacctgatcctgaagagtggcagctcagtggtgattctaccttgaataccaatgacctaacacacttaagagtacaggtggtagatgaagaaggggaccaacaacatcaagaaggaaaaagacttcggagggtagcttgcacctgtcccaactgtaaagaaggtggtggaagaggtaccaatcttgggaaaaagaagcaacacatttgtcatataccaggatgtggtaaagtctatgggaagacctcacatctgagagctcatctgcgttggcattctggagaacgcccttttgtttgtaactggatgtactgtggtaaaagatttactcgaagtgatgaattacagaggcacagaagaacacatacaggtgagaagaaatttgtttgtccagaatgttcaaaacgctttatgagaagtgaccaccttgccaaacatattaaaacacaccagaataaaaaaggtattcactctagcagtacagtgctggcatctgtggaagctgcgcgagatgatactttgattactgcaggaggaacaacgcttatccttgcaaatattcaacaaggttctgtttcagggataggaactgttaatacttccgccaccagcaatcaagatatccttaccaacactgaaatacctttacagcttgtcacagtttctggaaatgagacaatggag

SEQ ID NO: 3676 - DNA, 2139 bp, Homo sapiens
  source 1..2139: mol_type = genomic DNA
atagggccgccatcgccgggcgacgacgaggaggaggcggccgccgcagccggggcccccgccgccgccggagcgacaggtgatttggcttctgcacagttaggaggagcaccaaaccgatgggaggttttgtcagccacacctacaactataaaagatgaagctggtaatctagtccagattccaagtgctgctacttcaagtgggcagtatgttcttccccttcagaatttgcagaatcaacaaatattttccgttgcaccaggatcagattcatcaaatggtacagtgtccagtgttcaatatcaagtgataccacagatccagtcagcagatggtcagcaggttcaaattggtttcacaggctcttcagataatgggggtataaatcaagaaagcagtcaaattcagatcattcctggctctaatcaaaccttacttgcctctggaacaccttctgctaacatccagaatctcataccacagactggtcaagtccaggttcagggagttgcaattggtggttcatcttttcctggtcaaacccaagtagttgctaatgtgcctcttggtctgccaggaaatattacgtttgtaccaatcaatagtgtcgatctagattctttgggactctcgggcagttctcagacaatgactgcaggcattaatgccgacggacatttgataaacacaggacaagctatggatagttcagacaattcagaaaggactggtgagcgggtttctcctgatattaatgaaactaatactgatacagatttatttgtgccaacatcctcttcatcacagttgcctgttacgatagatagtacaggtatattacaacaaaacacaaatagcttgactacatctagtgggcaggttcattcttcagatcttcagggaaattatatccagtcgcctgtttctgaagagacacaggcacagaatattcaggtttctacagcacagcctgttgtacagcatctacaacttcaagagtctcagcagccaaccagtcaagcccaaattgtgcaaggtattacaccacagacaatccatggtgtgcaagccagtggtcaaaatatatcacaacaggctttgcaaaatcttcagttgcagctgaatcctggaacctttttaattcaggcacagacagtgaccccttctggacaggtaacttggcaaacgtttcaagtacaaggggtccagaacttgcagaatttgcaaatacagaatactgctgcccaacaaataactttgacgcctgttcaaaccctcacacttggtcaagttgcggcaggtggagccttcacttcaactccagttagtctaagcactggtcagttgccaaatctacaaacagttacagtgaactctatagattctgctggtatacagctacatccaggagagaatgctgacagtcctgcagatattaggatcaaggaagaagaacctgatcctgaagagtggcagctcagtggtgattctaccttgaataccaatgacctaacacacttaagagtacaggtggtagatgaagaaggggaccaacaacatcaagaaggaaaaagacttcggagggtagcttgcacctgtcccaactgtaaagaaggtggtggaagaggtaccaatcttgggaaaaagaagcaacacatttgtcatataccaggatgtggtaaagtctatgggaagacctcacatctgagagctcatctgcgttggcattctggagaacgcccttttgtttgtaactggatgtactgtggtaaaagatttactcgaagtgatgaattacagaggcacagaagaacacatacaggtgagaagaaatttgtttgtccagaatgttcaaaacgctttatgagaagtgaccaccttgccaaacatattaaaacacaccagaataaaaaaggtattcactctagcagtacagtgctggcatctgtggaagctgcgcgagatgatactttgattactgcaggaggaacaacgcttatccttgcaaatattcaacaaggttctgtttcagggataggaactgttaatacttccgccaccagcaatcaagatatccttaccaacactgaaatacctttacagcttgtcacagtttctggaaatgagacaatggag

SEQ ID NO: 3677 - DNA, 1194 bp, Homo sapiens
  source 1..1194: mol_type = genomic DNA
atggccgcggtggccgtcctccggaacgactcgctgcaggcctttctccaggaccgcacccccagcgcctccccggacctgggcaagcactcgcccctggcattgctggccgccacctgtagccgcatcggccagccgggcgcggcggcgcccccggacttcctgcaggtgccctacgaccccgcgctgggctcaccctccaggctcttccacccgtggaccgccgacatgccggcgcactcgccaggcgcactgccgcccccgcatcccagcttggggctgacgccgcagaagacgcacctgcagccgtccttcggggctgcgcacgagcttccccttacaccccccgccgacccctcgtacccctacgagttctcgccggtcaagatgctgccctcgagcatggcggctctgcccgccagctgcgcgcccgcctacgtgccctacgcggcgcaggccgcgctgccgccaggctactccaacctgctgcctccgccgccgccaccgcccccgccgcccacctgccgccagttgtcacccaacccggcccccgacgacctcccgtggtggagcatcccgcaggcgggcgccgggccgggggcctccggggttccgggaagcggcctctccggcgcctgtgccggggccccccacgcgccccgcttccccgcctctgcggccgctgctgctgcggccgccgccgccctacaaagaggcctggtgttgggcccgtcggactttgcgcagtaccagagccagatcgccgcgctgctgcagaccaaggcccccctggcggccacggccaggaggtgccgccgctgccgctgtcccaactgccaggcggcgggcggcgcccccgaggcggagccggggaagaagaagcagcacgtgtgccacgtgccgggctgcggcaaggtgtacgggaagacgtcgcacctgaaggcgcacctgcgctggcacacgggcgagcgacccttcgtgtgcaactggctcttctgcgggaagagcttcacgcgctcggacgagctgcagcggcacctgcggactcacacgggcgagaagcgctttgcctgtcccgagtgcggcaagcgcttcatgcgcagcgaccacctcgcgaagcacgtcaagactcaccagaataagaagctcaaagtcgctgaggccggggttaagcgggaggacgcgcgggacctg

SEQ ID NO: 3678 - DNA, 1239 bp, Homo sapiens
  source 1..1239: mol_type = genomic DNA
atgctgacggcagcgtgcagcaaatttggtggctctagccctctgcgggactcaacaactctgggcaaagcaggcacaaagaagccgtactctgtgggcagtgacctttcagcctccaaaaccatgggggatgcttatccagccccctttacaagcactaatgggctcctttcacctgcaggcagtcctccagcacccacctcaggctatgctaatgattaccctcccttttcccactcattccctgggcccacaggcacccaggaccctgggctactagtgcccaaggggcacagctcttctgactgtctgcccagtgtctacacctctctggacatgacacacccctatggctcctggtacaaggcaggcatccatgcaggcatttcaccaggcccaggcaacactcctactccatggtgggatatgcaccctggaggcaactggctaggtggtgggcagggccagggtgatgggctgcaagggacactgcccacaggtccagctcagcctccactgaacccccagctgcccacctacccatctgactttgctccccttaatccagccccctacccagctccccacctcttgcaaccagggccccagcatgtcttgccccaagatgtctataaacccaaggcagtgggaaatagtgggcagctagaagggagtggtggagccaaacccccacggggtgcaagcactgggggtagtggtggatatgggggcagtggggcagggcgctcctcctgcgactgccctaattgccaggagctagagcggctgggagcagcagcggctgggctgcggaagaagcccatccacagctgccacatccctggctgcggcaaggtgtatggcaaggcttcgcacctgaaggcccacttgcgctggcacacaggcgagaggcccttcgtctgcaactggctcttctgcggcaagaggttcactcgttcggatgagctggagcgtcatgtgcgcactcacacccgggagaagaagttcacctgcctgctctgctccaagcgctttacccgaagcgaccacctgagcaaacaccagcgcacccatggagaaccaggcccgggtccccctcccagtggccccaaggagctgggggagggccgcagcacgggggaagaggaggccagtcagacgccccgaccttctgcctcgccagcaaccccagagaaagcccctggaggcagccctgagcagagcaacttgctggagatc

SEQ ID NO: 3679 - DNA, 1293 bp, Homo sapiens
  source 1..1293: mol_type = genomic DNA
atggcgtcctccctgcttgaggaggaagttcactatggctccagtcccctggccatgctgacggcagcgtgcagcaaatttggtggctctagccctctgcgggactcaacaactctgggcaaagcaggcacaaagaagccgtactctgtgggcagtgacctttcagcctccaaaaccatgggggatgcttatccagccccctttacaagcactaatgggctcctttcacctgcaggcagtcctccagcacccacctcaggctatgctaatgattaccctcccttttcccactcattccctgggcccacaggcacccaggaccctgggctactagtgcccaaggggcacagctcttctgactgtctgcccagtgtctacacctctctggacatgacacacccctatggctcctggtacaaggcaggcatccatgcaggcatttcaccaggcccaggcaacactcctactccatggtgggatatgcaccctggaggcaactggctaggtggtgggcagggccagggtgatgggctgcaagggacactgcccacaggtccagctcagcctccactgaacccccagctgcccacctacccatctgactttgctccccttaatccagccccctacccagctccccacctcttgcaaccagggccccagcatgtcttgccccaagatgtctataaacccaaggcagtgggaaatagtgggcagctagaagggagtggtggagccaaacccccacggggtgcaagcactgggggtagtggtggatatgggggcagtggggcagggcgctcctcctgcgactgccctaattgccaggagctagagcggctgggagcagcagcggctgggctgcggaagaagcccatccacagctgccacatccctggctgcggcaaggtgtatggcaaggcttcgcacctgaaggcccacttgcgctggcacacaggcgagaggcccttcgtctgcaactggctcttctgcggcaagaggttcactcgttcggatgagctggagcgtcatgtgcgcactcacacccgggagaagaagttcacctgcctgctctgctccaagcgctttacccgaagcgaccacctgagcaaacaccagcgcacccatggagaaccaggcccgggtccccctcccagtggccccaaggagctgggggagggccgcagcacgggggaagaggaggccagtcagacgccccgaccttctgcctcgccagcaaccccagagaaagcccctggaggcagccctgagcagagcaacttgctggagatc

SEQ ID NO: 3680 - DNA, 1764 bp, Homo sapiens
  source 1..1764: mol_type = genomic DNA
atgttagagaactacagaaacctggtcttcctgggtattgctgcctttaagccagacctgatcatttttctggagcaaggaaaagagccctggaatatgaagagacatgagatggtggaagaacccccagttatatgttctcatttttcccaagagttttggccagagcaaggcatagaagattctttccaaaaaatgatattgagaagatatgacaaatgtggacatgagaatttacacttaaaaattagttgtaccaatgtggatgagtgtaacgtgcacaaagaaggttataataaacttaaccagagtttaacaactacacagagcaaagtatttcaatgtggcaaatatgcaaacgtctttcataaatgttcaaattcaaacagacataagataaggcatactggagagaaaggtttgaaatgtaaagaatatgtcagatcattttgcatgctttcacacctatctcaacatgaaagaatttatactagagagaattcctacaaatgtgaagaaaatggcaaagcttttaactggtcctcaacccttacttattataagagtattcatactggagagaaaccctacaaatgtgaagaatgtggcaaagcctttagtaagttctcaatccttactaaacataaggtaattcatactggagagaaaccctacaaatgtgaagaatgtggcaaagcttttaatcgatcctcaatccttactaaacataagataattcatactggagagaaaccctacaaatgtgaagaatgtggcaaaggatttagtagcgtctcaacccttaatacacataaggcaattcatgctgaagagaagccctacaaatgtgaagaatgtggcaaagcttccaactcgtcctcaaagctcatggaacataagagaattcatactggagagaaaccctacaagtgtgaagaatgtggcaaagccttcagctggtcctcaagccttactgaacacaagagaattcatgctggagagaaaccctacaaatgtgaagaatgcgggaaagcttttaatcgatcctcaatccttactaaacataagattattcatactggagagaaaccctacaaatgtgaaggatgtggcaaagcctttagtaaggtctcaacccttaatacacataaggcaattcatgctgaagagaagccctacaaatgtgaagaatgtggcaaagcttccaactcatcctcaaagctcatggaacataagagaattcatactggagagaaaccctacaagtgtgaagaatgtggcaaagccttcagctggtcctcaagccttactgaacacaagagaattcatgctggagagaaaccctacaaatgtgaagaatgtggcaaagccttcacctggtcctcaagctttactaaacacaagagaattcatgctgcagagaaaccttacaaatgtgaagaatgtggcaaaggctttagtacgttctcaatccttactaaacataagataattcatactggagagaaacgctacaaatgtgaagaatgtggcaaagccttcagctggtcctcgatccttactgaacataagataattcatactggagagaaaccctacaaatgtgaagaatgtggcaaagccttcagcagatcctcaagccttactagacacaagagaattcatactggagagaaaccctacaaatgtgaagaatgtggcaaagcttttaagtcatcctcaactgttagttatcataagaaaattcatactggagagaatccc

SEQ ID NO: 3681 - DNA, 1704 bp, Homo sapiens
  source 1..1704: mol_type = genomic DNA
atgggactgttgacatttagggatgtggccatagaattctctctggaagaatggcaatgcctggacactgcacagcggaatttatataaaaatgtgattttagagaactacagaaacctggtcttcctgggtattgctgtctctaagcaagacctgatcacctgtctggagcaagaaaaagagcctttgactgtgaagagacatgagatggtgaatgaacccccagtaatgtgttctcattttgcccaagagttttggccagagcagaacataaaagattcttttgaaaaagtgacactgagaagatatgaaaaatgtggaaatgataattttcagttaaaaggctgtaaaagtgtggatgaatgtaagttgcacaagggaggttataatggacttaaccaatgtttaccaactatgcagagcaaaatgtttcaatgtgataaatatgtgaaagtctttaataaattttcacattcagatagacataagataaaacatatggaaaataaacctttcaaatgtaaagaatgtggcagatcattttgcatgctttcacacctaactcgacatgaaagaaattataccaaggtgaatttctgcaaatgtgaagaatgtgaaaaagctgttaaccaatcttcaaagcttactaaacataaaagaatttatacttgtgagaaactctacaaatgtcaagaatgtgacagaacttttaaccaattctcaaaccttactgaatataaaaaagattatgctcgagagaaaccatacaaatgtgaagaatgtggcaaagcctttaaccagtcctcacaccttactacacataagataattcatacaggagagaaaccctacaaatgtgaagaatgtggcaaagcctttaaccagttctcaaatcttactacacataaaaaaattcatactggagagcaaccctacatatgtgaagaatgtggcaaggcttttacccaatcctcaacccttactacacataagagaattcatactggagaaaaaccctacaaatgtgaagaatgtggaaaagcttttaaccgatcctcaaaacttactgaacataaaaacattcatactggagagcaaccctacaaatgtgaggaatgcggcaaagcttttaaccgatcctcaaatcttacggaacataggaaaattcataccgaagagaaaccctacaaatgtaaagaatgtggcaaagcttttaaacactcctcagcccttactacacataagagaattcacactggagagaaaccctacaaatgtgaagaatgtggcaaagcttttaaccgatcctcaaaacttactgaacataagaaacttcatactggaaagaaaccctacaaatgtgaagaatgtggcaaagcttttatccaatcctcaaaacttactgaacataagaaaattcattctggagagataccctacaagtgtgaagaatgtggcaaagcttttaaacactcctcatcccttactacacataaaagaattcatactggggagaaaccctacaaatgtgaagaatgtggcaaagcttttagccgatcctcaaaacttactgaacataagataattcatactggagagaaaccctataaatgtgagagatgtgacaaagcttttaaccaatctgcaaaccttactaaacataaaaaaatacatactggagagaaactacagaactggaatgtg

SEQ ID NO: 3682 - DNA, 1725 bp, Homo sapiens
  source 1..1725: mol_type = genomic DNA
atggccatgtcccaggaatcattgaccttcaaggacgtgtttgtggacttcaccctggaggagtggcagcaactggactctgcccagaagaacctctacagggatgtcatgcttgagaactacagccacctggtgtccgtggggcatctagttgggaagccagatgtgatcttcaggttgggaccaggtgacgagtcctggatggcagatggagggaccccggtacggacctgtgcagtctgggaagttgacgagcagatagatcactacaaggaaagccaagacaaatttctgtggcaagctgcattcataggcaaggaaacactgaaggatgaaagtggtcaagaatgtaaaatatgtagaaaaatcatttatctcaacacagactttgtttctgtaaaacaaagactccctaaatattattcatgggaaaggtgttcaaaacatcatttaaactttcttggtcaaaatagaagctatgtaagaaagaaagatgatggatgtaaggcatattggaaagtatgcctccattataatcttcataaagctcaacctgcagagagattttttgaccctaatcaacgagggaaagccctccaccaaaagcaagcccttagaaaaagtcagagaagtcaaactggggagaaactctacaaatgtactgaatgtggaaaagtgtttatccagaaagcaaacttagttgtacatcaaagaactcacaccggagagaaaccttatgaatgctgcgaatgtgcaaaagccttcagccagaagtcaaccctcatagcacaccagagaactcacacaggggagaagccctatgaatgcagtgaatgtggaaaaacctttatccagaagtcaactctgattaaacatcaacgaactcatacaggagagaaaccatttgtatgtgacaaatgtccaaaagcctttaagagttcatatcatcttattagacatgaaaaaacacacattagacaagcattttataaaggtattaaatgtactacgtccagccttatatatcaaagaattcacacaagtgagaaacctcagtgcagtgaacatgggaaagcctctgatgagaagcccagtcccactaaacattggagaactcatacaaaagagaacatttatgagtgtagtaaatgtgggaaaagcttcagaggaaagtcacacctctctgttcatcagagaattcatacaggagagaaaccctatgaatgtagtatatgtgggaagactttcagtggaaagtcacacctctctgtccatcatagaactcatacaggagagaaaccttatgaatgcagaagatgtgggaaagcctttggggagaagtcaacccttattgtacatcagagaatgcatacaggagagaaaccctataaatgcaacgaatgtgggaaagcctttagtgagaagtcaccactgattaaacatcagagaattcatacaggagagagaccctatgaatgcactgactgtaaaaaagccttcagtaggaagtcaactctcatcaaacatcagagaattcatacaggagaaaaaccttacaaatgtagtgaatgtgggaaggccttcagtgtgaaatcaactctcattgtgcatcacagaactcatacaggagagaaaccttatgaatgcagagactgtgggaaagcattcagtgggaagtcaactctcattaaacatcagagaagtcacacaggagataaaaaccta

SEQ ID NO: 3683 - DNA, 1743 bp, Homo sapiens
  source 1..1743: mol_type = genomic DNA
atggccatgtcccaggaatcattgaccttcaaggacgtgtttgtggacttcaccctggaggagtggcagcaactggactctgcccagaagaacctctacagggatgtcatgcttgagaactacagccacctggtgtccgtggggcatctagttgggaagccagatgtgatcttcaggttgggaccaggtgacgagtcctggatggcagatggagggaccccggtacggacctgtgcaggtgaggacaggccagaagtctgggaagttgacgagcagatagatcactacaaggaaagccaagacaaatttctgtggcaagctgcattcataggcaaggaaacactgaaggatgaaagtggtcaagaatgtaaaatatgtagaaaaatcatttatctcaacacagactttgtttctgtaaaacaaagactccctaaatattattcatgggaaaggtgttcaaaacatcatttaaactttcttggtcaaaatagaagctatgtaagaaagaaagatgatggatgtaaggcatattggaaagtatgcctccattataatcttcataaagctcaacctgcagagagattttttgaccctaatcaacgagggaaagccctccaccaaaagcaagcccttagaaaaagtcagagaagtcaaactggggagaaactctacaaatgtactgaatgtggaaaagtgtttatccagaaagcaaacttagttgtacatcaaagaactcacaccggagagaaaccttatgaatgctgcgaatgtgcaaaagccttcagccagaagtcaaccctcatagcacaccagagaactcacacaggggagaagccctatgaatgcagtgaatgtggaaaaacctttatccagaagtcaactctgattaaacatcaacgaactcatacaggagagaaaccatttgtatgtgacaaatgtccaaaagcctttaagagttcatatcatcttattagacatgaaaaaacacacattagacaagcattttataaaggtattaaatgtactacgtccagccttatatatcaaagaattcacacaagtgagaaacctcagtgcagtgaacatgggaaagcctctgatgagaagcccagtcccactaaacattggagaactcatacaaaagagaacatttatgagtgtagtaaatgtgggaaaagcttcagaggaaagtcacacctctctgttcatcagagaattcatacaggagagaaaccctatgaatgtagtatatgtgggaagactttcagtggaaagtcacacctctctgtccatcatagaactcatacaggagagaaaccttatgaatgcagaagatgtgggaaagcctttggggagaagtcaacccttattgtacatcagagaatgcatacaggagagaaaccctataaatgcaacgaatgtgggaaagcctttagtgagaagtcaccactgattaaacatcagagaattcatacaggagagagaccctatgaatgcactgactgtaaaaaagccttcagtaggaagtcaactctcatcaaacatcagagaattcatacaggagaaaaaccttacaaatgtagtgaatgtgggaaggccttcagtgtgaaatcaactctcattgtgcatcacagaactcatacaggagagaaaccttatgaatgcagagactgtgggaaagcattcagtgggaagtcaactctcattaaacatcagagaagtcacacaggagataaaaaccta

SEQ ID NO: 3684 - DNA, 1356 bp, Homo sapiens
  source 1..1356: mol_type = genomic DNA
atgtttgccacatctggggcagtggcagcggggaagccttactcgtgcagcgaatgtggcaagagcttctgctacagctcagtgctgctgcgacatgaacgagctcacggcggtgacggccgcttccgttgcctagaatgcggtgagcgctgtgcacgggctgctgacctccgagcgcacaggcgcacgcatgctggccagaccctctacatctgcagtgagtgcggacaaagcttccgccacagcggccgtcttgacctacacttgggcgcacaccggcagcgatgccgcacttgcccctgccgcacatgcggccggcgcttcccgcacctcccggcgctgctgctacaccggcgccgccagcatctgccagagcggccccgccgctgcccgctgtgcgcccgcaccttccggcagagcgcgctgctcttccaccaggcgcgggcgcaccccttggggacaacctctgaccctgctgccccaccccaccgctgcgcgcagtgcccgcgagccttccgaagcggcgccgggctgcggagtcacgcgcgcatccacgtgtcccggagccccacgcgaccccgtgtctcagacgcccaccagtgtggcgtgtgcggcaagtgctttggcaagagctctacgctgacgcgacacctgcagacgcactcgggggagaaacccttcaagtgcccggagtgcggcaagggcttcctggagagcgccacgctggtgcgccaccagcgcacacacacgggcgagaagccgtacgcatgtggcgactgtggacgctgcttcagcgagagttccacgctgctgcgccatcggcgcagccatcagggcgagcggccacatgcgtgcgccacttgcggcaagggtttcgggcagcgctccgacctggtggtgcaccagcgcatccacacgggcgagaagcccttcgcgtgccccgagtgcggccgccgcttcagcgaccgctcggacctcaccaagcaccggcgcacgcacacgggcgagaagccctaccgctgcgaactgtgcggcaagcggttcacgtgcgtgtccaatctcaacgtgcatcggcgcaaccatgccggccacaagccacacaaatgccccgagtgcagcaaggccttcagcgtcgcctccaagcttgcactgcaccgcaagacgcacctgggcgaacggccagcggagtgcgcagagtgcggcaagtgcttcagccacagccgctcgctgtcacagcatcagcgggcccacacgcgcgcccgcaccgctgccgccgttgccatccagtccgcagtgggcactgccctcgtctttgaggggccggctgaacaggaaaagccagggttctctgtgtcc

SEQ ID NO: 3685 - DNA, 1602 bp, Homo sapiens
  source 1..1602: mol_type = genomic DNA
atgttgtccccagtgtcccgagacgcgtctgatgctctgcagggacggaagtgcctgcgtccccgatcgagacgcctgccgctcccggcagctgtccgcgcccacggtcctatggcggagctaacggactccgcgcggggctgtgtggtctttgaggatgtgtttgtatacttctctcgggaagaatgggagcttcttgatgatgctcagagacttttgtaccatgatgtgatgctggagaactttgcacttttagcctcactgggaattgcattttccagatcacgtgcagtcatgaaactagagcgaggagaagagccctgggtgtatgaccaggtggatatgacttcagccacagaaagagaggcccagaggggacttagacctggttgttggcatggagtggaggatgaagaggtatcttctgagcagagcatttttgtagcaggagtgtcagaggtcaggactctcatggcagagctggagtctcacccatgtgacatatgtggcccaatattgaaagataccttacacctggctaaataccatgggggaaaagccaggcagaaaccatacttgtgtggggcatgtggaaagcaattctggttcagtacagactttgaccagcaccagaaccagcccaatggagggaaacttttcccaaggaaggagggcagagactctgtgaaaagctgcagagtccatgtgccagagaagaccctcacatgtgggaaaggtaggagagacttttcagccacatctggccttcttcagcatcaggcctctctcagcagcatgaagccccacaagagcactaagcttgtgagtggctttctcatgggacagaggtatcacaggtgtggtgaatgtgggaaagccttcacccgcaaagacacacttgctcggcatcagagaatccacactggagaaaggccttatgagtgtaacgaatgtgggaaattcttcagccaaagctatgacctctttaaacaccagacagttcacactggagaaaggccatacgagtgcagcgaatgtgggaaattctttagacaaatctccggcctgattgagcacaggcgagttcacacgggtgaaagactctatcagtgtggcaaatgtgggaaattttttagcagtaagtctaatctcattcgacaccaggaagttcacacaggagccaggccttatgtatgcagcgaatgtgggaaagagttcagtcggaaacacacacttgttctgcaccaacgaactcacactggagaaaggccttatgagtgcagtgaatgtgggaaggcctttagccaaagctcccaccttaatgtacactggagaattcacagcagtgattatgagtgtagcagatgtggtaaagctttcagctgcatctccaaactcattcagcaccagaaagttcactctggagaaaagccttatgagtgcagcaagtgcgggaaagccttcactcaaagacccaacctcatcaggcactggaaagtccacactggggaaaggccttatgtgtgtagtgagtgcgggagagaattcatccggaaacagacacttgttctgcaccagagggttcatgctggagaaaagctt

SEQ ID NO: 3686 - DNA, 309 bp, Homo sapiens
  source 1..309: mol_type = genomic DNA
atgagcgataacgatgacatcgaggtggagagcgacgaagagcaaccgaggtttcaatctgcggctgacaaacgggctcatcataatgcactggaacgaaaacgtagggaccacatcaaagacagctttcacagtttgcgggactcagtcccatcactccaaggagagaaggcatcccgggcccaaatcctagacaaagccacagaatatatccagtatatgcgaaggaaaaaccacacacaccagcaagatattgacgacctcaagcggcagaatgctcttctggagcagcaaggggaaagcgagagc

SEQ ID NO: 3687 - DNA, 291 bp, Homo sapiens
  source 1..291: mol_type = genomic DNA
atgctcttctggagcagcaaggggaaagcgagagctgatcaagttctttgttcctggggaattcacttctcttcctccctcatggaagatgcaagtaaaaggaaattccgtgcactggagaaggcgaggtcaagtgcccaactgcagaccaactacccctcctcagacaacagcctctacaccaacgccaagggcagcaccatctctgccttcgatgggggctcggactccagctcggagtctgagcctgaagagccccaaagcaggaagaagctccggatggaggccagc

SEQ ID NO: 3688 - DNA, 249 bp, Homo sapiens
  source 1..249: mol_type = genomic DNA
atgagcgataacgatgacatcgaggtggagagcgacgaagagcaaccgaggtttcaatctgcggctgacaaacgggctcatcataatgcactggaacgaaaacgtagggaccacatcaaagacagctttcacagtttgcgggactcagtcccatcactccaaggagagaagggaacaaagatgaagttaaccctcccacctgtctttccttatgaacacttgccttttccaactgttttctgccatggc

SEQ ID NO: 3689 - DNA, 453 bp, Homo sapiens
  source 1..453: mol_type = genomic DNA
atgagcgataacgatgacatcgaggtggagagcgacgctgacaaacgggctcatcataatgcactggaacgaaaacgtagggaccacatcaaagacagctttcacagtttgcgggactcagtcccatcactccaaggagagaaggcatcccgggcccaaatcctagacaaagccacagaatatatccagtatatgcgaaggaaaaaccacacacaccagcaagatattgacgacctcaagcggcagaatgctcttctggagcagcaagtccgtgcactggagaaggcgaggtcaagtgcccaactgcagaccaactacccctcctcagacaacagcctctacaccaacgccaagggcagcaccatctctgccttcgatgggggctcggactccagctcggagtctgagcctgaagagccccaaagcaggaagaagctccggatggaggccagc

SEQ ID NO: 3690 - DNA, 516 bp, Homo sapiens
  source 1..516: mol_type = genomic DNA
atgttcccggtgtttccttgcacgctgctggccccccccttccccgtgctgggcctggactcccggggggtgggcggcctcatgaactccttcccgccacctcagggtcacgcccagaaccccctgcaggtcggggctgagctccagtcccgcttctttgcctcccagggctgcgcccagagtccattccagaaatgtgaggcagctttcgccacgaaggatcggctgcgggcgcacacagtacgacacgaggagaaagtgccatgtcacgtgtgtggcaagatgctgagctcggcttatatttcggaccacatgaaggtgcacagccagggtcctcaccatgtctgtgagctctgcaacaaaggtactggtgaggtttgtccaatggcggcggcagcggcagcggcggcagcggcagcagcggcagcagtagcagcccctcccacagctgtgggctccctctcgggggcggagggggtgcctgtgagctctcagccacttccctcccaaccctgg

SEQ ID NO: 3691 - DNA, 1431 bp, Homo sapiens
  source 1..1431: mol_type = genomic DNA
atgttcccggtgtttccttgcacgctgctggccccccccttccccgtgctgggcctggactcccggggggtgggcggcctcatgaactccttcccgccacctcagggtcacgcccagaaccccctgcaggtcggggctgagctccagtcccgcttctttgcctcccagggctgcgcccagagtccattccaggccgcgccggcgcccccgcccacgccccaggccccggcggccgagcccctccaggtggacttgctcccggtgctcgccgccgcccaggagtccgccgcggctgctgcggccgctgccgccgctgctgccgccgtcgctgccgcgcccccggcccctgccgccgcctctacggtggacacagcggccctgaagcagcctccggcgccccctccgccacccccgccagtgtcggcgcccgcggccgaggccgcgccccccgcctccgccgccactatcgccgcggcggcggccaccgccgtcgtagccccaacctcgacggtcgccgtggccccggtcgcgtctgccttggagaagaagacaaagagcaaggggccctacatctgcgctctgtgcgccaaggagttcaagaacggctacaatctccggaggcacgaagccatccacacgggagccaaggccggccgggtcccctcgggtgctatgaagatgccgaccatggtgcccctgagcctcctgagcgtgccccagctgagcggagccggcgggggagggggagaggcgggtgccggcggcggcgctgccgcagtggccgccggtggcgtggtgaccacgaccgcctcggggaagcgcatccggaagaaccatgcctgcgagatgtgtggcaaggccttccgcgacgtctaccacctgaaccgacacaagctgtcgcactcggacgagaagccctaccagtgcccggtgtgccagcagcgcttcaagcgcaaggaccgcatgagctaccacgtgcgctcacatgacggcgctgtgcacaagccctacaactgctcccactgtggcaagagcttctcccggccggatcacctcaacagtcacgtcagacaagtgcactcaacagaacggcccttcaaatgtgagaaatgtgaggcagctttcgccacgaaggatcggctgcgggcgcacacagtacgacacgaggagaaagtgccatgtcacgtgtgtggcaagatgctgagctcggcttatatttcggaccacatgaaggtgcacagccagggtcctcaccatgtctgtgagctctgcaacaaaggtactggtgaggtttgtccaatggcggcggcagcggcagcggcggcagcggcagcagcggcagcagtagcagcccctcccacagctgtgggctccctctcgggggcggagggggtgcctgtgagctctcagccacttccctcccaaccctgg

SEQ ID NO: 3692 - DNA, 1362 bp, Homo sapiens
  source 1..1362: mol_type = genomic DNA
atggatcccagcaactggagcagcttcatcttccagggtcacgcccagaaccccctgcaggtcggggctgagctccagtcccgcttctttgcctcccagggctgcgcccagagtccattccaggccgcgccggcgcccccgcccacgccccaggccccggcggccgagcccctccaggtggacttgctcccggtgctcgccgccgcccaggagtccgccgcggctgctgcggccgctgccgccgctgctgccgccgtcgctgccgcgcccccggcccctgccgccgcctctacggtggacacagcggccctgaagcagcctccggcgccccctccgccacccccgccagtgtcggcgcccgcggccgaggccgcgccccccgcctccgccgccactatcgccgcggcggcggccaccgccgtcgtagccccaacctcgacggtcgccgtggccccggtcgcgtctgccttggagaagaagacaaagagcaaggggccctacatctgcgctctgtgcgccaaggagttcaagaacggctacaatctccggaggcacgaagccatccacacgggagccaaggccggccgggtcccctcgggtgctatgaagatgccgaccatggtgcccctgagcctcctgagcgtgccccagctgagcggagccggcgggggagggggagaggcgggtgccggcggcggcgctgccgcagtggccgccggtggcgtggtgaccacgaccgcctcggggaagcgcatccggaagaaccatgcctgcgagatgtgtggcaaggccttccgcgacgtctaccacctgaaccgacacaagctgtcgcactcggacgagaagccctaccagtgcccggtgtgccagcagcgcttcaagcgcaaggaccgcatgagctaccacgtgcgctcacatgacggcgctgtgcacaagccctacaactgctcccactgtggcaagagcttctcccggccggatcacctcaacagtcacgtcagacaagtgcactcaacagaacggcccttcaaatgtgagaaatgtgaggcagctttcgccacgaaggatcggctgcgggcgcacacagtacgacacgaggagaaagtgccatgtcacgtgtgtggcaagatgctgagctcggcttatatttcggaccacatgaaggtgcacagccagggtcctcaccatgtctgtgagctctgcaacaaaggtactggtgaggtttgtccaatggcggcggcagcggcagcggcggcagcggcagcagcggcagcagtagcagcccctcccacagctgtgggctccctctcgggggcggagggggtgcctgtgagctctcagccacttccctcccaaccctgg

SEQ ID NO: 3693 - DNA, 1479 bp, Homo sapiens
  source 1..1479: mol_type = genomic DNA
atgttcccggtgtttccttgcacgctgctggccccccccttccccgtgctgggcctggactcccggggggtgggcggcctcatgaactccttcccgccacctcagggtcacgcccagaaccccctgcaggtcggggctgagctccagtcccgcttctttgcctcccagggctgcgcccagagtccattccaggccgcgccggcgcccccgcccacgccccaggccccggcggccgagcccctccaggtggacttgctcccggtgctcgccgccgcccaggagtccgccgcggctgctgcggccgctgccgccgctgctgccgccgtcgctgccgcgcccccggcccctgccgccgcctctacggtggacacagcggccctgaagcagcctccggcgccccctccgccacccccgccagtgtcggcgcccgcggccgaggccgcgccccccgcctccgccgccactatcgccgcggcggcggccaccgccgtcgtagccccaacctcgacggtcgccgtggccccggtcgcgtctgccttggagaagaagacaaagagcaaggggccctacatctgcgctctgtgcgccaaggagttcaagaacggctacaatctccggaggcacgaagccatccacacgggagccaaggccggccgggtcccctcgggtgctatgaagatgccgaccatggtgcccctgagcctcctgagcgtgccccagctgagcggagccggcgggggagggggagaggcgggtgccggcggcggcgctgccgcagtggccgccggtggcgtggtgaccacgaccgcctcggggaagcgcatccggaagaaccatgcctgcgagatgtgtggcaaggccttccgcgacgtctaccacctgaaccgacacaagctgtcgcactcggacgagaagccctaccagtgcccggtgtgccagcagcgcttcaagcgcaaggaccgcatgagctaccacgtgcgctcacatgacggcgctgtgcacaagccctacaactgctcccactgtggcaagagcttctcccggccggatcacctcaacagtcacgtcagacaagtgcactcaacagaacggcccttcaaatgtgagaaatgtgaggcagctttcgccacgaaggatcggctgcgggcgcacacagtacgacacgaggagaaagtgccatgtcacgtgtgtggcaagatgctgagctcggcttatatttcggaccacatgaaggtgcacagccagggtcctcaccatgtctgtgagctctgcaacaaaggcttcaccacggcagcatacctgcgcatccacgcggtgaaggaccacgggctccaggccccgcgggctgaccgcatcctgtgcaagctgtgcagcgtgcactgcaagacccctgcccagctggccggccacatgcagacccatctggggggggccgccccccctgtcccgggagacgccccccagccacagcccacctgc

SEQ ID NO: 3694 - DNA, 1233 bp, Homo sapiens
  source 1..1233: mol_type = genomic DNA
atggctaaaagaccgggatcccctggaagccgagaaatgggactgttgacattcagagatgtagtcatagaattctctctggaggagtggcaatgcctggatcacgctcagcagaatttatatagagatgtgatgttagagaactacagaaacctggtctccctgggtattgctgtctctaagccagacttgatcacctgtctggagcaaaataaagagccttggaatataaagagaaatgagatggtaaccaaacacccagttatgtgttctcatttcacccaagaccttccgccagagctaggcataaaagattcactccaaaaagtaataccaagaagatatggaaaaagtggacatgacaatttacaagtaaaaacatgtaaaagcatgggtgagtgtgaggtgcaaaaaggaggttgtaatgaagttaaccaatgtttgtcaactacccaaaacaaaatatttcagactcataaatgtgtcaaagtcttcggcaaattttcaaattccaatagacataagacaagacatactggaaagaaacatttcaaatgtaaaaaatatggcaaatcattttgcatggtttcacaactacatcaacatcagataattcatactagggagaattcctaccaatgtgaagaatgcggcaaacccttcaactgctcttcaaccctttctaaacataaaagaattcatactggagagaaaccctacagatgtgaggaatgtggcaaagcttttacctggtcctcaacccttactaaacataggagaattcatactggagaaaaaccctacacatgtgaagaatgtggccaagcctttagccgctcctcaacacttgctaaccacaagagaattcatactggagagaaaccatacacatgtgaagaatgtggcaaagcctttagcttatcctcatccctcacttaccacaagagaattcatactggagagaaaccctacacatgtgaagaatgtggcaaagcctttaactgctcctcaacccttaagaaacataagataattcatactggagagaaaccctacaaatgtaaagaatgtgggaaagcctttgccttctcctcaactcttaatactcataagaggattcatactggagaggaaccctacaaatgtgaagaatgtgacaaagcttttaagtggtcctcaagtcttgctaatcataagagtatgcatactggagagaaaccctacaaatgtgaa

SEQ ID NO: 3695 - DNA, 1740 bp, Homo sapiens
  source 1..1740: mol_type = genomic DNA
atgccaggacaccccgaaagccggaaaacgagacgcattctcactatgttgcccaggctggtcttgaactccttccctcaagtgattcttctgcctaatcctcccaaagttcttagattacagggactactggcattcagtgatgtggtcatagaattctctccagaggagtgggcatgcctggaccctgcccagcgaaatttgtatagggatgtgatgttcgagaactacagaaacctggtctccctggctattttatcttattccattcaagaccttttgccagagcaggatatgaaagatttatgccaaaaagtgacactgacaagacatagaagctggggccttgacaatttgcacttagtgaaagactggagaactgtgaatgaaggtaaggggcagaaagaatattgcaatagacttactcaatgttcatcaactaaaagcaaaatctttcaatgtattgaatgtggcagaaattttagctggaggtcaatccttactgaacataagagaattcatactggagagaagccatacaaatgtgaagaatgtggcaaagttttcaatcgatgttcaaacctaacaaaacataaaagaattcatactggagagaaaccctacaaatgtgacgaatgtggcaaagtttttaattggtggtcacaactaactaaccataagaaaattcatactggagagaaaccctacaaatgtgatgaatgtgacaaagtttttaattggtggtcacaactaactagccataagaaaattcatagtggagagaaaccatacccatgtgaagaatgtggcaaagcctttacccagttctcaaaccttacacaacataagagaattcatactggagagaaaccctacaaatgcaaagaatgttgcaaagcctttaacaagttctcaaaccttactcaacataagagaattcatactggagagaaaccttacaagtgtgaagaatgtggcaacgtttttaatgagtgctcacacctaactagacataggagaattcatactggagagaaaccctacaaatgtgaagaatgtggcaaagcctttacacagtttgcaagccttactcgtcataaaagaattcatactggagaaaaaccctaccaatgtgaagaatgtggcaaaacttttaatcggtgttcacacctaagtagccataagagaattcatactggagagaaaccctacaaatgtgaagaatgtggcagaacctttactcaattctcaaacctcactcagcataaaagaattcatactggagagaaaccctacaaatgcaaagaatgtggcaaagcgtttaacaagttctcaagccttactcaacataggagaattcatactggagtgaaaccctacaaatgtgaagaatgtgggaaagtttttaaacagtgctctcacctaactagccataagagaattcatactggagagaaaccctacaaatgtaaagaatgtggcaaagctttttaccaatcctcaatccttagtaagcataagagaattcatactgaagagaaaccctacaaatgtgaagaatgtggcaaagcctttaaccagttctcaagccttactcgtcataaaagaattcatactggagagaaacgctacaaatgtaaagaatgtggaaaaggtttttaccaatcctcaatccatagtaagtataagagaatttatactggagaggaacctgacaaatgtaaaaaatgtggcagtctt

SEQ ID NO: 3696 - DNA, 1149 bp, Homo sapiens
  source 1..1149: mol_type = genomic DNA
atggcatcagaactggcaatgagcaactccgacctgcccaccagtcccctggccatggaatatgttaatgacttcgatctgatgaagtttgaagtgaaaaaggaaccggtggagaccgaccgcatcatcagccagtgcggccgtctcatcgccgggggctcgctgtcctccacccccatgagcacgccgtgcagctcggtgcccccttcccccagcttctcggcgcccagcccgggctcgggcagcgagcagaaggcgcacctggaagactactactggatgaccggctacccgcagcagctgaaccccgaggcgctgggcttcagccccgaggacgcggtcgaggcgctcatcagcaacagccaccagctccagggcggcttcgatggctacgcgcgcggggcgcagcagctggccgcggcggccggggccggtgccggcgcctccttgggcggcagcggcgaggagatgggccccgccgccgccgtggtgtccgccgtgatcgccgcggccgccgcgcagagcggcgcgggcccgcactaccaccaccaccaccaccacgccgccggccaccaccaccacccgacggccggcgcgcccggcgccgcgggcagcgcggccgcctcggccggtggcgctgggggcgcgggcggcggtggcccggccagcgctgggggcggcggcggcggcggcggcggcggaggcggcgggggcgcggcgggggcggggggcgccctgcacccgcaccacgccgccggcggcctgcacttcgacgaccgcttctccgacgagcagctggtgaccatgtctgtgcgcgagctgaaccggcagctgcgcggggtcagcaaggaggaggtgatccggctgaagcagaagaggcggaccctgaaaaaccgcggctatgcccagtcctgccgcttcaagagggtgcagcagagacacgtcctggagtcggagaagaaccagctgctgcagcaagtcgaccacctcaagcaggagatctccaggctggtgcgcgagagggacgcgtacaaggagaaatacgagaagttggtgagcagcggcttccgagaaaacggctcgagcagcgacaacccgtcctctcccgagtttttcatgtacccaagggaatcctctacatcagtgatg

SEQ ID NO: 3697 - DNA, 1119 bp, Homo sapiens
  source 1..1119: mol_type = genomic DNA
atggcatcagaactggcaatgagcaactccgacctgcccaccagtcccctggccatggaatatgttaatgacttcgatctgatgaagtttgaagtgaaaaaggaaccggtggagaccgaccgcatcatcagccagtgcggccgtctcatcgccgggggctcgctgtcctccacccccatgagcacgccgtgcagctcggtgcccccttcccccagcttctcggcgcccagcccgggctcgggcagcgagcagaaggcgcacctggaagactactactggatgaccggctacccgcagcagctgaaccccgaggcgctgggcttcagccccgaggacgcggtcgaggcgctcatcagcaacagccaccagctccagggcggcttcgatggctacgcgcgcggggcgcagcagctggccgcggcggccggggccggtgccggcgcctccttgggcggcagcggcgaggagatgggccccgccgccgccgtggtgtccgccgtgatcgccgcggccgccgcgcagagcggcgcgggcccgcactaccaccaccaccaccaccacgccgccggccaccaccaccacccgacggccggcgcgcccggcgccgcgggcagcgcggccgcctcggccggtggcgctgggggcgcgggcggcggtggcccggccagcgctgggggcggcggcggcggcggcggcggcggaggcggcgggggcgcggcgggggcggggggcgccctgcacccgcaccacgccgccggcggcctgcacttcgacgaccgcttctccgacgagcagctggtgaccatgtctgtgcgcgagctgaaccggcagctgcgcggggtcagcaaggaggaggtgatccggctgaagcagaagaggcggaccctgaaaaaccgcggctatgcccagtcctgccgcttcaagagggtgcagcagagacacgtcctggagtcggagaagaaccagctgctgcagcaagtcgaccacctcaagcaggagatctccaggctggtgcgcgagagggacgcgtacaaggagaaatacgagaagttggtgagcagcggcttccgagaaaacggctcgagcagcgacaacccgtcctctcccgagtttttcatg

SEQ ID NO: 3698 - DNA, 1209 bp, Homo sapiens
  source 1..1209: mol_type = genomic DNA
atggcatcagaactggcaatgagcaactccgacctgcccaccagtcccctggccatggaatatgttaatgacttcgatctgatgaagtttgaagtgaaaaaggaaccggtggagaccgaccgcatcatcagccagtgcggccgtctcatcgccgggggctcgctgtcctccacccccatgagcacgccgtgcagctcggtgcccccttcccccagcttctcggcgcccagcccgggctcgggcagcgagcagaaggcgcacctggaagactactactggatgaccggctacccgcagcagctgaaccccgaggcgctgggcttcagccccgaggacgcggtcgaggcgctcatcagcaacagccaccagctccagggcggcttcgatggctacgcgcgcggggcgcagcagctggccgcggcggccggggccggtgccggcgcctccttgggcggcagcggcgaggagatgggccccgccgccgccgtggtgtccgccgtgatcgccgcggccgccgcgcagagcggcgcgggcccgcactaccaccaccaccaccaccacgccgccggccaccaccaccacccgacggccggcgcgcccggcgccgcgggcagcgcggccgcctcggccggtggcgctgggggcgcgggcggcggtggcccggccagcgctgggggcggcggcggcggcggcggcggcggaggcggcgggggcgcggcgggggcggggggcgccctgcacccgcaccacgccgccggcggcctgcacttcgacgaccgcttctccgacgagcagctggtgaccatgtctgtgcgcgagctgaaccggcagctgcgcggggtcagcaaggaggaggtgatccggctgaagcagaagaggcggaccctgaaaaaccgcggctatgcccagtcctgccgcttcaagagggtgcagcagagacacgtcctggagtcggagaagaaccagctgctgcagcaagtcgaccacctcaagcaggagatctccaggctggtgcgcgagagggacgcgtacaaggagaaatacgagaagttggtgagcagcggcttccgagaaaacggctcgagcagcgacaacccgtcctctcccgagtttttcataactgagcccactcgcaagttggagccatcagtgggatacgccacattttggaagccccagcatcgtgtacttaccagtgtgttcacaaaa

SEQ ID NO: 3699 - DNA, 1320 bp, Homo sapiens
  source 1..1320: mol_type = genomic DNA
atgggcagctcgcacttgctcaacaagggcctgccgcttggcgtccgacctccgatcatgaacgggcccctgcacccgcggcccctggtggcattgctggatggccgggactgcacagtggagatgcccatcctgaaggacgtggccactgtggccttctgcgacgcgcagtccacgcaggagatccatgagaaggtcctgaacgaggctgtgggggccctgatgtaccacaccatcactctcaccagggaggacctggagaagttcaaagccctccgcatcatcgtccggattggcagtggttttgacaacatcgacatcaagtcggccggggatttaggcattgccgtctgcaacgtgcccgcggcgtctgtggaggagacggccgactcgacgctgtgccacatcctgaacctgtaccggcgggccacctggctgcaccaggcgctgcgggagggcacacgagtccagagcgtcgagcagatccgcgaggtggcgtccggcgctgccaggatccgcggggagaccttgggcatcatcggacttggtcgcgtggggcaggcagtggcgctgcgggccaaggccttcggcttcaacgtgctcttctacgacccttacttgtcggatggcgtggagcgggcgctggggctgcagcgtgtcagcaccctgcaggacctgctcttccacagcgactgcgtgaccctgcactgcggcctcaacgagcacaaccaccacctcatcaacgacttcaccgtcaagcagatgagacaaggggccttcctggtgaacacagcccggggtggcctggtggatgagaaggcgctggcccaggccctgaaggagggccggatccgcggcgcggccctggatgtgcacgagtcggaacccttcagctttagccagggccctctgaaggatgcacccaacctcatctgcaccccccatgctgcatggtacagcgagcaggcatccatcgagatgcgagaggaggcggcacgggagatccgcagagccatcacaggccggatcccagacagcctgaagaactgtgtcaacaaggaccatctgacagccgccacccactgggccagcatggaccccgccgtcgtgcaccctgagctcaatggggctgcctataggtaccctccgggcgtggtgggcgtggcccccactggcatcccagctgctgtggaaggtatcgtccccagcgccatgtccctgtcccacggcctgccccctgtggcccacccgccccacgccccttctcctggccaaaccgtcaagcccgaggcggatagagaccacgccagtgaccagttg

SEQ ID NO: 3700 - DNA, 1335 bp, Homo sapiens
  source 1..1335: mol_type = genomic DNA
atggcccttgtggataagcacaaagtcaagagacagcgattggacagaatttgtgaaggtatccgcccccagatcatgaacggccccctgcacccccgccccctggtggcgctgctggacggccgcgactgcactgtggagatgcccatcctgaaggacctggccactgtggccttctgtgacgcgcagtcgacgcaggaaatccacgagaaggttctaaacgaagccgtgggcgccatgatgtaccacaccatcaccctcaccagggaggacctggagaagttcaaggccctgagagtgatcgtgcggataggcagtggctatgacaacgtggacatcaaggctgccggcgagctcggaattgccgtgtgcaacatcccgtctgcagccgtggaagagacagcggactctaccatctgccacatcctcaacctgtaccggaggaacacgtggctgtaccaggcactgcgggaaggcacgcgggttcagagcgtggagcagatccgcgaggtggcctcgggagcggcccgcatccgtggggagacgctgggcctcattggctttggtcgcacggggcaggcggttgcagttcgagccaaggcctttggattcagcgtcatattttatgacccctacttgcaggatgggatcgagcggtccctgggcgtgcagagggtctacaccctgcaggatttgctgtatcagagcgactgcgtctccttgcactgcaatctcaacgaacataaccaccacctcatcaatgactttaccataaagcagatgaggcagggagcattccttgtgaacgcagcccgtggcggcctggtggacgagaaagccttagcacaagccctcaaggagggcaggatacgaggggcagccctcgacgtgcatgagtcagagcccttcagctttgctcagggtccgttgaaagatgccccgaatctcatctgcactcctcacactgcctggtacagtgagcaggcgtcactggagatgagggaggcagctgccaccgagatccgccgagccatcacaggtcgcatcccagaaagcttaagaaattgtgtgaacaaggaattctttgtcacatcagcgccttggtcagtaatagaccagcaagcaattcatcctgagctcaatggtgccacatacagatatccgccaggcatcgtgggtgtggctccaggaggacttcctgcagccatggaagggatcatccctggaggcatcccagtgactcacaacctcccgacagtggcacatccttcccaagcgccctctcccaaccagcccacaaaacacggggacaatcgagagcaccccaacgagcaa

SEQ ID NO: 3701 - DNA, 1539 bp, Homo sapiens
  source 1..1539: mol_type = genomic DNA
atgagaccaggacttccaggccccacagggttgtgcgctcagacctcaagtaggggccagaagagtgtactgaaacagaaggaatcttgtggaatttggcagttgtaccattttcttagcagaaaacaggagcccaggtgggagccatgtgtgtcgggttcctcgtcaggtgacggtgctgttgcggatctcgcggatgagctgagggggtatccagctttgtgctgcacgcttcctgtccactcatacaggtcgtgggctggtatccgcccccagatcatgaacggccccctgcacccccgccccctggtggcgctgctggacggccgcgactgcactgtggagatgcccatcctgaaggacctggccactgtggccttctgtgacgcgcagtcgacgcaggaaatccacgagaaggttctaaacgaagccgtgggcgccatgatgtaccacaccatcaccctcaccagggaggacctggagaagttcaaggccctgagagtgatcgtgcggataggcagtggctatgacaacgtggacatcaaggctgccggcgagctcggaattgccgtgtgcaacatcccgtctgcagccgtggaagagacagcggactctaccatctgccacatcctcaacctgtaccggaggaacacgtggctgtaccaggcactgcgggaaggcacgcgggttcagagcgtggagcagatccgcgaggtggcctcgggagcggcccgcatccgtggggagacgctgggcctcattggctttggtcgcacggggcaggcggttgcagttcgagccaaggcctttggattcagcgtcatattttatgacccctacttgcaggatgggatcgagcggtccctgggcgtgcagagggtctacaccctgcaggatttgctgtatcagagcgactgcgtctccttgcactgcaatctcaacgaacataaccaccacctcatcaatgactttaccataaagcagatgaggcagggagcattccttgtgaacgcagcccgtggcggcctggtggacgagaaagccttagcacaagccctcaaggagggcaggatacgaggggcagccctcgacgtgcatgagtcagagcccttcagctttgctcagggtccgttgaaagatgccccgaatctcatctgcactcctcacactgcctggtacagtgagcaggcgtcactggagatgagggaggcagctgccaccgagatccgccgagccatcacaggtcgcatcccagaaagcttaagaaattgtgtgaacaaggaattctttgtcacatcagcgccttggtcagtaatagaccagcaagcaattcatcctgagctcaatggtgccacatacagatatccgccaggcatcgtgggtgtggctccaggaggacttcctgcagccatggaagggatcatccctggaggcatcccagtgactcacaacctcccgacagtggcacatccttcccaagcgccctctcccaaccagcccacaaaacacggggacaatcgagagcaccccaacgagcaa

SEQ ID NO: 3702 - DNA, 2955 bp, Homo sapiens
  source 1..2955: mol_type = genomic DNA
atgccagttcccagcaggcatataaatattggtcgttctcagagctgggatgctgctgggtggtacgagggcccctgggagaacgccgagtccctgcggcctctggggaggagaagctccctgacgtatggcacagcagaggggacttggtttgagccaaaccaccgaccacaggacgctgccctgcccgtggccgccgagccctacctgtaccgggaggccgtttataactcagtggctgcaagaaaggggtctactcctgacttcaccttctacgacagcagacaggcagtgatgtctggtcgcagccccctgctgccacgggagtactacagtgatccgtctggagctgctagggtacccaaagagcctcccctctatcgggacccaggagtcagccggccggtccccagctacggagtgcttggcagcagaacgtcatgggatccaatgcaaggccggtcacctgccctgcaggacgccggtcacctgtaccgggatcctggaggtaaaatgatccctcaggggcggcagacacagagcagggctgcatctcccgggcggtatggacgggagcagcccgacaccaggtatggggcggaggtgcctgcctaccccctcagccaggtcttcagcgacatcagcgaaagacccattgaccctgcccctgccagacaggtggccccgacgtgcctggttgtggaccccagttcagctgctgcccccgaaggcagcacaggggtggccccaggggccctgaatcgtggctacgggcctgcccgggaaagcatcccatccaagatggcttacgagacttacgaagctgacctgtccaccttccagggtcctggtggcaagaggaccgtgctccctgagttcctggcctttctgcgggcggaggggctggcagaggccacgctgggagccctactgcagcagggctttgactccccggccgtcctggctaccctggaggacgcggatatcaagtctgtcgcacccaacctgggccaggcccgtgttctgagccgcctggccaatagctgcaggaccgaaatgcagctgcggaggcaggaccgggggggcccgctgccccgggcgcggtccagcagcttcagccaccgaagcgaactgctccatggtgacttggcttctctgggcgctgcggctcctctgcagacagcatccccccgagctggagacccggctcgccgtccctccagcgcaccatctcagcacctcctggagacggcagccacctattctgcccctggcgtgggcacccatgccccacacttcccctccaactccgggtacagctctcccaccccttgcgccctgacagcgcgtctgagccccacgtaccccctgcaggcaggggtggccttgactaacccgggcccctcaaacccccttcacccaggccccagaacagcctactccacggcatacacggtgcccatggagctgctaaagagggagcgcaacgtggccgcctctccgctgcccagccctcacggcagcccccaggtcttgcggaagccaggtgcacccctggggccatccaccctgccgccggccagccagagcctccacacgcctcactcaccgtaccagaaggtggcccggcgcacaggggcacccatcatcgtgtccaccatgcttgcaccagaaccaagtatccgcccccagatcatgaacggccccctgcacccccgccccctggtggcgctgctggacggccgcgactgcactgtggagatgcccatcctgaaggacctggccactgtggccttctgtgacgcgcagtcgacgcaggaaatccacgagaaggttctaaacgaagccgtgggcgccatgatgtaccacaccatcaccctcaccagggaggacctggagaagttcaaggccctgagagtgatcgtgcggataggcagtggctatgacaacgtggacatcaaggctgccggcgagctcggaattgccgtgtgcaacatcccgtctgcagccgtggaagagacagcggactctaccatctgccacatcctcaacctgtaccggaggaacacgtggctgtaccaggcactgcgggaaggcacgcgggttcagagcgtggagcagatccgcgaggtggcctcgggagcggcccgcatccgtggggagacgctgggcctcattggctttggtcgcacggggcaggcggttgcagttcgagccaaggcctttggattcagcgtcatattttatgacccctacttgcaggatgggatcgagcggtccctgggcgtgcagagggtctacaccctgcaggatttgctgtatcagagcgactgcgtctccttgcactgcaatctcaacgaacataaccaccacctcatcaatgactttaccataaagcagatgaggcagggagcattccttgtgaacgcagcccgtggcggcctggtggacgagaaagccttagcacaagccctcaaggagggcaggatacgaggggcagccctcgacgtgcatgagtcagagcccttcagctttgctcagggtccgttgaaagatgccccgaatctcatctgcactcctcacactgcctggtacagtgagcaggcgtcactggagatgagggaggcagctgccaccgagatccgccgagccatcacaggtcgcatcccagaaagcttaagaaattgtgtgaacaaggaattctttgtcacatcagcgccttggtcagtaatagaccagcaagcaattcatcctgagctcaatggtgccacatacagatatccgccaggcatcgtgggtgtggctccaggaggacttcctgcagccatggaagggatcatccctggaggcatcccagtgactcacaacctcccgacagtggcacatccttcccaagcgccctctcccaaccagcccacaaaacacggggacaatcgagagcaccccaacgagcaa

SEQ ID NO: 3703 - DNA, 2733 bp, Homo sapiens
  source 1..2733: mol_type = genomic DNA
atggatacctgcggggtcggctatgttgccctgggggaggccggccccgtggggaacatgactgtggtagactctcctggacaagaggtgctaaatcagcttgatgtcaagacctcttcagaaatgaccagtgcagaggcttccgtagagatgtcattacctacccctttgcctggatttgaggattctcctgatcagaggaggctccctccagagcaggaaagcctctccagactggaacagccagatctttcttcagagatgtcaaaggtctcaaagcctagggcctcaaagcctggccggaagagaggtggtaggacacgaaaaggccccaaaaggccccaacagcctaatcctccatcagccccactggttcctggtctcttagatcaatccaaccctctgtccacccccatgcctaagaaacgaggtcgaaagtccaaggcagagctgctgctgctgaagttgtcaaaagacctagatcggccagaatctcaatctccaaagaggccccctgaggactttgagaccccttctggggaacgaccccgccgaagggctgcccaagtggcacttctgtatcttcaggaactggctgaagagctctcaacagccctgcctgcccctgtgtcctgtcctgagggccccaaggtgagcagccccaccaaaccgaagaagatccggcagccagcagcctgtccaggtggagaagaggtggatggtgctccacgggatgaagacttttttctccaggttgaggctgaagatgtggaagaaagtgagggcccaagtgagagctcatctgaacctgagcctgtagtgccccgaagcaccccacgaggatctacttcagggaaacagaaaccacactgccgaggaatggctcccaatggcttaccaaatcatatcatggctcctgtttggaagtgcctccatctcaccaaggacttccgagagcagaaacattcatactgggagtttgctgagtggattcctttagcctggaagtggcacttgttatctgagcttgaggccgctccctacctgccccaggaggagaagtctccattgttttctgtacaacgtgaagggctacctgaagatggcaccctctaccgaataaacagatttagctcgatcacagcacatccagagcgctgggatgtgtccttcttcacggggggaccgctctgggctctggactggtgcccagtgccagagggggcaggagcctcgcaatatgtggctcttttctccagccctgacatgaatgagacacacccactgagccagcttcattcgggtcctgggctgctccagctctggggccttgggaccttgcagcaagaaagctgtcctggcaacagggcccactttgtctatgggattgcttgtgacaacggctgcatctgggacctcaagttctgccccagtggagcatgggaacttccaggcacccctcggaaggctcctctcctgccccggttgggtctcttggctctggcctgctcagacgggaaagtactgctattcagtctaccccatccggaggccctgctggctcagcaacccccagatgcagtgaagcctgccatatataaggtacaatgtgtggcaactctgcaggtggggtctatgcaagctacagacccctctgagtgtggtcagtgccttagcctggcctggatgcctaccaggccccaccaacacctagctgctggatattataatggcatggtggttttctggaaccttcccactaactcacccctgcagcggatacggctctctgatggctccttaaagctctaccccttccagtgtttcctagcccatgaccaggctgtgcgtacccttcaatggtgcaaagctaacagccatttccttgtctctgcggggagtgaccggaaaatcaaattctgggaccttcgacgtccttacgaacccataaactctatcaagcgcttcttgagtacagaactggcctggctgcttccctacaatggtgtcactgtggctcaggacaactgctatgcctcttatggactctgtgggattcattatattgacgctggttaccttggtttcaaggcctacttcactgctcctcgaaaaggcaccgtttggagtctttcaggatccgactggcttgggacaatagctgcaggagatatatccggggagctcattgctgctatattaccagatatggcactgaatccaataaatgtcaagcgacctgtagagcgaagatttcctatatataaagcagatctgataccgtatcaggacagtcctgaaggtccagaccattcttctgcttcatctggggtccccaaccctcctaaggctcgaacttacactgaaactgtcaaccatcactacttgctctttcaagacacagatttgggttcattccatgatctgctccgtagagaaccaatgctgcgcatgcaggagggagaggggcattctcaactctgcctggacaggctgcagctggaggctattcataaggtacgtttcagcccaaacctggactcctatggatggctggtatctggggggcagtcagggctggttcgaatccattttgtccgtggactcgcctccccactgggccaccgtatgcagcttgaaagccgagcccacttcaatgctatgttccaaccatcctcccccactagacggcctggcttctctccaaccagccatcgccttctgcccactccc

SEQ ID NO: 3704 - DNA, 5589 bp, Homo sapiens
  source 1..5589: mol_type = genomic DNA
atgattgaagacaaggggcctcgtgttgctgactactttgttgtagcaggattaactgatgtttcaaagcctctagaagaagaaattcacttcaatgatgcttgtcataaagtagctaaaccaaaagaacctattacagatgtttcagttattatcaaatctcttggggaggaagtcccacaggattatatctgtattgatgttaccccaactggattgtcagctgatcttaataatggaagtcttgtggggccacagatttacctttgctatagaagaggaagagataagcctccacttacagatctgggggttttatatgactggaaagaaagattgaaacagggttgtgaaattattcagagtactccctatgggcgccccgcaaatattagtgggagtacctcatcacaaagaatttatatcacttaccgaagagcctctgaaaacatgactcagaatacgttggctgtcactgacatatgtattattatacccagtaaaggagaaagcccaccacacacgttctgcaaagtcgacaagaatctcaataacagtatgtggggatcagcagtatacttgtgttataaaaaatcggtggcaaagacgaacactgtatcttacaaagctggcctaatttgtagatatcctcaagaagattatgagtcattctcactaccggaatctgttcctctattttgtttaccaatgggtgcaaccattgaatgttggccatcaaatagcaaataccctctgcctgtattttctacttttgttttaactggagcctcagctgaaaaggtttatggtgctgctattcagttttatgaaccatactctgaggagaatctcacagaaaagcagagacttcttttgggtttaacatcagcagatgggaagtctgatagttccaaaacaattcatactaacaaatgcatctgtcttctttctcactggcctttttttgatgcattcaggaagtttctgacttttctgtatcgttattccatctctgggcctcatgtccttccaattgagaagcatatttctcattttatgcataaagttccttttccatctcctcagagaccacggattttagttcagttatcaccacatgataatctgattctcagtcagcctgtgtcttcacctcttccactaagtggtggcaagttttcaacactactgcagaatttaggccctgaaaatgctgtgacactactggtgtttgcagtaacagaacataaaattcttatccattccctacggccatccgtgcttactagtgtgacagaagcattagtgtctatgattttccctttccactggccatgcccgtatgttcctctctgcccactggctttagcagatgtcttgagtgcaccatgtccattcatagtagggattgattcaagatactttgatctctatgatcctccaccagatgtcagttgtgttgatgtagataccaacactatttctcaaattggtgacaagaaaaatgtagcctggaagatacttccaaagaagccatgtaaaaatctgatgaacacactgaataatttgcatcagcaattggcaaaattgcagcagagaccgagagatgatggactcatggatttagcaataaatgactatgattttaattctggaaagaggttgcacatgatagatttggaaatccaagaggcatttttgtttttcatggcctctattttaaaaggttacagatcatacttaaggccaataacacaagccccatctgagacagccacagatgcagcctctctctttgccctacaagctttcttaagaagccgggaccggtcacatcaaaaattctataacatgatgaccaaaacacaaatgtttattcgcttcattgaagaatgttcttttgttagtgacaaagatgcaagcctggcattttttgatgattgtgtagataaagtggatatggacaagagcggtgaagtacgacttatagaactggatgaatctttcaaaagtgaacacactgtttttgtaacaccacctgagatcccccacctacccaatggtgaagaaccccctttacagtacagctataatggatttccagttcttaggaacaatttatttgaaagacctgaaggatttctacaagcaaagaagaacaaattgccttcaaaatcaagtagtcctaatagccctttgcccatgttcagaagaacaaaacaggaaattaaatcagcccataaaattgcaaagaggtactcttccatccctcagatgtggtctaggtgtctactgcgccactgttatggactgtggtttatttgtctcccagcttatgtgaaagtctgtcattcaaaagtcagggctctgaaaacagcatatgatgtgcttaaaaaaatgcagtcaaagaagatggatccacctgatgaggtatgctaccgcattcttatgcaactctgtggacaatatgatcagccagtgcttgcagttcgagtgctttttgaaatgcagaaagctggtattgaccccaatgccattacttatggttattataataaggctgttttggaaagtacctggccttcaagaagtcgtagtggctattttctttggacaaaagtaagaaatgttgttttaggagtaacacagttcaaaagagctttaaagaagcatgcacacttatcacaaacaactctctcaggtggccagtctgatcttggatataattcattatctaaagatgaagttagaagaggggatacatctactgaagacattcaagaagaaaaagataaaaaagggagtgattgtagttccttgtcagagagtgagagtacaaaaggaagtgctgattgccttcctaagctcagttatcaaaattcttccagtatcgttcgcctcactggtacaagtaacaacagtgctggtaaaatatcaggagaaagcatggaaagcacacctgagctgctcttaatatcatctcttgaagatacaaatgaaacacgaaacattcaaagtagatgcttcaggaaaagacataaaagtgacaatgaaactaatttgcagcagcaagtggtctggggaaatagaaaccgtaatcttagtggaggggtactgatgggatttatgctcaatagaattaaccaggaagcaacccctggagatatagttgaaaaattgggagctgatgcaaaaattctttcaaatgttatctcaaaaagcacgagaccaaatactcttgatattgggaagccacctttaagatcaaaaagagacagtctagaaaaggaatctagtgatgatgatacaccttttgatggttctaactatttggcagataaagtggattctcctgttatttttgacttagaagacttagacagtgaaacagatgtatcaaaagcaggatgtgttgctacacaaaatcccaagaggattcaacgtatgaacagcagcttttcagtaaaaccttttgaaaaaactgatgtcgcaacaggatttgatcccctctctcttttggttgctgagactgaacagcagcaaaaagaagaagaggaggaggatgaagatgatagcaaaagcatttcaacaccatctgctaggcgtgatttagctgaagaaattgtgatgtatatgaataacatgagcagtcctttgacaagtcgtacaccaagcattgatttacaacgggcatgtgatgataaattaaataagaaaagtccaccattggtcaaggcatgcagaagatctagtctgcctcctaattctcctaagccagtgagacttaccaaatctaaaagttacacaaaaagtgaggagaaaccaagggatagactttggtcttctccagccttctcacctacttgcccatttagggaagaatctcaggatacattaacccactcatcaccttcatttaacttagatacactactagtacctaaactagatgttctaagaaacagtatgttcactgctggaaaaggagttgcagagaaagcaagcaaatggtattcaagattcaccatgtacaccacatcatctaaggatcaaagttctgatcgtaccagtctttcttcagtgggagcccaggattctgaatctacctctttaacagatgaagatgtctgccatgagttggaaggacctatctcctctcaagagaccagtgctacttcagggactaagagaattgatctcagccgaataagcctggaaagttctgcatccttggaaggatctctgtcgaagtttgccttacctgggaaatcagaagtgacatcttccttcaacgcgagtaatacaaatatcttccagaactatgcaatggaggttctcatctcaagttgctctcggtgtagaacttgtgattgtcttgtccatgatgaggaaatcatggctggctggacagcagatgattcaaatctcaatactacatgcccattctgtggcaatatcttcttaccctttctgaatatagaaataagagatttaagacgacctggaagatactttctaaagtcaagcccatcaacagaaaatatgcactttccatcctccatttcaagtcagacgaggcagtcttgcatttcaacatcagcctctggtcttgacacatctgctctctctgttcaagggaattttgatctaaatagcaaatctaaactgcaggaaaatttttgcacccgaagtattcagatccctgctaatagatcaaaaacagctatgtctaaatgtccaatatttccaatggccaggagtattagtacttctggccccttggataaggaagatactggaagacagaagctcatttctacaggcagcctgccagctactttacaaggagctacagattctttaggtttagaatggcaccttccaagtcccgatcctgtcactgttccgtatcttagtcctttagtggtatggaaagaacttgaaagcttattggaaaatgaaggtgatcatgcaataacagtagcagactttgtggaccatcatccaattgttttttggaacctggtatggtatttcagacgtcttgacttgcccagtaacttacctggattgattctttcttctgagcactgtaacaagtattcaaagattccccgccactgtatgtctgaagatagcaaatatgttttaatacaaatgttatgggacaatatgaagttacatcaggatccgggacagcccttgtacattctctggaatgcacacacccaaaaatatccaatggtccatttattgcaaaaaagtgataactcatttaaccaggaactgttgaaaagtatggtaaaaagcattaaaatgaatgatgtctatggaccaatgagtcagattttagagacactgaataagtgtccacattttaaaagacagaggagtttatacagagaaatactatttctctcacttgtggcactgggaagagaaaacattgatatagatgcttttgataaagagtacaagatggcatacgatcgtctcacacctagtcaagtcaagagtacacacaactgtgatagaccaccaagtacaggggtgatggaatgtcgaaaaacctttggagaaccttatctt

SEQ ID NO: 3705 - DNA, 5718 bp, Homo sapiens
  source 1..5718: mol_type = genomic DNA
atgattgaagacaaggggcctcgtgttgctgactactttgttgtagcaggattaactgatgtttcaaagcctctagaagaagaaattcacttcaatgatgcttgtcataaagtagctaaaccaaaagaacctattacagatgtttcagttattatcaaatctcttggggaggaagtcccacaggattatatctgtattgatgttaccccaactggattgtcagctgatcttaataatggaagtcttgtggggccacagatttacctttgctatagaagaggaagagataagcctccacttacagatctgggggttttatatgactggaaagaaagattgaaacagggttgtgaaattattcagagtactccctatgggcgccccgcaaatattagtgggagtacctcatcacaaagaatttatatcacttaccgaagagcctctgaaaacatgactcagaatacgttggctgtcactgacatatgtattattatacccagtaaaggagaaagcccaccacacacgttctgcaaagtcgacaagaatctcaataacagtatgtggggatcagcagtatacttgtgttataaaaaatcggtggcaaagacgaacactgtatcttacaaagctggcctaatttgtagatatcctcaagaagattatgagtcattctcactaccggaatctgttcctctattttgtttaccaatgggtgcaaccattgaatgttggccatcaaatagcaaataccctctgcctgtattttctacttttgttttaactggagcctcagctgaaaaggtttatggtgctgctattcagttttatgaaccatactctgaggagaatctcacagaaaagcagagacttcttttgggtttaacatcagcagatgggaagtctgatagttccaaaacaattcatactaacaaatgcatctgtcttctttctcactggcctttttttgatgcattcaggaagtttctgacttttctgtatcgttattccatctctgggcctcatgtccttccaattgagaagcatatttctcattttatgcataaagttccttttccatctcctcagagaccacggattttagttcagttatcaccacatgataatctgattctcagtcagcctgtgtcttcacctcttccactaagtggtggcaagttttcaacactactgcagaatttaggccctgaaaatgctgtgacactactggtgtttgcagtaacagaacataaaattcttatccattccctacggccatccgtgcttactagtgtgacagaagcattagtgtctatgattttccctttccactggccatgcccgtatgttcctctctgcccactggctttagcagatgtcttgagtgcaccatgtccattcatagtagggattgattcaagatactttgatctctatgatcctccaccagatgtcagttgtgttgatgtagataccaacactatttctcaaattggtgacaagaaaaatgtagcctggaagatacttccaaagaagccatgtaaaaatctgatgaacacactgaataatttgcatcagcaattggcaaaattgcagcagagaccgagagatgatggactcatggatttagcaataaatgactatgattttaattctggaaagaggttgcacatgatagatttggaaatccaagaggcatttttgtttttcatggcctctattttaaaaggttacagatcatacttaaggccaataacacaagccccatctgagacagccacagatgcagcctctctctttgccctacaagctttcttaagaagccgggaccggtcacatcaaaaattctataacatgatgaccaaaacacaaatgtttattcgcttcattgaagaatgttcttttgttagtgacaaagatgcaagcctggcattttttgatgattgtgtagataaagtggatatggacaagagcggtgaagtacgacttatagaactggatgaatctttcaaaagtgaacacactgtttttgtaacaccacctgagatcccccacctacccaatggtgaagaaccccctttacagtacagctataatggatttccagttcttaggaacaatttatttgaaagacctgaaggatttctacaagcaaagaagaacaaattgccttcaaaatcaagtagtcctaatagccctttgcccatgttcagaagaacaaaacaggaaattaaatcagcccataaaattgcaaagaggtactcttccatccctcagatgtggtctaggtgtctactgcgccactgttatggactgtggtttatttgtctcccagcttatgtgaaagtctgtcattcaaaagtcagggctctgaaaacagcatatgatgtgcttaaaaaaatgcagtcaaagaagatggatccacctgatgaggtatgctaccgcattcttatgcaactctgtggacaatatgatcagccagtgcttgcagttcgagtgctttttgaaatgcagaaagctggtattgaccccaatgccattacttatggttattataataaggctgttttggaaagtacctggccttcaagaagtcgtagtggctattttctttggacaaaagtaagaaatgttgttttaggagtaacacagttcaaaagagctttaaagaagcatgcacacttatcacaaacaactctctcagatggcagtgacctggatgctgttagtcatggcagcatggatagtggtcatgggacacacactgtggagcaggcaccttttaatacgggtttaatcaaagtatatgctactgatgatagatctagtacaggtggccagtctgatcttggatataattcattatctaaagatgaagttagaagaggggatacatctactgaagacattcaagaagaaaaagataaaaaagggagtgattgtagttccttgtcagagagtgagagtacaaaaggaagtgctgattgccttcctaagctcagttatcaaaattcttccagtatcgttcgcctcactggtacaagtaacaacagtgctggtaaaatatcaggagaaagcatggaaagcacacctgagctgctcttaatatcatctcttgaagatacaaatgaaacacgaaacattcaaagtagatgcttcaggaaaagacataaaagtgacaatgaaactaatttgcagcagcaagtggtctggggaaatagaaaccgtaatcttagtggaggggtactgatgggatttatgctcaatagaattaaccaggaagcaacccctggagatatagttgaaaaattgggagctgatgcaaaaattctttcaaatgttatctcaaaaagcacgagaccaaatactcttgatattgggaagccacctttaagatcaaaaagagacagtctagaaaaggaatctagtgatgatgatacaccttttgatggttctaactatttggcagataaagtggattctcctgttatttttgacttagaagacttagacagtgaaacagatgtatcaaaagcaggatgtgttgctacacaaaatcccaagaggattcaacgtatgaacagcagcttttcagtaaaaccttttgaaaaaactgatgtcgcaacaggatttgatcccctctctcttttggttgctgagactgaacagcagcaaaaagaagaagaggaggaggatgaagatgatagcaaaagcatttcaacaccatctgctaggcgtgatttagctgaagaaattgtgatgtatatgaataacatgagcagtcctttgacaagtcgtacaccaagcattgatttacaacgggcatgtgatgataaattaaataagaaaagtccaccattggtcaaggcatgcagaagatctagtctgcctcctaattctcctaagccagtgagacttaccaaatctaaaagttacacaaaaagtgaggagaaaccaagggatagactttggtcttctccagccttctcacctacttgcccatttagggaagaatctcaggatacattaacccactcatcaccttcatttaacttagatacactactagtacctaaactagatgttctaagaaacagtatgttcactgctggaaaaggagttgcagagaaagcaagcaaatggtattcaagattcaccatgtacaccacatcatctaaggatcaaagttctgatcgtaccagtctttcttcagtgggagcccaggattctgaatctacctctttaacagatgaagatgtctgccatgagttggaaggacctatctcctctcaagagaccagtgctacttcagggactaagagaattgatctcagccgaataagcctggaaagttctgcatccttggaaggatctctgtcgaagtttgccttacctgggaaatcagaagtgacatcttccttcaacgcgagtaatacaaatatcttccagaactatgcaatggaggttctcatctcaagttgctctcggtgtagaacttgtgattgtcttgtccatgatgaggaaatcatggctggctggacagcagatgattcaaatctcaatactacatgcccattctgtggcaatatcttcttaccctttctgaatatagaaataagagatttaagacgacctggaagatactttctaaagtcaagcccatcaacagaaaatatgcactttccatcctccatttcaagtcagacgaggcagtcttgcatttcaacatcagcctctggtcttgacacatctgctctctctgttcaagggaattttgatctaaatagcaaatctaaactgcaggaaaatttttgcacccgaagtattcagatccctgctaatagatcaaaaacagctatgtctaaatgtccaatatttccaatggccaggagtattagtacttctggccccttggataaggaagatactggaagacagaagctcatttctacaggcagcctgccagctactttacaaggagctacagattctttaggtttagaatggcaccttccaagtcccgatcctgtcactgttccgtatcttagtcctttagtggtatggaaagaacttgaaagcttattggaaaatgaaggtgatcatgcaataacagtagcagactttgtggaccatcatccaattgttttttggaacctggtatggtatttcagacgtcttgacttgcccagtaacttacctggattgattctttcttctgagcactgtaacaagtattcaaagattccccgccactgtatgtctgaagatagcaaatatgttttaatacaaatgttatgggacaatatgaagttacatcaggatccgggacagcccttgtacattctctggaatgcacacacccaaaaatatccaatggtccatttattgcaaaaaagtgataactcatttaaccaggaactgttgaaaagtatggtaaaaagcattaaaatgaatgatgtctatggaccaatgagtcagattttagagacactgaataagtgtccacattttaaaagacagaggagtttatacagagaaatactatttctctcacttgtggcactgggaagagaaaacattgatatagatgcttttgataaagagtacaagatggcatacgatcgtctcacacctagtcaagtcaagagtacacacaactgtgatagaccaccaagtacaggggtgatggaatgtcgaaaaacctttggagaaccttatctt

SEQ ID NO: 3706 - DNA, 1677 bp, Homo sapiens
  source 1..1677: mol_type = genomic DNA
atgggagacccggggtcggagataatagaatctgtccctccagctggccctgaggcatctgagtcaacaacggatgaaaatgaagacgacattcagtttgtcagtgaaggaccattacgacctgttcttgaatacattgatctggtcagcagtgatgatgaagagcctagcacctcttatactgatagaatgcctgaatctaaggtgccatcctctgagaatcatcgcccagaaatgtgctctagctgcaatgttcctcttcccattggagatagcagctccttctctgggagttgttccagcagtccagaaaggatagtttctcaaacttcctctgttgagaacccattggagaaccagaaaaatgatcaaaataattcagatactaagatctctgagacagagacccttaaatcatcacagaattttcagactctgccttcatctccacttctggtcccccaagaatctttggcctcttctgaggtcaaagagaatttacgtatagattcttcttcagcttcacagcatggacgggatgccatcctctatctccagacacaagtagctgaaatgtcccgagtgatacgtgatctgcagtccaggagctgttttagatttcatcattctaggccaagtgagaactcctcagttccttgggacatctccacctctaaagaggaaaatttatccacagttgaagaagaaactgattacaaatcaccatcagctgatgacaaagggcagccatctgaccccagccaatctagtttcacaggtcttttgaagagaatggaacaaagaggtgttataaaaagggtgacattacaatctgaagcggagtcatgtgaagggaaacctgattgtgtgacttctaaaaaacgtttggttcctccattgcatcctcttctgagaattgccaccactgaggtttttaaagaccctgctgattgccatccttcttccttcatgggacacagggtatatcctgtggccaaggacacctctcctttccaaccaaacccaccagctgaaggccccattgtagaagcattagaacacagcaaaagaggaaacacaacatcccctctagattctacctcaaaagaaatggaggtcatgggttgtaggttttaccacgctgcctccattgcagcccgagctgctagctacatggcctatatgactcaatatcagcgtaaactctgggaagacatggaagatctggttcatgacccagaatttgatcgtggaaaagcaagatgcataatatctgatggtatggatgcaggcctttggcaactttgtactactagggacataatggactctgtagtcagagttatggccatggccatagactatagacggcaggcctggcttcgacttacatctctcactaagaaaacccaggagaagatctcccacttgccctttgatggtacttccctttttggacaagatgtgaaagctgttgttgcagaagacaacaatataaaagaaaatgactataaagatcacaaatactataatcagcatcgatacttttatagtcatgatcagaaagcacattatcacaatagaggatactccaaaggggattggtacaaacctcgaaaccacccctatagatatagaaagaagggagactctccagaacgccatgggtacaagaat

SEQ ID NO: 3707 - DNA, 3039 bp, Homo sapiens
  source 1..3039: mol_type = genomic DNA
atgggagacccggggtcggagataatagaatctgtccctccagctggccctgaggcatctgagtcaacaacggatgaaaatgaagacgacattcagtttgtcagtgaaggaccattacgacctgttcttgaatacattgatctggtcagcagtgatgatgaagagcctagcacctcttatactgatgagaatattaaacgtaaagaccatattgattatcagaaggataaagttgctttaactctggctcgtctagcccgccatgttgaagtggagaaacagcagaaagaagagaagaatagagcattcagagaaaaaattgattttcagcatgctcatgggttacaagaattggaatttattcgaggacattctgatacagaagcagcaagactgtgtgtggaccagtggctaaaaatgccaggactcaaaacaggcacaattaattgtggaacaaaaagttcattccgaagaggaggccacacgtgggtgtctgggaaaccaattttatgtcctataatgcactgtaacaaggagtttgacaatgggcaccttctcttaggacatttgaaaaggttcgatcactctccatgtgatccaacaattacactacatggacctttcttcagctcctttgcttgtgtagtatgttataaaaaatttgttactcaacaacaatatagagatcacctttttgataaggaagccacagatgatggacataacaacaaccttcttcctcagattattcagtgttttgcatgtccaaattgcttccttctttttagcagaaaggaggagtgttcaaagcatatgtctggaaagaatcatttccatcagagtttcaaactgggtgataacaaaggaattgcacatccaatatctttcccatcttttgcaaagaaacttttgatctctctgtgcaaagatgttccctttcaagttaagtgtgtggcctgccacaagacactgcgttcccacatggagctcactgcccatttcagagttcattgtcgaaatgctggacctgtagctgtagctgagaagagcattacccaggttgcagagaaattcatattaagaggttattgtccagattgcaatcaagtctttgtggatgaaaccagcacccaaaatcataagcagaattcaggacacaaagtccgagtcattaactcagtggaagaatcagtcttactctattgccacagcagcgaagggaacaaggatccttcttctgacttgcatttattgttggatcaatcaaaattttcatcacttaaaagaaccatgtctattaaagaatctagctcactggagtgcattgccattccaaaaaagaagatgaatttaaaagataaaagccatgaaggtgttgcttgtgtccagaaagaaaaatcagtagttaaaacctggttctgtgaatgcaatcagcgattcccaagtgaagatgcagtagaaaagcatgttttctcagcaaacacaatgggttataaatgtgtggtctgtggaaaggtatgtgatgattcaggggtcattcgtttacacatgagccggattcacggaggggcacatttaaataactttcttttctggtgtcggacatgcaaaaaggagttaacaaggaaagatactatcatggcacatgtgactgaatttcataatggacacagatatttttatgagatggatgaggtagaaggtgaaactttgccatcatcctctacaacattggataatttgactgctaacaagccttcatcagctattactgttattgatcattccccggcaaatagttctccgaggggtaaatggcaatgccggatttgtgaagatatgtttgattcccaggaatatgtaaaacagcactgcatgtctttggcaagccacaagtttcatagatacagctgtgctcactgcagaaagccttttcataagatagaaacattgtaccgacattgccaagatgagcatgacaatgagataaagattaaatacttctgtgggctttgtgatcttatctttaatgtggaagaagcatttctgagtcattatgaggagcaccacagcatagattatgtatttgtgtcagaaaaaactgaaacttcaattaaaaccgaagatgattttccagtaatagagaccagtaaccagttaacttgtggttgccgtgagagttacatctgtaaagtcaacagaaaagaagattatagcagatgtctccaaatcatgctggataaaggaaaactgtggtttcgctgcagtttatgttcggcaacagcacagaatttaaccgacatgaacactcatatccatcaagtgcacaaagaaaagagtgatgaggaggagcagcagtatgtaatcaagtgtggcacctgcaccaaagcatttcatgatcctgagagtgcacagcagcatttccatagaaaacattgcttcttacagaaacccagtgtggctcattttggatctgaaaaatcaaacctgtacaagtttactgctagtgcctcacatacagagagaaaactgaaacaggcaataaactattcaaaaagtttagacatggagaaaggagttgagaatgacctaagctatcagaatataggaggaaacaccaattggaagcctccgctcaactgtaagatttataactacctgaacaggattggatgcttcttccttcatcctcgctgtagtaaaagaaaagatgctgctgattttgccatatgtatgcatgctggccgtctagatgaacaactacccaagcaaattcctttcaccatcctctcaggagatcaaggttttctggagctagagaatcaatttaagaagactcagaggccagctcatatactaaaccctcaccacttagagggagatatgatgtgtgccttgttaaatagcatatctgataccaccaaagaatgtgacagtgatgataacatgggtgccaaaaatacttcaataggagaagaatttatatccacagaagatgtggaattagaagaagctattagaagaagtcttgaggaaatg

SEQ ID NO: 3708 - DNA, 3183 bp, Homo sapiens
  source 1..3183: mol_type = genomic DNA
atgggagacccggggtcggagataatagaatctgtccctccagctggccctgaggcatctgagtcaacaacggatgaaaatgaagacgacattcagtttgtcagtgaaggaccattacgacctgttcttgaatacattgatctggtcagcagtgatgatgaagagcctagcacctcttatactgatgagaatattaaacgtaaagaccatattgattatcagaaggataaagttgctttaactctggctcgtctagcccgccatgttgaagtggagaaacagcagaaagaagagaagaatagagcattcagagaaaaaattgattttcagcatgctcatgggttacaagaattggaatttattcgaggacattctgatacagaagcagcaagactgtgtgtggaccagtggctaaaaatgccaggactcaaaacaggcacaattaattgtggaacaaaaagttcattccgaagaggaggccacacgtgggtgtctgggaaaccaattttatgtcctataatgcactgtaacaaggagtttgacaatgggcaccttctcttaggacatttgaaaaggttcgatcactctccatgtgatccaacaattacactacatggacctttcttcagctcctttgcttgtgtagtatgttataaaaaatttgttactcaacaacaatatagagatcacctttttgataaggaagccacagatgatggacataacaacaaccttcttcctcagattattcagtgttttgcatgtccaaattgcttccttctttttagcagaaaggaggagtgttcaaagcatatgtctggaaagaatcatttccatcagagtttcaaactgggtgataacaaaggaattgcacatccaatatctttcccatcttttgcaaagaaacttttgatctctctgtgcaaagatgttccctttcaagttaagtgtgtggcctgccacaagacactgcgttcccacatggagctcactgcccatttcagagttcattgtcgaaatgctggacctgtagctgtagctgagaagagcattacccaggttgcagagaaattcatattaagaggttattgtccagattgcaatcaagtctttgtggatgaaaccagcacccaaaatcataagcagaattcaggacacaaagtccgagtcattaactcagtggaagaatcagtcttactctattgccacagcagcgaagggaacaaggatccttcttctgacttgcatttattgttggatcaatcaaaattttcatcacttaaaagaaccatgtctattaaagaatctagctcactggagtgcattgccattccaaaaaagaagatgaatttaaaagataaaagccatgaaggtgttgcttgtgtccagaaagaaaaatcagtagttaaaacctggttctgtgaatgcaatcagcgattcccaagtgaagatgcagtagaaaagcatgttttctcagcaaacacaatgggttataaatgtgtggtctgtggaaaggtatgtgatgattcaggggtcattcgtttacacatgagccggattcacggaggggcacatttaaataactttcttttctggtgtcggacatgcaaaaaggagttaacaaggaaagatactatcatggcacatgtgactgaatttcataatggacacagatatttttatgagatggatgaggtagaaggtgaaactttgccatcatcctctacaacattggataatttgactgctaacaagccttcatcagctattactgttattgatcattccccggcaaatagttctccgaggggtaaatggcaatgccggatttgtgaagatatgtttgattcccaggaatatgtaaaacagcactgcatgtctttggcaagccacaagtttcatagatacagctgtgctcactgcagaaagccttttcataagatagaaacattgtaccgacattgccaagatgagcatgacaatgagataaagattaaatacttctgtgggctttgtgatcttatctttaatgtggaagaagcatttctgagtcattatgaggagcaccacagcatagattatgtatttgtgtcagaaaaaactgaaacttcaattaaaaccgaagatgattttccagtaatagagaccagtaaccagttaacttgtggttgccgtgagagttacatctgtaaagtcaacagaaaagaagattatagcagatgtctccaaatcatgctggataaaggaaaactgtggtttcgctgcagtttatgttcggcaacagcacagaatttaaccgacatgaacactcatatccatcaagtgcacaaagaaaagagtgatgaggaggagcagcagtatgtaatcaagtgtggcacctgcaccaaagcatttcatgatcctgagagtgcacagcagcatttccatagaaaacattgcttcttacagaaacccagtgtggctcattttggatctgaaaaatcaaacctgtacaagtttactgctagtgcctcacatacagagagaaaactgaaacaggcaataaactattcaaaaagtttagacatggagaaaggagttgagaatgacctaagctatcagaatatagaggaagaaattgttgagcttccagatttggattacctgcgaaccatgactcatatagtctttgtagattttgataactggtcaaacttttttggtcatctaccagggcatctaaaccaaggaacatttatttggggctttcaaggaggaaacaccaattggaagcctccgctcaactgtaagatttataactacctgaacaggattggatgcttcttccttcatcctcgctgtagtaaaagaaaagatgctgctgattttgccatatgtatgcatgctggccgtctagatgaacaactacccaagcaaattcctttcaccatcctctcaggagatcaaggttttctggagctagagaatcaatttaagaagactcagaggccagctcatatactaaaccctcaccacttagagggagatatgatgtgtgccttgttaaatagcatatctgataccaccaaagaatgtgacagtgatgataacatgggtgccaaaaatacttcaataggagaagaatttatatccacagaagatgtggaattagaagaagctattagaagaagtcttgaggaaatg

SEQ ID NO: 3709 - DNA, 2301 bp, Homo sapiens
  source 1..2301: mol_type = genomic DNA
atgagctttgatccaaaccttctccacaacaatggacataatgggtaccctaatggtacttcagcagcactgcgtgaaactggggttattgaaaaactgttaacctcttacggatttattcagtgttcagaacgtcaagctagacttttcttccactgttcacagtataatggcaacctgcaagacttaaaagtaggagatgatgttgaatttgaagtatcatcggaccgacggactgggaaacccattgctgttaaactggtgaagataaaacaagaaatcctccctgaagaacgaatgaatggacaagaagtgttttatctgacttacacccctgaagatgtcgaagggaacgttcagctggaaactggagataaaataaactttgtaattgataacaataaacatactggtgctgtaagtgctcgcaacattatgctgttgaaaaagaaacaagcccgctgtcagggagtagtttgtgccatgaaggaggcatttggctttattgaaagaggtgatgttgtaaaagagatattctttcactatagtgaatttaagggtgacttagaaaccttacagcctggcgatgatgtggaattcacaatcaaggacagaaatggtaaagaagttgcaacagatgtcagactattgcctcaaggaacagtcatttttgaagatatcagcattgaacattttgaaggaactgtaaccaaagttatcccaaaagtacccagtaaaaaccagaatgacccattgccaggacgcatcaaagttgactttgtgatccctaaagaacttccctttggagacaaagatacgaaatccaaggtgaccctgctggaaggtgaccatgttaggtttaatatttcaacagaccgacgtgacaaattagagcgagcaaccaatatagaagttctgtcaaatacatttcagttcactaatgaagcccgagaaatgggtgtgattgctgccatgagagatggttttggtttcatcaagtgtgtggatcgtgatgttcgtatgttcttccacttcagtgaaattctggatgggaaccagctccatattgcagatgaagtagagtttactgtggttcctgatatgctctctgctcaaagaaatcatgctattaggattaaaaaacttcccaagggcacggtttcatttcattcccattcagatcaccgttttctgggcacggtagaaaaagaagccactttttccaatcctaaaaccactagcccaaataaaggcaaagagaaggaggctgaggatggcattattgcttatgatgactgtggggtgaaactgactattgcttttcaagccaaggatgtggaaggatctacttctcctcaaataggagataaggttgaatttagtattagtgacaaacagaggcctggacagcaggttgcaacttgtgtgcgacttttaggtcgtaattctaactccaagaggctcttgggttatgtggcaactctgaaggataattttggatttattgaaacagccaatcatgataaggaaatctttttccattacagtgagttctctggtgatgttgatagcctggaactgggggacatggtcgagtatagcttgtccaaaggcaaaggcaacaaagtcagtgcagaaaaagtgaacaaaacacactcagtgaatggcattactgaggaagctgatcccaccatttactctggcaaagtaattcgccccctgaggagtgttgatccaacacagactgagtaccaaggaatgattgagattgtggaggagggcgatatgaaaggtgaggtctatccatttggcatcgttgggatggccaacaaaggggattgcctgcagaaaggggagagcgtcaagttccaattgtgtgtcctgggccaaaatgcacaaactatggcttacaacatcacacccctgcgcagggccacagtggaatgtgtgaaagatcagtttggcttcattaactatgaagtaggagatagcaagaagctctttttccatgtgaaagaagttcaggatggcattgagctacaggcaggagatgaggtggagttctcagtgattcttaatcagcgcactggcaagtgcagcgcctgtaatgtttggcgagtctgtgagggccccaaggctgttgcagctcctcgacctgatcggttggtcaatcgcttgaagaatatcactctggatgatgccagtgctcctcgcctaatggttcttcgtcagccaaggggaccagataactcaatggggtttggtgcagaaagaaagatccgtcaagctggtgtcattgac

SEQ ID NO: 3710 - DNA, 2532 bp, Homo sapiens
  source 1..2532: mol_type = genomic DNA
atggagaacgtttttactgtgtcatcagatcctcatccctctcctgcagcccctccttcactttctttacccttatcttcatcttctacctcatctgggactaaaaaacaaaagaggaccccaacttatcagagatctatgagctttgatccaaaccttctccacaacaatggacataatgggtaccctaatggtacttcagcagcactgcgtgaaactggggttattgaaaaactgttaacctcttacggatttattcagtgttcagaacgtcaagctagacttttcttccactgttcacagtataatggcaacctgcaagacttaaaagtaggagatgatgttgaatttgaagtatcatcggaccgacggactgggaaacccattgctgttaaactggtgaagataaaacaagaaatcctccctgaagaacgaatgaatggacaagttgtgtgcgctgttcctcacaacttagagagtaaatctccagctgccccgggtcagagtccaacagggagtgtatgctacgaacgtaatggggaagtgttttatctgacttacacccctgaagatgtcgaagggaacgttcagctggaaactggagataaaataaactttgtaattgataacaataaacatactggtgctgtaagtgctcgcaacattatgctgttgaaaaagaaacaagcccgctgtcagggagtagtttgtgccatgaaggaggcatttggctttattgaaagaggtgatgttgtaaaagagatattctttcactatagtgaatttaagggtgacttagaaaccttacagcctggcgatgatgtggaattcacaatcaaggacagaaatggtaaagaagttgcaacagatgtcagactattgcctcaaggaacagtcatttttgaagatatcagcattgaacattttgaaggaactgtaaccaaagttatcccaaaagtacccagtaaaaaccagaatgacccattgccaggacgcatcaaagttgactttgtgatccctaaagaacttccctttggagacaaagatacgaaatccaaggtgaccctgctggaaggtgaccatgttaggtttaatatttcaacagaccgacgtgacaaattagagcgagcaaccaatatagaagttctgtcaaatacatttcagttcactaatgaagcccgagaaatgggtgtgattgctgccatgagagatggttttggtttcatcaagtgtgtggatcgtgatgttcgtatgttcttccacttcagtgaaattctggatgggaaccagctccatattgcagatgaagtagagtttactgtggttcctgatatgctctctgctcaaagaaatcatgctattaggattaaaaaacttcccaagggcacggtttcatttcattcccattcagatcaccgttttctgggcacggtagaaaaagaagccactttttccaatcctaaaaccactagcccaaataaaggcaaagagaaggaggctgaggatggcattattgcttatgatgactgtggggtgaaactgactattgcttttcaagccaaggatgtggaaggatctacttctcctcaaataggagataaggttgaatttagtattagtgacaaacagaggcctggacagcaggttgcaacttgtgtgcgacttttaggtcgtaattctaactccaagaggctcttgggttatgtggcaactctgaaggataattttggatttattgaaacagccaatcatgataaggaaatctttttccattacagtgagttctctggtgatgttgatagcctggaactgggggacatggtcgagtatagcttgtccaaaggcaaaggcaacaaagtcagtgcagaaaaagtgaacaaaacacactcagtgaatggcattactgaggaagctgatcccaccatttactctggcaaagtaattcgccccctgaggagtgttgatccaacacagactgagtaccaaggaatgattgagattgtggaggagggcgatatgaaaggtgaggtctatccatttggcatcgttgggatggccaacaaaggggattgcctgcagaaaggggagagcgtcaagttccaattgtgtgtcctgggccaaaatgcacaaactatggcttacaacatcacacccctgcgcagggccacagtggaatgtgtgaaagatcagtttggcttcattaactatgaagtaggagatagcaagaagctctttttccatgtgaaagaagttcaggatggcattgagctacaggcaggagatgaggtggagttctcagtgattcttaatcagcgcactggcaagtgcagcgcctgtaatgtttggcgagtctgtgagggccccaaggctgttgcagctcctcgacctgatcggttggtcaatcgcttgaagaatatcactctggatgatgccagtgctcctcgcctaatggttcttcgtcagccaaggggaccagataactcaatggggtttggtgcagaaagaaagatccgtcaagctggtgtcattgac

SEQ ID NO: 3711 - DNA, 2439 bp, Homo sapiens
  source 1..2439: mol_type = genomic DNA
atggagaacgtttttactgtgtcatcagatcctcatccctctcctgcagcccctccttcactttctttacccttatcttcatcttctacctcatctgggactaaaaaacaaaagaggaccccaacttatcagagatctatgagctttgatccaaaccttctccacaacaatggacataatgggtaccctaatggtacttcagcagcactgcgtgaaactggggttattgaaaaactgttaacctcttacggatttattcagtgttcagaacgtcaagctagacttttcttccactgttcacagtataatggcaacctgcaagacttaaaagtaggagatgatgttgaatttgaagtatcatcggaccgacggactgggaaacccattgctgttaaactggtgaagataaaacaagaaatcctccctgaagaacgaatgaatggacaagaagtgttttatctgacttacacccctgaagatgtcgaagggaacgttcagctggaaactggagataaaataaactttgtaattgataacaataaacatactggtgctgtaagtgctcgcaacattatgctgttgaaaaagaaacaagcccgctgtcagggagtagtttgtgccatgaaggaggcatttggctttattgaaagaggtgatgttgtaaaagagatattctttcactatagtgaatttaagggtgacttagaaaccttacagcctggcgatgatgtggaattcacaatcaaggacagaaatggtaaagaagttgcaacagatgtcagactattgcctcaaggaacagtcatttttgaagatatcagcattgaacattttgaaggaactgtaaccaaagttatcccaaaagtacccagtaaaaaccagaatgacccattgccaggacgcatcaaagttgactttgtgatccctaaagaacttccctttggagacaaagatacgaaatccaaggtgaccctgctggaaggtgaccatgttaggtttaatatttcaacagaccgacgtgacaaattagagcgagcaaccaatatagaagttctgtcaaatacatttcagttcactaatgaagcccgagaaatgggtgtgattgctgccatgagagatggttttggtttcatcaagtgtgtggatcgtgatgttcgtatgttcttccacttcagtgaaattctggatgggaaccagctccatattgcagatgaagtagagtttactgtggttcctgatatgctctctgctcaaagaaatcatgctattaggattaaaaaacttcccaagggcacggtttcatttcattcccattcagatcaccgttttctgggcacggtagaaaaagaagccactttttccaatcctaaaaccactagcccaaataaaggcaaagagaaggaggctgaggatggcattattgcttatgatgactgtggggtgaaactgactattgcttttcaagccaaggatgtggaaggatctacttctcctcaaataggagataaggttgaatttagtattagtgacaaacagaggcctggacagcaggttgcaacttgtgtgcgacttttaggtcgtaattctaactccaagaggctcttgggttatgtggcaactctgaaggataattttggatttattgaaacagccaatcatgataaggaaatctttttccattacagtgagttctctggtgatgttgatagcctggaactgggggacatggtcgagtatagcttgtccaaaggcaaaggcaacaaagtcagtgcagaaaaagtgaacaaaacacactcagtgaatggcattactgaggaagctgatcccaccatttactctggcaaagtaattcgccccctgaggagtgttgatccaacacagactgagtaccaaggaatgattgagattgtggaggagggcgatatgaaaggtgaggtctatccatttggcatcgttgggatggccaacaaaggggattgcctgcagaaaggggagagcgtcaagttccaattgtgtgtcctgggccaaaatgcacaaactatggcttacaacatcacacccctgcgcagggccacagtggaatgtgtgaaagatcagtttggcttcattaactatgaagtaggagatagcaagaagctctttttccatgtgaaagaagttcaggatggcattgagctacaggcaggagatgaggtggagttctcagtgattcttaatcagcgcactggcaagtgcagcgcctgtaatgtttggcgagtctgtgagggccccaaggctgttgcagctcctcgacctgatcggttggtcaatcgcttgaagaatatcactctggatgatgccagtgctcctcgcctaatggttcttcgtcagccaaggggaccagataactcaatggggtttggtgcagaaagaaagatccgtcaagctggtgtcattgac

SEQ ID NO: 3712 - DNA, 2394 bp, Homo sapiens
  source 1..2394: mol_type = genomic DNA
atgagctttgatccaaaccttctccacaacaatggacataatgggtaccctaatggtacttcagcagcactgcgtgaaactggggttattgaaaaactgttaacctcttacggatttattcagtgttcagaacgtcaagctagacttttcttccactgttcacagtataatggcaacctgcaagacttaaaagtaggagatgatgttgaatttgaagtatcatcggaccgacggactgggaaacccattgctgttaaactggtgaagataaaacaagaaatcctccctgaagaacgaatgaatggacaagttgtgtgcgctgttcctcacaacttagagagtaaatctccagctgccccgggtcagagtccaacagggagtgtatgctacgaacgtaatggggaagtgttttatctgacttacacccctgaagatgtcgaagggaacgttcagctggaaactggagataaaataaactttgtaattgataacaataaacatactggtgctgtaagtgctcgcaacattatgctgttgaaaaagaaacaagcccgctgtcagggagtagtttgtgccatgaaggaggcatttggctttattgaaagaggtgatgttgtaaaagagatattctttcactatagtgaatttaagggtgacttagaaaccttacagcctggcgatgatgtggaattcacaatcaaggacagaaatggtaaagaagttgcaacagatgtcagactattgcctcaaggaacagtcatttttgaagatatcagcattgaacattttgaaggaactgtaaccaaagttatcccaaaagtacccagtaaaaaccagaatgacccattgccaggacgcatcaaagttgactttgtgatccctaaagaacttccctttggagacaaagatacgaaatccaaggtgaccctgctggaaggtgaccatgttaggtttaatatttcaacagaccgacgtgacaaattagagcgagcaaccaatatagaagttctgtcaaatacatttcagttcactaatgaagcccgagaaatgggtgtgattgctgccatgagagatggttttggtttcatcaagtgtgtggatcgtgatgttcgtatgttcttccacttcagtgaaattctggatgggaaccagctccatattgcagatgaagtagagtttactgtggttcctgatatgctctctgctcaaagaaatcatgctattaggattaaaaaacttcccaagggcacggtttcatttcattcccattcagatcaccgttttctgggcacggtagaaaaagaagccactttttccaatcctaaaaccactagcccaaataaaggcaaagagaaggaggctgaggatggcattattgcttatgatgactgtggggtgaaactgactattgcttttcaagccaaggatgtggaaggatctacttctcctcaaataggagataaggttgaatttagtattagtgacaaacagaggcctggacagcaggttgcaacttgtgtgcgacttttaggtcgtaattctaactccaagaggctcttgggttatgtggcaactctgaaggataattttggatttattgaaacagccaatcatgataaggaaatctttttccattacagtgagttctctggtgatgttgatagcctggaactgggggacatggtcgagtatagcttgtccaaaggcaaaggcaacaaagtcagtgcagaaaaagtgaacaaaacacactcagtgaatggcattactgaggaagctgatcccaccatttactctggcaaagtaattcgccccctgaggagtgttgatccaacacagactgagtaccaaggaatgattgagattgtggaggagggcgatatgaaaggtgaggtctatccatttggcatcgttgggatggccaacaaaggggattgcctgcagaaaggggagagcgtcaagttccaattgtgtgtcctgggccaaaatgcacaaactatggcttacaacatcacacccctgcgcagggccacagtggaatgtgtgaaagatcagtttggcttcattaactatgaagtaggagatagcaagaagctctttttccatgtgaaagaagttcaggatggcattgagctacaggcaggagatgaggtggagttctcagtgattcttaatcagcgcactggcaagtgcagcgcctgtaatgtttggcgagtctgtgagggccccaaggctgttgcagctcctcgacctgatcggttggtcaatcgcttgaagaatatcactctggatgatgccagtgctcctcgcctaatggttcttcgtcagccaaggggaccagataactcaatggggtttggtgcagaaagaaagatccgtcaagctggtgtcattgac

SEQ ID NO: 3713 - DNA, 1566 bp, Homo sapiens
  source 1..1566: mol_type = genomic DNA
atggctgtcagccacctgccaaccatggtccaggaatcggtgaccttcaaggatgtggctatactgttcacccaggaagagtgggggcagctgagccccgcccagagggccctgtacagggacgtgatgctggagaactacagcaacctggtctcactgggactcttaggacccaaaccagatacgttttcccagctagaaaaaagggaagtgtggatgccagaggacacccctggaggcttctgtcttgactggatgactatgcctgccagtaagaaatctactgtcaaggcagagattcctgaagaagaattggatcaatggacaataaaggaaagattcagtagcagtagtcactggaagtgtgctagcctgctggagtggcaatgtggaggccaggagatcagtttgcagcgagtggtactcactcaccccaacaccccatcacaggaatgtgatgaatccgggagcactatgagctcatctcttcacagtgatcaaagtcagggatttcaacctagcaaaaatgcctttgagtgtagtgagtgtggaaaagtcttctctaagagttcaactcttaataaacatcagaaaattcataatgaaaaaaatgcaaatcagaaaattcatattaaggagaaaagatatgaatgtagagaatgtgggaaagcctttcaccagagtacgcaccttatccatcaccaaagaattcacactggcgagaaaccctatgaatgtaaggaatgtggcaaggccttctcagtgagctcctcacttacgtaccatcagaaaattcatactggagagaagccttttgaatgcaacttatgtggaaaagcttttatccgaaatatacaccttgcccatcatcatagaatacatactggagagaaaccttttaaatgtaacatttgtgaaaaagcctttgtgtgcagggcacaccttaccaaacaccagaatatccacagtggagagaaaccctataaatgcaatgaatgtggaaaagcctttaatcagagtacaagtttccttcagcatcagagaattcacactggagagaaaccctttgaatgtaatgaatgtgggaaggccttcagggtgaactcttcccttactgaacatcagagaattcatactggagagaaaccttataaatgtaatgaatgtgggaaagctttcagggataattcatcctttgcacgacatcggaaaattcacactggagagaaaccttacagatgtggcttgtgtgagaaagcctttcgggaccaatcagcactagcccaacatcagagaattcatactggggaaaaaccttatacatgtaacatatgtgaaaaagccttcagtgaccattcagcccttacccaacataagagaattcatactagggaaaaaccttacaaatgtaaaatctgtgagaaagcctttatccgaagcactcacctgactcaacatcagaggattcacacaggagagaaaccctataaatgtaataaatgtgggaaagcttttaaccagactgcaaacctcattcagcatcagagacatcatattggagagaag

SEQ ID NO: 3714 - DNA, 2523 bp, Homo sapiens
  source 1..2523: mol_type = genomic DNA
atgtctgtggatgagaagcctgactcccccatgtatgtgtatgagtccacagtccactgcaccaacatcctcctgggcctcaatgaccagcggaaaaaggatattctctgtgacgtgactttgatcgtggagaggaaggagttccgggcccaccgggctgtgctggccgcatgcagtgaatatttttggcaggcgctggttggacagacaaaaaatgatttggtggtcagcttgcctgaggaggtcacagccaggggctttgggccgctgttacagtttgcctacactgccaagctgttactcagcagagaaaacatccgcgaggtcatccgctgtgctgagttcctgcgcatgcacaacctggaggactcctgcttcagcttcctgcagacccagctcctgaacagtgaggatggcctgtttgtgtgccggaaggatgctgcgtgccagcgcccacacgaggactgcgagaactctgcaggagaggaggaggatgaagaggaggagacgatggattcagagacggccaagatggcttgccccagggaccagatgcttccagagcccatcagctttgaggccgccgccatccccgtagcagagaaggaagaagccctgctgcccgagcctgacgtgcccacagacaccaaggagagctcagaaaaggacgcgttaacgcagtaccccagatacaagaaataccagcttgcatgtaccaagaatgtctataatgcatcatcacacagtacctcaggttttgcaagcacattccgggaagataactctagcaacagcctcaagccggggcttgccagggggcagattaaaagtgagccgcccagtgaagagaatgaggaagagagcatcacgctctgcctgtctggagatgagcctgacgccaaggacagagcgggggatgtcgagatggaccggaaacagcccagccctgcccctacccccacggccccagctggggccgcctgcctggagagatccaggagcgtggcctcgccctcctgcttaaggtctctgttcagcataacgaaaagtgtggagctgtctggcctgcccagtacatctcagcagcactttgccaggagtccagcctgcccttttgacaaggggatcactcagggtgaccttaaaactgactacacccctttcacagggaattatggacagccccacgtgggccagaaggaggtgtccaacttcaccatggggtcgcccctcagggggcctgggttggaggctctctgtaaacaggagggagagctggaccggaggagcgtgatcttctcctccagcgcttgtgaccaagtgagcacctcggtgcattcttattctggggtgagcagtttggacaaagacctctctgagccggtgccaaagggtctgtgggtgggagccggccagtccctccccagctcgcaggcctactcccacggtgggctgatggccgaccacttgccaggaaggatgcggcccaacaccagctgcccggtaccaatcaaagtctgccctcgctcaccccccttggagaccaggaccaggacttccagctcctgctcttcctattcctacgcggaggacgggagcgggggctcaccctgcagcctccctctctgtgagttctcctcctcgccctgttcccagggagccagattccttgccacagaacatcaggaaccaggcctgatgggagatggaatgtacaaccaagtgcggccccaaattaaatgtgagcagtcttatggaaccaactccagtgacgaatccggatcgttctcggaagcagacagtgagtcgtgtcctgtgcaggacaggggccaggaggtaaaacttccttttcctgtagatcaaatcacagatcttccaaggaacgatttccagatgatgattaaaatgcacaagctaacctcagaacagttagagtttattcatgatgtccgacggcgcagcaagaaccgcatcgcggcccagcgctgccgcaaaaggaaactggactgtattcagaatttagaatgtgaaatccgcaaattggtgtgtgagaaagagaaactgttgtcagagaggaatcaactgaaagcatgcatgggggaactgttggacaacttctcctgcctttcccaggaagtttgccgagacatccagagccccgagcagatccaggccctgcatcggtattgccctgtcctcagacccatggacttgcccacggcctccagtattaaccctgcgcccttgggtgctgagcagaacattgcggcctcccaatgcgcagtgggggaaaacgtgccctgctgcttggagccaggcgcggctccccccggacccccctgggcacccagcaacacctccgagaattgtacctctgggaggagactagaaggcactgacccgggaaccttctcagagagaggacctcctcttgaacccaggagccaaacagtgaccgtggacttctgccaggaaatgactgataagtgtacaactgacgaacagcccaggaaagattatacc

SEQ ID NO: 3715 - DNA, 564 bp, Homo sapiens
  source 1..564: mol_type = genomic DNA
atggccaccgtcaggcatcggcctgaagcccttgagcttctggaagcccagagcaaatttaccaagaaagagcttcagatcctttacagaggatttaagaatgaatgccccagtggtgttgttaatgaagaaaccttcaaagagatttactcgcagttctttccacagggagactctacaacatatgcacattttctgttcaatgcatttgatacagaccacaatggagctgtgagtttcgaggatttcatcaaaggtctttccattttgctccgggggacagtacaagaaaaactcaattgggcatttaatctgtatgacataaataaagatggctacatcactaaagaggaaatgcttgatataatgaaagcaatatacgatatgatgggtaaatgtacatatcctgtcctcaaagaagatgctcccagacaacacgttgaaacattttttcagaaaatggacaaaaataaagatggggttgttaccatagatgagttcattgaaagctgccaaaaagatgaaaacataatgcgctccatgcagctctttgaaaatgtgatt

SEQ ID NO: 3716 - DNA, 675 bp, Homo sapiens
  source 1..675: mol_type = genomic DNA
atgagtggctgtagaaagcggtgtaaacgtgaaatactgaaatttgcccagtaccttctcagactattaacaggttctcttcatacagacagcgtggaagatgaactggagatggccaccgtcaggcatcggcctgaagcccttgagcttctggaagcccagagcaaatttaccaagaaagagcttcagatcctttacagaggatttaagaatgaatgccccagtggtgttgttaatgaagaaaccttcaaagagatttactcgcagttctttccacagggagactctacaacatatgcacattttctgttcaatgcatttgatacagaccacaatggagctgtgagtttcgaggatttcatcaaaggtctttccattttgctccgggggacagtacaagaaaaactcaattgggcatttaatctgtatgacataaataaagatggctacatcactaaagaggaaatgcttgatataatgaaagcaatatacgatatgatgggtaaatgtacatatcctgtcctcaaagaagatgctcccagacaacacgttgaaacattttttcagaaaatggacaaaaataaagatggggttgttaccatagatgagttcattgaaagctgccaaaaagatgaaaacataatgcgctccatgcagctctttgaaaatgtgatt

SEQ ID NO: 3717 - DNA, 687 bp, Homo sapiens
  source 1..687: mol_type = genomic DNA
atgaacttggaagggcttgaaatgatagcagttctgatcgtcattgtgctttttgttaaattattggaacagtttgggctgattgaagcaggtttagaagacagcgtggaagatgaactggagatggccaccgtcaggcatcggcctgaagcccttgagcttctggaagcccagagcaaatttaccaagaaagagcttcagatcctttacagaggatttaagaatgaatgccccagtggtgttgttaatgaagaaaccttcaaagagatttactcgcagttctttccacagggagactctacaacatatgcacattttctgttcaatgcatttgatacagaccacaatggagctgtgagtttcgaggatttcatcaaaggtctttccattttgctccgggggacagtacaagaaaaactcaattgggcatttaatctgtatgacataaataaagatggctacatcactaaagaggaaatgcttgatataatgaaagcaatatacgatatgatgggtaaatgtacatatcctgtcctcaaagaagatgctcccagacaacacgttgaaacattttttcagaaaatggacaaaaataaagatggggttgttaccatagatgagttcattgaaagctgccaaaaagatgaaaacataatgcgctccatgcagctctttgaaaatgtgatt

SEQ ID NO: 3718 - DNA, 648 bp, Homo sapiens
  source 1..648: mol_type = genomic DNA
atgaatgtgaggagggtggaaagcatttcggctcagctggaggaggccagctctacaggcgacagcgtggaagatgaactggagatggccaccgtcaggcatcggcctgaagcccttgagcttctggaagcccagagcaaatttaccaagaaagagcttcagatcctttacagaggatttaagaatgaatgccccagtggtgttgttaatgaagaaaccttcaaagagatttactcgcagttctttccacagggagactctacaacatatgcacattttctgttcaatgcatttgatacagaccacaatggagctgtgagtttcgaggatttcatcaaaggtctttccattttgctccgggggacagtacaagaaaaactcaattgggcatttaatctgtatgacataaataaagatggctacatcactaaagaggaaatgcttgatataatgaaagcaatatacgatatgatgggtaaatgtacatatcctgtcctcaaagaagatgctcccagacaacacgttgaaacattttttcagaaaatggacaaaaataaagatggggttgttaccatagatgagttcattgaaagctgccaaaaagatgaaaacataatgcgctccatgcagctctttgaaaatgtgatt

SEQ ID NO: 3719 - DNA, 768 bp, Homo sapiens
  source 1..768: mol_type = genomic DNA
atgcagccggctaaggaagtgacaaaggcgtcggacggcagcctcctgggggacctcgggcacacaccacttagcaagaaggagggtatcaagtggcagaggccgaggctcagccgccaggctttgatgagatgctgcctggtcaagtggatcctgtccagcacagccccacagggctcagatagcagcgacagtgagctggagctgtccacggtgcgccaccagccagaggggctggaccagctgcaggcccagaccaagttcaccaagaaggagctgcagtctctctacaggggctttaagaatgagtgtcccacgggcctggtggacgaagacaccttcaaactcatttacgcgcagttcttccctcagggagatgccaccacctatgcacacttcctcttcaacgcctttgatgcggacgggaacggggccatccactttgaggactttgtggttggcctctccatcctgctgcggggcacagtccacgagaagctcaagtgggcctttaatctctacgacattaacaaggatggctacatcaccaaagaggagatgctggccatcatgaagtccatctatgacatgatgggccgccacacctaccccatcctgcgggaggacgcgccggcggagcacgtggagaggttcttcgagaaaatggaccggaaccaggatggggtagtgaccattgaagagttcctggaggcctgtcagaaggatgagaacatcatgagctccatgcagctgtttgagaatgtcatc

SEQ ID NO: 3720 - DNA, 690 bp, Homo sapiens
  source 1..690: mol_type = genomic DNA
atgggcatccagggcatggagctgtgcgccatggccgtggtggtgctgctgttcatcgccgtcctcaagcagttcggcatcctggagcccatatccatggaagatagcagcgacagtgagctggagctgtccacggtgcgccaccagccagaggggctggaccagctgcaggcccagaccaagttcaccaagaaggagctgcagtctctctacaggggctttaagaatgagtgtcccacgggcctggtggacgaagacaccttcaaactcatttacgcgcagttcttccctcagggagatgccaccacctatgcacacttcctcttcaacgcctttgatgcggacgggaacggggccatccactttgaggactttgtggttggcctctccatcctgctgcggggcacagtccacgagaagctcaagtgggcctttaatctctacgacattaacaaggatggctacatcaccaaagaggagatgctggccatcatgaagtccatctatgacatgatgggccgccacacctaccccatcctgcgggaggacgcgccggcggagcacgtggagaggttcttcgagaaaatggaccggaaccaggatggggtagtgaccattgaagagttcctggaggcctgtcagaaggatgagaacatcatgagctccatgcagctgtttgagaatgtcatc

SEQ ID NO: 3721 - DNA, 855 bp, Homo sapiens
  source 1..855: mol_type = genomic DNA
atgcggggccagggccgcaaggagagtttgtccgattcccgagacctggacggctcctacgaccagctcacgggccaccctccagggcccactaaaaaagcgctgaagcagcgattcctcaagctgctgccgtgctgcgggccccaagccctgccctcagtcagtgaaattggccgggtcttccgctttctcggtgacagttcgctcccttcagcattagccgccccagcctccctccgcccccacagaccccgcctgctggacccagacagcgtggacgatgaatttgaattgtccaccgtgtgtcaccggcctgagggtctggagcagctgcaggagcaaaccaaattcacgcgcaaggagttgcaggtcctgtaccggggcttcaagaacgaatgtcccagcggaattgtcaatgaggagaacttcaagcagatttactcccagttctttcctcaaggagactccagcacctatgccacttttctcttcaatgcctttgacaccaaccatgatggctcggtcagttttgaggactttgtggctggtttgtccgtgattcttcggggaactgtagatgacaggcttaattgggccttcaacctgtatgaccttaacaaggacggctgcatcaccaaggaggaaatgcttgacatcatgaagtccatctatgacatgatgggcaagtacacgtaccctgcactccgggaggaggccccaagggaacacgtggagagcttcttccagaagatggacagaaacaaggatggtgtggtgaccattgaggaattcattgagtcttgtcaaaaggatgagaacatcatgaggtccatgcagctctttgacaatgtcatc

SEQ ID NO: 3722 - DNA, 675 bp, Homo sapiens
  source 1..675: mol_type = genomic DNA
atgaaccgatgcccccgcaggtgccggagcccgctggggcaggcagcgcgatccctctaccagctggtgactgggtcgctgtccccagacagcgtggacgatgaatttgaattgtccaccgtgtgtcaccggcctgagggtctggagcagctgcaggagcaaaccaaattcacgcgcaaggagttgcaggtcctgtaccggggcttcaagaacgaatgtcccagcggaattgtcaatgaggagaacttcaagcagatttactcccagttctttcctcaaggagactccagcacctatgccacttttctcttcaatgcctttgacaccaaccatgatggctcggtcagttttgaggactttgtggctggtttgtccgtgattcttcggggaactgtagatgacaggcttaattgggccttcaacctgtatgaccttaacaaggacggctgcatcaccaaggaggaaatgcttgacatcatgaagtccatctatgacatgatgggcaagtacacgtaccctgcactccgggaggaggccccaagggaacacgtggagagcttcttccagaagatggacagaaacaaggatggtgtggtgaccattgaggaattcattgagtcttgtcaaaaggatgagaacatcatgaggtccatgcagctctttgacaatgtcatc

SEQ ID NO: 3723 - DNA, 681 bp, Homo sapiens
  source 1..681: mol_type = genomic DNA
atgcggggccagggccgcaaggagagtttgtccgattcccgagacctggacggctcctacgaccagctcacggacagcgtggacgatgaatttgaattgtccaccgtgtgtcaccggcctgagggtctggagcagctgcaggagcaaaccaaattcacgcgcaaggagttgcaggtcctgtaccggggcttcaagaaccctggtgccctctccttccaggaatgtcccagcggaattgtcaatgaggagaacttcaagcagatttactcccagttctttcctcaaggagactccagcacctatgccacttttctcttcaatgcctttgacaccaaccatgatggctcggtcagttttgaggactttgtggctggtttgtccgtgattcttcggggaactgtagatgacaggcttaattgggccttcaacctgtatgaccttaacaaggacggctgcatcaccaaggaggaaatgcttgacatcatgaagtccatctatgacatgatgggcaagtacacgtaccctgcactccgggaggaggccccaagggaacacgtggagagcttcttccagaagatggacagaaacaaggatggtgtggtgaccattgaggaattcattgagtcttgtcaaaaggatgagaacatcatgaggtccatgcagctctttgacaatgtcatc

SEQ ID NO: 3724 - DNA, 660 bp, Homo sapiens
  source 1..660: mol_type = genomic DNA
atgcggggccagggccgcaaggagagtttgtccgattcccgagacctggacggctcctacgaccagctcacggacagcgtggacgatgaatttgaattgtccaccgtgtgtcaccggcctgagggtctggagcagctgcaggagcaaaccaaattcacgcgcaaggagttgcaggtcctgtaccggggcttcaagaacgaatgtcccagcggaattgtcaatgaggagaacttcaagcagatttactcccagttctttcctcaaggagactccagcacctatgccacttttctcttcaatgcctttgacaccaaccatgatggctcggtcagttttgaggactttgtggctggtttgtccgtgattcttcggggaactgtagatgacaggcttaattgggccttcaacctgtatgaccttaacaaggacggctgcatcaccaaggaggaaatgcttgacatcatgaagtccatctatgacatgatgggcaagtacacgtaccctgcactccgggaggaggccccaagggaacacgtggagagcttcttccagaagatggacagaaacaaggatggtgtggtgaccattgaggaattcattgagtcttgtcaaaaggatgagaacatcatgaggtccatgcagctctttgacaatgtcatc

SEQ ID NO: 3725 - DNA, 810 bp, Homo sapiens
  source 1..810: mol_type = genomic DNA
atgcggggccagggccgcaaggagagtttgtccgattcccgagacctggacggctcctacgaccagctcacgggccaccctccagggcccactaaaaaagcgctgaagcagcgattcctcaagctgctgccgtgctgcgggccccaagccctgccctcagtcagtgaaacattagccgccccagcctccctccgcccccacagaccccgcctgctggacccagacagcgtggacgatgaatttgaattgtccaccgtgtgtcaccggcctgagggtctggagcagctgcaggagcaaaccaaattcacgcgcaaggagttgcaggtcctgtaccggggcttcaagaacgaatgtcccagcggaattgtcaatgaggagaacttcaagcagatttactcccagttctttcctcaaggagactccagcacctatgccacttttctcttcaatgcctttgacaccaaccatgatggctcggtcagttttgaggactttgtggctggtttgtccgtgattcttcggggaactgtagatgacaggcttaattgggccttcaacctgtatgaccttaacaaggacggctgcatcaccaaggaggaaatgcttgacatcatgaagtccatctatgacatgatgggcaagtacacgtaccctgcactccgggaggaggccccaagggaacacgtggagagcttcttccagaagatggacagaaacaaggatggtgtggtgaccattgaggaattcattgagtcttgtcaaaaggatgagaacatcatgaggtccatgcagctctttgacaatgtcatc

SEQ ID NO: 3726 - DNA, 774 bp, Homo sapiens
  source 1..774: mol_type = genomic DNA
atgaggtcattcaaccaggtttcatcagccccaggcggggctagcaaaggtggtggagaagagcccgggaagctgccggagccggcagaggaggaatcccaggttttgcgcggaactggccactgtaagtggttcaatgtgcgcatgggatttggattcatctccatgataaaccgagagggaagccccttggatattccagtcgatgtatttgtacaccaaagcaaactattcatggaaggatttagaagcctaaaagaaggagaaccagtggaattcacatttaaaaaatcttccaaaggccttgagtcaatacgggtaacaggacctggtgggagcccctgtttaggaagtgaaagaagacccaaagggaagacactacagaaaagaaaaccaaagggagatagatgctacaactgtggtggccttgatcatcatgctaaggaatgtagtctacctcctcagccaaagaagtgccattactgtcagagcatcatgcacatggtggcaaactgcccacataaaaatgttgcacagccacccgcgagttctcagggaagacaggaagcagaatcccagccatgcacttcaactctccctcgagaagtgggaggcgggcatggctgtacatcaccaccgtttcctcaggaggctagggcagagatctcagaacggtcaggcaggtcacctcaagaagcttcctccacgaagtcatctatagcaccagaagagcaaagcaaaaaggggccttcagttcaaaaaaggaaaaagaca

SEQ ID NO: 3727 - DNA, 627 bp, Homo sapiens
  source 1..627: mol_type = genomic DNA
atgggctccgtgtccaaccagcagtttgcaggtggctgcgccaaggcggcagaagaggcgcccgaggaggcgccggaggacgcggcccgggcggcggacgagcctcagctgctgcacggtgcgggcatctgtaagtggttcaacgtgcgcatggggttcggcttcctgtccatgaccgcccgcgccggggtcgcgctcgaccccccagtggatgtctttgtgcaccagagtaagctgcacatggaagggttccggagcttgaaggagggtgaggcagtggagttcacctttaagaagtcagccaagggtctggaatccatccgtgtcaccggacctggtggagtattctgtattgggagtgagaggcggccaaaaggaaagagcatgcagaagcgcagatcaaaaggagacaggtgctacaactgtggaggtctagatcatcatgccaaggaatgcaagctgccaccccagcccaagaagtgccacttctgccagagcatcagccatatggtagcctcatgtccgctgaaggcccagcagggccctagtgcacagggaaagccaacctactttcgagaggaagaagaagaaatccacagccctaccctgctcccggaggcacagaat

SEQ ID NO: 3728 - DNA, 2160 bp, Homo sapiens
  source 1..2160: mol_type = genomic DNA
atggaggaggcggaggagctgctcttggaggggaagaaggcgctgcaactcgcccgcgagccgcgcctgggcctggacttaggatggaacccttccggagaaggctgtacgcagggcctcaaagacgtcccacccgagccgacccgagacatcctcgctttaaagagccttccccggggcttggcccttggcccctcactcgccaaggaacagcgcttgggggtctggtgtgtcggggaccccctgcagcccggcctgctgtgggggccgctggaagaggagtctgcctccaaggagaagggcgagggagtaaagccacggcaggaggagaacctgtcattaggcccatggggagacgtgtgtgcctgtgagcagagttctggctggactagcttggtacaacggggcaggctggagagtgagggaaatgtggccccagtgcggatcagcgagaggcttcatctgcaagtgtaccagctggtgctgccaggctctgaactgctgctgtggccccagccttcctctgagggcccaagtctcacccagcctgggctggacaaagaggcagctgtagcagtggtgacagaagtggagtctgctgtacagcaggaagtggcctcccctggggaggatgcagcagaaccttgcatagatcctggttcccagtcaccctctggcatccaggcagagaatatggtgagccctggacttaagttcccaacccaggaccgaatttccaaggatagccagccacttggcccattgcttcaggatggcgacgtggatgaggaatgcccggcccaggcacagatgccacctgaacttcagagcaattcggctacccagcaggacccagatggcagtggagccagtttctcatcttctgccaggggcacccagccgcatggctacctggccaagaagttacacagccccagtgatcagtgcccacccagagcaaagaccccagagcctggagcccagcagtctggcttccctacactctcgcggagccctcctggcccagcaggaagctccccaaagcaggggcgacggtaccggtgtggagagtgtggcaaggcattcctacagctgtgccacctaaagaagcacgcatttgtgcacacgggccacaagccctttctttgcactgagtgtggcaagagctatagctcagaggagagcttcaaagcccatatgctgggccaccgtggggtgcggcccttcccctgtccacaatgcgacaaggcctatggcacccagcgagacctcaaagagcaccaggtggtacattcaggtgcccggccctttgcttgtgaccagtgtggcaaggcctttgcccgccggccctccctgcggctgcatcgcaagacccaccaggtgccagctgcccctgccccttgcccatgccctgtgtgtgggcggcccctggccaaccagggctccctgcggaaccatatgaggctccatacaggagaaaagcctttcctgtgcccgcactgtggccgggcgtttcgtcagcggggcaacctgcgtgggcatttgcggctccacaccggggagcgtccttaccgctgcccacactgtgccgatgccttcccccagctgcctgaactgcggcgccatctcatctcacacaccggggaggcccacttgtgcccggtgtgtggcaaggccctccgagacccacacacgctccgagctcacgagcgcctgcactccggagagaggccctttccctgtccccagtgtggccgtgcttacacgctggccaccaagctgcggcgccacctcaaatctcacttggaggacaagccctaccgctgccccacctgtggcatgggctacaccctcccgcagagcctcaggcggcatcagctcagtcaccggcctgaggcaccctgcagcccaccctctgtgccttctgctgcttctgagcccactgtggtgctcctgcaggctgagccacaactgctggacacacacagagaggaggaagtctcccccgccagggatgttgttgaggtcaccatttcagaaagccaggagaagtgctttgtggtgccagaggagccagatgccgcccccagcctggtgctaatccataaggacatgggcctcggcgcctgggcagaggtggtggaggtggagatgggcacc

SEQ ID NO: 3729 - DNA, 3324 bp, Homo sapiens
  source 1..3324: mol_type = genomic DNA
atgaaagttacaaattataatactgtggtagaaacaaattcagattcagatgatgaagacaaactgcatattgtggaagaagaaagtgttacagatgcagctgactgtgaaggtgtaccagaggatgacctgccaacagaccagacagtgttaccagggaggagcagtgaaagagaagggaatgctaagaactgctgggaggatgacacaggaaaggaagggcaagaaatcctggggcctgaagctcaggcagatgaagcaggatgtacagtaaaagatgatgaatgcgagtcagatgcagaaaatgagcaaaaccatgatcctaatgttgaagagtttctacaacaacaagacactgctgtcatttttcctgaggcacctgaagaggaccagaggcagggcacaccagaagccagtggtcatgatgaaaatggaacaccagatgcattttcacaattactcacctgtccatattgtgatagaggctataaacgctttacctctctgaaagaacacattaaatatcgtcatgaaaagaatgaagataactttagttgctccctgtgcagttacacctttgcatacagaacccaacttgaacgtcacatgacatcacataaatcaggaagagatcaaagacatgtgacgcagtctgggtgtaatcgtaaattcaaatgcactgagtgtggaaaagctttcaaatacaaacatcacctaaaagagcacttaagaattcacagtggagagaagccatatgaatgcccaaactgcaagaaacgcttttcccattctggctcctatagctcacacataagcagtaagaaatgtatcagcttgatacctgtgaatgggcgaccaagaacaggactcaagacatctcagtgttcttcaccgtctctttcagcatcaccaggcagtcccacacgaccacagatacggcaaaagatagagaataaaccccttcaagaacaactttctgttaaccaaattaaaactgaacctgtggattatgaattcaaacccatagtggttgcttcaggaatcaactgttcaacccctttacaaaatggggttttcactggtggtggcccattacaggcaaccagttctcctcagggcatggtgcaagctgttgttctgccaacagttggtttggtgtctcccataagtatcaatttaagtgatattcagaatgtacttaaagtggcggtagatggtaatgtaataaggcaagtgttggagaataatcaagccaatcttgcatccaaagaacaagaaacaatcaatgcttcacccatacaacaaggtggccattctgttatttcagccatcagtcttcctttggttgatcaagatggaacaaccaaaattatcatcaactacagtcttgagcagcctagccaacttcaagttgttcctcaaaatttaaaaaaagaaaatccagtcgctacaaacagttgtaaaagtgaaaagttaccagaagatcttactgttaagtctgagaaggacaaaagctttgaagggggggtgaatgatagcacttgtcttctgtgtgatgattgtccaggagatattaatgcacttccagaattaaagcactatgacctaaagcagcctactcagcctcctccactccctgcagcagaagctgagaagcctgagtcctctgtttcatcagctactggagatggcaatttgtctcctagtcagccacctttaaagaacctcttgtctctcctaaaagcatattatgctttgaatgcacaaccaagtgcagaagagctctcaaaaattgctgattcagtaaacctaccactggatgtagtaaaaaagtggtttgaaaagatgcaagctggacagatttcagtgcagtcttctgaaccatcttctcctgaaccaggcaaagtaaatatccctgccaagaacaatgatcagcctcaatctgcaaatgcaaatgaaccccaggacagcacagtaaatctacaaagtcctttgaagatgactaactccccagttttaccagtgggatcaaccaccaatggttccagaagtagtacaccatccccatcacctctaaacctttcctcatccagaaatacacagggttacttgtacacagctgagggtgcacaagaagagccacaagtagaacctcttgatctttcactaccaaagcaacagggagaattattagaaaggtcaactatcactagtgtttaccagaacagtgtttattctgtccaggaagaacccttgaacttgtcttgcgcaaaaaaggagccacaaaaggacagttgtgttacagactcagaaccagttgtaaatgtaatcccaccaagtgccaaccccataaatatcgctatacctacagtcactgcccagttacccacaatcgtggccattgctgaccagaacagtgttccatgcttaagagcgctagctgccaataagcaaacgattctgattccccaggtggcatacacctactcaactacggtcagccctgcagtccaagaaccacccttgaaagtgatccagccaaatggaaatcaggatgaaagacaagatactagctcagaaggagtatcaaatgtagaggatcagaatgactctgattctacaccgcccaaaaagaaaatgcggaagacagaaaatggaatgtatgcttgtgatttgtgtgacaagatattccaaaagagtagttcattattgagacataaatatgaacacacaggtaaaagacctcatgagtgtggaatctgtaaaaaggcatttaaacacaaacatcatttgattgaacacatgcgattacattctggagaaaagccctatcaatgtgacaaatgtggaaagcgcttctcacactctgggtcttattctcaacacatgaatcatcgctactcctactgtaagagagaagcggaagaacgtgacagcacagagcaggaagaggcagggcctgaaatcctctcgaatgagcacgtgggtgccagggcgtctccctcacagggcgactcggacgagagagagagtttgacaagggaagaggatgaagacagtgaaaaagaggaagaggaggaggataaagagatggaagaattgcaggaagaaaaagaatgtgaaaaaccacaaggggatgaggaagaggaggaggaggaggaagaagtggaagaagaagaggtagaagaggcagagaatgagggagaagaagcaaaaactgaaggtctgatgaaggatgacagggctgaaagtcaagcaagcagcttaggacaaaaagtaggcgagagtagtgagcaagtgtctgaagaaaagacaaatgaagcc

SEQ ID NO: 3730 - DNA, 3312 bp, Homo sapiens
  source 1..3312: mol_type = genomic DNA
atggcggatggccccaggtgtaagcgcagaaagcaggcgaacccgcggcgcaataacgttacaaattataatactgtggtagaaacaaattcagattcagatgatgaagacaaactgcatattgtggaagaagaaagtgttacagatgcagctgactgtgaaggtgtaccagaggatgacctgccaacagaccagacagtgttaccagggaggagcagtgaaagagaagggaatgctaagaactgctgggaggatgacataaaagatgatgaatgcgagtcagatgcagaaaatgagcaaaaccatgatcctaatgttgaagagtttctacaacaacaagacactgctgtcatttttcctgaggcacctgaagaggaccagaggcagggcacaccagaagccagtggtcatgatgaaaatggaacaccagatgcattttcacaattactcacctgtccatattgtgatagaggctataaacgctttacctctctgaaagaacacattaaatatcgtcatgaaaagaatgaagataactttagttgctccctgtgcagttacacctttgcatacagaacccaacttgaacgtcacatgacatcacataaatcaggaagagatcaaagacatgtgacgcagtctgggtgtaatcgtaaattcaaatgcactgagtgtggaaaagctttcaaatacaaacatcacctaaaagagcacttaagaattcacagtggagagaagccatatgaatgcccaaactgcaagaaacgcttttcccattctggctcctatagctcacacataagcagtaagaaatgtatcagcttgatacctgtgaatgggcgaccaagaacaggactcaagacatctcagtgttcttcaccgtctctttcagcatcaccaggcagtcccacacgaccacagatacggcaaaagatagagaataaaccccttcaagaacaactttctgttaaccaaattaaaactgaacctgtggattatgaattcaaacccatagtggttgcttcaggaatcaactgttcaacccctttacaaaatggggttttcactggtggtggcccattacaggcaaccagttctcctcagggcatggtgcaagctgttgttctgccaacagttggtttggtgtctcccataagtatcaatttaagtgatattcagaatgtacttaaagtggcggtagatggtaatgtaataaggcaagtgttggagaataatcaagccaatcttgcatccaaagaacaagaaacaatcaatgcttcacccatacaacaaggtggccattctgttatttcagccatcagtcttcctttggttgatcaagatggaacaaccaaaattatcatcaactacagtcttgagcagcctagccaacttcaagttgttcctcaaaatttaaaaaaagaaaatccagtcgctacaaacagttgtaaaagtgaaaagttaccagaagatcttactgttaagtctgagaaggacaaaagctttgaagggggggtgaatgatagcacttgtcttctgtgtgatgattgtccaggagatattaatgcacttccagaattaaagcactatgacctaaagcagcctactcagcctcctccactccctgcagcagaagctgagaagcctgagtcctctgtttcatcagctactggagatggcaatttgtctcctagtcagccacctttaaagaacctcttgtctctcctaaaagcatattatgctttgaatgcacaaccaagtgcagaagagctctcaaaaattgctgattcagtaaacctaccactggatgtagtaaaaaagtggtttgaaaagatgcaagctggacagatttcagtgcagtcttctgaaccatcttctcctgaaccaggcaaagtaaatatccctgccaagaacaatgatcagcctcaatctgcaaatgcaaatgaaccccaggacagcacagtaaatctacaaagtcctttgaagatgactaactccccagttttaccagtgggatcaaccaccaatggttccagaagtagtacaccatccccatcacctctaaacctttcctcatccagaaatacacagggttacttgtacacagctgagggtgcacaagaagagccacaagtagaacctcttgatctttcactaccaaagcaacagggagaattattagaaaggtcaactatcactagtgtttaccagaacagtgtttattctgtccaggaagaacccttgaacttgtcttgcgcaaaaaaggagccacaaaaggacagttgtgttacagactcagaaccagttgtaaatgtaatcccaccaagtgccaaccccataaatatcgctatacctacagtcactgcccagttacccacaatcgtggccattgctgaccagaacagtgttccatgcttaagagcgctagctgccaataagcaaacgattctgattccccaggtggcatacacctactcaactacggtcagccctgcagtccaagaaccacccttgaaagtgatccagccaaatggaaatcaggatgaaagacaagatactagctcagaaggagtatcaaatgtagaggatcagaatgactctgattctacaccgcccaaaaagaaaatgcggaagacagaaaatggaatgtatgcttgtgatttgtgtgacaagatattccaaaagagtagttcattattgagacataaatatgaacacacaggtaaaagacctcatgagtgtggaatctgtaaaaaggcatttaaacacaaacatcatttgattgaacacatgcgattacattctggagaaaagccctatcaatgtgacaaatgtggaaagcgcttctcacactctgggtcttattctcaacacatgaatcatcgctactcctactgtaagagagaagcggaagaacgtgacagcacagagcaggaagaggcagggcctgaaatcctctcgaatgagcacgtgggtgccagggcgtctccctcacagggcgactcggacgagagagagagtttgacaagggaagaggatgaagacagtgaaaaagaggaagaggaggaggataaagagatggaagaattgcaggaagaaaaagaatgtgaaaaaccacaaggggatgaggaagaggaggaggaggaggaagaagtggaagaagaagaggtagaagaggcagagaatgagggagaagaagcaaaaactgaaggtctgatgaaggatgacagggctgaaagtcaagcaagcagcttaggacaaaaagtaggcgagagtagtgagcaagtgtctgaagaaaagacaaatgaagcc

SEQ ID NO: 3731 - DNA, 3375 bp, Homo sapiens
  source 1..3375: mol_type = genomic DNA
atggcggatggccccaggtgtaagcgcagaaagcaggcgaacccgcggcgcaataacgttacaaattataatactgtggtagaaacaaattcagattcagatgatgaagacaaactgcatattgtggaagaagaaagtgttacagatgcagctgactgtgaaggtgtaccagaggatgacctgccaacagaccagacagtgttaccagggaggagcagtgaaagagaagggaatgctaagaactgctgggaggatgacacaggaaaggaagggcaagaaatcctggggcctgaagctcaggcagatgaagcaggatgtacagtaaaagatgatgaatgcgagtcagatgcagaaaatgagcaaaaccatgatcctaatgttgaagagtttctacaacaacaagacactgctgtcatttttcctgaggcacctgaagaggaccagaggcagggcacaccagaagccagtggtcatgatgaaaatggaacaccagatgcattttcacaattactcacctgtccatattgtgatagaggctataaacgctttacctctctgaaagaacacattaaatatcgtcatgaaaagaatgaagataactttagttgctccctgtgcagttacacctttgcatacagaacccaacttgaacgtcacatgacatcacataaatcaggaagagatcaaagacatgtgacgcagtctgggtgtaatcgtaaattcaaatgcactgagtgtggaaaagctttcaaatacaaacatcacctaaaagagcacttaagaattcacagtggagagaagccatatgaatgcccaaactgcaagaaacgcttttcccattctggctcctatagctcacacataagcagtaagaaatgtatcagcttgatacctgtgaatgggcgaccaagaacaggactcaagacatctcagtgttcttcaccgtctctttcagcatcaccaggcagtcccacacgaccacagatacggcaaaagatagagaataaaccccttcaagaacaactttctgttaaccaaattaaaactgaacctgtggattatgaattcaaacccatagtggttgcttcaggaatcaactgttcaacccctttacaaaatggggttttcactggtggtggcccattacaggcaaccagttctcctcagggcatggtgcaagctgttgttctgccaacagttggtttggtgtctcccataagtatcaatttaagtgatattcagaatgtacttaaagtggcggtagatggtaatgtaataaggcaagtgttggagaataatcaagccaatcttgcatccaaagaacaagaaacaatcaatgcttcacccatacaacaaggtggccattctgttatttcagccatcagtcttcctttggttgatcaagatggaacaaccaaaattatcatcaactacagtcttgagcagcctagccaacttcaagttgttcctcaaaatttaaaaaaagaaaatccagtcgctacaaacagttgtaaaagtgaaaagttaccagaagatcttactgttaagtctgagaaggacaaaagctttgaagggggggtgaatgatagcacttgtcttctgtgtgatgattgtccaggagatattaatgcacttccagaattaaagcactatgacctaaagcagcctactcagcctcctccactccctgcagcagaagctgagaagcctgagtcctctgtttcatcagctactggagatggcaatttgtctcctagtcagccacctttaaagaacctcttgtctctcctaaaagcatattatgctttgaatgcacaaccaagtgcagaagagctctcaaaaattgctgattcagtaaacctaccactggatgtagtaaaaaagtggtttgaaaagatgcaagctggacagatttcagtgcagtcttctgaaccatcttctcctgaaccaggcaaagtaaatatccctgccaagaacaatgatcagcctcaatctgcaaatgcaaatgaaccccaggacagcacagtaaatctacaaagtcctttgaagatgactaactccccagttttaccagtgggatcaaccaccaatggttccagaagtagtacaccatccccatcacctctaaacctttcctcatccagaaatacacagggttacttgtacacagctgagggtgcacaagaagagccacaagtagaacctcttgatctttcactaccaaagcaacagggagaattattagaaaggtcaactatcactagtgtttaccagaacagtgtttattctgtccaggaagaacccttgaacttgtcttgcgcaaaaaaggagccacaaaaggacagttgtgttacagactcagaaccagttgtaaatgtaatcccaccaagtgccaaccccataaatatcgctatacctacagtcactgcccagttacccacaatcgtggccattgctgaccagaacagtgttccatgcttaagagcgctagctgccaataagcaaacgattctgattccccaggtggcatacacctactcaactacggtcagccctgcagtccaagaaccacccttgaaagtgatccagccaaatggaaatcaggatgaaagacaagatactagctcagaaggagtatcaaatgtagaggatcagaatgactctgattctacaccgcccaaaaagaaaatgcggaagacagaaaatggaatgtatgcttgtgatttgtgtgacaagatattccaaaagagtagttcattattgagacataaatatgaacacacaggtaaaagacctcatgagtgtggaatctgtaaaaaggcatttaaacacaaacatcatttgattgaacacatgcgattacattctggagaaaagccctatcaatgtgacaaatgtggaaagcgcttctcacactctgggtcttattctcaacacatgaatcatcgctactcctactgtaagagagaagcggaagaacgtgacagcacagagcaggaagaggcagggcctgaaatcctctcgaatgagcacgtgggtgccagggcgtctccctcacagggcgactcggacgagagagagagtttgacaagggaagaggatgaagacagtgaaaaagaggaagaggaggaggataaagagatggaagaattgcaggaagaaaaagaatgtgaaaaaccacaaggggatgaggaagaggaggaggaggaggaagaagtggaagaagaagaggtagaagaggcagagaatgagggagaagaagcaaaaactgaaggtctgatgaaggatgacagggctgaaagtcaagcaagcagcttaggacaaaaagtaggcgagagtagtgagcaagtgtctgaagaaaagacaaatgaagcc

SEQ ID NO: 3732 - DNA, 3171 bp, Homo sapiens
  source 1..3171: mol_type = genomic DNA
atggcggatggccccaggtgtaagcgcagaaagcaggcgaacccgcggcgcaataacggaaaggaagggcaagaaatcctggggcctgaagctcaggcagatgaagcaggatgtacagtaaaagatgatgaatgcgagtcagatgcagaaaatgagcaaaaccatgatcctaatgttgaagagtttctacaacaacaagacactgctgtcatttttcctgaggcacctgaagaggaccagaggcagggcacaccagaagccagtggtcatgatgaaaatggaacaccagatgcattttcacaattactcacctgtccatattgtgatagaggctataaacgctttacctctctgaaagaacacattaaatatcgtcatgaaaagaatgaagataactttagttgctccctgtgcagttacacctttgcatacagaacccaacttgaacgtcacatgacatcacataaatcaggaagagatcaaagacatgtgacgcagtctgggtgtaatcgtaaattcaaatgcactgagtgtggaaaagctttcaaatacaaacatcacctaaaagagcacttaagaattcacagtggagagaagccatatgaatgcccaaactgcaagaaacgcttttcccattctggctcctatagctcacacataagcagtaagaaatgtatcagcttgatacctgtgaatgggcgaccaagaacaggactcaagacatctcagtgttcttcaccgtctctttcagcatcaccaggcagtcccacacgaccacagatacggcaaaagatagagaataaaccccttcaagaacaactttctgttaaccaaattaaaactgaacctgtggattatgaattcaaacccatagtggttgcttcaggaatcaactgttcaacccctttacaaaatggggttttcactggtggtggcccattacaggcaaccagttctcctcagggcatggtgcaagctgttgttctgccaacagttggtttggtgtctcccataagtatcaatttaagtgatattcagaatgtacttaaagtggcggtagatggtaatgtaataaggcaagtgttggagaataatcaagccaatcttgcatccaaagaacaagaaacaatcaatgcttcacccatacaacaaggtggccattctgttatttcagccatcagtcttcctttggttgatcaagatggaacaaccaaaattatcatcaactacagtcttgagcagcctagccaacttcaagttgttcctcaaaatttaaaaaaagaaaatccagtcgctacaaacagttgtaaaagtgaaaagttaccagaagatcttactgttaagtctgagaaggacaaaagctttgaagggggggtgaatgatagcacttgtcttctgtgtgatgattgtccaggagatattaatgcacttccagaattaaagcactatgacctaaagcagcctactcagcctcctccactccctgcagcagaagctgagaagcctgagtcctctgtttcatcagctactggagatggcaatttgtctcctagtcagccacctttaaagaacctcttgtctctcctaaaagcatattatgctttgaatgcacaaccaagtgcagaagagctctcaaaaattgctgattcagtaaacctaccactggatgtagtaaaaaagtggtttgaaaagatgcaagctggacagatttcagtgcagtcttctgaaccatcttctcctgaaccaggcaaagtaaatatccctgccaagaacaatgatcagcctcaatctgcaaatgcaaatgaaccccaggacagcacagtaaatctacaaagtcctttgaagatgactaactccccagttttaccagtgggatcaaccaccaatggttccagaagtagtacaccatccccatcacctctaaacctttcctcatccagaaatacacagggttacttgtacacagctgagggtgcacaagaagagccacaagtagaacctcttgatctttcactaccaaagcaacagggagaattattagaaaggtcaactatcactagtgtttaccagaacagtgtttattctgtccaggaagaacccttgaacttgtcttgcgcaaaaaaggagccacaaaaggacagttgtgttacagactcagaaccagttgtaaatgtaatcccaccaagtgccaaccccataaatatcgctatacctacagtcactgcccagttacccacaatcgtggccattgctgaccagaacagtgttccatgcttaagagcgctagctgccaataagcaaacgattctgattccccaggtggcatacacctactcaactacggtcagccctgcagtccaagaaccacccttgaaagtgatccagccaaatggaaatcaggatgaaagacaagatactagctcagaaggagtatcaaatgtagaggatcagaatgactctgattctacaccgcccaaaaagaaaatgcggaagacagaaaatggaatgtatgcttgtgatttgtgtgacaagatattccaaaagagtagttcattattgagacataaatatgaacacacaggtaaaagacctcatgagtgtggaatctgtaaaaaggcatttaaacacaaacatcatttgattgaacacatgcgattacattctggagaaaagccctatcaatgtgacaaatgtggaaagcgcttctcacactctgggtcttattctcaacacatgaatcatcgctactcctactgtaagagagaagcggaagaacgtgacagcacagagcaggaagaggcagggcctgaaatcctctcgaatgagcacgtgggtgccagggcgtctccctcacagggcgactcggacgagagagagagtttgacaagggaagaggatgaagacagtgaaaaagaggaagaggaggaggataaagagatggaagaattgcaggaagaaaaagaatgtgaaaaaccacaaggggatgaggaagaggaggaggaggaggaagaagtggaagaagaagaggtagaagaggcagagaatgagggagaagaagcaaaaactgaaggtctgatgaaggatgacagggctgaaagtcaagcaagcagcttaggacaaaaagtaggcgagagtagtgagcaagtgtctgaagaaaagacaaatgaagcc

SEQ ID NO: 3733 - DNA, 3372 bp, Homo sapiens
  source 1..3372: mol_type = genomic DNA
atggcggatggccccaggtgtaagcgcagaaagcaggcgaacccgcggcgcaataacgttacaaattataatactgtggtagaaacaaattcagattcagatgatgaagacaaactgcatattgtggaagaagaaagtgttacagatgcagctgactgtgaaggtgtaccagaggatgacctgccaacagaccagacagtgttaccagggaggagcagtgaaagagaagggaatgctaagaactgctgggaggatgacagaaaggaagggcaagaaatcctggggcctgaagctcaggcagatgaagcaggatgtacagtaaaagatgatgaatgcgagtcagatgcagaaaatgagcaaaaccatgatcctaatgttgaagagtttctacaacaacaagacactgctgtcatttttcctgaggcacctgaagaggaccagaggcagggcacaccagaagccagtggtcatgatgaaaatggaacaccagatgcattttcacaattactcacctgtccatattgtgatagaggctataaacgctttacctctctgaaagaacacattaaatatcgtcatgaaaagaatgaagataactttagttgctccctgtgcagttacacctttgcatacagaacccaacttgaacgtcacatgacatcacataaatcaggaagagatcaaagacatgtgacgcagtctgggtgtaatcgtaaattcaaatgcactgagtgtggaaaagctttcaaatacaaacatcacctaaaagagcacttaagaattcacagtggagagaagccatatgaatgcccaaactgcaagaaacgcttttcccattctggctcctatagctcacacataagcagtaagaaatgtatcagcttgatacctgtgaatgggcgaccaagaacaggactcaagacatctcagtgttcttcaccgtctctttcagcatcaccaggcagtcccacacgaccacagatacggcaaaagatagagaataaaccccttcaagaacaactttctgttaaccaaattaaaactgaacctgtggattatgaattcaaacccatagtggttgcttcaggaatcaactgttcaacccctttacaaaatggggttttcactggtggtggcccattacaggcaaccagttctcctcagggcatggtgcaagctgttgttctgccaacagttggtttggtgtctcccataagtatcaatttaagtgatattcagaatgtacttaaagtggcggtagatggtaatgtaataaggcaagtgttggagaataatcaagccaatcttgcatccaaagaacaagaaacaatcaatgcttcacccatacaacaaggtggccattctgttatttcagccatcagtcttcctttggttgatcaagatggaacaaccaaaattatcatcaactacagtcttgagcagcctagccaacttcaagttgttcctcaaaatttaaaaaaagaaaatccagtcgctacaaacagttgtaaaagtgaaaagttaccagaagatcttactgttaagtctgagaaggacaaaagctttgaagggggggtgaatgatagcacttgtcttctgtgtgatgattgtccaggagatattaatgcacttccagaattaaagcactatgacctaaagcagcctactcagcctcctccactccctgcagcagaagctgagaagcctgagtcctctgtttcatcagctactggagatggcaatttgtctcctagtcagccacctttaaagaacctcttgtctctcctaaaagcatattatgctttgaatgcacaaccaagtgcagaagagctctcaaaaattgctgattcagtaaacctaccactggatgtagtaaaaaagtggtttgaaaagatgcaagctggacagatttcagtgcagtcttctgaaccatcttctcctgaaccaggcaaagtaaatatccctgccaagaacaatgatcagcctcaatctgcaaatgcaaatgaaccccaggacagcacagtaaatctacaaagtcctttgaagatgactaactccccagttttaccagtgggatcaaccaccaatggttccagaagtagtacaccatccccatcacctctaaacctttcctcatccagaaatacacagggttacttgtacacagctgagggtgcacaagaagagccacaagtagaacctcttgatctttcactaccaaagcaacagggagaattattagaaaggtcaactatcactagtgtttaccagaacagtgtttattctgtccaggaagaacccttgaacttgtcttgcgcaaaaaaggagccacaaaaggacagttgtgttacagactcagaaccagttgtaaatgtaatcccaccaagtgccaaccccataaatatcgctatacctacagtcactgcccagttacccacaatcgtggccattgctgaccagaacagtgttccatgcttaagagcgctagctgccaataagcaaacgattctgattccccaggtggcatacacctactcaactacggtcagccctgcagtccaagaaccacccttgaaagtgatccagccaaatggaaatcaggatgaaagacaagatactagctcagaaggagtatcaaatgtagaggatcagaatgactctgattctacaccgcccaaaaagaaaatgcggaagacagaaaatggaatgtatgcttgtgatttgtgtgacaagatattccaaaagagtagttcattattgagacataaatatgaacacacaggtaaaagacctcatgagtgtggaatctgtaaaaaggcatttaaacacaaacatcatttgattgaacacatgcgattacattctggagaaaagccctatcaatgtgacaaatgtggaaagcgcttctcacactctgggtcttattctcaacacatgaatcatcgctactcctactgtaagagagaagcggaagaacgtgacagcacagagcaggaagaggcagggcctgaaatcctctcgaatgagcacgtgggtgccagggcgtctccctcacagggcgactcggacgagagagagagtttgacaagggaagaggatgaagacagtgaaaaagaggaagaggaggaggataaagagatggaagaattgcaggaagaaaaagaatgtgaaaaaccacaaggggatgaggaagaggaggaggaggaggaagaagtggaagaagaagaggtagaagaggcagagaatgagggagaagaagcaaaaactgaaggtctgatgaaggatgacagggctgaaagtcaagcaagcagcttaggacaaaaagtaggcgagagtagtgagcaagtgtctgaagaaaagacaaatgaagcc

SEQ ID NO: 3734 - DNA, 3306 bp, Homo sapiens
  source 1..3306: mol_type = genomic DNA
atgaaggaagactatgacactatggggccagaagccacgatccagaccgcaattaacaatggtacagtgaagaatgcaaattgcacatcagattttgaggaatactttgccaaaagaaaactggaggaacgcgatggtcatgcagtcagcatcgaggagtaccttcagcgcagtgacacagccattatttacccagaagcccctgaggagctgtctcgccttggcacgccagaggccaatgggcaagaagaaaatgacctgccacctggaactccagatgcttttgcccaactgctgacctgcccctactgcgaccggggctacaagcgcttgacatcactgaaggagcacatcaagtaccgccacgagaagaatgaagagaacttttcctgccctctctgtagctacacgtttgcctaccgcacccagctcgagcggcatatggtgacacacaagccagggacagatcagcaccaaatgctaacccaaggagcaggtaatcgcaagttcaaatgcacagagtgtggcaaggccttcaaatataaacaccatctgaaagaacacctgcgaattcacagtggtgaaaaaccttacgagtgcccaaactgcaagaaacgtttctcccattctggttcctacagttcgcacatcagcagcaagaaatgtattggtttaatctctgtaaatggccgaatgagaaacaatatcaagacgggttcttcccctaattctgtttcttcttctcctactaattcagccattacccagttaagaaacaagttggagaatggaaaaccacttagtatgtctgaacagacaggcttacttaaaattaaaacagaaccactagacttcaatgactataaagttcttatggctacacacgggtttagtggcactagtccctttatgaatggtgggcttggagccaccagccctttaggagttcatccatctgctcagagtccaatgcagcacttaggtgtagggatggaagcccctttacttgggtttcccaccatgaatagtaatttaagtgaggtacaaaaggttctacagattgtggacaatactgtttccaggcaaaaaatggactgcaaggctgaagaaatttcaaagttgaaaggttatcacatgaaggatccatgctctcaacctgaggaacaaggagttacttctcctaatattccgcctgtcggtcttccggtagtgagtcataatggtgccactaaaagtattattgactatacgttggaaaaagtcaatgaagccaaagcttgcctccagagcttgactactgactcaaggagacagatcagtaatataaagaaagagaagctacgtactttaatagatttggtcactgatgacaaaatgattgagaaccacaacatatccactccattttcatgccagttctgtaaagaaagttttcctggccccatccctttgcatcagcatgaacgttacctttgtaagatgaatgaagagatcaaggcggtcctgcagcctcatgaaaacatagtccccaacaaagccggagtttttgttgataataaagccctcctcttgtcatctgtactttctgagaaaggaatgacaagccccatcaacccatacaaggaccacatgtctgtactcaaagcatactatgctatgaacatggagcccaactccgatgaactgctgaaaatttccattgctgtgggccttcctcaggaatttgtgaaggaatggtttgaacaacgaaaagtctaccagtactcaaattccaggtccccatccctggaaagaagctccaagccgttagctcccaacagtaaccctcccacaaaagactctttattacccaggtctcctgtaaaacctatggactccataacatcaccatctatagcagaactccacaacagtgttacgaattgtgatcctcctctcaggctaacaaaaccttcccattttaccaatattaaaccagttgaaaaattggaccactccaggagtaatactccttctcccttaaatctttcctccacatcttctaaaaactcccacagtagttcatacactccaaacagcttctcttctgaggagctccaggctgagcctttagacttgtcattaccaaaacaaatgaaagaacccaaaagtattatagccacaaagaacaaaacaaaagctagtagcatcagtttagatcataacagtgtttcttcctcatctgaaaactcagatgagcctctgaacttgacttttatcaagaaggaattttcaaattcaaataatctggacaacaaaagcactaacccagtgttcagcatgaacccatttagtgccaaacctttatacacagctcttccacctcaaagcgcatttccccctgctactttcatgccaccagtccagaccagtattcctgggctacgaccatacccaggactggatcagatgagcttcctaccacatatggcctacacctacccaactggagcagctacttttgctgatatgcagcaaaggagaaagtaccagcggaaacaaggatttcagggagaattgcttgatggagcacaagactacatgtcaggcctagatgatatgacagactccgactcctgtctgtctcgcaaaaagatcaagaagacagagagtggcatgtatgcatgtgacttatgtgacaagacattccagaaaagcagttcccttctgcgacataaatacgaacacacaggaaaaagaccacatcagtgtcagatttgtaagaaagcgtttaaacacaagcaccaccttatcgagcactcaaggcttcactcgggcgagaagccctatcagtgtgataaatgtggcaagcgcttctcacactcgggctcgtactcgcagcacatgaatcacaggtattcctactgcaagcgggaggcggaggagcgggaagcggcggagcgcgaggcgcgcgagaaagggcacttggaacccaccgagctgctgatgaaccgggcttacttgcagagcattacccctcaggggtactctgactcggaggagagggagagtatgccgagggatggcgagagcgagaaggagcacgagaaagaaggcgaggatggctacgggaagctgggcagacaggatggcgacgaggagttcgaggaggaagaggaagaaagtgaaaataaaagtatggatacggatcccgaaacgatacgagatgaagaagagactggagatcactccatggacgatagttcggaggatgggaaaatggaaaccaaatcagaccacgaggaagacaatatggaagatggcatg

SEQ ID NO: 3735 - DNA, 3570 bp, Homo sapiens
  source 1..3570: mol_type = genomic DNA
atgaagcagccgatcatggcggatggcccccggtgcaagaggcgcaaacaagccaatcccaggaggaaaaacgtggtgaactatgacaatgtagtggacacaggttctgaaacagatgaggaagacaagcttcatattgctgaggatgacggtattgccaaccctctggaccaggagacgagtccagctagtgtgcccaaccatgagtcctccccacacgtgagccaagctctgttgccaagagaggaagaggaagatgaaataagggagggtggagtggaacacccctggcacaacaacgagattctacaagcctctgtagatggtccagtgaagaatgcaaattgcacatcagattttgaggaatactttgccaaaagaaaactggaggaacgcgatggtcatgcagtcagcatcgaggagtaccttcagcgcagtgacacagccattatttacccagaagcccctgaggagctgtctcgccttggcacgccagaggccaatgggcaagaagaaaatgacctgccacctggaactccagatgcttttgcccaactgctgacctgcccctactgcgaccggggctacaagcgcttgacatcactgaaggagcacatcaagtaccgccacgagaagaatgaagagaacttttcctgccctctctgtagctacacgtttgcctaccgcacccagctcgagcggcatatggtgacacacaagccagggacagatcagcaccaaatgctaacccaaggagcaggtaatcgcaagttcaaatgcacagagtgtggcaaggccttcaaatataaacaccatctgaaagaacacctgcgaattcacagtggtgaaaaaccttacgagtgcccaaactgcaagaaacgtttctcccattctggttcctacagttcgcacatcagcagcaagaaatgtattggtttaatctctgtaaatggccgaatgagaaacaatatcaagacgggttcttcccctaattctgtttcttcttctcctactaattcagccattacccagttaagaaacaagttggagaatggaaaaccacttagtatgtctgaacagacaggcttacttaaaattaaaacagaaccactagacttcaatgactataaagttcttatggctacacacgggtttagtggcactagtccctttatgaatggtgggcttggagccaccagccctttaggagttcatccatctgctcagagtccaatgcagcacttaggtgtagggatggaagcccctttacttgggtttcccaccatgaatagtaatttaagtgaggtacaaaaggttctacagattgtggacaatactgtttccaggcaaaaaatggactgcaaggctgaagaaatttcaaagttgaaaggttatcacatgaaggatccatgctctcaacctgaggaacaaggagttacttctcctaatattccgcctgtcggtcttccggtagtgagtcataatggtgccactaaaagtattattgactatacgttggaaaaagtcaatgaagccaaagcttgcctccagagcttgactactgactcaaggagacagatcagtaatataaagaaagagaagctacgtactttaatagatttggtcactgatgacaaaatgattgagaaccacaacatatccactccattttcatgccagttctgtaaagaaagttttcctggccccatccctttgcatcagcatgaacgttacctttgtaagatgaatgaagagatcaaggcggtcctgcagcctcatgaaaacatagtccccaacaaagccggagtttttgttgataataaagccctcctcttgtcatctgtactttctgagaaaggaatgacaagccccatcaacccatacaaggaccacatgtctgtactcaaagcatactatgctatgaacatggagcccaactccgatgaactgctgaaaatttccattgctgtgggccttcctcaggaatttgtgaaggaatggtttgaacaacgaaaagtctaccagtactcaaattccaggtccccatccctggaaagaagctccaagccgttagctcccaacagtaaccctcccacaaaagactctttattacccaggtctcctgtaaaacctatggactccataacatcaccatctatagcagaactccacaacagtgttacgaattgtgatcctcctctcaggctaacaaaaccttcccattttaccaatattaaaccagttgaaaaattggaccactccaggagtaatactccttctcccttaaatctttcctccacatcttctaaaaactcccacagtagttcatacactccaaacagcttctcttctgaggagctccaggctgagcctttagacttgtcattaccaaaacaaatgaaagaacccaaaagtattatagccacaaagaacaaaacaaaagctagtagcatcagtttagatcataacagtgtttcttcctcatctgaaaactcagatgagcctctgaacttgacttttatcaagaaggaattttcaaattcaaataatctggacaacaaaagcactaacccagtgttcagcatgaacccatttagtgccaaacctttatacacagctcttccacctcaaagcgcatttccccctgctactttcatgccaccagtccagaccagtattcctgggctacgaccatacccaggactggatcagatgagcttcctaccacatatggcctacacctacccaactggagcagctacttttgctgatatgcagcaaaggagaaagtaccagcggaaacaaggatttcagggagaattgcttgatggagcacaagactacatgtcaggcctagatgatatgacagactccgactcctgtctgtctcgcaaaaagatcaagaagacagagagtggcatgtatgcatgtgacttatgtgacaagacattccagaaaagcagttcccttctgcgacataaatacgaacacacaggaaaaagaccacatcagtgtcagatttgtaagaaagcgtttaaacacaagcaccaccttatcgagcactcaaggcttcactcgggcgagaagccctatcagtgtgataaatgtggcaagcgcttctcacactcgggctcgtactcgcagcacatgaatcacaggtattcctactgcaagcgggaggcggaggagcgggaagcggcggagcgcgaggcgcgcgagaaagggcacttggaacccaccgagctgctgatgaaccgggcttacttgcagagcattacccctcaggggtactctgactcggaggagagggagagtatgccgagggatggcgagagcgagaaggagcacgagaaagaaggcgaggatggctacgggaagctgggcagacaggatggcgacgaggagttcgaggaggaagaggaagaaagtgaaaataaaagtatggatacggatcccgaaacgatacgagatgaagaagagactggagatcactccatggacgatagttcggaggatgggaaaatggaaaccaaatcagaccacgaggaagacaatatggaagatggcatg

SEQ ID NO: 3736 - DNA, 3642 bp, Homo sapiens
  source 1..3642: mol_type = genomic DNA
atgaagcagccgatcatggcggatggcccccggtgcaagaggcgcaaacaagccaatcccaggaggaaaaacgtggtgaactatgacaatgtagtggacacaggttctgaaacagatgaggaagacaagcttcatattgctgaggatgacggtattgccaaccctctggaccaggagacgagtccagctagtgtgcccaaccatgagtcctccccacacgtgagccaagctctgttgccaagagaggaagaggaagatgaaataagggagggtggagtggaacacccctggcacaacaacgagattctacaagcctctgtagatggtccagaagaaatgaaggaagactatgacactatggggccagaagccacgatccagaccgcaattaacaatggtacagtgaagaatgcaaattgcacatcagattttgaggaatactttgccaaaagaaaactggaggaacgcgatggtcatgcagtcagcatcgaggagtaccttcagcgcagtgacacagccattatttacccagaagcccctgaggagctgtctcgccttggcacgccagaggccaatgggcaagaagaaaatgacctgccacctggaactccagatgcttttgcccaactgctgacctgcccctactgcgaccggggctacaagcgcttgacatcactgaaggagcacatcaagtaccgccacgagaagaatgaagagaacttttcctgccctctctgtagctacacgtttgcctaccgcacccagctcgagcggcatatggtgacacacaagccagggacagatcagcaccaaatgctaacccaaggagcaggtaatcgcaagttcaaatgcacagagtgtggcaaggccttcaaatataaacaccatctgaaagaacacctgcgaattcacagtggtgaaaaaccttacgagtgcccaaactgcaagaaacgtttctcccattctggttcctacagttcgcacatcagcagcaagaaatgtattggtttaatctctgtaaatggccgaatgagaaacaatatcaagacgggttcttcccctaattctgtttcttcttctcctactaattcagccattacccagttaagaaacaagttggagaatggaaaaccacttagtatgtctgaacagacaggcttacttaaaattaaaacagaaccactagacttcaatgactataaagttcttatggctacacacgggtttagtggcactagtccctttatgaatggtgggcttggagccaccagccctttaggagttcatccatctgctcagagtccaatgcagcacttaggtgtagggatggaagcccctttacttgggtttcccaccatgaatagtaatttaagtgaggtacaaaaggttctacagattgtggacaatactgtttccaggcaaaaaatggactgcaaggctgaagaaatttcaaagttgaaaggttatcacatgaaggatccatgctctcaacctgaggaacaaggagttacttctcctaatattccgcctgtcggtcttccggtagtgagtcataatggtgccactaaaagtattattgactatacgttggaaaaagtcaatgaagccaaagcttgcctccagagcttgactactgactcaaggagacagatcagtaatataaagaaagagaagctacgtactttaatagatttggtcactgatgacaaaatgattgagaaccacaacatatccactccattttcatgccagttctgtaaagaaagttttcctggccccatccctttgcatcagcatgaacgttacctttgtaagatgaatgaagagatcaaggcggtcctgcagcctcatgaaaacatagtccccaacaaagccggagtttttgttgataataaagccctcctcttgtcatctgtactttctgagaaaggaatgacaagccccatcaacccatacaaggaccacatgtctgtactcaaagcatactatgctatgaacatggagcccaactccgatgaactgctgaaaatttccattgctgtgggccttcctcaggaatttgtgaaggaatggtttgaacaacgaaaagtctaccagtactcaaattccaggtccccatccctggaaagaagctccaagccgttagctcccaacagtaaccctcccacaaaagactctttattacccaggtctcctgtaaaacctatggactccataacatcaccatctatagcagaactccacaacagtgttacgaattgtgatcctcctctcaggctaacaaaaccttcccattttaccaatattaaaccagttgaaaaattggaccactccaggagtaatactccttctcccttaaatctttcctccacatcttctaaaaactcccacagtagttcatacactccaaacagcttctcttctgaggagctccaggctgagcctttagacttgtcattaccaaaacaaatgaaagaacccaaaagtattatagccacaaagaacaaaacaaaagctagtagcatcagtttagatcataacagtgtttcttcctcatctgaaaactcagatgagcctctgaacttgacttttatcaagaaggaattttcaaattcaaataatctggacaacaaaagcactaacccagtgttcagcatgaacccatttagtgccaaacctttatacacagctcttccacctcaaagcgcatttccccctgctactttcatgccaccagtccagaccagtattcctgggctacgaccatacccaggactggatcagatgagcttcctaccacatatggcctacacctacccaactggagcagctacttttgctgatatgcagcaaaggagaaagtaccagcggaaacaaggatttcagggagaattgcttgatggagcacaagactacatgtcaggcctagatgatatgacagactccgactcctgtctgtctcgcaaaaagatcaagaagacagagagtggcatgtatgcatgtgacttatgtgacaagacattccagaaaagcagttcccttctgcgacataaatacgaacacacaggaaaaagaccacatcagtgtcagatttgtaagaaagcgtttaaacacaagcaccaccttatcgagcactcaaggcttcactcgggcgagaagccctatcagtgtgataaatgtggcaagcgcttctcacactcgggctcgtactcgcagcacatgaatcacaggtattcctactgcaagcgggaggcggaggagcgggaagcggcggagcgcgaggcgcgcgagaaagggcacttggaacccaccgagctgctgatgaaccgggcttacttgcagagcattacccctcaggggtactctgactcggaggagagggagagtatgccgagggatggcgagagcgagaaggagcacgagaaagaaggcgaggatggctacgggaagctgggcagacaggatggcgacgaggagttcgaggaggaagaggaagaaagtgaaaataaaagtatggatacggatcccgaaacgatacgagatgaagaagagactggagatcactccatggacgatagttcggaggatgggaaaatggaaaccaaatcagaccacgaggaagacaatatggaagatggcatg

SEQ ID NO: 3737 - DNA, 930 bp, Homo sapiens
  source 1..930: mol_type = genomic DNA
atggacagacttcttagacttggaggaggtatgcctggactgggccaggggccacctacagatgctcctgcagtggacacagcagaacaagtctatatctcttccctggcactgttaaaaatgttaaaacatggccgtgctggagttccaatggaagttatgggtttgatgcttggagaatttgttgatgattataccgtcagagtgattgatgtgtttgctatgccacagtcaggaacaggtgtcagtgtggaggcagttgatccagtgttccaagctaaaatgttggatatgttgaagcagacaggaaggccggagatggttgttggttggtatcacagtcaccctggctttggttgttggctttctggtgtggatatcaacactcagcagagctttgaagccttgtcggagagagctgtggcagtggttgtggatcccattcagagtgtaaaaggaaaggttgttattgatgccttcagattgatcaatgctaatatgatggtcttaggacatgaaccaagacaaacaacttcgaatctgggtcacttaaacaagccatctatccaggcattaattcatggactaaacagacattattactccattactattaactatcggaaaaatgaactggaacagaagatgttgctaaatttgcataagaagagttggatggaaggtttgacacttcaggactacagtgaacattgtaaacacaatgaatcagtggtaaaagagatgttggaattagccaagaattacaataaggctgtagaagaagaagataagatgacacctgaacagctggcaataaagaatgttggcaagcaggaccccaaacgtcatttggaggaacatgtggatgtacttatgacctcaaatattgtccagtgtttagcagctatgttggatactgtcgtatttaaa

SEQ ID NO: 3738 - DNA, 579 bp, Homo sapiens
  source 1..579: mol_type = genomic DNA
atggacaacctgcgcgagactttcctcagcctcgaggatggcttgggctcctctgacagccctggcctgctgtcttcctgggactggaaggacagggcagggccctttgagctgaatcaggcctccccctctcagagcctttccccggctccatcgctggaatcctattcttcttctccctgtccagctgtggctgggctgccctgtgagcacggcggggccagcagtgggggcagcgaaggctgcagtgtcggtggggccagtggcctggtagaggtggactacaatatgttagctttccagcccacccaccttcagggcggtggtggccccaaggcccagaagggcaccaaagtcaggatgtctgtccagcggaggcggaaagccagcgagagggagaagctcaggatgaggaccttggcagatgccctgcacaccctccggaattacctgccacctgtctacagccagagaggccagcctctcaccaagatccagacactcaagtacaccatcaagtacatcggggaactcacagacctccttaaccgcggcagagagcccagagcccagagcgcg

SEQ ID NO: 3739 - DNA, 630 bp, Homo sapiens
  source 1..630: mol_type = genomic DNA
atggacctggaggagtttttgtcagaaaatggcattccccccagcccatctcagcatgaccacagccctcaccctcctgggctgcagccagcttcctcggctgccccctcggtcatggacctcagcagccgggcctctgcaccccttcaccctggcatcccatctccgaactgtatgcagagccccatcagaccaggtcagctgttgccagcaaaccgcaatacaccaagtcccattgatcctgacaccatccaggtcccagtgggttatgagccagacccagcagatcttgccctttccagcatccctggccaggaaatgtttgaccctcgcaaacgcaagttctctgaggaagaactgaagccacagcccatgatcaagaaagctcgcaaagtcttcatccctgatgacctgaaggatgacaagtactgggcaaggcgcagaaagaacaacatggcagccaagcgctcccgcgacgcccggaggctgaaagagaaccagatcgccatccgggcctcgttcctggagaaggagaactcggccctccgccaggaggtggctgacttgaggaaggagctgggcaaatgcaagaacatacttgccaagtatgaggccaggcacgggcccctg

SEQ ID NO: 3740 - DNA, 1071 bp, Homo sapiens
  source 1..1071: mol_type = genomic DNA
atgcagagtgtgcagagcacgagcttttgtctccgaaagcagtgcctttgcctgaccttcctgcttctccatctcctgggacaggtcgctgcgactcagcgctgccctccccagtgcccgggccggtgccctgcgacgccgccgacctgcgcccccggggtgcgcgcggtgctggacggctgctcatgctgtctggtgtgtgcccgccagcgtggcgagagctgctcagatctggagccatgcgacgagagcagtggcctctactgtgatcgcagcgcggaccccagcaaccagactggcatctgcacggcggtagagggagataactgtgtgttcgatggggtcatctaccgcagtggagagaaatttcagccaagctgcaaattccagtgcacctgcagagatgggcagattggctgtgtgccccgctgtcagctggatgtgctactgcctgagcctaactgcccagctccaagaaaagttgaggtgcctggagagtgctgtgaaaagtggatctgtggcccagatgaggaggattcactgggaggccttacccttgcagcttacaggccagaagccaccctaggagtagaagtctctgactcaagtgtcaactgcattgaacagaccacagagtggacagcatgctccaagagctgtggtatggggttctccacccgggtcaccaataggaaccgtcaatgtgagatgctgaaacagactcggctctgcatggtgcggccctgtgaacaagagccagagcagccaacagataagaaaggaaaaaagtgtctccgcaccaagaagtcactcaaagccatccacctgcagttcaagaactgcaccagcctgcacacctacaagcccaggttctgtggggtctgcagtgatggccgctgctgcactccccacaataccaaaaccatccaggcagagtttcagtgctccccagggcaaatagtcaagaagccagtgatggtcattgggacctgcacctgtcacaccaactgtcctaagaacaatgaggccttcctccaggagctggagctgaagactaccagagggaaaatg

SEQ ID NO: 3741 - DNA, 1503 bp, Homo sapiens
  source 1..1503: mol_type = genomic DNA
atgcaggcgcgctactccgtgtccgaccccaacgccctgggagtggtgccctacctgagcgagcagaattactaccgggctgcgggcagctacggcggcatggccagccccatgggcgtctattccggccacccggagcagtacagcgcggggatgggccgctcctacgcgccctaccaccaccaccagcccgcggcgcctaaggacctggtgaagccgccctacagctacatcgcgctcatcaccatggccatccagaacgcgcccgagaagaagatcaccttgaacggcatctaccagttcatcatggaccgcttccccttctaccgggagaacaagcagggctggcagaacagcatccgccacaacctctcgctcaacgagtgcttcgtcaaggtgccccgcgacgacaagaagcccggcaagggcagttactggaccctggacccggactcctacaacatgttcgagaacggcagcttcctgcggcgccggcggcgcttcaaaaagaaggacgtgtccaaggagaaggaggagcgggcccacctcaaggagccgcccccggcggcgtccaagggcgccccggccaccccccacctagcggacgcccccaaggaggccgagaagaaggtggtgatcaagagcgaggcggcgtccccggcgctgccggtcatcaccaaggtggagacgctgagccccgagagcgcgctgcagggcagcccgcgcagcgcggcctccacgcccgccggctcccccgacggctcgctgccggagcaccacgccgcggcgcccaacgggctgcctggcttcagcgtggagaacatcatgaccctgcgaacgtcgccgccgggcggagagctgagcccgggggccggacgcgcgggcctggtggtgccgccgctggcgctgccctacgccgccgcgccgcccgccgcctacggccagccgtgcgctcagggcctggaggccggggccgccgggggctaccagtgcagcatgcgagcgatgagcctgtacaccggggccgagcggccggcgcacatgtgcgtcccgcccgccctggacgaggccctctcggaccacccgagcggccccacgtcgcccctgagcgctctcaacctcgccgccggccaggagggcgcgctcgccgccacgggccaccaccaccagcaccacggccaccaccacccgcaggcgccgccgcccccgccggctccccagccccagccgacgccgcagcccggggccgccgcggcgcaggcggcctcctggtatctcaaccacagcggggacctgaaccacctccccggccacacgttcgcggcccagcagcaaactttccccaacgtgcgggagatgttcaactcccaccggctggggattgagaactcgaccctcggggagtcccaggtgagtggcaatgccagctgccagctgccctacagatccacgccgcctctctatcgccacgcagccccctactcctacgactgcacgaaatac

SEQ ID NO: 3742 - DNA, 1659 bp, Homo sapiens
  source 1..1659: mol_type = genomic DNA
atgcaggcgcgctactccgtgtccagccccaactccctgggagtggtgccctacctcggcggcgagcagagctactaccgcgcggcggccgcggcggccgggggcggctacaccgccatgccggcccccatgagcgtgtactcgcaccctgcgcacgccgagcagtacccgggcggcatggcccgcgcctacgggccctacacgccgcagccgcagcccaaggacatggtgaagccgccctatagctacatcgcgctcatcaccatggccatccagaacgccccggacaagaagatcaccctgaacggcatctaccagttcatcatggaccgcttccccttctaccgggacaacaagcagggctggcagaacagcatccgccacaacctctcgctcaacgagtgcttcgtcaaggtgccgcgcgacgacaagaagccgggcaagggcagctactggacgctggacccggactcctacaacatgttcgagaacggcagcttcctgcggcggcggcggcgcttcaagaagaaggacgcggtgaaggacaaggaggagaaggacaggctgcacctcaaggagccgcccccgcccggccgccagcccccgcccgcgccgccggagcaggccgacggcaacgcgcccggtccgcagccgccgcccgtgcgcatccaggacatcaagaccgagaacggtacgtgcccctcgccgccccagcccctgtccccggccgccgccctgggcagcggcagcgccgccgcggtgcccaagatcgagagccccgacagcagcagcagcagcctgtccagcgggagcagccccccgggcagcctgccgtcggcgcggccgctcagcctggacggtgcggattccgcgccgccgccgcccgcgccctccgccccgccgccgcaccatagccagggcttcagcgtggacaacatcatgacgtcgctgcgggggtcgccgcagagcgcggccgcggagctcagctccggccttctggcctcggcggccgcgtcctcgcgcgcggggatcgcacccccgctggcgctcggcgcctactcgcccggccagagctccctctacagctccccctgcagccagacctccagcgcgggcagctcgggcggcggcggcggcggcgcgggggccgcggggggcgcgggcggcgccgggacctaccactgcaacctgcaagccatgagcctgtacgcggccggcgagcgcgggggccacttgcagggcgcgcccgggggcgcgggcggctcggccgtggacgaccccctgcccgactactctctgcctccggtcaccagcagcagctcgtcgtccctgagtcacggcggcggcggcggcggcggcgggggaggccaggaggccggccaccaccctgcggcccaccaaggccgcctcacctcgtggtacctgaaccaggcgggcggagacctgggccacttggcgagcgcggcggcggcggcggcggccgcaggctacccgggccagcagcagaacttccactcggtgcgggagatgttcgagtcacagaggatcggcttgaacaactctccagtgaacgggaatagtagctgtcaaatggccttcccttccagccagtctctgtaccgcacgtccggagctttcgtctacgactgtagcaagttt

SEQ ID NO: 3743 - DNA, 504 bp, Homo sapiens
  source 1..504: mol_type = genomic DNA
atgcacccaagtttggctacaatggggaaactggcttcaaagctacaacttgatctatccgtagtaaagatctggttcaagaaccagcgtgccaaatggaagaggcagcagcggcagcaaatgcagacacggccatcactagggccagcaaaccagacaacttcagtgaagaaggaggagactccctcagccataactactgcaaacattcgtccagtaagtcctggaatctctgatgcaaatgaccatgatctacgtgagccttctggtatcaagaatcctggaggagccagcgcctctgcgagggtttcatcctgggattctcagtcatatgacattgaacagatatgtctgggggcttcaaatcctccttgggcctccactctctttgaaatagatgaatttgtaaagatctatgacttgccaggggaagatgacaccagcagcctaaatcaatatctttttccagtatgccttgagtatgaccagctccaatcttcagtg

SEQ ID NO: 3744 - DNA, 1401 bp, Homo sapiens
  source 1..1401: mol_type = genomic DNA
atgcactccaccacccccatcagctccctcttctccttcaccagccccgcagtgaagagactgctaggctggaagcaaggagatgaagaggaaaagtgggcagagaaggcagtggactctctagtgaagaagttaaagaagaagaagggagccatggacgagctggagagggctctcagctgcccggggcagcccagcaaatgcgtcacgattccccgctccctggacgggcggctgcaggtgtcccaccgcaagggcctgccccatgtgatttactgtcgcgtgtggcgctggccggatctgcagtcccaccacgagctgaagccgctggagtgctgtgagttcccatttggctccaagcagaaagaagtgtgcattaacccttaccactaccgccgggtggagactccagtactgcctcctgtgctcgtgccaagacacagtgaatataacccccagctcagcctcctggccaagttccgcagcgcctccctgcacagtgagccactcatgccacacaacgccacctatcctgactctttccagcagcctccgtgctctgcactccctccctcacccagccacgcgttctcccagtccccgtgcacggccagctaccctcactccccaggaagtccttctgagccagagagtccctatcaacactcagttgacacaccacccctgccttatcatgccacagaagcctctgagacccagagtggccaacctgtagatgccacagctgatagacatgtagtgctatcgataccaaatggagactttcgaccagtttgttacgaggagccccagcactggtgctcggtcgcctactatgaactgaacaaccgagttggggagacattccaggcttcctcccgaagtgtgctcatagatgggttcaccgacccttcaaataacaggaacagattctgtcttggacttctttctaatgtaaacagaaactcaacgatagaaaataccaggagacatataggaaagggtgtgcacttgtactacgtcgggggagaggtgtatgccgagtgcgtgagtgacagcagcatctttgtgcagagccggaactgcaactatcaacacggcttccacccagctaccgtctgcaagatccccagcggctgcagcctcaaggtcttcaacaaccagctcttcgctcagctcctggcccagtcagttcaccacggctttgaagtcgtgtatgaactgaccaagatgtgtactatccggatgagttttgttaagggttggggtgctgagtatcatcgccaggatgtcaccagcaccccctgctggattgagattcatcttcatgggccactgcagtggctggacaaagttctgactcagatgggctctccacataaccccatttcttcagtgtct

SEQ ID NO: 3745 - DNA, 3660 bp, Homo sapiens
  source 1..3660: mol_type = genomic DNA
atgggtgaccagcaactgtacaagaccaaccatgtggcccatggtagtgagaaccttttctaccaacagccaccacttggcgtccacagcgggctgaaccacaactatgggaatgcagttacagggggcggaatggatgcccctcaggcctcgccaatctccccccacttccctcaagatacacgggatggtctgggcttgcctgttggctccaaaaaccttggccaaatggatacctcgaggcagggagggtggggaagtcatgcagggcctggaaaccatgtccagctacgtggaaacctggccaactcaaacatgatgtggggggcaccagcccaggctgagcccactgatggctaccaatacacctactcccaggccagcgagatccggacccagaagcttaccagcggtgtcttacacaagctggactctttcacccaggtgtttgccaaccaaaacctgcgaattcaggtcaacaatatggcccaggtgctgcacactcagtcagcagtgatggatggagcccctgacagtgctctccgccagctgctgtctcagaagcccatggagcccccagcaccggctatcccttcccgctaccagcaggtgccccagcagcctcaccctggtttcactggtgggctgtccaaaccagctcttcaggtcgggcagcaccctacccaagggcacctgtattatgactaccagcagcctctggctcaggtgccagtgcagggaggacagccactgcaggccccacagatgctgtcacagcacatgcaacagatgcagcagcaccagtattacccaccgcagcaacagcagcaagccgggcaacagcgtatctccatgcaagaaatacagacgcagccgcaacaaattcgcccatcacagccacagccgccgccacagcagcagcagccgcagcagctacagctgcagcagcggcagggttcaatgcagatacctcagtattatcagccccaacccatgatgcagcacttgcaagagcagcagcagcaacagatgcacctgcagcctccttcttatcacagggaccctcaccagtataccccagagcaggcacacactgtccagctgattcccctgggctccatgtcccagtactactaccaggagccccagcagccctacagccaccccctctaccagcagagccacctgtcccagcaccagcagcgtgaggacagtcagctgaagacctactctagtgacagacaggcccaggccatgctgagctcccatggggacctggggcctcctgacacaggaatgggagacccagcgagctcagatctgacccgggtcagcagcaccctcccccatcgccccctcctatcccccagtgggatccacctcaacaacatggggcctcagcatcagcagctgtctcccagtgccatgtggccccagatgcacctacctgatgggagagcccagccagggtcccctgagtcaagtggccaacccaaaggagcgtttggggagcagtttgatgccaagaacaagctgacatgctccatctgcctgaaggagttcaagaacctgcctgccctgaatggccacatgcggtcccacgggggaatgagggcctcccccaacctcaaacaggaggaaggagagaaggtcctgccgcctcagccccagccaccactgccgcctccgcctccgcctccgccgccaccacagctccctcccgaggcagaaagcctcacgcctatggtcatgcccgtgtctgtccctgtcaagcttctcccgcccaagcccagctctcaggggttcaccaacagcaccgttgccgccccctccgccagagacaagccagccagctcgatgtcggacgacgagatgcctgtgctcgtgaggatgaccctctctcccccacactcaccccaaggggctgccccccgcacgcctgctgaaatccccaggaagcatcagccgagtgtgcccaaagccgaggagcccctcaagaccgtgcaggagaagaaaaagttccggcaccggccggaacctctcttcatcccgccgccgccctcctacaacccgaaccccgctgcctcctactcgggcgccaccctgtaccagagccagctgcgctccccgcgcgtcctcggggaccacctgctcctggaccccacccacgagctgcccccttacacgcccccacccatgctgagcccggtgcgccagggctcggggctcttcagcaatgtcctcatctccggccacggccctggcgcccacccgcagctgcccctgacgcccctgacgcccacaccacgggtgctgctgtgtcgctccaacagcatcgatggcagcaacgtgacggtcaccccagggcctggagagcagactgtagatgttgaaccacgcatcaacattggcttgagattccaagcagaaatccctgaactccaagatatctctgccctggcccaggacacacacaaggccacactggtatggaagccctggccagaactagaaaaccatgacctccagcaaagagtggagaatcttctgaatttgtgctgttccagtgcattgccaggtggagggaccaattctgaatttgctttgcactctctgtttgaggccaaaggtgatgtgatggttgctctggaaatgctgctactgcggaagcctgtcaggttaaaatgtcatcctttagcaaattaccactatgccggttcggacaagtggacctccctagaaagaaaactgtttaacaaagcactagccacttacagcaaagactttatttttgtacagaagatggtgaagtccaagacggtggctcagtgcgtggagtactactacacgtggaaaaagatcatgcggctggggcggaaacaccggacacgcctggcagaaatcatcgacgattgtgtgacaagtgaagaagaagaagagttagaggaggaggaggaggaggacccggaagaagataggaaatccacaaaagaagaagagagtgaggtgccgaagtccccggagccaccacccgtccccgtcctggctcccacggaggggccgcccctgcaggccctgggccagccctcaggctccttcatctgtgaaatgcccaactgtggggctgtgttcagctcccgacaggcactgaatggccatgcccgcatccacgggggcaccaaccaggtgaccaaggcccgaggtgccatcccctctgggaagcagaagcctggtggcacccagagtgggtactgttcggtaaagagctcaccctctcacagcaccaccagcggcgagacagaccccaccaccatcttcccctgcaaggagtgtggcaaagtcttcttcaagatcaaaagccgaaatgcacacatgaaaactcacaggcagcaggaggaacaacagaggcaaaaggctcagaaggcggcttttgcagctgagatggcagccacgattgagaggactacggggcccgtgggggcgccggggctgctgcccctggaccagctgagtctgatcaaacccatcaaggatgtggacatcctcgacgacgacgtcgtccagcagttgggaggtgtcatggaagaggctgaagttgtggacaccgatcttctcttggatgatcaagattcagtcttgcttcagggtgacgcagaacta

SEQ ID NO: 3746 - DNA, 3387 bp, Homo sapiens
  source 1..3387: mol_type = genomic DNA
atgggtgaccagcaactgtacaagaccaaccatgtggcccatggtagtgagaaccttttctaccaacagccaccacttggcgtccacagcgggctgaaccacaactatgggaatgcagttacagggggcggaatggatgcccctcaggcctcgccaatctccccccacttccctcaagatacacgggatggtctgggcttgcctgttggctccaaaaaccttggccaaatggatacctcgaggcagggagggtggggaagtcatgcagggcctggaaaccatgtccagctacgtggaaacctggccaactcaaacatgatgtggggggcaccagcccaggctgagcccactgatggctaccaatacacctactcccaggccagcgagatccggacccagaagcttaccagcggtgtcttacacaagctggactctttcacccaggtgtttgccaaccaaaacctgcgaattcaggtcaacaatatggcccaggtgctgcacactcagtcagcagtgatggatggagcccctgacagtgctctccgccagctgctgtctcagaagcccatggagcccccagcaccggctatcccttcccgctaccagcaggtgccccagcagcctcaccctggtttcactggtgggctgtccaaaccagctcttcaggtcgggcagcaccctacccaagggcacctgtattatgactaccagcagcctctggctcaggtgccagtgcagggaggacagccactgcaggccccacagatgctgtcacagcacatgcaacagatgcagcagcaccagtattacccaccgcagcaacagcagcaagccgggcaacagcgtatctccatgcaagaaatacagacgcagccgcaacaaattcgcccatcacagccacagccgccgccacagcagcagcagccgcagcagctacagctgcagcagcggcagggttcaatgcagatacctcagtattatcagccccaacccatgatgcagcacttgcaagagcagcagcagcaacagatgcacctgcagcctccttcttatcacagggaccctcaccagtataccccagagcaggcacacactgtccagctgattcccctgggctccatgtcccagtactactaccaggagccccagcagccctacagccaccccctctaccagcagagccacctgtcccagcaccagcagcgtgaggacagtcagctgaagacctactctagtgacagacaggcccaggccatgctgagctcccatggggacctggggcctcctgacacaggaatgggagacccagcgagctcagatctgacccgggtcagcagcaccctcccccatcgccccctcctatcccccagtgggatccacctcaacaacatggggcctcagcatcagcagctgtctcccagtgccatgtggccccagatgcacctacctgatgggagagcccagccagggtcccctgagtcaagtggccaacccaaaggagcgtttggggagcagtttgatgccaagaacaagctgacatgctccatctgcctgaaggagttcaagaacctgcctgccctgaatggccacatgcggtcccacgggggaatgagggcctcccccaacctcaaacaggaaatccccaggaagcatcagccgagtgtgcccaaagccgaggagcccctcaagaccgtgcaggagaagaaaaagttccggcaccggccggaacctctcttcatcccgccgccgccctcctacaacccgaaccccgctgcctcctactcgggcgccaccctgtaccagagccagctgcgctccccgcgcgtcctcggggaccacctgctcctggaccccacccacgagctgcccccttacacgcccccacccatgctgagcccggtgcgccagggctcggggctcttcagcaatgtcctcatctccggccacggccctggcgcccacccgcagctgcccctgacgcccctgacgcccacaccacgggtgctgctgtgtcgctccaacagcatcgatggcagcaacgtgacggtcaccccagggcctggagagcagactgtagatgttgaaccacgcatcaacattggcttgagattccaagcagaaatccctgaactccaagatatctctgccctggcccaggacacacacaaggccacactggtatggaagccctggccagaactagaaaaccatgacctccagcaaagagtggagaatcttctgaatttgtgctgttccagtgcattgccaggtggagggaccaattctgaatttgctttgcactctctgtttgaggccaaaggtgatgtgatggttgctctggaaatgctgctactgcggaagcctgtcaggttaaaatgtcatcctttagcaaattaccactatgccggttcggacaagtggacctccctagaaagaaaactgtttaacaaagcactagccacttacagcaaagactttatttttgtacagaagatggtgaagtccaagacggtggctcagtgcgtggagtactactacacgtggaaaaagatcatgcggctggggcggaaacaccggacacgcctggcagaaatcatcgacgattgtgtgacaagtgaagaagaagaagagttagaggaggaggaggaggaggacccggaagaagataggaaatccacaaaagaagaagagagtgaggtgccgaagtccccggagccaccacccgtccccgtcctggctcccacggaggggccgcccctgcaggccctgggccagccctcaggctccttcatctgtgaaatgcccaactgtggggctgactgtagatgtcatgtcactccctttcttccccaggtgttcagctcccgacaggcactgaatggccatgcccgcatccacgggggcaccaaccaggtgaccaaggcccgaggtgccatcccctctgggaagcagaagcctggtggcacccagagtgggtactgttcggtaaagagctcaccctctcacagcaccaccagcggcgagacagaccccaccaccatcttcccctgcaaggagtgtggcaaagtcttcttcaagatcaaaagccgaaatgcacacatgaaaactcacaggcagcaggaggaacaacagaggcaaaaggctcagaaggcggcttttgcagctgagatggcagccacgattgagaggactacggggcccgtgggggcgccggggctgctgcccctggaccagctgagtctgatcaaacccatcaaggatgtggacatcctcgacgacgacgtcgtccagcagttgggaggtgtcatggaagaggctgaagttgtggacaccgatcttctcttggatgatcaagattcagtcttgcttcagggtgacgcagaacta

SEQ ID NO: 3747 - DNA, 3600 bp, Homo sapiens
  source 1..3600: mol_type = genomic DNA
atgggtgaccagcaactgtacaagaccaaccatgtggcccatggtagtgagaaccttttctaccaacagccaccacttggcgtccacagcgggctgaaccacaactatgggaatgcagttacagggggcggaatggatgcccctcaggcctcgccaatctccccccacttccctcaagatacacgggatggtctgggcttgcctgttggctccaaaaaccttggccaaatggatacctcgaggcagggagggtggggaagtcatgcagggcctggaaaccatgtccagctacgtggaaacctggccaactcaaacatgatgtggggggcaccagcccaggctgagcccactgatggctaccaatacacctactcccaggccagcgagatccggacccagaagcttaccagcggtgtcttacacaagctggactctttcacccaggtgtttgccaaccaaaacctgcgaattcaggtcaacaatatggcccaggtgctgcacactcagtcagcagtgatggatggagcccctgacagtgctctccgccagctgctgtctcagaagcccatggagcccccagcaccggctatcccttcccgctaccagcaggtgccccagcagcctcaccctggtttcactggtgggctgtccaaaccagctcttcaggtcgggcagcaccctacccaagggcacctgtattatgactaccagcagcctctggctcaggtgccagtgcagggaggacagccactgcaggccccacagatgctgtcacagcacatgcaacagatgcagcagcaccagtattacccaccgcagcaacagcagcaagccgggcaacagcgtatctccatgcaagaaatacagacgcagccgcaacaaattcgcccatcacagccacagccgccgccacagcagcagcagccgcagcagctacagctgcagcagcggcagggttcaatgcagatacctcagtattatcagccccaacccatgatgcagcacttgcaagagcagcagcagcaacagatgcacctgcagcctccttcttatcacagggaccctcaccagtataccccagagcaggcacacactgtccagctgattcccctgggctccatgtcccagtactactaccaggagccccagcagccctacagccaccccctctaccagcagagccacctgtcccagcaccagcagcgtgaggacagtcagctgaagacctactctagtgacagacaggcccaggccatgctgagctcccatggggacctggggcctcctgacacaggaatgggagacccagcgagctcagatctgacccgggtcagcagcaccctcccccatcgccccctcctatcccccagtgggatccacctcaacaacatggggcctcagcatcagcagctgtctcccagtgccatgtggccccagatgcacctacctgatgggagagcccagccagggtcccctgagtcaagtggccaacccaaaggagcgtttggggagcagtttgatgccaagaacaagctgacatgctccatctgcctgaaggagttcaagaacctgcctgccctgaatggccacatgcggtcccacgggggaatgagggcctcccccaacctcaaacaggaggaaggagagaaggtcctgccgcctcagccccagccaccactgccgcctccgcctccgcctccgccgccaccacagctccctcccgaggcagaaagcctcacgcctatggtcatgcccgtgtctgtccctgtcaagcttctcccgcccaagcccagctctcaggggttcaccaacagcaccgttgccgccccctccgccagagacaagccagccagctcgatgtcggacgacgagatgcctgtgctcgaaatccccaggaagcatcagccgagtgtgcccaaagccgaggagcccctcaagaccgtgcaggagaagaaaaagttccggcaccggccggaacctctcttcatcccgccgccgccctcctacaacccgaaccccgctgcctcctactcgggcgccaccctgtaccagagccagctgcgctccccgcgcgtcctcggggaccacctgctcctggaccccacccacgagctgcccccttacacgcccccacccatgctgagcccggtgcgccagggctcggggctcttcagcaatgtcctcatctccggccacggccctggcgcccacccgcagctgcccctgacgcccctgacgcccacaccacgggtgctgctgtgtcgctccaacagcatcgatggcagcaacgtgacggtcaccccagggcctggagagcagactgtagatgttgaaccacgcatcaacattggcttgagattccaagcagaaatccctgaactccaagatatctctgccctggcccaggacacacacaaggccacactggtatggaagccctggccagaactagaaaaccatgacctccagcaaagagtggagaatcttctgaatttgtgctgttccagtgcattgccaggtggagggaccaattctgaatttgctttgcactctctgtttgaggccaaaggtgatgtgatggttgctctggaaatgctgctactgcggaagcctgtcaggttaaaatgtcatcctttagcaaattaccactatgccggttcggacaagtggacctccctagaaagaaaactgtttaacaaagcactagccacttacagcaaagactttatttttgtacagaagatggtgaagtccaagacggtggctcagtgcgtggagtactactacacgtggaaaaagatcatgcggctggggcggaaacaccggacacgcctggcagaaatcatcgacgattgtgtgacaagtgaagaagaagaagagttagaggaggaggaggaggaggacccggaagaagataggaaatccacaaaagaagaagagagtgaggtgccgaagtccccggagccaccacccgtccccgtcctggctcccacggaggggccgcccctgcaggccctgggccagccctcaggctccttcatctgtgaaatgcccaactgtggggctgtgttcagctcccgacaggcactgaatggccatgcccgcatccacgggggcaccaaccaggtgaccaaggcccgaggtgccatcccctctgggaagcagaagcctggtggcacccagagtgggtactgttcggtaaagagctcaccctctcacagcaccaccagcggcgagacagaccccaccaccatcttcccctgcaaggagtgtggcaaagtcttcttcaagatcaaaagccgaaatgcacacatgaaaactcacaggcagcaggaggaacaacagaggcaaaaggctcagaaggcggcttttgcagctgagatggcagccacgattgagaggactacggggcccgtgggggcgccggggctgctgcccctggaccagctgagtctgatcaaacccatcaaggatgtggacatcctcgacgacgacgtcgtccagcagttgggaggtgtcatggaagaggctgaagttgtggacaccgatcttctcttggatgatcaagattcagtcttgcttcagggtgacgcagaacta

SEQ ID NO: 3748 - DNA, 3351 bp, Homo sapiens
  source 1..3351: mol_type = genomic DNA
atgggtgaccagcaactgtacaagaccaaccatgtggcccatggtagtgagaaccttttctaccaacagccaccacttggcgtccacagcgggctgaaccacaactatgggaatgcagttacagggggcggaatggatgcccctcaggcctcgccaatctccccccacttccctcaagatacacgggatggtctgggcttgcctgttggctccaaaaaccttggccaaatggatacctcgaggcagggagggtggggaagtcatgcagggcctggaaaccatgtccagctacgtggaaacctggccaactcaaacatgatgtggggggcaccagcccaggctgagcccactgatggctaccaatacacctactcccaggccagcgagatccggacccagaagcttaccagcggtgtcttacacaagctggactctttcacccaggtgtttgccaaccaaaacctgcgaattcaggtcaacaatatggcccaggtgctgcacactcagtcagcagtgatggatggagcccctgacagtgctctccgccagctgctgtctcagaagcccatggagcccccagcaccggctatcccttcccgctaccagcaggtgccccagcagcctcaccctggtttcactggtgggctgtccaaaccagctcttcaggtcgggcagcaccctacccaagggcacctgtattatgactaccagcagcctctggctcaggtgccagtgcagggaggacagccactgcaggccccacagatgctgtcacagcacatgcaacagatgcagcagcaccagtattacccaccgcagcaacagcagcaagccgggcaacagcgtatctccatgcaagaaatacagacgcagccgcaacaaattcgcccatcacagccacagccgccgccacagcagcagcagccgcagcagctacagctgcagcagcggcagggttcaatgcagatacctcagtattatcagccccaacccatgatgcagcacttgcaagagcagcagcagcaacagatgcacctgcagcctccttcttatcacagggaccctcaccagtataccccagagcaggcacacactgtccagctgattcccctgggctccatgtcccagtactactaccaggagccccagcagccctacagccaccccctctaccagcagagccacctgtcccagcaccagcagcgtgaggacagtcagctgaagacctactctagtgacagacaggcccaggccatgctgagctcccatggggacctggggcctcctgacacaggaatgggagacccagcgagctcagatctgacccgggtcagcagcaccctcccccatcgccccctcctatcccccagtgggatccacctcaacaacatggggcctcagcatcagcagctgtctcccagtgccatgtggccccagatgcacctacctgatgggagagcccagccagggtcccctgagtcaagtggccaacccaaaggagcgtttggggagcagtttgatgccaagaacaagctgacatgctccatctgcctgaaggagttcaagaacctgcctgccctgaatggccacatgcggtcccacgggggaatgagggcctcccccaacctcaaacaggaaatccccaggaagcatcagccgagtgtgcccaaagccgaggagcccctcaagaccgtgcaggagaagaaaaagttccggcaccggccggaacctctcttcatcccgccgccgccctcctacaacccgaaccccgctgcctcctactcgggcgccaccctgtaccagagccagctgcgctccccgcgcgtcctcggggaccacctgctcctggaccccacccacgagctgcccccttacacgcccccacccatgctgagcccggtgcgccagggctcggggctcttcagcaatgtcctcatctccggccacggccctggcgcccacccgcagctgcccctgacgcccctgacgcccacaccacgggtgctgctgtgtcgctccaacagcatcgatggcagcaacgtgacggtcaccccagggcctggagagcagactgtagatgttgaaccacgcatcaacattggcttgagattccaagcagaaatccctgaactccaagatatctctgccctggcccaggacacacacaaggccacactggtatggaagccctggccagaactagaaaaccatgacctccagcaaagagtggagaatcttctgaatttgtgctgttccagtgcattgccaggtggagggaccaattctgaatttgctttgcactctctgtttgaggccaaaggtgatgtgatggttgctctggaaatgctgctactgcggaagcctgtcaggttaaaatgtcatcctttagcaaattaccactatgccggttcggacaagtggacctccctagaaagaaaactgtttaacaaagcactagccacttacagcaaagactttatttttgtacagaagatggtgaagtccaagacggtggctcagtgcgtggagtactactacacgtggaaaaagatcatgcggctggggcggaaacaccggacacgcctggcagaaatcatcgacgattgtgtgacaagtgaagaagaagaagagttagaggaggaggaggaggaggacccggaagaagataggaaatccacaaaagaagaagagagtgaggtgccgaagtccccggagccaccacccgtccccgtcctggctcccacggaggggccgcccctgcaggccctgggccagccctcaggctccttcatctgtgaaatgcccaactgtggggctgtgttcagctcccgacaggcactgaatggccatgcccgcatccacgggggcaccaaccaggtgaccaaggcccgaggtgccatcccctctgggaagcagaagcctggtggcacccagagtgggtactgttcggtaaagagctcaccctctcacagcaccaccagcggcgagacagaccccaccaccatcttcccctgcaaggagtgtggcaaagtcttcttcaagatcaaaagccgaaatgcacacatgaaaactcacaggcagcaggaggaacaacagaggcaaaaggctcagaaggcggcttttgcagctgagatggcagccacgattgagaggactacggggcccgtgggggcgccggggctgctgcccctggaccagctgagtctgatcaaacccatcaaggatgtggacatcctcgacgacgacgtcgtccagcagttgggaggtgtcatggaagaggctgaagttgtggacaccgatcttctcttggatgatcaagattcagtcttgcttcagggtgacgcagaacta

SEQ ID NO: 3749 - DNA, 1488 bp, Homo sapiens
  source 1..1488: mol_type = genomic DNA
atgttcaggtccaaacgctcggggctggtgcggcgactttggcgaagtcgtgtggtccccgaccgggaggaaggcggcagcggcggcggcggtggcggcgacgaggatgggagcttgggcagccgagctgagccggccccgcgggcaagagagggcggaggctgcggccgctccgaagtccgcccggtagccccgcggcggccccgggacgcagtgggacagcgaggcgcccagggcgcggggaggcgccggcgcgcagggggccccccgaggcccatgtcggagccaggggccggcgctgggagctccctgctggacgtggcggagccgggaggcccgggctggctgcccgagagtgactgcgagacggtgacctgctgtctcttttcggagcgggacgccgccggcgcgccccgggacgccagcgaccccctggccggggcggccctggagccggcgggcggcgggcggagtcgcgaagcgcgctcgcggctgctgctgctggagcaggaactcaaaaccgtcacgtactcgctgctgaagcggctcaaggagcgctcgctggacacgctgctggaggcggtggagtcccgcggcggcgtgccgggcggctgcgtgctggtgccgcgcgccgacctccgcctgggcggccagcccgcgccgccgcagctgctgctcggccgcctctttcgctggcccgacctgcagcacgccgtggagctgaagcccctgtgcggctgccacagcttcgccgccgccgccgacggccctaccgtgtgctgcaacccctaccacttcagccggctctgcgggcccgaatctccgccacctccctactctcggctgtctcctcgcgacgagtacaagccactggatctgtccgattccacattgtcttacactgaaacggaggctaccaactccctcatcactgctccgggtgaattctcagacgccagcatgtctccggacgccaccaagccgagccactggtgcagcgtggcgtactgggagcaccggacgcgcgtgggccgcctctatgcggtgtacgaccaggccgtcagcatcttctacgacctacctcagggcagcggcttctgcctgggccagctcaacctggagcagcgcagcgagtcggtgcggcgaacgcgcagcaagatcggcttcggcatcctgctcagcaaggagcccgacggcgtgtgggcctacaaccgcggcgagcaccccatcttcgtcaactccccgacgctggacgcgcccggcggccgcgccctggtcgtgcgcaaggtgccccccggctactccatcaaggtgttcgacttcgagcgctcgggcctgcagcacgcgcccgagcccgacgccgccgacggcccctacgaccccaacagcgtccgcatcagcttcgccaagggctgggggccctgctactcccggcagttcatcacctcctgcccctgctggctggagatcctcctcaacaaccccaga

SEQ ID NO: 3750 - DNA, 1275 bp, Homo sapiens
  source 1..1275: mol_type = genomic DNA
atgttcaggaccaaacgatctgcgctcgtccggcgtctctggaggagccgtgcgcccggcggcgaggacgaggaggagggcgcagggggaggtggaggaggaggcgagctgcggggagaaggggcgacggacagccgagcgcatggggccggtggcggcggcccgggcagggctggatgctgcctgggcaaggcggtgcgaggtgccaaaggtcaccaccatccccacccgccagccgcgggcgccggcgcggccgggggcgccgaggcggatctgaaggcgctcacgcactcggtgctcaagaaactgaaggagcggcagctggagctgctgctccaggccgtggagtcccgcggcgggacgcgcaccgcgtgcctcctgctgcccggccgcctggactgcaggctgggcccgggggcgcccgccggcgcgcagcctgcgcagccgccctcgtcctactcgctccccctcctgctgtgcaaagtgttcaggtggccggatctcaggcattcctcggaagtcaagaggctgtgttgctgtgaatcttacgggaagatcaaccccgagctggtgtgctgcaacccccatcaccttagccgactctgcgaactagagtctcccccccctccttactccagatacccgatggattttctcaaaccaactgactgtccagatgctgtgccttcctccgctgaaacagggggaacgaattatctggcccctggggggctttcagattcccaacttcttctggagcctggggatcggtcacactggtgcgtggtggcatactgggaggagaagacgagagtggggaggctctactgtgtccaggagccctctctggatatcttctatgatctacctcaggggaatggcttttgcctcggacagctcaattcggacaacaagagtcagctggtgcagaaggtgcggagcaaaatcggctgcggcatccagctgacgcgggaggtggatggtgtgtgggtgtacaaccgcagcagttaccccatcttcatcaagtccgccacactggacaacccggactccaggacgctgttggtacacaaggtgttccccggtttctccatcaaggctttcgactacgagaaggcgtacagcctgcagcggcccaatgaccacgagtttatgcagcagccgtggacgggctttaccgtgcagatcagctttgtgaagggctggggccagtgctacacccgccagttcatcagcagctgcccgtgctggctagaggtcatcttcaacagccgg

SEQ ID NO: 3751 - DNA, 633 bp, Homo sapiens
  source 1..633: mol_type = genomic DNA
atggattttctcaaaccaactgcagactgtccagatgctgtgccttcctccgctgaaacagggggaacgaattatctggcccctggggggctttcagattcccaacttcttctggagcctggggatcggtcacactggtgcgtggtggcatactgggaggagaagacgagagtggggaggctctactgtgtccaggagccctctctggatatcttctatgatctacctcaggggaatggcttttgcctcggacagctcaattcggacaacaagagtcagctggtgcagaaggtgcggagcaaaatcggctgcggcatccagctgacgcgggaggtggatggtgtgtgggtgtacaaccgcagcagttaccccatcttcatcaagtccgccacactggacaacccggactccaggacgctgttggtacacaaggtgttccccggtttctccatcaaggctttcgactacgagaaggcgtacagcctgcagcggcccaatgaccacgagtttatgcagcagccgtggacgggctttaccgtgcagatcagctttgtgaagggctggggccagtgctacacccgccagttcatcagcagctgcccgtgctggctagaggtcatcttcaacagccgg

SEQ ID NO: 3752 - DNA, 1311 bp, Homo sapiens
  source 1..1311: mol_type = genomic DNA
atgtcgtccatcttgccattcacgccgccagttgtgaagagactgctgggatggaagaagtcagctggtgggtctggaggagcaggcggaggagagcagaatgggcaggaagaaaagtggtgtgagaaagcagtgaaaagtctggtgaagaagctaaagaaaacaggacgattagatgagcttgagaaagccatcaccactcaaaactgtaatactaaatgtgttaccataccaaggtctcttgatggtcgtctccaggtatcccatcgaaaaggattgccacatgttatatattgccgattatggcgctggcctgatcttcacagtcatcatgaactcaaggcaattgaaaactgcgaatatgcttttaatcttaaaaaggatgaagtatgtgtaaacccttaccactatcagagagttgagacaccagttttgcctccagtattagtgccccgacacaccgagatcctaacagaacttccgcctctggatgactatactcactccattccagaaaacactaacttcccagcaggaattgagccacagagtaattatattccagaaacgccacctcctggatatatcagtgaagatggagaaacaagtgaccaacagttgaatcaaagtatggacacaggctctccagcagaactatctcctactactctttcccctgttaatcatagcttggatttacagccagttacttactcagaacctgcattttggtgttcgatagcatattatgaattaaatcagagggttggagaaaccttccatgcatcacagccctcactcactgtagatggctttacagacccatcaaattcagagaggttctgcttaggtttactctccaatgttaaccgaaatgccacggtagaaatgacaagaaggcatataggaagaggagtgcgcttatactacataggtggggaagtttttgctgagtgcctaagtgatagtgcaatctttgtgcagagccccaattgtaatcagagatatggctggcaccctgcaacagtgtgtaaaattccaccaggctgtaatctgaagatcttcaacaaccaggaatttgctgctcttctggctcagtctgttaatcagggttttgaagccgtctatcagctaactagaatgtgcaccataagaatgagttttgtgaaagggtggggagcagaataccgaaggcagacggtaacaagtactccttgctggattgaacttcatctgaatggacctctacagtggttggacaaagtattaactcagatgggatccccttcagtgcgttgctcaagcatgtca

SEQ ID NO: 3753 - DNA, 690 bp, Homo sapiens
  source 1..690: mol_type = genomic DNA
atgaaccacagcatggacgcaggttctccaaacctatccccgaatccgatgtccccagcacataataacttggacctgcagccagttacctactgcgagccggccttctggtgctccatctcctactacgagctgaaccagcgcgtcggggagacattccacgcctcgcagccatccatgactgtggatggcttcaccgacccctccaattcggagcgcttctgcctagggctgctctccaatgtcaacaggaatgcagcagtggagctgacacggagacacatcggaagaggcgtgcggctctactacatcggaggggaggtcttcgcagagtgcctcagtgacagcgctatttttgtccagtctcccaactgtaaccagcgctatggctggcacccggccaccgtctgcaagatcccaccaggatgcaacctgaagatcttcaacaaccaggagttcgctgccctcctggcccagtcggtcaaccagggctttgaggctgtctaccagttgacccgaatgtgcaccatccgcatgagcttcgtcaaaggctggggagcggagtacaggagacagactgtgaccagtaccccctgctggattgagctgcacctgaatgggcctttgcagtggcttgacaaggtcctcacccagatgggctccccaagcatccgctgttccagtgtgtct

SEQ ID NO: 3754 - DNA, 960 bp, Homo sapiens
  source 1..960: mol_type = genomic DNA
atggagctgtgtgagttcgccttcaatatgaagaaggacgaggtctgcgtgaatccctaccactaccagagagtagagacaccagttctacctcctgtgttggtgccacgccacacagagatcccggccgagttccccccactggacgactacagccattccatccccgaaaacactaacttccccgcaggcatcgagccccagagcaatattccagagaccccaccccctggctacctgagtgaagatggagaaaccagtgaccaccagatgaaccacagcatggacgcaggttctccaaacctatccccgaatccgatgtccccagcacataataacttggacctgcagccagttacctactgcgagccggccttctggtgctccatctcctactacgagctgaaccagcgcgtcggggagacattccacgcctcgcagccatccatgactgtggatggcttcaccgacccctccaattcggagcgcttctgcctagggctgctctccaatgtcaacaggaatgcagcagtggagctgacacggagacacatcggaagaggcgtgcggctctactacatcggaggggaggtcttcgcagagtgcctcagtgacagcgctatttttgtccagtctcccaactgtaaccagcgctatggctggcacccggccaccgtctgcaagatcccaccaggatgcaacctgaagatcttcaacaaccaggagttcgctgccctcctggcccagtcggtcaaccagggctttgaggctgtctaccagttgacccgaatgtgcaccatccgcatgagcttcgtcaaaggctggggagcggagtacaggagacagactgtgaccagtaccccctgctggattgagctgcacctgaatgggcctttgcagtggcttgacaaggtcctcacccagatgggctccccaagcatccgctgttccagtgtgtct

SEQ ID NO: 3755 - DNA, 1143 bp, Homo sapiens
  source 1..1143: mol_type = genomic DNA
atgtcttgcctgcaccctaggcaaacgtggaaaggcgcagctctggtacaccggaaagcatggtggatggggaggtccctggatggccggttgcaggtgtcccatcggaaggggctccctcatgtcatctactgccgcctgtggcgatggccagacctgcacagccaccacgagctacgggccatggagctgtgtgagttcgccttcaatatgaagaaggacgaggtctgcgtgaatccctaccactaccagagagtagagacaccagttctacctcctgtgttggtgccacgccacacagagatcccggccgagttccccccactggacgactacagccattccatccccgaaaacactaacttccccgcaggcatcgagccccagagcaatattccagagaccccaccccctggctacctgagtgaagatggagaaaccagtgaccaccagatgaaccacagcatggacgcaggttctccaaacctatccccgaatccgatgtccccagcacataataacttggacctgcagccagttacctactgcgagccggccttctggtgctccatctcctactacgagctgaaccagcgcgtcggggagacattccacgcctcgcagccatccatgactgtggatggcttcaccgacccctccaattcggagcgcttctgcctagggctgctctccaatgtcaacaggaatgcagcagtggagctgacacggagacacatcggaagaggcgtgcggctctactacatcggaggggaggtcttcgcagagtgcctcagtgacagcgctatttttgtccagtctcccaactgtaaccagcgctatggctggcacccggccaccgtctgcaagatcccaccaggatgcaacctgaagatcttcaacaaccaggagttcgctgccctcctggcccagtcggtcaaccagggctttgaggctgtctaccagttgacccgaatgtgcaccatccgcatgagcttcgtcaaaggctggggagcggagtacaggagacagactgtgaccagtaccccctgctggattgagctgcacctgaatgggcctttgcagtggcttgacaaggtcctcacccagatgggctccccaagcatccgctgttccagtgtgtct

SEQ ID NO: 3756 - DNA, 2244 bp, Homo sapiens
  source 1..2244: mol_type = genomic DNA
atgaaaactagcccccgtcggccactgattctcaaaagacggaggctgccccttcctgttcaaaatgccccaagtgaaacatcagaggaggaacctaagagatcccctgcccaacaggagtctaatcaagcagaggcctccaaggaagtggcagagtccaactcttgcaagtttccagctgggatcaagattattaaccaccccaccatgcccaacacgcaagtagtggccatccccaacaatgctaatattcacagcatcatcacagcactgactgccaagggaaaagagagtggcagtagtgggcccaacaaattcatcctcatcagctgtgggggagccccaactcagcctccaggactccggcctcaaacccaaaccagctatgatgccaaaaggacagaagtgaccctggagaccttgggaccaaaacctgcagctagggatgtgaatcttcctagaccacctggagccctttgcgagcagaaacgggagacctgtgatggtgaggcagcaggctgcactatcaacaatagcctatccaacatccagtggcttcgaaagatgagttctgatggactgggctcccgcagcatcaagcaagagatggaggaaaaggagaattgtcacctggagcagcgacaggttaaggttgaggagccttcgagaccatcagcgtcctggcagaactctgtgtctgagcggccaccctactcttacatggccatgatacaattcgccatcaacagcactgagaggaagcgcatgactttgaaagacatctatacgtggattgaggaccactttccctactttaagcacattgccaagccaggctggaagaactccatccgccacaacctttccctgcacgacatgtttgtccgggagacgtctgccaatggcaaggtctccttctggaccattcaccccagtgccaaccgctacttgacattggaccaggtgtttaagcagcagcagaaacgaccgaatccagagctccgccggaacatgaccatcaaaaccgaactccccctgggcgcacggcggaagatgaagccactgctaccacgggtcagctcatacctggtacctatccagttcccggtgaaccagtcactggtgttgcagccctcggtgaaggtgccattgcccctggcggcttccctcatgagctcagagcttgcccgccatagcaagcgagtccgcattgcccccaaggtgctgctagctgaggaggggatagctcctctttcttctgcaggaccagggaaagaggagaaactcctgtttggagaagggttttctcctttgcttccagttcagactatcaaggaggaagaaatccagcctggggaggaaatgccacacttagcgagacccatcaaagtggagagccctcccttggaagagtggccctccccggccccatctttcaaagaggaatcatctcactcctgggaggattcgtcccaatctcccaccccaagacccaagaagtcctacagtgggcttaggtccccaacccggtgtgtctcggaaatgcttgtgattcaacacagggagaggagggagaggagccggtctcggagaaaacagcatctactgcctccctgtgtggatgagccggagctgctcttctcagaggggcccagtacttcccgctgggccgcagagctcccgttcccagcagactcctctgaccctgcctcccagctcagctactcccaggaagtgggaggaccttttaagacacccattaaggaaacgctgcccatctcctccaccccgagcaaatctgtcctccccagaacccctgaatcctggaggctcacgcccccagccaaagtagggggactggatttcagcccagtacaaacctcccagggtgcctctgaccccttgcctgaccccctggggctgatggatctcagcaccactcccttgcaaagtgctcccccccttgaatcaccgcaaaggctcctcagttcagaacccttagacctcatctccgtcccctttggcaactcttctccctcagatatagacgtccccaagccaggctccccggagccacaggtttctggccttgcagccaatcgttctctgacagaaggcctggtcctggacacaatgaatgacagcctcagcaagatcctgctggacatcagctttcctggcctggacgaggacccactgggccctgacaacatcaactggtcccagtttattcctgagctacag

SEQ ID NO: 3757 - DNA, 2244 bp, Homo sapiens
  source 1..2244: mol_type = genomic DNA
atgaaaactagcccccgtcggccactgattctcaaaagacggaggctgccccttcctgttcaaaatgccccaagtgaaacatcagaggaggaacctaagagatcccctgcccaacaggagtctaatcaagcagaggcctccaaggaagtggcagagtccaactcttgcaagtttccagctgggatcaagattattaaccaccccaccatgcccaacacgcaagtagtggccatccccaacaatgctaatattcacagcatcatcacagcactgactgccaagggaaaagagagtggcagtagtgggcccaacaaattcatcctcatcagctgtgggggagccccaactcagcctccaggactccggcctcaaacccaaaccagctatgatgccaaaaggacagaagtgaccctggagaccttgggaccaaaacctgcagctagggatgtgaatcttcctagaccacctggagccctttgcgagcagaaacgggagacctgtgcagatggtgaggcagcaggctgcactatcaacaatagcctatccaacatccagtggcttcgaaagatgagttctgatggactgggctcccgcagcatcaagcaagagatggaggaaaaggagaattgtcacctggagcagcgacaggttaaggttgaggagccttcgagaccatcagcgtcctggcagaactctgtgtctgagcggccaccctactcttacatggccatgatacaattcgccatcaacagcactgagaggaagcgcatgactttgaaagacatctatacgtggattgaggaccactttccctactttaagcacattgccaagccaggctggaagaactccatccgccacaacctttccctgcacgacatgtttgtccgggagacgtctgccaatggcaaggtctccttctggaccattcaccccagtgccaaccgctacttgacattggaccaggtgtttaagcagcagaaacgaccgaatccagagctccgccggaacatgaccatcaaaaccgaactccccctgggcgcacggcggaagatgaagccactgctaccacgggtcagctcatacctggtacctatccagttcccggtgaaccagtcactggtgttgcagccctcggtgaaggtgccattgcccctggcggcttccctcatgagctcagagcttgcccgccatagcaagcgagtccgcattgcccccaaggtgctgctagctgaggaggggatagctcctctttcttctgcaggaccagggaaagaggagaaactcctgtttggagaagggttttctcctttgcttccagttcagactatcaaggaggaagaaatccagcctggggaggaaatgccacacttagcgagacccatcaaagtggagagccctcccttggaagagtggccctccccggccccatctttcaaagaggaatcatctcactcctgggaggattcgtcccaatctcccaccccaagacccaagaagtcctacagtgggcttaggtccccaacccggtgtgtctcggaaatgcttgtgattcaacacagggagaggagggagaggagccggtctcggagaaaacagcatctactgcctccctgtgtggatgagccggagctgctcttctcagaggggcccagtacttcccgctgggccgcagagctcccgttcccagcagactcctctgaccctgcctcccagctcagctactcccaggaagtgggaggaccttttaagacacccattaaggaaacgctgcccatctcctccaccccgagcaaatctgtcctccccagaacccctgaatcctggaggctcacgcccccagccaaagtagggggactggatttcagcccagtacaaacctcccagggtgcctctgaccccttgcctgaccccctggggctgatggatctcagcaccactcccttgcaaagtgctcccccccttgaatcaccgcaaaggctcctcagttcagaacccttagacctcatctccgtcccctttggcaactcttctccctcagatatagacgtccccaagccaggctccccggagccacaggtttctggccttgcagccaatcgttctctgacagaaggcctggtcctggacacaatgaatgacagcctcagcaagatcctgctggacatcagctttcctggcctggacgaggacccactgggccctgacaacatcaactggtcccagtttattcctgagctacag

SEQ ID NO: 3758 - DNA, 2403 bp, Homo sapiens
  source 1..2403: mol_type = genomic DNA
atgaaaactagcccccgtcggccactgattctcaaaagacggaggctgccccttcctgttcaaaatgccccaagtgaaacatcagaggaggaacctaagagatcccctgcccaacaggagtctaatcaagcagaggcctccaaggaagtggcagagtccaactcttgcaagtttccagctgggatcaagattattaaccaccccaccatgcccaacacgcaagtagtggccatccccaacaatgctaatattcacagcatcatcacagcactgactgccaagggaaaagagagtggcagtagtgggcccaacaaattcatcctcatcagctgtgggggagccccaactcagcctccaggactccggcctcaaacccaaaccagctatgatgccaaaaggacagaagtgaccctggagaccttgggaccaaaacctgcagctagggatgtgaatcttcctagaccacctggagccctttgcgagcagaaacgggagacctgtgcagatggtgaggcagcaggctgcactatcaacaatagcctatccaacatccagtggcttcgaaagatgagttctgatggactgggctcccgcagcatcaagcaagagatggaggaaaaggagaattgtcacctggagcagcgacaggttaaggttgaggagccttcgagaccatcagcgtcctggcagaactctgtgtctgagcggccaccctactcttacatggccatgatacaattcgccatcaacagcactgagaggaagcgcatgactttgaaagacatctatacgtggattgaggaccactttccctactttaagcacattgccaagccaggctggaagaactccatccgccacaacctttccctgcacgacatgtttgtccgggagacgtctgccaatggcaaggtctccttctggaccattcaccccagtgccaaccgctacttgacattggaccaggtgtttaagccactggacccagggtctccacaattgcccgagcacttggaatcacagcagaaacgaccgaatccagagctccgccggaacatgaccatcaaaaccgaactccccctgggcgcacggcggaagatgaagccactgctaccacgggtcagctcatacctggtacctatccagttcccggtgaaccagtcactggtgttgcagccctcggtgaaggtgccattgcccctggcggcttccctcatgagctcagagcttgcccgccatagcaagcgagtccgcattgcccccaaggtttttggggaacaggtggtgtttggttacatgagtaagttctttagtggcgatctgcgagattttggtacacccatcaccagcttgtttaattttatctttctttgtttatcagtgctgctagctgaggaggggatagctcctctttcttctgcaggaccagggaaagaggagaaactcctgtttggagaagggttttctcctttgcttccagttcagactatcaaggaggaagaaatccagcctggggaggaaatgccacacttagcgagacccatcaaagtggagagccctcccttggaagagtggccctccccggccccatctttcaaagaggaatcatctcactcctgggaggattcgtcccaatctcccaccccaagacccaagaagtcctacagtgggcttaggtccccaacccggtgtgtctcggaaatgcttgtgattcaacacagggagaggagggagaggagccggtctcggagaaaacagcatctactgcctccctgtgtggatgagccggagctgctcttctcagaggggcccagtacttcccgctgggccgcagagctcccgttcccagcagactcctctgaccctgcctcccagctcagctactcccaggaagtgggaggaccttttaagacacccattaaggaaacgctgcccatctcctccaccccgagcaaatctgtcctccccagaacccctgaatcctggaggctcacgcccccagccaaagtagggggactggatttcagcccagtacaaacctcccagggtgcctctgaccccttgcctgaccccctggggctgatggatctcagcaccactcccttgcaaagtgctcccccccttgaatcaccgcaaaggctcctcagttcagaacccttagacctcatctccgtcccctttggcaactcttctccctcagatatagacgtccccaagccaggctccccggagccacaggtttctggccttgcagccaatcgttctctgacagaaggcctggtcctggacacaatgaatgacagcctcagcaagatcctgctggacatcagctttcctggcctggacgaggacccactgggccctgacaacatcaactggtcccagtttattcctgagctacag

SEQ ID NO: 3759 - DNA, 3297 bp, Homo sapiens
  source 1..3297: mol_type = genomic DNA
atgaacctccaggcccagcccaaggctcagaacaagcggaagcgttgcctcttcgggggccaggaaccagctcccaaggagcagccccctcccctgcagcccccccagcagtccatcagagtgaaggaggagcagtacctcgggcacgagggtccaggaggggcagtctccacctctcagcctgtggaactgccccctcctagcagcctggccctgctgaactctgtggtatatgggcctgagcggacctcagcagccatgctgtcccagcaggtggcctcagtaaagtggcccaactctgtgatggctccagggcggggcccggagcgtggaggaggtgggggtgtcagtgacagcagctggcagcagcagccaggccagcctccaccccattcaacatggaactgccacagtctgtccctctacagtgcaaccaaggggagcccgcatcctggagtgggagtcccgacttactataaccaccctgaggcactgaagcgggagaaagcggggggcccacagctggaccgctatgtgcgaccaatgatgccacagaaggtgcagctggaggtagggcggccccaggcacccctgaattctttccacgcagccaagaaacccccaaaccagtcactgcccctgcaacccttccagctggcattcggccaccaggtgaaccggcaggtcttccggcagggcccaccgcccccaaacccggtggctgccttccctccacagaagcagcagcagcagcagcaaccacagcagcagcagcagcagcagcaggcagccctaccccagatgccgctctttgagaacttctattccatgccgcagcaaccctcgcagcaaccccaggactttggcctgcagccagctgggccactgggacagtcccacctggctcaccacagcatggcaccctaccccttcccccccaacccagatatgaacccagaactgcgcaaggcccttctgcaggactcagccccgcagccagcgctacctcaggtccagatccccttcccccgccgctcccgccgcctctctaaggagggtatcctgcctcccagcgccctggatggggctggcacccagcctgggcaggaggccactggcaacctgttcctacatcactggcccctgcagcagccgccacctggctccctggggcagccccatcctgaagctctgggattcccgctggagctgagggagtcgcagctactgcctgatggggagagactagcacccaatggccgggagcgagaggctcctgccatgggcagcgaggagggcatgagggcagtgagcacaggggactgtgggcaggtgctacggggcggagtgatccagagcacgcgacggaggcgccgggcatcccaggaggccaatttgctgaccctggcccagaaggctgtggagctggcctcactgcagaatgcaaaggatggcagtggttctgaagagaagcggaaaagtgtattggcctcaactaccaagtgtggggtggagttttctgagccttccttagccaccaagcgagcacgagaagacagtgggatggtacccctcatcatcccagtgtctgtgcctgtgcgaactgtggacccaactgaggcagcccaggctggaggtcttgatgaggacgggaagggtcctgaacagaaccctgctgagcacaagccatcagtcatcgtcacccgcaggcggtccacccgaatccccgggacagatgctcaagctcaggcagaggacatgaatgtcaagttggagggggagccttccgtgcggaaaccaaagcagcggcccaggcccgagcccctcatcatccccaccaaggcgggcactttcatcgcccctcccgtctactccaacatcaccccataccagagccacctgcgctctcccgtgcgcctagctgaccacccctctgagcggagctttgagctacctccctacacgccgccccccatcctcagccctgtgcgggaaggctctggcctctacttcaatgccatcatatcaaccagcaccatccctgcccctcctcccatcacgcctaagagtgcccatcgcacgctgctccggactaacagtgctgaagtaaccccgcctgtcctctctgtgatgggggaggccaccccagtgagcatcgagccacggatcaacgtgggctcccggttccaggcagaaatccccttgatgagggaccgtgccctggcagctgcagatccccacaaggctgacttggtgtggcagccatgggaggacctagagagcagccgggagaagcagaggcaagtggaagacctgctgacagccgcctgctccagcattttccctggtgctggcaccaaccaggagctggccctgcactgtctgcacgaatccagaggagacatcctggaaacgctgaataagctgctgctgaagaagcccctgcggccccacaaccatccgctggcaacttatcactacacaggctctgaccagtggaagatggccgagaggaagctgttcaacaaaggcattgccatctacaagaaggatttcttcctggtgcagaagctgatccagaccaagaccgtggcccagtgcgtggagttctactacacctacaagaagcaggtgaaaatcggccgcaatgggactctaacctttggggatgtggatacgagcgatgagaagtcggcccaggaagaggttgaagtggatattaagacttcccaaaagttcccaagggtgcctcttcccagaagagagtccccaagtgaagagaggctggagcccaagagggaggtgaaggagcccaggaaggagggggaggaggaggtgccagagatccaagagaaggaggagcaggaagaggggcgagagcgcagcaggcgggcagcggcagtcaaagccacgcagacactacaggccaatgagtcggccagtgacatcctcatcctccggagccacgagtccaacgcccctgggtctgccggtggccaggcctcggagaagccaagggaagggacagggaagtcacgaagggcactacctttttcagagaagaagaaaaaaacagagacattcagtaagacccagaatcaggagaacactttcccctgtaaaaaatgtggcagggtgttttacaaggtgaagagccgcagtgcgcatatgaagagccacgcagagcaggagaagaaggctgcagcgctgaggctgaaggagaaagaggccgctgctgccgccgccgccgcccaccagcaggccctgcgggaggagagcggtgcgggcgacaagggc

SEQ ID NO: 3760 - DNA, 3135 bp, Homo sapiens
  source 1..3135: mol_type = genomic DNA
atgaacctccaggcccagcccaaggctcagaacaagcggaagcgttgcctcttcgggggccaggaaccagctcccaaggagcagccccctcccctgcagcccccccagcagtccatcagagtgaaggaggagcagtacctcgggcacgagggtccaggaggggcagtctccacctctcagcctgtggaactgccccctcctagcagcctggccctgctgaactctgtggtatatgggcctgagcggacctcagcagccatgctgtcccagcaggtggcctcagtaaagtggcccaactctgtgatggctccagggcggggcccggagcgtggaggaggtgggggtgtcagtgacagcagctggcagcagcagccaggccagcctccaccccattcaacatggaactgccacagtctgtccctctacagtgcaaccaaggggagcccgcatcctggagtgggagtcccgacttactataaccaccctgaggcactgaagcgggagaaagcggggggcccacagctggaccgctatgtgcgaccaatgatgccacagaaggtgcagctggaggtagggcggccccaggcacccctgaattctttccacgcagccaagaaacccccaaaccagtcactgcccctgcaacccttccagctggcattcggccaccaggtgaaccggcaggtcttccggcagggcccaccgcccccaaacccggtggctgccttccctccacagaagcagcagcagcagcagcaaccacagcagcagcagcagcagcagcaggcagccctaccccagatgccgctctttgagaacttctattccatgccgcagcaaccctcgcagcaaccccaggactttggcctgcagccagctgggccactgggacagtcccacctggctcaccacagcatggcaccctaccccttcccccccaacccagatatgaacccagaactgcgcaaggcccttctgcaggactcagccccgcagccagcgctacctcaggtccagatccccttcccccgccgctcccgccgcctctctaaggagggtatcctgcctcccagcgccctggatggggctggcacccagcctgggcaggaggccactggcaacctgttcctacatcactggcccctgcagcagccgccacctggctccctggggcagccccatcctgaagctctgggattcccgctggagctgagggagtcgcagctactgcctgatggggagagactagcacccaatggccgggagcgagaggctcctgccatgggcagcgaggagggcatgagggcagtgagcacaggggactgtgggcaggtgctacggggcggagtgatccagagcacgcgacggaggcgccgggcatcccaggaggccaatttgctgaccctggcccagaaggctgtggagctggcctcactgcagaatgcaaaggatggcagtggttctgaagagaagcggaaaagtgtattggcctcaactaccaagtgtggggtggagttttctgagccttccttagccaccaagcgagcacgagaagacagtgggatggtacccctcatcatcccagtgtctgtgcctgtgcgaactgtggacccaactgaggcagcccaggctggaggtcttgatgaggacgggaagggtcctgaacagaaccctgctgagcacaagccatcagtcatcgtcacccgcaggcggtccacccgaatccccgggacagatgctcaagctcaggcagaggacatgaatgtcaagttggagggggagccttccgtgcggaaaccaaagcagcggcccaggcccgagcccctcatcatccccaccaaggcgggcactttcatcgcccctcccgtctactccaacatcaccccataccagagccacctgcgctctcccgtgcgcctagctgaccacccctctgagcggagctttgagctacctccctacacgccgccccccatcctcagccctgtgcgggaaggctctggcctctacttcaatgccatcatatcaaccagcaccatccctgcccctcctcccatcacgcctaagagtgcccatcgcacgctgctccggactaacagtgctgaagtaaccccgcctgtcctctctgtgatgggggaggccaccccagtgagcatcgagccacggatcaacgtgggctcccggttccaggcagaaatccccttgatgagggaccgtgccctggcagctgcagatccccacaaggctgacttggtgtggcagccatgggaggacctagagagcagccgggagaagcagaggcaagtggaagacctgctgacagccgcctgctccagcattttccctggtgctggcaccaaccaggagctggccctgcactgtctgcacgaatccagaggagacatcctggaaacgctgaataagctgctgctgaagaagcccctgcggccccacaaccatccgctggcaacttatcactacacaggctctgaccagtggaagatggccgagaggaagctgttcaacaaaggcattgccatctacaagaaggatttcttcctggtgcagaagctgatccagaccaagaccgtggcccagtgcgtggagttctactacacctacaagaagcaggtgaaaatcggccgcaatgggactctaacctttggggatgtggatacgagcgatgagaagtcggcccaggaagaggttgaagtggatattaagacttcccaaaagttcccaagggtgcctcttcccagaagagagtccccaagtgaagagaggctggagcccaagagggaggtgaaggagcccaggaaggagggggaggaggaggtgccagagatccaagagaaggaggagcaggaagaggggcgagagcgcagcaggcgggcagcggcagtcaaagccacgcagacactacaggccaatgagtcggccagtgacatcctcatcctccggagccacgagtccaacgcccctgggtctgccggtggccaggcctcggagaagccaagggaagggacagggaagtcacgaagggcactacctttttcagagaagaagaaaaaaacagagacattcagtaagacccagaatcaggagaacactttcccctgtaaaaaatgtggcagg

SEQ ID NO: 3761 - DNA, 837 bp, Homo sapiens
  source 1..837: mol_type = genomic DNA
atgcactgccacgccgagctgaggctgagctcgcccggccagctcaaagcagccaggcggcgctacaagactttcatgatcgacgagatcctctccaaggagacctgcgattactttgagaaactttccctctactccgtgtgcccgtcgctggtcgtgcgacccaagcccctgcattcctgtacgggctccccttccctgcgggcatatccgctcctctcggtgatcacccgccagcccactgtcatctcccacctggtccctgccaccccgggaatcgcccaggcactgtcctgccaccaggtcaccgaggcggtctctgctgaggccccagggggcgaggccctagccagcagcgagtcagagacggaacagcccacgccccgacagaagaagccccgccggagtcgcaccatcttcaccgagctgcagctcatgggcctggagaagaaattccagaagcagaagtatttgtcaaccccagacaggttggacttggctcagtctctgggactcactcagctgcaggtgaagacctggtatcagaatcgcaggatgaaatggaagaaaatggttcttaaaggtggacaggaagcacccacaaaacccaaaggtcgccccaagaagaactccatccccacatcagaagagattgaagctgaagagaagatgaacagccaggcccagggtcaggagcagctggagccctctcaggggcaggaggagctctgtgaagcacaggaaccgaaagcacgtgatgtccccttagagatggcagagccaccagacccgccccaggagttgccaataccctcttcggaacccccaccattaagc

SEQ ID NO: 3762 - DNA, 762 bp, Homo sapiens
  source 1..762: mol_type = genomic DNA
atgcagcggccgggggagccgggcgccgcgcgcttcggcccgcccgagggctgcgcggaccaccggccgcaccgctatcgcagcttcatgattgaggagatcctcacggagccacccgggcccaagggcgccgcgcccgcagccgccgctgccgcggcgggcgagctgctgaagttcggcgtgcaggcgctgctggcggcgcggcccttccacagccacctggccgtgctgaaggccgagcaggcggcggtgttcaagttcccactggcgccgctgggctgttcagggctgagctctgcgttgctggcggcagggcccgggctgcccggcgccgcgggtgcgccacacctgccgctcgagttgcagctccgcgggaagctggaggcggcaggccctggggagccaggcaccaaagccaagaaggggcgtcggagccgcactgtgttcaccgagctgcagctgatgggcctggagaaacgcttcgagaagcagaagtacctttccacgccggacagaatagatcttgctgagtccctgggcctgagccagttgcaggtgaagacgtggtaccagaatcggaggatgaagtggaagaaaatagtgctgcagggcggcggcctggagtctcccaccaagcccaaggggcggcccaagaagaactcaattccaacgagcgagcagcttactgagcaggagcgcgccaaggatgcagagaaaccggcggaggtgccgggcgagcccagcgacaggagccgcgaggac

SEQ ID NO: 3763 - DNA, 969 bp, Homo sapiens
  source 1..969: mol_type = genomic DNA
atggactcggacgccagcctggtgtccagccgcccgtcgtcgccagagcccgatgacctttttctgccggcccggagtaagggcagcagcggcagcgccttcactgggggcaccgtgtcctcgtccaccccgagtgactgcccgccggagctgagcgccgagctgcgcggcgctatgggctctgcgggcgcgcatcctggggacaagctaggaggcagtggcttcaagtcatcctcgtccagcacctcgtcgtctacgtcgtcggcggctgcgtcgtccaccaagaaggacaagaagcaaatgacagagccggagctgcagcagctgcgtctcaagatcaacagccgcgagcgcaagcgcatgcacgacctcaacatcgccatggatggcctccgcgaggtcatgccgtacgcacacggcccttcggtgcgcaagctttccaagatcgccacgctgctgctggcgcgcaactacatcctcatgctcaccaactcgctggaggagatgaagcgactggtgagcgagatctacgggggccaccacgctggcttccacccgtcggcctgcggcggcctggcgcactccgcgcccctgcccgccgccaccgcgcacccggcagcagcagcgcacgccgcacatcaccccgcggtgcaccaccccatcctgccgcccgccgccgcagcggctgctgccgccgctgcagccgcggctgtgtccagcgcctctctgcccggatccgggctgccgtcggtcggctccatccgtccaccgcacggcctactcaagtctccgtctgctgccgcggccgccccgctggggggcgggggcggcggcagtggggcgagcgggggcttccagcactggggcggcatgccctgcccctgcagcatgtgccaggtgccgccgccgcaccaccacgtgtcggctatgggcgccggcagcctgccgcgcctcacctccgacgccaag

SEQ ID NO: 3764 - DNA, 813 bp, Homo sapiens
  source 1..813: mol_type = genomic DNA
atgtactatgcggtttcccaggcgcgcgtgaacgcggtccccgggaccatgctgcggccacagcggcccggagacttgcagctcggggcctccctctacgagctggtgggctacaggcagccgccctcctcctcctcctcctccacctcctccacctcctccacttcctcctcctccacgacggcccccctcctccccaaggctgcgcgcgagaagccggaggcgccggccgagcctccaggccccgggcccgggtcaggcgcgcacccgggcggcagcgcccggccggacgccaaggaggagcagcagcagcagctgcggcgcaagatcaacagccgcgagcggaagcgcatgcaggacctgaacctggccatggacgccctgcgcgaggtcatcctgccctactcagcggcgcactgccagggcgcgcccggccgcaagctctccaagatagccacgctgctgctcgcccgcaactacatcctactgctgggcagctcgctgcaggagctgcgccgcgcgctgggcgagggcgccgggcccgccgcgccgcgcctgctgctggccgggctgcccctgctcgccgccgcgcccggctccgtgctgctggcgcccggcgccgtaggaccccccgacgcgctgcgccccgccaagtacctgtcgctggcgctggacgagccgccgtgcggccagttcgctctccccggcggcggcgcaggcggccccggcctctgcacctgcgccgtgtgcaagttcccgcacctggtcccggccagcctgggcctggccgccgtgcaggcgcaattctccaag

SEQ ID NO: 3765 - DNA, 5742 bp, Homo sapiens
  source 1..5742: mol_type = genomic DNA
atggcggacggaaagggagacgccgccgctgtcgccggggctggggctgaggctccggcggtagcgggagccggagatggagtcgagactgagtccatggttcggggtcatcgccccgtatctccagcgccgggagcctcgggactgcggccgtgtctgtggcagctggagacagagctgagggagcaagaggtgtcggaggtctcatctttgaactactgccggagcttctgccagaccttattgcaatatgcaagcaacaagaatgcatcagaacatattgtgtatcttctggaggtatatcgacttgccatccaaagctttgccagtgcacgtccatacttaactactgaatgtgaagatgtcctcttagtgcttggcagattagtactgagttgtttcgaattactgctttcagtgtctgaaagtgaactgccatgtgaagtctggctaccattccttcagtctctacaggagtcacatgatgcattattggaatttgggaataataacctacaaatattggttcatgttaccaaggaaggggtgtggaaaaacccagttcttcttaaaattctgtctcaacagccagtagaaacggaggaagtcaataaattgattgcacaagaaggaccttcctttctgcaaatgcgaataaaacatttgttgaaatctaactgcatcccccaggctactgctttatcaaaactatgtgcagaatctaaagaaatttcaaatgtgtcatcttttcagcaagcctatatcacatgtttatgttctatgctccctaatgaagatgctattaaggagattgcaaaggtcgactgcaaggaagtactagacatcatttgtaatctggaatctgaggggcaggataacacagcatttgttctttgtacgacttaccttacccagcagctccaaactgcaagtgtatattgttcttgggaactgactcttttttggagtaaactgcaaagaagaattgacccttctttagatacttttttggagcgctgtcgtcagtttggtgtcatagctaaaacgcagcagcatttattttgcctcattagagttatacaaactgaagcacaagatgctggtcttggggtgtcaattttactgtgtgtcagagctcttcaactcagatcaagtgaagatgaggaaatgaaggcatcagtttgtaaaacaattgcctgtcttttaccagaagatttagaagttagacgagcctgtcagcttacagaattcttaattgaacccagtttggatggatttaatatgttagaagaactatatttgcaaccagatcaaaaatttgatgaagaaaatgcaccggttccaaattctcttcgatgtgagctcttactagctttaaaagcccactggccttttgatcctgagttttgggactggaaaactttaaaacgacactgccaccaacttttaggacaagaagcctcagattctgatgatgatttaagtggctatgaaatgtccattaatgacacagatgttttagagtcatttctcagtgactatgatgagggtaaagaagataaacaatatagaagaagagatttgacagatcagcataaggagaaaagagacaaaaaacctattggctcttctgaaagatatcagaggtggcttcagtacaagtttttctgtttgttatgtaagcgggaatgtatagaggctagaattcttcatcattctaagatgcatatggaagatggaatttacacctgtccagtttgtattaaaaaatttaagagaaaagaaatgtttgttcctcatgtgatggagcatgttaaaatgccaccaagcagaagggaccgctctaaaaagaaattactgttaaaaggctctcaaaagggtatttgtcctaagagcccctctgcaatcccagagcaaaaccattcattgaatgaccaagccaaaggagagtctcatgaatatgtcacattcagcaaattagaagattgccacctgcaagacagagatttgtatccatgtcccggtacagactgttcccgtgtgtttaagcaatttaaatacttaagtgtgcatcttaaagctgaacaccaaaataatgatgaaaatgccaagcactacttggatatgaaaaatagaagagagaagtgtacttactgtcgacgacattttatgtctgcttttcaccttcgagagcacgaacaagtgcattgtgggcctcagccttatatgtgtgtatctatagattgctatgctaggtttggatcagtaaatgaactacttaaccataaacaaaagcatgacgatctgcgttacaaatgtgaattaaatggctgtaatattgttttcagtgacttgggacagctttaccaccatgaagcacaacactttagggatgcatcttacacatgcaacttccttggctgtaaaaagttctattactccaaaattgaataccagaatcacctctcaatgcataatgttgaaaattcaaatggagacataaagaaatcagtgaaacttgaggagtctgcaacaggtgaaaagcaagattgtattaatcagccccatctacttaaccaaactgataaatcacatttacctgaagatcttttctgtgcagaatcagctaattctcaaatagatacagaaactgcagaaaacctgaaagaaaacagtgacagtaattctagtgatcagttaagtcatagctcttcagcttcaatgaatgaagagctaattgacacactagatcactctgaaactatgcaggatgtattgttatctaatgagaaagtctttgggccctccagtttaaaagaaaaatgttccagtatggcagtttgttttgacgggactaagtttacctgtggttttgatggctgtggttccacatacaaaaatgcaagaggaatgcagaaacatttacggaaggttcatccataccatttcaagcccaaaaagataaagacgaaagatctgtttccctctttgggtaatgaacataatcagacaactgaaaagttggatgcagaacctaaaccctgctcagatacaaacagtgactccccagatgaaggtctagatcacaatattcacattaaatgtaaacgagaacatcaaggttattcctcagaatcctccatttgtgcttctaaaaggccctgtacagaggataccatgttggaacttctgttacgcttgaaacatttaagcttgaaaaactcaataacacatggatctttctcagggtcattgcaggggtacccatccagtggtgctaagtctcttcagtcagtttcatctatctcagaccttaattttcagaatcaagatgaaaacatgccaagtcagtaccttgcacagttggcggctaagccgtttttctgtgagcttcaaggatgcaaatatgaatttgtgaccagagaggctctgttaatgcattatcttaaaaagcataattattcaaaagaaaaagtccttcagttaaccatgttccaacatcggtattccccatttcagtgtcatatttgccaaaggtcatttacaagaaaaacacaccttaggattcattataaaaataaacatcaaattggcagtgacagagcaactcacaaactattagataatgaaaagtgtgatcatgaaggcccatgttcagtagataggttgaaaggtgattgttctgcagaacttggaggtgatcccagtagtaactctgagaaaccacactgtcatcctaaaaaggatgaatgtagttctgaaacagatttggaatcatcttgtgaagaaacagaaagtaaaacatctgacatttcatcaccaataggcagccatagagaagaacaagaaggaagagagggcagaggtagcaggcgaactgttgctaaaggaaatctgtgttatattttgaataaataccacaaaccattccattgtattcataaaacttgcaactcctcattcaccaatctaaaaggcttaattcgccattacagaactgtacatcagtacaacaaagaacagttatgtttggagaaagacaaagcaagaaccaaaagggaacttgtcaaatgtaaaaagatatttgcttgcaaatataaggaatgtaataaacgcttcctgtgttccaaagctcttgctaagcactgtagtgattctcataacctagaccatattgaagagcctaaagtactttccgaagctggatctgcagcaaggttttcttgtaaccagcctcagtgccctgctgttttttatacattcaacaagttgaagcaccacttgatggaacagcataatattgaaggggaaatacattcagattatgaaattcattgtgatcttaatggctgtggccagattttcacccatcgcagtaattactcacaacatgtatattaccgacataaagactattatgatgatttgtttagaagccagaaagtagcaaatgagagactactaaggagtgaaaaggtatgtcaaacagctgatactcaggggcatgaacatcagaccaccaggagatcatttaatgctaagtctaaaaaatgtggcttaatcaaagaaaagaaagccccaataagttttaaaaccagagctgaggccctccatatgtgtgtggagcactctgagcacacacagtacccctgcatggttcaaggatgcttatctgtggtgaagttggagagcagcattgtgaggcattacaaacgcactcatcagatgagtagtgcctatttagagcaacagatggagaatcttgttgtttgcgttaagtacggtaccaaaattaaggaggaacccccttctgaagcagatccctgtataaagaaagaagaaaatagaagctgtgaatcagagcgcacagaacacagccattccccgggtgacagtagtgcacccatccagaacactgattgctgtcattcaagtgaaagggatggaggtcagaaagggtgcatagaaagcagctcagtatttgatgcagatactctgctctacaggggaactttgaaatgtaatcatagttccaaaaccacttccctagaacagtgtaatatagttcagcctcctcctccttgtaaaatagaaaattccatacctaatcccaatgggactgaaagtgggacttatttcacaagtttccagctgcctttaccaaggatcaaagaatcagaaactaggcagcatagttcagggcaagaaaacactgtaaaaaatccaacccatgtcccaaaagagaattttaggaaacattcacagccccggtcatttgatttgaagacttacaaacctatgggatttgaatcttcatttctgaaatttattcaggaaagtgaagagaaagaagatgattttgatgattgggagccttcagagcacttaacattaagtaattcttcacagtccagtaatgatttaacagggaatgttgtggcaaataatatggtgaatgacagtgaacctgaagttgacatacctcattcttccagtgactctacaattcatgagaacctgactgcaatcccacctttaatagtagctgaaacaacaacagttccttccttggaaaacctgagggttgtattggacaaagcattaacagactgtggagagcttgccttaaaacagcttcattatcttcggccagtggtggttcttgaaagatctaagttttccacaccaattttagacttatttccaacaaaaaagacagatgagctttgtgtaggaagttca

SEQ ID NO: 3766 - DNA, 1968 bp, Homo sapiens
  source 1..1968: mol_type = genomic DNA
atggagggagatggttcagacccagagcctccagatgccggggaggacagcaagtccgagaatggggagaatgcgcccatctactgcatctgccgcaaaccggacatcaactgcttcatgatcgggtgtgacaactgcaatgagtggttccatggggactgcatccggatcactgagaagatggccaaggccatccgggagtggtactgtcgggagtgcagagagaaagaccccaagctagagattcgctatcggcacaagaagtcacgggagcgggatggcaatgagcgggacagcagtgagccccgggatgagggtggagggcgcaagaggcctgtccctgatccagacctgcagcgccgggcagggtcagggacaggggttggggccatgcttgctcggggctctgcttcgccccacaaatcctctccgcagcccttggtggccacacccagccagcatcaccagcagcagcagcagcagatcaaacggtcagcccgcatgtgtggtgagtgtgaggcatgtcggcgcactgaggactgtggtcactgtgatttctgtcgggacatgaagaagttcgggggccccaacaagatccggcagaagtgccggctgcgccagtgccagctgcgggcccgggaatcgtacaagtacttcccttcctcgctctcaccagtgacgccctcagagtccctgccaaggccccgccggccactgcccacccaacagcagccacagccatcacagaagttagggcgcatccgtgaagatgagggggcagtggcgtcatcaacagtcaaggagcctcctgaggctacagccacacctgagccactctcagatgaggacctacctctggatcctgacctgtatcaggacttctgtgcaggggcctttgatgaccatggcctgccctggatgagcgacacagaagagtccccattcctggaccccgcgctgcggaagagggcagtgaaagtgaagcatgtgaagcgtcgggagaagaagtctgagaagaagaaggaggagcgatacaagcggcatcggcagaagcagaagcacaaggataaatggaaacacccagagagggctgatgccaaggaccctgcgtcactgccccagtgcctggggcccggctgtgtgcgccccgcccagcccagctccaagtattgctcagatgactgtggcatgaagctggcagccaaccgcatctacgagatcctcccccagcgcatccagcagtggcagcagagcccttgcattgctgaagagcacggcaagaagctgctcgaacgcattcgccgagagcagcagagtgcccgcactcgccttcaggaaatggaacgccgattccatgagcttgaggccatcattctacgtgccaagcagcaggctgtgcgcgaggatgaggagagcaacgagggtgacagtgatgacacagacctgcagatcttctgtgtttcctgtgggcaccccatcaacccacgtgttgccttgcgccacatggagcgctgctacgccaagtatgagagccagacgtcctttgggtccatgtaccccacacgcattgaaggggccacacgactcttctgtgatgtgtataatcctcagagcaaaacatactgtaagcggctccaggtgctgtgccccgagcactcacgggaccccaaagtgccagctgacgaggtatgcgggtgcccccttgtacgtgatgtctttgagctcacgggtgacttctgccgcctgcccaagcgccagtgcaatcgccattactgctgggagaagctgcggcgtgcggaagtggacttggagcgcgtgcgtgtgtggtacaagctggacgagctgtttgagcaggagcgcaatgtgcgcacagccatgacaaaccgcgcgggattgctggccctgatgctgcaccagacgatccagcacgatcccctcactaccgacctgcgctccagtgccgaccgc

SEQ ID NO: 3767 - DNA, 1470 bp, Homo sapiens
  source 1..1470: mol_type = genomic DNA
atgcttgccgctacctgtaataagataggcagccccagcccgtctccctcctccctctcggacagctcttcttccttcggcaaaggcttccacccctggaaacgctcctcgtcctcttcttccgccagctgcaacgtagtgggttccagtctctcaagcttcggcgtgtccggggcctccaggaacggcggctcgtcctcggcggctgcggcggccgcggcagcagccgcggctgccgcggccctggtgtccgactcgttcagctgcggcggctcgcctggctccagcgccttctccctcacctccagcagcgccgcagccgccgccgccgccgccgcagccgccgcctccagctcgcccttcgccaacgactactctgttttccaggcccccggagtttccgggggcagcggcggcggcggcgggggcggcggcggcggctcctccgcgcactcgcaggacggctcccaccagccggtgttcatctccaaggtgcacacctctgtggacgggctgcagggcatctacccgcgggtgggcatggcgcacccgtacgagtcgtggtttaagccctcgcacccgggcctgggtgctgcgggcgaggtgggctcggccggcgcctccagctggtgggacgtgggggccggctggatcgacgtgcagaacccgaacagcgcggctgcgctgcccggctcgctgcaccctgccgccggggggctccaaacctcgctgcactcgccgctcggaggctacaactcggattactcgggcctgagtcactcggccttcagcagcggcgcctcctcgcacctgctcagccccgccgggcagcacctcatggacggcttcaagccagtgctacccggctcctacccggactcggccccgtcgccgctggccggcgcggggggctccatgttgagcgctgggccttcggcgccgctggggggctccccgcgctcctcagctcgccgctactccggccgcgccacctgcgactgccccaactgccaggaggcagagcggctgggccctgccggggcgagcttgcggcgcaagggcctgcacagctgccacatcccgggctgcggcaaggtgtacggcaagacttcgcacctcaaggcgcacctgcgctggcacacgggcgagcggcccttcgtgtgcaactggcttttctgcggcaagcgcttcacgcgctccgacgagctgcagcggcacctgcggacccacaccggcgagaagcgcttcgcctgtccagtttgcaacaagcgcttcatgcgcagcgaccacctcagcaagcacgtgaagacgcacagtggcggcggcggcggcggcggctcggcgggctcgggcagcggcggcaagaagggcagcgacaccgacagcgagcacagcgccgcgggcagcccgccctgccactccccagagctgctgcagccccccgagcccgggcaccgcaacggcctagag

SEQ ID NO: 3768 - DNA, 1524 bp, Homo sapiens
  source 1..1524: mol_type = genomic DNA
atggcaacttcacttctaggggaagaaccgaggttgggatcgactcctctggccatgcttgccgctacctgtaataagataggcagccccagcccgtctccctcctccctctcggacagctcttcttccttcggcaaaggcttccacccctggaaacgctcctcgtcctcttcttccgccagctgcaacgtagtgggttccagtctctcaagcttcggcgtgtccggggcctccaggaacggcggctcgtcctcggcggctgcggcggccgcggcagcagccgcggctgccgcggccctggtgtccgactcgttcagctgcggcggctcgcctggctccagcgccttctccctcacctccagcagcgccgcagccgccgccgccgccgccgcagccgccgcctccagctcgcccttcgccaacgactactctgttttccaggcccccggagtttccgggggcagcggcggcggcggcgggggcggcggcggcggctcctccgcgcactcgcaggacggctcccaccagccggtgttcatctccaaggtgcacacctctgtggacgggctgcagggcatctacccgcgggtgggcatggcgcacccgtacgagtcgtggtttaagccctcgcacccgggcctgggtgctgcgggcgaggtgggctcggccggcgcctccagctggtgggacgtgggggccggctggatcgacgtgcagaacccgaacagcgcggctgcgctgcccggctcgctgcaccctgccgccggggggctccaaacctcgctgcactcgccgctcggaggctacaactcggattactcgggcctgagtcactcggccttcagcagcggcgcctcctcgcacctgctcagccccgccgggcagcacctcatggacggcttcaagccagtgctacccggctcctacccggactcggccccgtcgccgctggccggcgcggggggctccatgttgagcgctgggccttcggcgccgctggggggctccccgcgctcctcagctcgccgctactccggccgcgccacctgcgactgccccaactgccaggaggcagagcggctgggccctgccggggcgagcttgcggcgcaagggcctgcacagctgccacatcccgggctgcggcaaggtgtacggcaagacttcgcacctcaaggcgcacctgcgctggcacacgggcgagcggcccttcgtgtgcaactggcttttctgcggcaagcgcttcacgcgctccgacgagctgcagcggcacctgcggacccacaccggcgagaagcgcttcgcctgtccagtttgcaacaagcgcttcatgcgcagcgaccacctcagcaagcacgtgaagacgcacagtggcggcggcggcggcggcggctcggcgggctcgggcagcggcggcaagaagggcagcgacaccgacagcgagcacagcgccgcgggcagcccgccctgccactccccagagctgctgcagccccccgagcccgggcaccgcaacggcctagag

SEQ ID NO: 3769 - DNA, 1452 bp, Homo sapiens
  source 1..1452: mol_type = genomic DNA
atggccacgtctatactcggggaagagccgcgcttcggaacgaccccgttggccatgctggcggcgacctgcaacaagatcggcaacacgagcccgctgacgacgctgccagagtcgagcgccttcgccaaaggcggctttcacccctggaagcgctcctcgtccagctgcaacctcggctccagcctctcgggcttcgcggtggccaccgggggccgtggctcgggcggcctggcgggcggctcgggcgccgccaacagcgccttctgcctggcctccacgtcgcccacgtcgtccgccttcagcagcgactacggcggcctcttctccaactcggcggctgccgcggcggcagcggccggggtgtccccgcaggaggcgggtggccagtcggccttcatttccaaggtgcacacgacggcagccgacgggctgtacccgcgcgtgggcatggcgcacccgtacgagtcctggtacaagtcgggcttccattcgacgctggcggccggcgaggtgaccaacggcgcggcgtcgtcgtggtgggacgtgcacagcagcccgggctcgtggctggaagtgcagaaccccgctggggggctccagagctcgctgcactcgggcgccccccaggcctcgctgcactcgcagctgggcacctacaaccccgacttcagctcgctcacgcactccgccttcagctccacgggcctcggctcctccgccgccgccgcctcccacctgctctccaccagccagcacctgctggcccaggacggcttcaagccggtgttgccctcctattcggactccagcgccgccgtggcagccgccgccgccagcgccatgatatcgggcgccgcggctgccgccgccggggggagctcggcacgctctgcccgccgctactcgggccgcgccacctgcgactgccccaactgccaggaggcggagcggctgggcccggccggggcgagcctgcggcgcaagggcctgcacagctgccacattccgggctgcggcaaggtgtacgggaagacgtcgcacctgaaggcgcacctgcgctggcacacgggcgagcggcccttcgtgtgcaactggctcttctgcggcaagcgcttcacgcgctcggacgagctgcagcggcatctgcggactcacacgggcgagaagcgcttcgcctgtccggtgtgcaacaagcgcttcatgcgcagcgaccacctgagcaaacacattaagacgcacaacgggggcggcgggggcaaaaagggcagcgacagtgacacggacgccagcaacctggagacgccccgttccgaatcccccgacctcatcctgcatgactccggcgtcagtgccgcccgggcggcggcagcggcggcggcggcagcggcggcggcggcggcggcggcctccgcgggaggcaaggaagcagcgtctggccccaacgactct

SEQ ID NO: 3770 - DNA, 600 bp, Homo sapiens
  source 1..600: mol_type = genomic DNA
atggctaaaggtgaccccaagaaaccaaagggcaagatgtccgcttatgccttctttgtgcagacatgcagagaagaacataagaagaaaaacccagaggtccctgtcaattttgcggaattttccaagaagtgctctgagaggtggaagacgatgtccgggaaagagaaatctaaatttgatgaaatggcaaaggcagataaagtgcgctatgatcgggaaatgaaggattatggaccagctaagggaggcaagaagaagaaggatcctaatgctcccaaaaggccaccgtctggattcttcctgttctgttcagaattccgccccaagatcaaatccacaaaccccggcatctctattggagacgtggcaaaaaagctgggtgagatgtggaataatttaaatgacagtgaaaagcagccttacatcactaaggcggcaaagctgaaggagaagtatgagaaggatgttgctgactataagtcgaaaggaaagtttgatggtgcaaagggtcctgctaaagttgcccggaaaaaggtggaagaggaagatgaagaagaggaggaggaagaagaggaggaggaggaggaggaggatgaa

SEQ ID NO: 3771 - DNA, 558 bp, Homo sapiens
  source 1..558: mol_type = genomic DNA
atgggaaaagaaatccagctaaagcctaaggcaaatgtctcttcttacgttcactttttgctgaattacagaaacaaattcaaggagcagcagccaaatacctatgttggctttaaagagttctctagaaagtgttcggaaaaatggagatccatctcaaagcatgaaaaggccaaatatgaagccctggccaaactcgacaaagcccgataccaggaagaaatgatgaattatgttggcaagaggaagaaacggagaaagcgggatccccaggaacccagacggcctccatcatccttcctactcttctgccaagaccactatgctcagctgaagagggagaacccgaactggtcggtggtgcaggtggccaaggccacagggaagatgtggtcaacagcgacagacctggagaagcacccttatgagcaaagagtggctctcctgagagctaagtacttcgaggaacttgaactctaccgtaaacaatgtaatgccaggaagaagtaccgaatgtcagctagaaaccggtgcagagggaaaagagtcaggcagagc

SEQ ID NO: 3772 - DNA, 1488 bp, Homo sapiens
  source 1..1488: mol_type = genomic DNA
atggatgacgtccccgccccaacccctgcaccagcaccgcccgccgctgccgcccccagggtcccgtttcactgcagtgaatgtggcaagagcttccgctaccgctcagacctgcggcgccactttgcccggcacacagcgctcaagccccacgcatgtccgcgctgcggcaagggtttcaagcacagcttcaacctagccaaccacctgcgctcgcacaccggggagcggccctaccgctgctctgcctgccccaaggggttccgcgactccaccggcctgctgcaccaccaggtcgtccacactggtgagaaaccctactgctgcctggtctgcgagctccgcttctcctcacgctccagcctgggccgccacctcaagcgccagcaccgtggggttctcccctctcccctgcagcccggccctggcctgcccgccttgagtgcgccctgctccgtctgctgcaatgtggggccctgctcggtgtgcgggggctcaggggccggcggcggagagggccccgagggggcaggcgcgggtctgggcagctgggggctggcagaggcggcagctgcggccgcggcctccttgcccccatttgcgtgcggcgcctgcgcgcggcgcttcgaccacggccgcgagctggcggcccactgggcggcgcacaccgacgtgaagcccttcaagtgcccgcgctgcgagcgcgacttcaacgcgcccgcgctgctggagcggcacaagctgacgcacgacctgcagggcccgggcgcgcccccagcgcaggcctgggccgcggggccaggcgcagggcccgagacggcgggcgaaggcaccgctgcggaggcgggcgacgctcctctggcttcggaccgcaggctgctcctgggccccgcggggggcggcgtgcccaagctcggggggctgctccccgagggcggtggggaggcgcctgcacctgcggcggccgccgagccctcggaagacaccctgtaccagtgcgactgcgggaccttctttgcgtcggccgcggccctggccagtcacctggaggcccactcgggcccggccacctacggctgcggccactgcggggctctgtacgcggcgctggccgccttggaggagcaccggcgggtcagccacggtgagggcggcggggaggaggcggcgaccgccgcccgggaaagggaaccggcgtccggggaacccccgtctggctccggccgcggcaagaagatcttcggctgctccgagtgcgagaagctgttccgctcaccgcgagacctggagcggcacgtgctggtgcacactggcgagaagccgttcccgtgcctggagtgcggcaagttcttccgccacgagtgctacctcaagcgccaccggctgctgcacggcaccgagcggcccttcccttgccacatctgcggcaagggcttcatcacgctcagcaacctctccaggcacctgaagctgcaccggggcatggac

SEQ ID NO: 3773 - DNA, 474 bp, Homo sapiens
  source 1..474: mol_type = genomic DNA
atggggagaagcccgaggaagattgaccagttttgtaattctagcaacatggtccatggatcagtgacattcagggatgtggccattgacttctctcaggaggagtgggagtgcctgcagcctgatcagaggaccttgtacagggatgtgatgttggagaactacagccacctgatctcactgggaagttccatttctaaaccagatgtaattacgttactagagcaagagaaagagccctggatggttgtaaggaaagaaacaagcagacggtatccagatttggagttaaaatatggacctgagaaagtatctccagaaaatgatacctctgaagtaaatttacccaaacagatttcttcattggcttccaaaccatcttttacagctattcatattcaaaggagaatccattgcagaatctgcattgcatttggttatctctctttagtgtattgtagcctggaaatccta

SEQ ID NO: 3774 - DNA, 1926 bp, Homo sapiens
  source 1..1926: mol_type = genomic DNA
atggtccatggatcagtgacattcagggatgtggccattgacttctctcaggaggagtgggagtgcctgcagcctgatcagaggaccttgtacagggatgtgatgttggagaactacagccacctgatctcactggcaggaagttccatttctaaaccagatgtaattacgttactagagcaagagaaagagccctggatggttgtaaggaaagaaacaagcagacggtatccagatttggagttaaaatatggacctgagaaagtatctccagaaaatgatacctctgaagtaaatttacccaaacaggttataaagcaaataagtacaactcttggcattgaggccttttattttagaaatgactcagaatatagacaatttgagggactacagggatatcaagaaggaaatatcaatcaaaagatgatcagctatgaaaaactgcctactcatactcctcatgcttctcttatttgcaatacacataaaccgtatgaatgtaaggaatgtgggaaatactttagtcgtagtgcaaatcttattcagcatcagagtattcatactggagagaaaccctttgaatgtaaggagtgtgggaaagcctttcgacttcacatacaatttactcgacatcagaaatttcatactggtgagaaaccttttgaatgtaacgaatgtggaaaggcctttagtcttcttaccctgcttaatcgccataagaacattcacacaggtgagaaactgtttgaatgtaaggaatgtgggaagtcctttaatcgtagctcaaaccttgttcaacatcagagtattcattctggtgtaaaaccatatgaatgtaaggagtgtgggaaaggctttaatcgtggtgcacaccttattcagcatcagaaaattcattccaatgagaaaccctttgtatgtaaggaatgtgggatggcctttcgatatcattaccaacttattgaacattgccaaattcatactggtgagaaaccctttgaatgtaaagaatgtggaaaggcgtttactcttctgacaaagcttgttcgacatcagaagattcatactggtgagaaaccctttgaatgcagggaatgtgggaaggcctttagtcttctcaaccagcttaatcgccataagaacattcacacaggtgaaaaaccgtttgaatgtaaggaatgtgggaagtcctttaatcgtagctcaaaccttgttcaacatcagagtattcatgctggtataaaaccatatgaatgtaaggagtgtgggaaaggctttaatcgtggtgcacaccttattcagcatcagaaaattcattccaatgagaaaccttttgtatgtagggaatgtgagatggcctttagatatcattgccaacttattgaacattctcgaattcatactggtgacaagccatttgaatgtcaagactgtgggaaggccttcaatcgtggctcaagccttgttcaacatcagagtattcacactggtgagaagccctatgaatgtaaggagtgtgggaaggcttttagactttacctacaactttcccaacatcagaaaactcacacaggtgaaaaaccatttgaatgtaaggaatgtgggaaattctttcgtcgtggttcaaatcttaatcaacatcgaagtattcatactggaaagaaaccctttgaatgtaaggaatgtgggaaagcctttcgacttcatatgcaccttattcgacatcagaaattgcatactggtgagaaaccctttgaatgtaaggagtgtgggaaagcctttcgacttcatatgcaacttattcgacatcagaaattgcatactggtgagaaaccctttgaatgtaaggaatgtggaaaggtttttagtcttcccacccagcttaatcgccataagaacattcacacaggtgagaaggcatct

SEQ ID NO: 3775 - DNA, 1923 bp, Homo sapiens
  source 1..1923: mol_type = genomic DNA
atggtccatggatcagtgacattcagggatgtggccattgacttctctcaggaggagtgggagtgcctgcagcctgatcagaggaccttgtacagggatgtgatgttggagaactacagccacctgatctcactgggaagttccatttctaaaccagatgtaattacgttactagagcaagagaaagagccctggatggttgtaaggaaagaaacaagcagacggtatccagatttggagttaaaatatggacctgagaaagtatctccagaaaatgatacctctgaagtaaatttacccaaacaggttataaagcaaataagtacaactcttggcattgaggccttttattttagaaatgactcagaatatagacaatttgagggactacagggatatcaagaaggaaatatcaatcaaaagatgatcagctatgaaaaactgcctactcatactcctcatgcttctcttatttgcaatacacataaaccgtatgaatgtaaggaatgtgggaaatactttagtcgtagtgcaaatcttattcagcatcagagtattcatactggagagaaaccctttgaatgtaaggagtgtgggaaagcctttcgacttcacatacaatttactcgacatcagaaatttcatactggtgagaaaccttttgaatgtaacgaatgtggaaaggcctttagtcttcttaccctgcttaatcgccataagaacattcacacaggtgagaaactgtttgaatgtaaggaatgtgggaagtcctttaatcgtagctcaaaccttgttcaacatcagagtattcattctggtgtaaaaccatatgaatgtaaggagtgtgggaaaggctttaatcgtggtgcacaccttattcagcatcagaaaattcattccaatgagaaaccctttgtatgtaaggaatgtgggatggcctttcgatatcattaccaacttattgaacattgccaaattcatactggtgagaaaccctttgaatgtaaagaatgtggaaaggcgtttactcttctgacaaagcttgttcgacatcagaagattcatactggtgagaaaccctttgaatgcagggaatgtgggaaggcctttagtcttctcaaccagcttaatcgccataagaacattcacacaggtgaaaaaccgtttgaatgtaaggaatgtgggaagtcctttaatcgtagctcaaaccttgttcaacatcagagtattcatgctggtataaaaccatatgaatgtaaggagtgtgggaaaggctttaatcgtggtgcacaccttattcagcatcagaaaattcattccaatgagaaaccttttgtatgtagggaatgtgagatggcctttagatatcattgccaacttattgaacattctcgaattcatactggtgacaagccatttgaatgtcaagactgtgggaaggccttcaatcgtggctcaagccttgttcaacatcagagtattcacactggtgagaagccctatgaatgtaaggagtgtgggaaggcttttagactttacctacaactttcccaacatcagaaaactcacacaggtgaaaaaccatttgaatgtaaggaatgtgggaaattctttcgtcgtggttcaaatcttaatcaacatcgaagtattcatactggaaagaaaccctttgaatgtaaggaatgtgggaaagcctttcgacttcatatgcaccttattcgacatcagaaattgcatactggtgagaaaccctttgaatgtaaggagtgtgggaaagcctttcgacttcatatgcaacttattcgacatcagaaattgcatactggtgagaaaccctttgaatgtaaggaatgtggaaaggtttttagtcttcccacccagcttaatcgccataagaacattcacacaggtgagaaggcatct

SEQ ID NO: 3776 - DNA, 2499 bp, Homo sapiens
  source 1..2499: mol_type = genomic DNA
atggtccatggatcagtgacattcagggatgtggccattgacttctctcaggaggagtgggagtgcctgcagcctgatcagaggaccttgtacagggatgtgatgttggagaactacagccacctgatatcactgggaagttccatttctaagccagatgtgattacattactagagcaagagaaagagccctggattgttgtaagtaaagaaacaagcagatggtatccagatttggagtcaaaatatggacctgagaaaatatctccagaaaatgatatttttgaaataaatttacccaaacatgttataaagcaaataagtaaaacacttggcctcgaggccttttattttagaaatgactcagaatatagaagtagatttgagggacgacagggacatcaagaaggatatatcaaccagaagatcatcagctatgaagaaatgcctgcttatactcatgcttctcctattcataatacacataaaccatatgaatgtaaggaatgtgggaaatactttagttgtggttcaaatcttattcagcatcagagtattcatactggagagaaaccctataaatgcaaagaatgtgggaaagcctttcaacttcacatacaacttactcgacatcagaaatttcatactggtgagaaaacttttgaatgtaaggaatgtggaaaagcctttaatcttcccacccagcttaatcgccataagaacattcacacagttaagaaactgtttgaatgtaaggaatgtgggaagtcttttaatcgtagctcaaaccttactcagcatcaaagtattcatgctggtgtaaaaccatatcaatgtaaggagtgtgggaaagcctttaatcgtggttcaaatcttattcagcatcaaaaaattcattccaatgagaaaccctttgtatgtagggaatgtgagatggcctttcgatatcattaccaactcattgaacattgccgaattcatactggcgagaaaccctttgaatgtaaagaatgcagaaaggcctttactcttctgacaaagcttgttcgacatcagaagattcatatgggtgagaagccctttgaatgcagggaatgcgggaaggcctttagtctcctcaatcagcttaatcgccataagaatattcacacaggtgaaaaaccatttgaatgtaaagaatgtgggaagtcctttaatcgtagttcaaaccttattcaacaccagagtattcatgctgatgtaaaaccatatgaatgtaaggagtgtgggaaaggctttaatcgtggtgcaaatcttattcagcatcaaaaaattcattccaatgagaaaccctttgtatgtagggaatgtgagatggcctttcgatatcattaccaacttattcaacattgccaaattcatactggtgggaaaccctttgaatgtaaagaatgtggaaaggcctttagtcttctgacacagcttgctcgacataagaacattcatactggtgagaaaccatttgaatgtaaagactgtgggaaggccttcaatcgtggctcgaaccttgttcaacatcagagtattcacactggtgagaagccctatgaatgtaaggagtgtgggaaggcttttagacttcacctacaactttctcaacatgagaaaactcatacaggtgagaaaccctttgaatgtaaggaatgtgggaaattctttcgtcgtggttcaaatcttaatcaacatcgaagtattcataccggaaagaaaccctttgaatgtaaggaatgtgggaaagcctttcgacttcatatgcaccttattcgacatcagaaatttcatactggtgagaagccctttgaatgtaaggaatgtggcaaggccttcagtcttcacacccagcttaatcaccataagaacattcacacaggtgagaagccatttaaatgtaaagaatgtgggaagtcctttaatcgtgtctcaaaccttgttcaacatcagagtattcatgctggtgtaaaaccatatgaatgtaaggagtgtgggaaaggctttagtcgtgtttcaaaccttattcagcatcagaaaactcattccagtgcgaaaccctttgtatgtaaggagtgtaggaagacctttagatatcattaccagcttactgaacattaccgaattcatactggtgagaaaccctttgaatgtaaagaatgcggaaaggcctttggtcttctgacacagcttgctcaacatcagatcattcatactggtgagaagccatttaaatgtaaggagtgtgggaaggcctttaatcgtggctcaaaccttgttcaacctcagagtattcatactggtgagaaaccctatgaatgtaaggagtgtgggaaggcttttagacttcacctacaactttctctgcatcaaaaacttgtacaggtgagaaaccctttgaatgtaagaaatgtgggacagccttcagacatcagtagcaacttactgaacatcagaaaattcatacttggg

SEQ ID NO: 3777 - DNA, 3360 bp, Homo sapiens
  source 1..3360: mol_type = genomic DNA
atggcggaggcgcctcctgtctcaggtacttttaaattcaatacagatgctgctgaattcattcctcaggagaaaaaaaattctggtctaaattgtgggactcaaaggagactagactctaataggattggtagaagaaattacagttcaccacctccctgtcacctttccaggcaggtcccttatgatgaaatctctgctgttcatcagcatagttatcatccgtcaggaagcaaacctaagagtcagcagacgtctttccagtcctctccttgtaataaatcgcccaagagccatggccttcagaatcaaccttggcagaaattgaggaatgagaagcaccatatcagagtcaagaaagcacagagtcttgctgagcagacctcagatacagctggattagagagctcgaccagatcagagagtgggacagacctcagagagcatagtccttctgagagtgagaaggaagttgtgggtgcagatcccaggggagcaaaacccaaaaaagcaacacagtttgtatacagctatggtagaggaccaaaagtcaaggggaaactcaaatgtgaatggagtaaccgaacaactccaaaaccggaggatgctggacccgaaagtaccaaacctgtgggggttttccaccctgactcttcagaggcatcctctagaaaaggagtattggatgggtatggagccagacgaaatgagcagagaagatacccacagaaaaggcctccctgggaagtggagggggccaggccacgaccaggcagaaatccaccaaaacaggagggccaccgacatacaaacgcaggacacagaaacaacatgggccccattccaaaggatgacctcaatgaaagaccagcaaaatctacctgtgacagtgagaacttggcagtcatcaacaagtcttccaggagggttgaccaagagaaatgcactgtacggaggcaggatcctcaagtagtatctcctttctcccgaggcaaacagaaccatgtgctaaagaatgtggaaacgcacacaggttctctaattgaacaactaacaacagaaaaatacgagtgcatggtgtgctgtgaattggttcgtgtcacggccccagtgtggagttgtcagagctgttaccatgtgtttcatttgaactgcataaagaaatgggcaaggtctccagcatctcaagcagatggccagagtggttggaggtgccctgcctgtcagaatgtttctgcacatgttcctaatacctacacttgtttctgtggcaaggtaaagaatcctgagtggagcagaaatgaaattccacatagctgtggtgaggtttgtagaaagaaacagcctggccaggactgcccacattcctgtaaccttctctgccatccaggaccctgcccaccctgccctgcctttatgacaaaaacatgtgaatgtggacgaaccaggcacacagttcgctgtggtcaggctgtctcagtccactgttctaacccatgtgagaatattttgaactgtggtcagcaccagtgtgctgagctgtgccatgggggtcagtgccagccttgccagatcattttgaaccaggtatgctattgcggcagcacctcccgagatgtgttatgtggaaccgatgtaggaaagtctgatggatttggggatttcagctgtttaaagatatgtggcaaggacttgaaatgcggtaaccatacatgttcgcaagtgtgccaccctcagccctgccagcaatgcccacggctcccccagctggtgcgctgttgcccctgtggccaaactcctctcagccaattgctagaacttggaagtagtagtcggaaaacatgcatggaccctgtgccttcatgtggaaaagtgtgcggcaagcctctgccttgtggttccttagatttcattcatacctgtgaaaagctctgccatgaaggagactgtggaccatgctctcgcacatcagttatttcctgcagatgctctttcagaacaaaggagcttccatgtaccagtctcaaaagtgaagatgctacatttatgtgtgacaagcggtgtaacaagaaacggttgtgtggacggcataaatgtaatgagatatgctgtgtggataaggagcacaagtgtcctttgatttgtgggaggaaactccgttgtggccttcataggtgtgaagaaccttgtcatcgtggaaactgccagacatgctggcaagccagttttgatgaattaacctgccattgtggtgcatcagtgatttaccctccagttccctgtggtactaggccccctgaatgtacccaaacctgcgctagagtccatgagtgtgaccatccagtatatcattcttgtcatagtgaggagaagtgtcccccttgcactttcctaactcagaagtggtgcatgggcaagcatgagtttcggagcaacatcccctgtcacctggttgatatctcttgcggattaccctgcagtgccacgctaccatgtgggatgcacaaatgtcagagactctgtcacaaaggggagtgtcttgtggatgagccctgcaagcagccctgcaccacccccagagctgactgtggtcacccgtgtatggcaccctgccataccagctcaccctgccctgtgactgcttgtaaagctaaggtagagctacagtgtgaatgtggacgaagaaaagagatggtgatttgctctgaagcatctagtacttatcaaagaatagctgcaatctccatggcctctaagataacagacatgcagcttggaggttcagtggagatcagcaagttaattaccaaaaaggaagttcatcaagccaggctggagtgtgatgaggagtgttcagccttggaaaggaaaaagagattagcagaggcatttcatatcagtgaggattctgatcctttcaatatacgttcttcagggtcaaaattcagtgatagtttgaaagaagatgccaggaaggacttaaagtttgtcagtgacgttgagaaggaaatggaaaccctcgtggaggccgtgaataagggaaagaatagtaagaaaagccacagcttccctcccatgaacagagaccaccgccggatcatccatgacttggcccaagtttatggcctggagagcgtgagctatgacagtgaaccgaagcgcaatgtggtggtcactgccatcagggggaagtccgtttgtcctcctaccacgctgacaggtgtgcttgaaagggaaatgcaggcacggcctccaccaccgattcctcatcacagacatcagtcagacaagaatcctgggagcagtaatttacagaaaataaccaaggagccaataattgactattttgacgtccaggac

SEQ ID NO: 3778 - DNA, 2499 bp, Homo sapiens
  source 1..2499: mol_type = genomic DNA
atggcggaggcgcctcctgtctcaggtacttttaaattcaatacagatgctgctgaattcattcctcaggagaaaaaaaattctggtctaaattgtgggactcaaaggagactagactctaataggattggtagaagaaattacagttcaccacctccctgtcacctttccaggcaggtcccttatgatgaaatctctgctgttcatcagcatagttatcatccgtcaggaagcaaacctaagagtcagcagacgtctttccagtcctctccttgtaataaatcgcccaagagccatggccttcagaatcaaccttggcagaaattgaggaatgagaagcaccatatcagagtcaagaaagcacagagtcttgctgagcagacctcagatacagctggattagagagctcgaccagatcagagagtgggacagacctcagagagcatagtccttctgagagtgagaaggaagttgtgggtgcagatcccaggggagcaaaacccaaaaaagcaacacagtttgtatacagctatggtagaggaccaaaagtcaaggggaaactcaaatgtgaatggagtaaccgaacaactccaaaaccggaggatgctggacccgaaagtaccaaacctgtgggggttttccaccctgactcttcagaggcatcctctagaaaaggagtattggatgggtatggagccagacgaaatgagcagagaagatacccacagaaaaggcctccctgggaagtggagggggccaggccacgaccaggcagaaatccaccaaaacaggagggccaccgacatacaaacgcaggacacagaaacaacatgggccccattccaaaggatgacctcaatgaaagaccagcaaaatctacctgtgacagtgagaacttggcagtcatcaacaagtcttccaggagggttgaccaagagaaatgcactgtacggaggcaggatcctcaagtagtatctcctttctcccgaggcaaacagaaccatgtgctaaagaatgtggaaacgcacacaggttctctaattgaacaactaacaacagaaaaatacgagtgcatggtgtgctgtgaattggttcgtgtcacggccccagtgtggagttgtcagagctgttaccatgtgtttcatttgaactgcataaagaaatgggcaaggtctccagcatctcaagcagatggccagagtggttggaggtgccctgcctgtcagaatgtttctgcacatgttcctaatacctacacttgtttctgtggcaaggtaaagaatcctgagtggagcagaaatgaaattccacatagctgtggtgaggtttgtagaaagaaacagcctggccaggactgcccacattcctgtaaccttctctgccatccaggaccctgcccaccctgccctgcctttatgacaaaaacatgtgaatgtggacgaaccaggcacacagttcgctgtggtcaggctgtctcagtccactgttctaacccatgtgagaatattttgaactgtggtcagcaccagtgtgctgagctgtgccatgggggtcagtgccagccttgccagatcattttgaaccaggtatgctattgcggcagcacctcccgagatgtgttatgtggaaccgatgtaggaaagtctgatggatttggggatttcagctgtttaaagatatgtggcaaggacttgaaatgcggtaaccatacatgttcgcaagtgtgccaccctcagccctgccagcaatgcccacggctcccccagctggtgcgctgttgcccctgtggccaaactcctctcagccaattgctagaacttggaagtagtagtcggaaaacatgcatggaccctgtgccttcatgtggaaaagtgtgcggcaagcctctgccttgtggttccttagatttcattcatacctgtgaaaagctctgccatgaaggagactgtggaccatgctctcgcacatcagttatttcctgcagatgctctttcagaacaaaggagcttccatgtaccagtctcaaaagtgaagatgctacatttatgtgtgacaagcggtgtaacaagaaacggttgtgtggacggcataaatgtaatgagatatgctgtgtggataaggagcacaagtgtcctttgatttgtgggaggaaactccgttgtggccttcataggtgtgaagaaccttgtcatcgtggaaactgccagacatgctggcaagccagttttgatgaattaacctgccattgtggtgcatcagtgatttaccctccagttccctgtggtactaggccccctgaatgtacccaaacctgcgctagagtccatgagtgtgaccatccagtatatcattcttgtcatagtgaggagaagtgtcccccttgcactttcctaactcagaagtggtgcatgggcaagcatgagcagtcccactactgggcgtctacccagaagaaaagaagtcattatatgaaaaagatacctgcacacgcatgttta

SEQ ID NO: 3779 - DNA, 2181 bp, Homo sapiens
  source 1..2181: mol_type = genomic DNA
atgaacggagaagccgactgccccacagacctggaaatggccgcccccaaaggccaagaccgttggtcccaggaagacatgctgactttgctggaatgcatgaagaacaaccttccatccaatgacagctccaagttcaaaaccaccgaatcacacatggactgggaaaaagtagcatttaaagacttttctggagacatgtgcaagctcaaatgggtggagatttctaatgaggtgaggaagttccgtacattgacagaattgatcctcgatgctcaggaacatgttaaaaatccttacaaaggcaaaaaactcaagaaacacccagacttcccaaagaagcccctgaccccttatttccgcttcttcatggagaagcgggccaagtatgcgaaactccaccctgagatgagcaacctggacctaaccaagattctgtccaagaaatacaaggagcttccggagaagaagaagatgaaatatattcaggacttccagagagagaaacaggagttcgagcgaaacctggcccgattcagggaggatcaccccgacctaatccagaatgccaagaaatcggacatcccagagaagcccaaaaccccccagcagctgtggtacacccacgagaagaaggtgtatctcaaagtgcggccagatgagatcatgagagactatatccagaagcacccagagctgaacatcagtgaggagggtatcaccaagtccaccctcaccaaggccgaacgccagctcaaggacaagtttgacgggcgacccaccaagccacctccgaacagctactcgctgtactgcgcagagctcatggccaacatgaaggacgtgcccagcacagagcgcatggtgctgtgcagccagcagtggaagctgctgtcccagaaggagaaggacgcctatcacaagaagtgtgatcagaaaaagaaagattacgaggtggagctgctccgtttcctcgagagcctgcctgaggaggagcagcagcgggtcttgggggaagagaagatgctgaacatcaacaagaagcaggccaccagccccgcctccaagaagccagcccaggaagggggcaagggcggctccgagaagcccaagcggcccgtgtcggccatgttcatcttctcggaggagaaacggcggcagctgcaggaggagcggcctgagctctccgagagcgagctgacccgcctgctggcccgaatgtggaacgacctgtctgagaagaagaaggccaagtacaaggcccgagaggcggcgctcaaggctcagtcggagaggaagcccggcggggagcgcgaggaacggggcaagctgcccgagtcccccaaaagagctgaggagatctggcaacagagcgttatcggcgactacctggcccgcttcaagaatgaccgggtgaaggccttgaaagccatggaaatgacctggaataacatggaaaagaaggagaaactgatgtggattaagaaggcagccgaagaccaaaagcgatatgagagagagctgagtgagatgcgggcacctccagctgctacaaattcttccaagaagatgaaattccagggagaacccaagaagcctcccatgaacggttaccagaagttctcccaggagctgctgtccaatggggagctgaaccacctgccgctgaaggagcgcatggtggagatcggcagtcgctggcagcgcatctcccagagccagaaggagcactacaaaaagctggccgaggagcagcaaaagcagtacaaggtgcacctggacctctgggttaagagcctgtctccccaggaccgtgcagcatataaagagtacatctccaataaacgtaagagcatgaccaagctgcgaggcccaaaccccaaatccagccggactactctgcagtccaagtcggagtccgaggaggatgatgaagaggatgaggatgacgaggacgaggatgaagaagaggaagatgatgagaatggggactcctctgaagatggcggcgactcctctgagtccagcagcgaggacgagagcgaggatggggatgagaatgaagaggatgacgaggacgaagacgacgacgaggatgacgatgaggatgaagataatgagtccgagggcagcagctccagctcctcctcctcaggggactcctcagactctgactccaac

SEQ ID NO: 3780 - DNA, 2292 bp, Homo sapiens
  source 1..2292: mol_type = genomic DNA
atgaacggagaagccgactgccccacagacctggaaatggccgcccccaaaggccaagaccgttggtcccaggaagacatgctgactttgctggaatgcatgaagaacaaccttccatccaatgacagctccaagttcaaaaccaccgaatcacacatggactgggaaaaagtagcatttaaagacttttctggagacatgtgcaagctcaaatgggtggagatttctaatgaggtgaggaagttccgtacattgacagaattgatcctcgatgctcaggaacatgttaaaaatccttacaaaggcaaaaaactcaagaaacacccagacttcccaaagaagcccctgaccccttatttccgcttcttcatggagaagcgggccaagtatgcgaaactccaccctgagatgagcaacctggacctaaccaagattctgtccaagaaatacaaggagcttccggagaagaagaagatgaaatatattcaggacttccagagagagaaacaggagttcgagcgaaacctggcccgattcagggaggatcaccccgacctaatccagaatgccaagaaatcggacatcccagagaagcccaaaaccccccagcagctgtggtacacccacgagaagaaggtgtatctcaaagtgcggccagatgccactacgaaggaggtgaaggactccctggggaagcagtggtctcagctctcggacaaaaagaggctgaaatggattcataaggccctggagcagcggaaggagtacgaggagatcatgagagactatatccagaagcacccagagctgaacatcagtgaggagggtatcaccaagtccaccctcaccaaggccgaacgccagctcaaggacaagtttgacgggcgacccaccaagccacctccgaacagctactcgctgtactgcgcagagctcatggccaacatgaaggacgtgcccagcacagagcgcatggtgctgtgcagccagcagtggaagctgctgtcccagaaggagaaggacgcctatcacaagaagtgtgatcagaaaaagaaagattacgaggtggagctgctccgtttcctcgagagcctgcctgaggaggagcagcagcgggtcttgggggaagagaagatgctgaacatcaacaagaagcaggccaccagccccgcctccaagaagccagcccaggaagggggcaagggcggctccgagaagcccaagcggcccgtgtcggccatgttcatcttctcggaggagaaacggcggcagctgcaggaggagcggcctgagctctccgagagcgagctgacccgcctgctggcccgaatgtggaacgacctgtctgagaagaagaaggccaagtacaaggcccgagaggcggcgctcaaggctcagtcggagaggaagcccggcggggagcgcgaggaacggggcaagctgcccgagtcccccaaaagagctgaggagatctggcaacagagcgttatcggcgactacctggcccgcttcaagaatgaccgggtgaaggccttgaaagccatggaaatgacctggaataacatggaaaagaaggagaaactgatgtggattaagaaggcagccgaagaccaaaagcgatatgagagagagctgagtgagatgcgggcacctccagctgctacaaattcttccaagaagatgaaattccagggagaacccaagaagcctcccatgaacggttaccagaagttctcccaggagctgctgtccaatggggagctgaaccacctgccgctgaaggagcgcatggtggagatcggcagtcgctggcagcgcatctcccagagccagaaggagcactacaaaaagctggccgaggagcagcaaaagcagtacaaggtgcacctggacctctgggttaagagcctgtctccccaggaccgtgcagcatataaagagtacatctccaataaacgtaagagcatgaccaagctgcgaggcccaaaccccaaatccagccggactactctgcagtccaagtcggagtccgaggaggatgatgaagaggatgaggatgacgaggacgaggatgaagaagaggaagatgatgagaatggggactcctctgaagatggcggcgactcctctgagtccagcagcgaggacgagagcgaggatggggatgagaatgaagaggatgacgaggacgaagacgacgacgaggatgacgatgaggatgaagataatgagtccgagggcagcagctccagctcctcctcctcaggggactcctcagactctgactccaac

SEQ ID NO: 3781 - DNA, 1077 bp, Homo sapiens
  source 1..1077: mol_type = genomic DNA
atggcgggacacctggcttcggatttcgccttctcgccccctccaggcggtgggggtgatgggccatggggggcggagccgggctgggttgatcctctgacctggctaagcttccaaggccctcctggagggccaggaatcgggccgggggttgggccaggctctgaggtgtgggggattcccccttgccccccgccgtatgagttatgtggggggatggcgtactgtgggcctcaggttggagtggggctagtgccccaaggcggcttggagacctctcagcctgagagcgaagcaggagtcggggtggagagcaactccaatggggcctccccggaaccctgcaccgtcccccctggtgccgtgaagctggagaaggagaagctagagcaaaacccggagaagtcccaggacatcaaagctctgcagaaagaactcgagcaatttgccaagctcctgaagcagaagaggatcaccctgggatatacacaggccgatgtggggctcatcctgggggttctatttgggaaggtgttcagccaaaagaccatctgccgctttgaggctctgcagcttagcttcaagaacatgtgtaagctgcggcccttgctgcagaagtgggtggaggaagctgacaacaatgaaaatcttcaggagatatgcaaagcagaaaccctcatgcaggcccgaaagagaaagcgaaccagtatcgagaaccgagtgagaggcaacctggagaatttgttcctgcagtgcccgaaacccacactgcagatcagccacatcgcccagcagcttgggctcgagaaggatgtggtccgagtgtggttctgtaaccggcgccagaagggcaagcgatcaagcagcgactatgcacaacgagaggattttgaggctgctgggtctcctttctcagggggaccagtgtcctttcctccggccccagggccccattttggtaccccaggctatgggagccctcacttcactgcactgtactcctcagtccctttccctgagggggaagtctttcccccagtctccgtcatcactctgggctctcccatgcattcaaac

SEQ ID NO: 3782 - DNA, 513 bp, Homo sapiens
  source 1..513: mol_type = genomic DNA
atgtggactctcgggcgccgcgcagtagccggcctcctggcgtcacccagcccagcccaggcccagaccctcacccgggtcccgcggccggcagagttggccccactctgcggccgccgtggcctgcgcaccgacatcgatgcgacctgcacgccccgccgcgcaagttcgaaccaacgtggcctcaaccagatttggaatgtcaaaaagcagagtgtctatttgatgaatttgaggaaatctggaactttgggccacccaggctctctagatgagaccacctatgaaagactagcagaggaaacgctggactctttagcagagttttttgaagaccttgcagacaagccatacacgtttgaggactatgatgtctcctttgggagtggtgtcttaactgtcaaactgggtggagatctaggaacctatgtgatcaacaagcagacgccaaacaagcaaatctggctatcttctccatccaggttaacgtggctcctgtggctgttccatccc

SEQ ID NO: 3783 - DNA, 588 bp, Homo sapiens
  source 1..588: mol_type = genomic DNA
atgtggactctcgggcgccgcgcagtagccggcctcctggcgtcacccagcccagcccaggcccagaccctcacccgggtcccgcggccggcagagttggccccactctgcggccgccgtggcctgcgcaccgacatcgatgcgacctgcacgccccgccgcgcaagttcgaaccaacgtggcctcaaccagatttggaatgtcaaaaagcagagtgtctatttgatgaatttgaggaaatctggaactttgggccacccaggctctctagatgagaccacctatgaaagactagcagaggaaacgctggactctttagcagagttttttgaagaccttgcagacaagccatacacgtttgaggactatgatgtctcctttgggagtggtgtcttaactgtcaaactgggtggagatctaggaacctatgtgatcaacaagcagacgccaaacaagcaaatctggctatcttctccatccaggtatgtagtggacctaagcgttatgactggactgggaaaaactgggtgtactcccacgacggcgtgtccctccatgagctgctggccgcagagctcactaaagcct

SEQ ID NO: 3784 - DNA, 852 bp, Homo sapiens
  source 1..852: mol_type = genomic DNA
atggactactcctacctcaattcgtacgactcgtgcgtggcggccatggaggcgtccgcctacggcgactttggcgcctgcagccagcccggcggcttccaatacagccccctgcggcccgctttccccgcggcagggccgccctgccccgcgctcggctcctccaactgcgcacttggcgccctacgcgaccaccagcccgcgccctactcggcagtgccctacaagttcttcccagagccatccggcctgcacgagaagcgcaagcagcggcgcatccgcaccacgttcaccagcgcgcagctcaaggagctggagcgcgttttcgctgagacccactaccccgacatttacacgcgtgaggagctggcgctcaagatcgacctcactgaggctcgcgtgcaggtctggttccagaaccgccgggccaagttccgcaaacaggagcgcgcggccagcgccaagggcgcggcgggcgcggcgggcgccaaaaagggcgaggcgcgctgctcctccgaggacgacgattccaaggagtccacgtgcagccccacgcccgatagcaccgcctcgctgccgccgccgcctgcgcccggcctggccagcccgcgcctgagccccagcccgctgcccgtcgcactgggctccgggccgggacctgggccggggccacagccgctcaagggcgcactgtgggccggtgtggcgggcggtgggggcggcgggcctggcgcgggagcggccgaactacttaaggcttggcagccggcggagtccggccccgggcccttctccggggttctgtcctcctttcaccggaagcccggccccgccctgaagaccaatctcttc

SEQ ID NO: 3785 - DNA, 942 bp, Homo sapiens
  source 1..942: mol_type = genomic DNA
atgtataaaatggaatattcttacctcaattcctctgcctacgagtcctgtatggctgggatggacacctcgagcctggcttcagcctatgctgacttcagttcctgcagccaggccagtggcttccagtataacccgataaggaccacttttggggccacgtccggctgcccttccctcacgccgggatcctgcagcctgggcaccctcagggaccaccagagcagtccgtacgccgcagttccttacaaactcttcacggaccacggcggcctcaacgagaagcgcaagcagcggcgcatccgcaccactttcaccagtgcccagctcaaagagctggaaagggtcttcgcggagactcactaccccgacatctacactcgggaggagctggccctgaagatcgacctcacagaggcgcgagtccaggtgtggttccagaaccgccgcgccaagtttcgcaagcaggagcgcgcagcggcagccgcagcggccgcggccaagaacggctcctcgggcaaaaagtctgactcttccagggacgacgagagcaaagaggccaagagcactgacccggacagcactgggggcccaggtcccaatcccaaccccacccccagctgcggggcgaatggaggcggcggcggcgggcccagcccggctggagctccgggggcggcggggcccgggggcccgggaggcgaacccggcaagggcggcgcagcagcagcggcggcggccgcggcagcggcggcggcggcagcggcagcggcggcagctggaggcctggctgcggctgggggccctggacaaggctgggctcccggccccggccccatcacctccatcccggattcgcttgggggtcccttcgccagcgtcctatcttcgctccaaagacccaacggtgccaaagccgccttagtgaagagcagtatgttc

SEQ ID NO: 3786 - DNA, 159 bp, Homo sapiens
  source 1..159: mol_type = genomic DNA
atggtgcagtcctgctccgcctacggctgcaagaaccgctacgacaaggacaagcccgtttctttccacaaaaagaagatcttctggagccacaggaacagcttcccccacctcctttaccgcctcctgtttcccaggttgatgctgctattggattac

SEQ ID NO: 3787 - DNA, 1713 bp, Homo sapiens
  source 1..1713: mol_type = genomic DNA
atggcgctcaccagctttttacctgcacctactcagctatctcaggaccagcttgaggctgaagaaaaggcaagatcccagagatcacggcagacctcactggtctcctcccgaagagaacctcccccgtacggataccggaaaggctggatacctcggttattagaggattttggagatggaggtgcttttccagagatccatgtggcccagtatccactggatatgggacgaaagaaaaaaatgtcgaatgcgctggccattcaggtggattctgaaggaaaaattaaatatgatgcaattgctcgacaaggacagtcaaaagacaaggtcatttatagcaaatacactgacctggttccaaaggaggttatgaatgcagatgatccagacctgcaaaggcccgatgaagaagctattaaagagataacagaaaagacaagagtagccttagaaaaatctgtatcacagaaggtcgccgcagccatgccagttcgagcagctgacaaattggctcctgctcagtatatccgatacacaccatctcagcaaggagtggcattcaactctggagctaaacagagggttattcggatggtagaaatgcagaaagatccaatggagcctccaaggttcaagattaataagaaaattccccggggaccaccttctcctcctgcgcctgtcatgcattctcctagccgaaagatgactgtaaaggaacaacaagagtggaagattcctccttgtatttctaactggaaaaatgcaaagggttatacaattccattagacaaacgtctggctgctgatggaagaggactacagacagtacacataaatgaaaatttcgccaaattggcagaagccctctacattgctgatcggaaggctcgtgaagctgtggaaatgcgtgcccaagtagagagaaaaatggctcagaaagaaaaggaaaaacatgaagagaaacttagagaaatggcccagaaagccagggagagaagagctgggatcaaaactcatgtggaaaaagaggatggggaggcacgtgagagggatgaaatccggcatgacaggcgaaaagagagacagcatgaccggaatctttccagggcagctcctgataagaggtcgaaacttcagagaaatgaaaatcgggatatcagtgaagttattgctctcggtgttcctaatcctcggacttccaatgaagttcagtatgaccaaaggctcttcaaccaatccaagggtatggacagtggatttgcaggtggagaagatgaaatttataatgtttatgatcaagcctggagaggtggtaaagatatggcccagagtatttataggcccagtaaaaatctggacaaggacatgtatggtgatgacctagaagccagaataaagaccaacaggtgccaagccatacaactcaatttcagtgtttacactggtgaaagcaaagtagttcatagttttttctccttttccttagatttgttcccgacaaggagttttctggttcagaccgtagacagagaggccgagaaggaccagtgcagtttgaggaagatccttttggtttggacaagtttttggaagaagccaaacagcatggtggctctaaaagaccctcagatagcagccgccccaaggaacacgagcatgaaggcaagaagaggaggaaggaataggcacaggtctctccaaagtgaa

SEQ ID NO: 3788 - DNA, 495 bp, Homo sapiens
  source 1..495: mol_type = genomic DNA
atggagccccccaagatgaacccagtggtggagccactgtcctggatgctgggcacctggctgtcggacccacctggagccgggacctaccccacactgcagcccttccagtacctggaggaggttcacatctcccacgtgggccagcccatgctgaacttctcgttcaactccttccacccggacacgcgcaagccgatgcacagagagtgtggcttcattcgcctcaagcccgacaccaacaaggtggcctttgtcagcgcccagaacacaggcgtggtggaagtggaggagggcgaggtgaacgggcaggagctgtgcatcgcatcccactccatcgccaggatctccttcgccaaggagccccacgtagagcagatcacccggaagttcaggctgaattctgaaggcaaacttgagcagacggtctccatggcaaccacgacacagccaatgactcagcatcttcacgtcacctacaagaaggtgaccccg

SEQ ID NO: 3789 - DNA, 1731 bp, Homo sapiens
  source 1..1731: mol_type = genomic DNA
atggtgatctgctgtgcggccgtgaactgctccaaccggcagggaaagggcgagaagcgcgccgtctccttccacaggttccccctaaaggactcaaaacgtctaatccaatggttaaaagctgttcagagggataactggactcccactaagtattcatttctctgtagtgagcatttcaccaaagacagcttctccaagaggctggaggaccagcatcgcctgctgaagcccacggccgtgccatccatcttccacctgaccgagaagaagaggggggctggaggccatggccgcacccggagaaaagatgccagcaaggccacagggggtgtgaggggacactcgagtgccgccaccagcagaggagctgcaggttggtcaccgtcctcgagtggaaacccgatggccaagccagagtcccgcaggttgaagcaagctgctctgcaaggtgaagccacacccagggcggcccaggaggccgccagccaggagcaggcccagcaagctctggaacggactccaggagatggactggccaccatggtggcaggcagtcagggaaaagcagaagcgtctgccacagatgctggcgatgagagcgccacttcctccatcgaagggggcgtgacagataagagtggcatttctatggatgactttacgcccccaggatctggggcgtgcaaatttatcggctcacttcattcgtacagtttctcctctaagcacacccgagaaaggccatctgtcccccgagagcccattgaccgcaagaggctgaagaaagatgtggaaccaagctgcagtgggagcagcctgggacccgacaagggcctggcccagagccctcccagctcatcacttaccgcgacaccgcagaagccttcccagagcccctctgcccctcctgccgacgtcaccccaaagccagccacggaagccgtgcagagcgagcacagcgacgccagccccatgtccatcaacgaggtcatcctgtcggcgtcaggggcctgcaagctcatcgactcactgcactcctactgcttctcctcccggcagaacaagagccaggtgtgctgcctgcgggagcaggtggagaagaagaacggcgagctgaagagcctgcggcagagggtcagccgctccgacagccaggtgcggaagctacaggagaagctggatgagctgaggagagtgagcgtcccctatccaagtagcctgctgtcgcccagccgcgagccccccaagatgaacccagtggtggagccactgtcctggatgctgggcacctggctgtcggacccacctggagccgggacctaccccacactgcagcccttccagtacctggaggaggttcacatctcccacgtgggccagcccatgctgaacttctcgttcaactccttccacccggacacgcgcaagccgatgcacagagagtgtggcttcattcgcctcaagcccgacaccaacaaggtggcctttgtcagcgcccagaacacaggcgtggtggaagtggaggagggcgaggtgaacgggcaggagctgtgcatcgcatcccactccatcgccaggatctccttcgccaaggagccccacgtagagcagatcacccggaagttcaggctgaattctgaaggcaaacttgagcagacggtctccatggcaaccacgacacagccaatgactcagcatcttcacgtcacctacaagaaggtgaccccg

SEQ ID NO: 3790 - DNA, 1059 bp, Homo sapiens
  source 1..1059: mol_type = genomic DNA
atgaagcgagattcatgggttcccagtaaataccagtttctatgtagtgaccattttactcctgactctcttgacatcagatggggtattcgatatttaaaacaaactgcagttccaacaatattttctttgcctgaagacaatcagggaaaagacccttctaaaaaaaaatcccagaagaaaaacttggaagatgagaaagaagtatgcccaaaagccaagtcagaagaatcatttgtattaaatgagacaaagaaaaatatagttaacacagatgtgccccatcaacatccagaattacttcattcatcttccttggtaaagccaccagctcccaaaacaggaagtatacaaaataacatgttaactcttaatctagttaaacaacatactgggaaaccagaatctaccttggaaacatcagttaaccaagatacaggtagaggtggttttcacacatgttttgagaatctaaattctacaactattactttgacaacttcaaattcagaaagtattcatcaatctttggaaactcaagaagttcttgaagtaactaccagtcatcttgctaatccaaactttacaagtaattccatggaaataaagtcagcacaggaaaatccattcttattcagcacaattaatcaaacagttgaagaattaaacacaaataaagaatctgttattgccatttttgtacctgctgaaaattctaaaccctcagttaattcttttatatctgcacaaaaagaaaccacggaaatggaagacacagacattgaagactccttgtataaggatgtagactatgggacagaagttttacaaatcgaacattcttactgcagacaagatataaataaggaacatctttggcagaaagtctctaagctacattcaaagataactcttctagagttaaaagagcaacaaactctaggtagattgaagtctttggaagctcttataaggcagctaaagcaggaaaactggctatctgaagaaaacgtcaagattatagaaaaccattttacaacatatgaagtcactatgata

SEQ ID NO: 3791 - DNA, 1185 bp, Homo sapiens
  source 1..1185: mol_type = genomic DNA
atgccccgctattgcgcagcgatttgttgtaagaaccgccggggacgaaacaataaagaccggaagctgagtttttatccatttcctctacatgacaaagaaagactggaaaagtggttaaagaatatgaagcgagattcatgggttcccagtaaataccagtttctatgtagtgaccattttactcctgactctcttgacatcagatggggtattcgatatttaaaacaaactgcagttccaacaatattttctttgcctgaagacaatcagggaaaagacccttctaaaaaaaaatcccagaagaaaaacttggaagatgagaaagaagtatgcccaaaagccaagtcagaagaatcatttgtattaaatgagacaaagaaaaatatagttaacacagatgtgccccatcaacatccagaattacttcattcatcttccttggtaaagccaccagctcccaaaacaggaagtatacaaaataacatgttaactcttaatctagttaaacaacatactgggaaaccagaatctaccttggaaacatcagttaaccaagatacaggtagaggtggttttcacacatgttttgagaatctaaattctacaactattactttgacaacttcaaattcagaaagtattcatcaatctttggaaactcaagaagttcttgaagtaactaccagtcatcttgctaatccaaactttacaagtaattccatggaaataaagtcagcacaggaaaatccattcttattcagcacaattaatcaaacagttgaagaattaaacacaaataaagaatctgttattgccatttttgtacctgctgaaaattctaaaccctcagttaattcttttatatctgcacaaaaagaaaccacggaaatggaagacacagacattgaagactccttgtataaggatgtagactatgggacagaagttttacaaatcgaacattcttactgcagacaagatataaataaggaacatctttggcagaaagtctctaagctacattcaaagataactcttctagagttaaaagagcaacaaactctaggtagattgaagtctttggaagctcttataaggcagctaaagcaggaaaactggctatctgaagaaaacgtcaagattatagaaaaccattttacaacatatgaagtcactatgata

SEQ ID NO: 3792 - DNA, 540 bp, Homo sapiens
  source 1..540: mol_type = genomic DNA
atggtgaaatgctgctccgccattggatgtgcttctcgctgcttgccaaattcgaagttaaaaggactgacatttcacgtattccccacagatgaaaacatcaaaaggaaatgggtattagcaatgaaaagacttgatgtgaatgcagccggcatttgggagcctaaaaaaggagatgtgttgtgttcgaggcactttaagaagacagattttgacagaagtgctccaaatattaaactgaaacctggagtcataccttctatctttgattctccatatcacctacaggaacatagctacagtgtaatggacagtccaaagaaacttaagcataaattagatcatgtgatcggcgagctagaggatacaaaggaaagtctacggaatgttttagaccgagaaaaacgttttcagaaatcattgaggaagacaatcagggaattaaaggatgaatgtctgatcagccaagaaacagcaaatagactggacactttctgttgggactgttgtcaggagagcatagaacaggactatatttca

SEQ ID NO: 3793 - DNA, 480 bp, Homo sapiens
  source 1..480: mol_type = genomic DNA
atggtgaaatgctgctccgccattggatgtgcttctcgctgcttgccaaattcgaagttaaaaggactgacatttcacgtattccccacagatgaaaacatcaaaaggaaatgggtattagcaatgaaaagacttgatgtgaatgcagccggcatttgggagcctaaaaaaggagatgtgttgtgttcgaggcactttaagaagacagattttgacagaagtgctccaaatattaaactgaaacctggagtcataccttctatctttgattctccatatcacctacaggggaaaagagaaaaacttcattgtagaaaaaacttcaccctcaaaaccgttccagccactaactacaatcaccatcttgttggtgcttcctcatgtattgaagaattccaatcccagttcatttttaaacacaggaaaaggaaacaagaacaggaagaagaacaaaaaccaagaagagagaaatgcatttca

SEQ ID NO: 3794 - DNA, 927 bp, Homo sapiens
  source 1..927: mol_type = genomic DNA
atgccgcgtcactgctccgccgccggctgctgcacacgggacacgcgcgagacgcgcaaccgcggcatctccttccacagacttcccaagaaggacaacccgaggcgaggcttgtggctggccaactgccagcggctggaccccagcggccagggcctgtgggacccggcatccgagtacatctacttctgctccaaacactttgaggaggactgctttgagctggtgggaatcagtggatatcacaggctaaaggagggggcagtccccaccatatttgagtctttctccaagttgcgccggacaaccaagaccaaaggacacagttacccacctggccccgctgaagtcagccggctcagacgatgcaggaagcgctgctccgagggccgagggcccacaactccattttctccacctccacctgctgatgtcacctgctttcctgtggaagaggcctcagcacctgccactttgccggcctccccagctgggaggctggagcctggccttagcagccccttttcagacctactgggccccttgggtgcccaggcagatgaagcaggctgcagcgcccagccttcaccagagcggcagccctcccctctcgaaccacggccagtctccccctcagcgtatatgctgcgcctgcccccacccgccggagcctacatccagaatgaacacagctaccaggtgggcagcgccttactctggaagcggcgagccgaggcagcccttgatgcccttgacaaggcccagcgccagctgcaggcctgcaagcggcgggagcagcggctgcggttgagactgaccaagctgcagcaggagcgggcacgggagaagcgggcacaggcagatgcccgccagactctgaaggagcatgtgcaggactttgccatgcagctgagcagcagcatggcc

SEQ ID NO: 3795 - DNA, 2709 bp, Homo sapiens
  source 1..2709: mol_type = genomic DNA
atgacccgaagttgctccgcagtgggctgcagcacccgtgacaccgtgctcagccgggagcgcggcctctccttccaccaatttccaactgataccatacagcgctcaaaatggatcagggctgttaatcgtgtggaccccagaagcaaaaagatttggattccaggaccaggtgctatactgtgttccaaacattttcaagaaagtgactttgagtcatatggcataagaagaaagctgaaaaaaggagctgtgccttctgtttctctatacaagattcctcaaggtgtacatcttaaaggtaaagcaagacaaaaaatcctaaaacaacctcttccagacaattctcaagaagttgctactgaggaccataactatagtttaaagacacctttgacgataggtgcagagaaactggctgaggtgcaacaaatgttacaagtgtccaaaaaaagacttatctccgtaaagaactacaggatgatcaagaagagaaagggtttacgattaattgatgcacttgtagaagagaaactactttctgaagaaacagagtgtctgctacgagctcaattttcagattttaagtgggagttatataattggagagaaacagatgagtactccgcagaaatgaaacaatttgcatgtacactctacttgtgcagtagcaaagtctatgattatgtaagaaagattcttaagctgcctcattcttccatcctcagaacgtggttatccaaatgccaacccagtccaggtttcaacagcaacattttttcttttcttcaacgaagagtagagaatggagatcagctctatcaatactgttcattgttaataaaaagtatgcctctcaagcaacagcttcagtgggatcctagcagtcacagtttgcaggggtttatggactttggtcttggaaaacttgatgctgatgaaacgccacttgcttcagaaactgttttgttaatggcagtgggtatttttggccattggagaacacctcttggttatttttttgtaaacagagcatctggatatttgcaggctcagctgcttcgtctgactattggtaaactgagtgacataggaatcacagttctggctgttacatctgatgccacagcacatagtgttcagatggcaaaagcattggggatacatattgatggagacgacatgaaatgtacatttcagcatccttcatcttctagtcaacagattgcatacttctttgactcttgccacttgctaagattaataagaaatgcatttcagaattttcaaagcattcagtttattaatggtatagcacattggcagcacctcgtggagttagtagcactggaggaacaggaattatcaaatatggaaagaataccaagtacacttgcaaatttgaaaaatcatgtactgaaagtgaatagtgccacccaactctttagtgagagtgtagccagtgcattagaatatttgttatccttagacctgccaccttttcaaaactgtattggtaccatccattttttacgtttaattaacaatctgtttgacatctttaatagtaggaactgttatggaaagggacttaaagggcctctgttgcctgaaacttacagtaaaataaaccacgtgttaattgaagccaagactatttttgttacattatctgacactagcaataatcaaataattaaaggtaagcaaaaactaggattcctgggatttttgctcaatgctgagagcttaaaatggctctaccaaaattatgttttcccaaaggtcatgccttttccttatcttctgacttacaaattcagtcatgatcatctggaattatttctaaagatgcttaggcaggtattagtaacaagttctagccctacctgcatggcattccagaaagcttactataatttggagaccagatacaaatttcaagatgaagtttttctaagcaaagtaagcatctttgacatttcaattgctcgaaggaaagacttggcgctttggacagttcaacgtcagtatggtgtcagcgttacaaagactgtctttcacgaagagggtatttgtcaagactggtctcattgttcactaagtgaggcattactagacctgtcagatcataggcgaaatctcatctgttatgctggttatgttgcaaacaagttatcagctcttttaacttgtgaggactgcatcactgcactgtatgcatcggatctcaaagcctctaaaattgggtcactattatttgttaaaaagaagaatggtttgcattttccttcagaaagtctgtgtcgggtcataaatatttgtgagcgagttgtaagaacccattcaagaatggcaatttttgaactagtttctaaacaaagggaattgtatcttcaacagaaaatattatgtgagctttctgggcatattaatctttttgtagatgtgaataagcatctctttgatggagaagtgtgtgccatcaatcactttgtcaagttgctaaaggatataataatctgtttcttaaatatcagagctaaaaatgttgcacagaatcctttaaaacatcattcagagagaactgatatgaaaactttatcaaggaaacactggtcatctgtacaggattataaatgttcaagttttgctaataccagtagtaaattcaggcatttgctaagtaacgatggatatccattcaaa

SEQ ID NO: 3796 - DNA, 1983 bp, Homo sapiens
  source 1..1983: mol_type = genomic DNA
atggcgtccacggattacagtacctatagccaagctgcagcgcagcagggctacagtgcttacaccgcccagcccactcaaggatatgcacagaccacccaggcatatgggcaacaaagctatggaacctatggacagcccactgatgtcagctatacccaggctcagaccactgcaacctatgggcagaccgcctatgcaacttcttatggacagcctcccactgtagaagggaccagtacaggttatactactccaactgccccccaggcatacagccagcctgtccaggggtatggcactggtgcttatgataccaccactgctacagtcaccaccacccaggcctcctatgcagctcagtctgcatatggcactcagcctgcttatccagcctatgggcagcagccagcagccactgcacctacaagaccgcaggatggaaacaagcccactgagactagtcaacctcaatctagcacagggggttacaaccagcccagcctaggatatggacagagtaactacagttatccccaggtacctgggagctaccccatgcagccagtcactgcacctccatcctaccctcctaccagctattcctctacacagccgactagttatgatcagagcagttactctcagcagaacacctatgggcaaccgagcagctatggacagcagagtagctatggtcaacaaagcagctatgggcagcagcctcccactagttacccaccccaaactggatcctacagccaagctccaagtcaatatagccaacagagcagcagctacgggcagcagagttcattccgacaggaccaccccagtagcatgggtgtttatgggcaggagtctggaggattttccggaccaggagagaaccggagcatgagtggccctgataaccggggcaggggaagagggggatttgatcgtggaggcatgagcagaggtgggcggggaggaggacgcggtggaatgggcgctggagagcgaggtggcttcaataagcctggtggacccatggatgaaggaccagatcttgatctaggcccacctgtagatccagatgaagactctgacaacagtgcaatttatgtacaaggattaaatgacagtgtgactctagatgatctggcagacttctttaagcagtgtggggttgttaagatgaacaagagaactgggcaacccatgatccacatctacctggacaaggaaacaggaaagcccaaaggcgatgccacagtgtcctatgaagacccacccactgccaaggctgccgtggaatggtttgatgggaaagattttcaagggagcaaacttaaagtctcccttgctcggaagaagcctccaatgaacagtatgcggggtggtctgccaccccgtgagggcagaggcatgccaccaccactccgtggaggtccaggaggcccaggaggtcctgggggacccatgggtcgcatgggaggccgtggaggagatagaggaggcttccctccaagaggaccccggggttcccgagggaacccctctggaggaggaaacgtccagcaccgagctggagactggcagtgtcccaatccgggttgtggaaaccagaacttcgcctggagaacagagtgcaaccagtgtaaggccccaaagcctgaaggcttcctcccgccaccctttccgcccccgggtggtgatcgtggcagaggtggccctggtggcatgcggggaggaagaggtggcctcatggatcgtggtggtcccggtggaatgttcagaggtggccgtggtggagacagaggtggcttccgtggtggccggggcatggaccgaggtggctttggtggaggaagacgaggtggccctggggggccccctggacctttgatggaacagatgggaggaagaagaggaggacgtggaggacctggaaaaatggataaaggcgagcaccgtcaggagcgcagagatcggccctac

SEQ ID NO: 3797 - DNA, 1800 bp, Homo sapiens
  source 1..1800: mol_type = genomic DNA
atggcgtccacggattacagtacctatagccaagctgcagcgcagcagggctacagtgcttacaccgcccagcccactcaaggatatgcacagaccacccaggcatatgggcaacaaagctatggaacctatggacagcccactgatgtcagctatacccaggctcagaccactgcaacctatgggcagaccgcctatgcaacttcttatggacagcctcccactggttatactactccaactgccccccaggcatacagccagcctgtccaggggtatggcactggtgcttatgataccaccactgctacagtcaccaccacccaggcctcctatgcagctcagtctgcatatggcactcagcctgcttatccagcctatgggcagcagccagcagccactgcacctacaagctattcctctacacagccgactagttatgatcagagcagttactctcagcagaacacctatgggcaaccgagcagctatggacagcagagtagctatggtcaacaaagcagctatgggcagcagcctcccactagttacccaccccaaactggatcctacagccaagctccaagtcaatatagccaacagagcagcagctacgggcagcagagttcattccgacaggaccaccccagtagcatgggtgtttatgggcaggagtctggaggattttccggaccaggagagaaccggagcatgagtggccctgataaccggggcaggggaagagggggatttgatcgtggaggcatgagcagaggtgggcggggaggaggacgcggtggaatgggcagcgctggagagcgaggtggcttcaataagcctggtggacccatggatgaaggaccagatcttgatctaggcccacctgtagatccagatgaagactctgacaacagtgcaatttatgtacaaggattaaatgacagtgtgactctagatgatctggcagacttctttaagcagtgtggggttgttaagatgaacaagagaactgggcaacccatgatccacatctacctggacaaggaaacaggaaagcccaaaggcgatgccacagtgtcctatgaagacccacccactgccaaggctgccgtggaatggtttgatgggaaagattttcaagggagcaaacttaaagtctcccttgctcggaagaagcctccaatgaacagtatgcggggtggtctgccaccccgtgagggcagaggcatgccaccaccactccgtggaggtccaggaggcccaggaggtcctgggggacccatgggtcgcatgggaggccgtggaggagatagaggaggcttccctccaagaggaccccggggttcccgagggaacccctctggaggaggaaacgtccagcaccgagctggagactggcagtgtcccaatccgggttgtggaaaccagaacttcgcctggagaacagagtgcaaccagtgtaaggccccaaagcctgaaggcttcctcccgccaccctttccgcccccgggtggtgatcgtggcagaggtggccctggtggcatgcggggaggaagaggtggcctcatggatcgtggtggtcccggtggaatgttcagaggtggccgtggtggagacagaggtggcttccgtggtggccggggcatggaccgaggtggctttggtggaggaagacgaggtggccctggggggccccctggacctttgatggaacagatgggaggaagaagaggaggacgtggaggacctggaaaaatggataaaggcgagcaccgtcaggagcgcagagatcggccctac

SEQ ID NO: 3798 - DNA, 1968 bp, Homo sapiens
  source 1..1968: mol_type = genomic DNA
atggcgtccacggattacagtacctatagccaagctgcagcgcagcagggctacagtgcttacaccgcccagcccactcaaggatatgcacagaccacccaggcatatgggcaacaaagctatggaacctatggacagcccactgatgtcagctatacccaggctcagaccactgcaacctatgggcagaccgcctatgcaacttcttatggacagcctcccactggttatactactccaactgccccccaggcatacagccagcctgtccaggggtatggcactggtgcttatgataccaccactgctacagtcaccaccacccaggcctcctatgcagctcagtctgcatatggcactcagcctgcttatccagcctatgggcagcagccagcagccactgcacctacaagaccgcaggatggaaacaagcccactgagactagtcaacctcaatctagcacagggggttacaaccagcccagcctaggatatggacagagtaactacagttatccccaggtacctgggagctaccccatgcagccagtcactgcacctccatcctaccctcctaccagctattcctctacacagccgactagttatgatcagagcagttactctcagcagaacacctatgggcaaccgagcagctatggacagcagagtagctatggtcaacaaagcagctatgggcagcagcctcccactagttacccaccccaaactggatcctacagccaagctccaagtcaatatagccaacagagcagcagctacgggcagcagagttcattccgacaggaccaccccagtagcatgggtgtttatgggcaggagtctggaggattttccggaccaggagagaaccggagcatgagtggccctgataaccggggcaggggaagagggggatttgatcgtggaggcatgagcagaggtgggcggggaggaggacgcggtggaatgggcagcgctggagagcgaggtggcttcaataagcctggtggacccatggatgaaggaccagatcttgatctaggcccacctgtagatccagatgaagactctgacaacagtgcaatttatgtacaaggattaaatgacagtgtgactctagatgatctggcagacttctttaagcagtgtggggttgttaagatgaacaagagaactgggcaacccatgatccacatctacctggacaaggaaacaggaaagcccaaaggcgatgccacagtgtcctatgaagacccacccactgccaaggctgccgtggaatggtttgatgggaaagattttcaagggagcaaacttaaagtctcccttgctcggaagaagcctccaatgaacagtatgcggggtggtctgccaccccgtgagggcagaggcatgccaccaccactccgtggaggtccaggaggcccaggaggtcctgggggacccatgggtcgcatgggaggccgtggaggagatagaggaggcttccctccaagaggaccccggggttcccgagggaacccctctggaggaggaaacgtccagcaccgagctggagactggcagtgtcccaatccgggttgtggaaaccagaacttcgcctggagaacagagtgcaaccagtgtaaggccccaaagcctgaaggcttcctcccgccaccctttccgcccccgggtggtgatcgtggcagaggtggccctggtggcatgcggggaggaagaggtggcctcatggatcgtggtggtcccggtggaatgttcagaggtggccgtggtggagacagaggtggcttccgtggtggccggggcatggaccgaggtggctttggtggaggaagacgaggtggccctggggggccccctggacctttgatggaacagatgggaggaagaagaggaggacgtggaggacctggaaaaatggataaaggcgagcaccgtcaggagcgcagagatcggccctac

SEQ ID NO: 3799 - DNA, 1062 bp, Homo sapiens
  source 1..1062: mol_type = genomic DNA
atggcgtccacggattacagtacctatagccaagctgcagcgcagcagggctacagtgcttacaccgcccagcccactcaaggatatgcacagaccacccaggcatatgggcaacaaagctatggaacctatggacagcccactgatgtcagctatacccaggctcagaccactgcaacctatgggcagaccgcctatgcaacttcttatggacagcctcccactggttatactactccaactgccccccaggcatacagccagcctgtccaggggtatggcactggtgcttatgataccaccactgctacagtcaccaccacccaggcctcctatgcagctcagtctgcatatggcactcagcctgcttatccagcctatgggcagcagccagcagccactgcacctacaagaccgcaggatggaaacaagcccactgagactagtcaacctcaatctagcacagggggttacaaccagcccagcctaggatatggacagagtaactacagttatccccaggtacctgggagctaccccatgcagccagtcactgcacctccatcctaccctcctaccagctattcctctacacagccgactagttatgatcagagcagttactctcagcagaacacctatgggcaaccgagcagctatggacagcagagtagctatggtcaacaaagcagctatgggcagcagcctcccactagttacccaccccaaactggatcctacagccaagctccaagtcaatatagccaacagagcagcagctacgggcagcagagttcattccgacaggaccaccccagtagcatgggtgtttatgggcaggagtctggaggattttccggaccaggagagaaccggagcatgagtggccctgataaccggggcaggggaagagggggatttgatcgtggaggcatgagcagaggtgggcggggaggaggacgcggtggaatggggttacaaagtgagagccttgtatacacttcaatacttaaaaagtacccgtactcagtactcagccggcagcataatgaaaagtgggac

SEQ ID NO: 3800 - DNA, 1965 bp, Homo sapiens
  source 1..1965: mol_type = genomic DNA
atggcgtccacggattacagtacctatagccaagctgcagcgcagcagggctacagtgcttacaccgcccagcccactcaaggatatgcacagaccacccaggcatatgggcaacaaagctatggaacctatggacagcccactgatgtcagctatacccaggctcagaccactgcaacctatgggcagaccgcctatgcaacttcttatggacagcctcccactggttatactactccaactgccccccaggcatacagccagcctgtccaggggtatggcactggtgcttatgataccaccactgctacagtcaccaccacccaggcctcctatgcagctcagtctgcatatggcactcagcctgcttatccagcctatgggcagcagccagcagccactgcacctacaagaccgcaggatggaaacaagcccactgagactagtcaacctcaatctagcacagggggttacaaccagcccagcctaggatatggacagagtaactacagttatccccaggtacctgggagctaccccatgcagccagtcactgcacctccatcctaccctcctaccagctattcctctacacagccgactagttatgatcagagcagttactctcagcagaacacctatgggcaaccgagcagctatggacagcagagtagctatggtcaacaaagcagctatgggcagcagcctcccactagttacccaccccaaactggatcctacagccaagctccaagtcaatatagccaacagagcagcagctacgggcagcagagttcattccgacaggaccaccccagtagcatgggtgtttatgggcaggagtctggaggattttccggaccaggagagaaccggagcatgagtggccctgataaccggggcaggggaagagggggatttgatcgtggaggcatgagcagaggtgggcggggaggaggacgcggtggaatgggcgctggagagcgaggtggcttcaataagcctggtggacccatggatgaaggaccagatcttgatctaggcccacctgtagatccagatgaagactctgacaacagtgcaatttatgtacaaggattaaatgacagtgtgactctagatgatctggcagacttctttaagcagtgtggggttgttaagatgaacaagagaactgggcaacccatgatccacatctacctggacaaggaaacaggaaagcccaaaggcgatgccacagtgtcctatgaagacccacccactgccaaggctgccgtggaatggtttgatgggaaagattttcaagggagcaaacttaaagtctcccttgctcggaagaagcctccaatgaacagtatgcggggtggtctgccaccccgtgagggcagaggcatgccaccaccactccgtggaggtccaggaggcccaggaggtcctgggggacccatgggtcgcatgggaggccgtggaggagatagaggaggcttccctccaagaggaccccggggttcccgagggaacccctctggaggaggaaacgtccagcaccgagctggagactggcagtgtcccaatccgggttgtggaaaccagaacttcgcctggagaacagagtgcaaccagtgtaaggccccaaagcctgaaggcttcctcccgccaccctttccgcccccgggtggtgatcgtggcagaggtggccctggtggcatgcggggaggaagaggtggcctcatggatcgtggtggtcccggtggaatgttcagaggtggccgtggtggagacagaggtggcttccgtggtggccggggcatggaccgaggtggctttggtggaggaagacgaggtggccctggggggccccctggacctttgatggaacagatgggaggaagaagaggaggacgtggaggacctggaaaaatggataaaggcgagcaccgtcaggagcgcagagatcggccctac

SEQ ID NO: 3801 - DNA, 1677 bp, Homo sapiens
  source 1..1677: mol_type = genomic DNA
atggacaatcagtgcaccgtccaggtgaggttagagctggggcatcgcgcccaactgcgcaagaagcccaccacggaggggttcactcacgactggatggtgtttgtccgcggccccgagcaatgtgacatccagcacttcgtggagaaggtggtcttctggctgcacgacagcttccccaagcccagacgcgtgtgcaaggagcccccctacaaagtagaggagtcggggtacgctggcttcatcatgcccatcgaggtgcacttcaaaaacaaggaggagccgaggaaggtctgcttcacctacgacctgttcctgaacctggaaggcaacccgcccgtgaaccacctgcgctgcgagaagctcaccttcaacaaccccaccacggagttccggtacaagctcctgcgggccggcggggtgatggtaatgcccgaaggagcagacacggtgtccaggcccagtcccgactaccccatgttacccacaattccactctctgccttctctgaccccaagaagaccaaaccatcccacggctccaaggacgccaacaaggagagcagcaagacctccaagccacacaaggtgaccaaggagcaccgggagcggccccgcaaagactccgagagcaagagctcctccaaggagctggagcgtgagcaggccaaaagctccaaggacacctcgcggaagctgggcgagggccggctgcccaaggaggagaaggcgccaccgcccaaggctgccttcaaggaacccaagatggccctgaaagagaccaagctggaaagcacgtcccccaagggtgggcccccacccccacccccacccccaccccgggcttccagcaagcggccggccaccgccgactcgccaaagcccagcgccaagaagcagaagaagagcagctcgaaggggtcccggagtgctccaggcacctcgccccgcacctcctcctcctcctccttctcggacaagaagccggccaaggacaagagcagcaccagaggggagaaggtgaaggccgagagtgagccccgggaggccaaaaaggccctggaggtggaggagtccaactcagaggacgaggcctccttcaagtccgagtctgcccagtcaagcccgtccaactccagctccagctcagactccagctcagactcagacttcgagccatcccagaaccacagccaaggacccctgcgctccatggtggaggacctgcagtccgaggagtccgacgaggacgactcttcgtcaggcgaggaggctgccggcaagaccaacccggggagggactccaggttgagcttcagcgacagcgagagtgacaacagcgccgactcctccctgcccagccgtgagcccccacccccccagaagccacccccgcccaacagcaaggtgtcaggccggaggagccccgagtcctgcagcaagcctgagaagatcctcaagaagggcacctacgacaaggcctacacggatgagctggtggagctacaccggaggctgatggcgctgcgggagcgcaacgtgctgcagcagattgtgaatctgatcgaggagactggccacttcaatgtcaccaacaccaccttcgacttcgacctcttctccctggacgagaccaccgtgcgcaaactgcagagctgcctggaggccgtggccaca

SEQ ID NO: 3802 - DNA, 1347 bp, Homo sapiens
  source 1..1347: mol_type = genomic DNA
atgtgcttcctgttttccaccttcccgcggactggcaagtgccacgtgcagaccattcagctgtgccgccggctcactgtggagttcatgcactacattatcgctgcccgtgccctgcgcaaggtcttcctgtccatcaaaggcatttactaccaggccgaggtactggggcagcccatcgtgtggatcactccctatgccttctcccatgaccacccgacagacgtggactacagggtcatggccaccttcaccgagttctacaccacgctgctgggctttgtcaacttccgcctttaccagttgctcaacctccactatcccccgaagctcgagggtcaggcccaagcagaggcaaaggccggtgagggcacctacgcgttggactccgagagttgtatggagaaactggcagccctcagtgccagcctggcccgcgtggtggtgcctgccacagaggaggaggccgaggtggatgagtttcccaccgatggggagatgtcagcgcaggaggaagaccgcaggaaggagctggaggcgcaggagaagcacaagaagctttttgagggcctgaagttcttcctgaaccgagaggtgccccgtgaggccctggccttcatcatcaggagttttggtggggaagtgtcctgggacaaatctttgtgcattggggccacctatgacgtcacagactcccgcatcacccatcagattgtcgaccggcctgggcagcagacctcagtcattggcaggtgctacgtgcagccccagtgggtgtttgactcagtgaacgccaggctccttctccccgtggcagagtacttctctggggtgcagctgcccccacacctttcaccctttgtgaccgagaaggaaggagattacgttccacctgagaagctgaagctgctggctctgcagcggggagaggacccaggaaacctgaatgagtcagaagaggaggaggaagaggacgacaacaacgaaggtgatggtgatgaagagggagaaaatgaggaggaggaggaagatgcagaggctggttcagaaaaggaggaagaggcccggctggcagccctggaagagcagaggatggaggggaagaagcccagggtgatggcaggcaccttgaagctggaggataagcagcggctggcccaggaggaggagagtgaggccaagcgcctggccattatgatgatgaagaagcgggagaagtacctgtaccagaagatcatgtttggcaagaggcgaaaaatccgagaggccaacaagctggcggagaagcggaaagcccacgatgaggcggtgaggtctgagaagaaggccaagaaggcaaggccggag

SEQ ID NO: 3803 - DNA, 1749 bp, Homo sapiens
  source 1..1749: mol_type = genomic DNA
atgggaggccttgagaagaagaagtatgaacgaggctcggccaccaactacatcacccggaacaaagcccggaagaagctccagctgagcttggctgactttaggcggctgtgcattctgaagggcatttatccccatgaacccaaacacaagaagaaggttaacaagggttctacagcagcccgaacgttttaccttatcaaagacatcaggtttctcctccacgaacccattgtcaacaagttccgtgaatacaaggtgttcgtccggaagctccggaaggcttatgggaagagcgagtggaacactgtagagcgtttaaaggacaataagcccaactacaaactcgaccacatcatcaaggaacggtatcccacgttcatcgatgccctgcgggacctggacgatgccctctccatgtgcttcctgttttccaccttcccgcggactggcaagtgccacgtgcagaccattcagctgtgccgccggctcactgtggagttcatgcactacattatcgctgcccgtgccctgcgcaaggtcttcctgtccatcaaaggcatttactaccaggccgaggtactggggcagcccatcgtgtggatcactccctatgccttctcccatgaccacccgacagacgtggactacagggtcatggccaccttcaccgagttctacaccacgctgctgggctttgtcaacttccgcctttaccagttgctcaacctccactatcccccgaagctcgagggtcaggcccaagcagaggcaaaggccggtgagggcacctacgcgttggactccgagagttgtatggagaaactggcagccctcagtgccagcctggcccgcgtggtggtgcctgccacagaggaggaggccgaggtggatgagtttcccaccgatggggaggaagaccgcaggaaggagctggaggcgcaggagaagcacaagaagctttttgagggcctgaagttcttcctgaaccgagaggtgccccgtgaggccctggccttcatcatcaggagttttggtggggaagtgtcctgggacaaatctttgtgcattggggccacctatgacgtcacagactcccgcatcacccatcagattgtcgaccggcctgggcagcagacctcagtcattggcaggtgctacgtgcagccccagtgggtgtttgactcagtgaacgccaggctccttctccccgtggcagagtacttctctggggtgcagctgcccccacacctttcaccctttgtgaccgagaaggaaggagattacgttccacctgagaagctgaagctgctggctctgcagcggggagaggacccaggaaacctgaatgagtcagaagaggaggaggaagaggacgacaacaacgaaggtgatggtgatgaagagggagaaaatgaggaggaggaggaagatgcagaggctggttcagaaaaggaggaagaggcccggctggcagccctggaagagcagaggatggaggggaagaagcccagggtgatggcaggcaccttgaagctggaggataagcagcggctggcccaggaggaggagagtgaggccaagcgcctggccattatgatgatgaagaagcgggagaagtacctgtaccagaagatcatgtttggcaagaggcgaaaaatccgagaggccaacaagctggcggagaagcggaaagcccacgatgaggcggtgaggtctgagaagaaggccaagaaggcaaggccggag

SEQ ID NO: 3804 - DNA, 2343 bp, Homo sapiens
  source 1..2343: mol_type = genomic DNA
atgtcctcttcctcccccaccgggcagatcgcaagtgcggcggacatcaagcaagagaatgggatggaaagcgcctcggaagggcaggaggcgcaccgagaagtggcggggggcgcggcggtagggctgagccccccggctccagccccttttcccctggagccgggggacgccgcgaccgctgccgccagggtgagcggagaggaaggggcagtggcggcggcggcggccggagcggcggcggatcaggtacaactccactcggaacttctgggcaggcaccaccacgccgccgccgccgccgcgcagaccccgctggccttctcgcccgaccacgtcgcctgcgtgtgcgaggcactgcagcaggggggcaacctggaccgcctggcccggttcctgtggtccctgccccagagcgacctgctacgtggcaacgagagcctgctgaaggcgcgggcgctcgtggccttccaccagggcatctaccccgagctctacagcatcctcgagagccacagcttcgagtcggccaaccacccgctgctgcagcagctctggtacaaggcgcgctacaccgaggccgagcgagcccgcggccggccgctgggagccgtagacaagtaccggctgcgcaggaaattccccctgccccgcaccatctgggacggcgaggagacggtgtattgtttcaaggagaagtcgcgcaacgcgctcaaggagctctacaagcagaatcgctacccttcgcccgccgagaagcggcacctggccaagatcaccggcctctccctcacccaggtcagcaactggttcaagaaccgccggcagcgcgacaggaacccctccgagacccagtccaaaagtgagtcagatggcaaccccagcactgaagatgaatccagcaagggacatgaggatttatctcctcacccactctccagttcatctgatggcatcaccaacctcagcctttccagtcatatggagccagtatatatgcaacaaattggaaatgctaagatatcattaagctcttctggagttctgttgaatggaagcttggtacctgcaagtacttcacctgtcttccttaatggaaattcttttattcagggacccagtggagttatccttaatggattaaatgtgggaaatacacaggcagtggcattgaacccaccaaaaatgtcatcaaacattgtgagcaatggtatatccatgactgacatactggggtctacttcccaggacgtgaaggaattcaaagtcctccagagttctgctaactcagcaaccaccacgtcctacagccccagtgtccctgtctcattcccaggcctgatacccagcactgaggtgaaaagagaaggcattcaaacagtggcttcccaagatggagggtctgtagtgacttttactacaccagtgcaaattaaccagtatggcattgtccagatccccaattccggagcaaacagccagttccttaatgggagcattggattctctccactgcagctgccccctgtgtcagtggcagcttcacaaggtaatatctcagtaagctcaagcacttcagatggaagcacatttacaagtgagtctaccacagtccagcaaggaaaggttttcttgagctctcttgctcccagtgcagtggtatacacggttcctaatacaggccagactataggatctgtgaaacaggaaggcttggaaaggagcctggtattttctcagttgatgcctgtcaatcagaatgcacaagtaaatgcaaacctgtcttctgaaaacatctcggggagtggcctgcatccactggcctcctcattagttaatgtatctccaactcacaatttttctctcagtccctctacactactaaatcccactgagctaaaccgcgacattgccgatagccaaccaatgtctgcaccggtggcaagcaaatctactgtgacatctgtcagcaacactaactatgcaactcttcagaactgctcccttattactggtcaagacctattgtcagtccctatgactcaggctgcccttggggaaatagttcctacagctgaagatcaggtaggtcacccctccccagcagtacatcaggattttgtccaagaacatcgtttggttctgcaatcggtagctaacatgaaagagaatttcttatcaaattctgagagcaaagcaacaagtagcttaatgatgctggactctaaatccaagtatgtcttagatggcatggttgatactgtctgtgaagacctggaaacagacaaaaaagagcttgccaagctccagactgtccagctggatgaagatatgcaagactta

SEQ ID NO: 3805 - DNA, 2217 bp, Homo sapiens
  source 1..2217: mol_type = genomic DNA
atggctaccttgcctgcggagccgagcgcggggccggcggctgggggggaggcggtggcggcggcggcggcgaccgaagaggaggaggaggaagcgcgccagctcttgcagactttgcaggcggccgagggtgaggcggcggcggcggccggggccggggcgggcgcagcggctgcgggagctgagggcccgggatccccgggcgtccccgggtcgccccccgaggccgcttccgaaccgcccacgggcctccgcttctcgcccgagcaggtggcgtgcgtctgcgaggcgctgctccaggcgggccacgccggccgcttgagccgcttcctgggcgcactgcccccggccgagcgcctacgtggcagcgacccggtgttgcgcgcgcgggccctggtggccttccagcggggcgagtacgccgagctctaccggctactcgagagccgccccttccccgccgcccaccacgccttcctgcaggacctctacctgcgcgcgcgctaccatgaggccgagcgggcccgcggccgcgcgcttggcgcagtggacaagtatcgactgcgcaagaagttcccgctgcccaagaccatctgggacggcgaggagacagtctactgcttcaaggagcgctcccgcgcagcgctcaaggcctgctaccgcggcaaccgctaccccacgccggacgagaagcgccgcctggccacactcaccggcctgtcgctcacgcaggtcagcaactggttcaagaaccggcgacagcgcgaccggaccggggccggaggcggcgcgccctgcaagagcgagtctgatgggaatcccacgactgaggacgagtccagccgaagtcctgaggacctggagagaggggcggccccagtgtccgccgaggccgctgcccagggctccatattcctggcagggaccggccctcccgcgccttgcccggcttcctcctccatcctggtgaacgggagcttcctggcagccagcggctccccagcagtgctcctcaacgggggccccgtcatcatcaacggcctggccctgggcgaggcctccagcctgggcccgctgctgctcactgggggcgggggtgcccctccaccgcagcccagccctcagggggccagcgagaccaagacctctctggtcctggaccctcagacaggggaggtgcggctggaggaggctcagtcggaggcccctgagaccaaaggggcccaggtggctgctccgggaccagcccttggagaggaggtcctggggcccctggcccaagtggtgcctggccccccgacggctgccacctttcctctgcccccggggccagtgcctgctgtggctgccccacaagtggtaccgctctccccacccccggggtatcccacgggcctgagccccacctccccactattgaacctgccccaggtagtacccacctcacaggtggtgaccctgccccaggctgtggggcccctgcagctgttggcagccgggccaggcagccctgtgaaggtggcagctgcagcaggccctgccaatgtgcacctcatcaactccggggtgggcgtgactgccctgcagctgccttcggccactgccccaggaaacttcctcctggccaaccctgtgtctggcagccccatcgtgacgggtgtggccctgcagcagggcaagatcatcctcaccgccaccttccccaccagcatgctcgtctcccaggtcctgccgccagcccccggcctggccctgccactgaagccagagacggccatctccgtgcctgagggaggcctcccggtggcccccagccctgctctcccagaggctcacgccctaggcaccctttctgcacagcagccaccccccgccgctgccaccacctccagcaccagcctgcccttctcccctgactcccctggcctcctgcccaacttcccggcgcccccaccagaggggctgatgttgtcacccgcggccgtgcctgtctggtcagcagggctggaactaagcgcaggaacagaggggctgctggaagcggaaaaggggctggggacacaggccccccacaccgtgctgaggctgccagaccccgaccctgaggggctgctcctgggggccaccgcagggggtgaggttgacgaggggttggaagctgaggccaaggttctgacccagctccagtcggtgcctgtggaggagcccttggaactg

SEQ ID NO: 3806 - DNA, 738 bp, Homo sapiens
  source 1..738: mol_type = genomic DNA
atgttccagctgcccatcttgaatttcagcccccagcaagtggccggggtatgtgagaccctggaagagagcggcgatgtggagcgcctgggtcgcttcctctggtcgctgcccgtggcccctgcggcctgcgaggccctcaacaagaatgagtcggtgctacgcgcacgagccatcgtggcctttcacggtggcaactaccgcgagctctatcatatcctggaaaaccacaagttcaccaaggagtcgcacgccaagctgcaggcgctgtggcttgaagcacactaccaggaggctgagaagctgcgtggaagacccctgggacctgtggacaagtaccgagtaaggaagaagttcccgctgccgcgcaccatttgggacggcgaacagaagacacactgcttcaaggagcgcacgcggcacctgctacgcgagtggtacctgcaggatccataccctaaccccagcaaaaaacgtgagctcgcccaggcaaccggactgacccctacgcaggtgggcaactggttcaaaaaccgccgacaaagggaccgagcggctgcagccaagaacagactccagcagcaggtcctgtcacagggttccgggcgggcactacgggcggagggcgacggcacgccagaggtgctgggcgtcgccaccagcccggccgccagtctatccagcaaggcggccacttcagccatctccatcacgtccagcgacagcgagtgcgacatc

SEQ ID NO: 3807 - DNA, 852 bp, Homo sapiens
  source 1..852: mol_type = genomic DNA
atgtcgatgctgccgtcgtttggctttacgcaggagcaagtggcgtgcgtgtgcgaggttctgcagcaaggcggaaacctggagcgcctgggcaggttcctgtggtcactgcccgcctgcgaccacctgcacaagaacgagagcgtactcaaggccaaggcggtggtcgccttccaccgcggcaacttccgtgagctctacaagatcctggagagccaccagttctcgcctcacaaccaccccaaactgcagcaactgtggctgaaggcgcattacgtggaggccgagaagctgcgcggccgacccctgggcgccgtgggcaaatatcgggtgcgccgaaaatttccactgccgcgcaccatctgggacggcgaggagaccagctactgcttcaaggagaagtcgaggggtgtcctgcgggagtggtacgcgcacaatccctacccatcgccgcgtgagaagcgggagctggccgaggccaccggcctcaccaccacccaggtcagcaactggtttaagaaccggaggcaaagagaccgggccgcggaggccaaggaaagggagaacaccgaaaacaataactcctcctccaacaagcagaaccaactctctcctctggaagggggcaagccgctcatgtccagctcagaagaggaattctcacctccccaaagtccagaccagaactcggtccttctgctgcagggcaatatgggccacgccaggagctcaaactattctctcccgggcttaacagcctcgcagcccagtcacggcctgcagacccaccagcatcagctccaagactctctgctcggccccctcacctccagtctggtggacttggggtcc

SEQ ID NO: 3808 - DNA, 873 bp, Homo sapiens
  source 1..873: mol_type = genomic DNA
atgtccatgctgcccaccttcggcttcacgcaggagcaagtggcgtgcgtgtgcgaggtgctgcagcagggcggcaacatcgagcggctgggccgcttcctgtggtcgctgcccgcctgcgagcaccttcacaagaatgaaagcgtgctcaaggccaaggccgtggtggccttccaccgcggcaacttccgcgagctctacaagatcctggagagccaccagttctcgccgcacaaccacgccaagctgcagcagctgtggctcaaggcacactacatcgaggcggagaagctgcgcggccgacccctgggcgccgtgggcaaataccgcgtgcgccgcaaattcccgctgccgcgctccatctgggacggcgaggagaccagctactgcttcaaggaaaagagtcgcagcgtgctgcgcgagtggtacgcgcacaacccctacccttcaccccgcgagaagcgtgagctggcggaggccacgggcctcaccaccacacaggtcagcaactggttcaagaaccggcggcagcgcgaccgggcggccgaggccaaggaaagggagaacaacgagaactccaattctaacagccacaacccgctgaatggcagcggcaagtcggtgttaggcagctcggaggatgagaagactccatcggggacgccagaccactcatcatccagccccgcactgctcctcagcccgccgccccctgggctgccgtccctgcacagcctgggccaccctccgggccccagcgcagtgccagtgccggtgccaggcggaggtggagcggacccactgcaacaccaccatggcctgcaggactccatcctcaaccccatgtcagccaacctcgtggacctgggctcc

SEQ ID NO: 3809 - DNA, 996 bp, Homo sapiens
  source 1..996: mol_type = genomic DNA
atggtattccgctcccccctagacctctattcctcccacttcttgttgccaaacttcgccgattctcaccaccgctccatacttctggcgagtagcggcggcgggaacggtgcgggaggcggcggcggcgcgggaggcggcagcggcggcgggaacggtgcgggaggcggcggtgctggcggagcaggcggcggcggcggcggcggctccagggcccccccggaagagttgtccatgttccagctgcccaccctcaacttctcgccggagcaggtggccagcgtctgtgagacgctggaggagacgggcgacatcgagcggctgggccgcttcctctggtcgctgcccgtggcccccggggcgtgcgaggccatcaacaaacacgagtcgatcctgcgcgcgcgcgccgtggtcgccttccacacgggcaacttccgcgacctctaccacatccttgagaaccacaagttcaccaaggagtctcacggcaagctgcaggccatgtggctcgaggcgcactaccaggaggccgagaagctgcgcggccgcccactcggcccggtggacaagtaccgcgtgcgcaagaagttcccgctgccacgcaccatctgggacggcgagcagaagacgcattgcttcaaggagcggactcggagcctgttgcgggagtggtacctacaggacccctaccccaaccccagcaagaaacgcgaactggcgcaggccaccggcctcactcccacacaagtaggcaactggtttaagaaccggcggcagcgcgaccgcgccgcggcggccaagaacaggctccagcaccaggccattggaccgagcggcatgcgctcgctggccgagcccggctgccccacgcacggctcggcagagtcgccgtccacggcggccagcccgaccaccagcgtgtccagcctgacggagcgcgcagacaccggcacctccatcctctcggtaacctccagcgactcggaatgtgatgta

SEQ ID NO: 3810 - DNA, 1206 bp, Homo sapiens
  source 1..1206: mol_type = genomic DNA
atggcggtggtggccacgctgaggctctctgctcagggcacagtgacttttgaagacgtggctgtgaaatttacccaggaggaatggaatctccttagtgaggctcagagatgcctgtaccgtgatgtgactctggagaacctggcacttatgtcctccctgggttgttggtgtggagtggaagatgaggcggcaccttctaagcagagtatttatatacaaagagagactcaggtcaggactcctgtgacaggtgtgtctcccaagaaggcccacccctgtgagatgtgtggcccgatcttgggagacattttgcatgtggcagatcatcagggaacacatcacaagcagaaactgcacaggtgtgaggcctgggggaataaattgtatgacagtggaaactttcatcagcaccagaatgagcacattggagagaaaccctacagagggagtgttgaggaggcgttgtttgtgaagaggtgtaagttgcatgtgtcaggggagtcatctgtcttcagtgagagtgggaaggactttttgcccaggtcaggattactccagcaggaggccagtcacactggggagaagtcaaacagcaaaactgagtgtgtgtctccctttcagtgtgggggagctcactatagccatggagattccatgaaacattttagcaccaaacatatactcagtcagcaccagagacttctccctcgagaagaatgttatgtgtgctgtgaatgtgggaaatcctttagcaaatatgttagcttcagtaatcatcagagagttcacagtggaaaaagaccttatgaatgtggagaatgtgagaaatcttttagtcaaaagagcagcctcattcaacatcagcaatttcacactggaggaaaaccttatgggtgtgaagaatgtgggaaatattttagcttagaaggatatcttaggcgccatcaaaaagttcacgctggaaaagggccttatgagtgtggagaatgtgggaaatcttttagttcaaacgtgaaccttaagagtcatcagcgcattcacactggagagagaccttacaagtgtggagaatgtgagaaatcttttagtcggaagcccagccttagttaccatcagcgctttgggaggccgaggtgggtggatcacaaggacaggaaggagttcaagaccagcctgggcaatatagtgaaatcctgtctcttc

SEQ ID NO: 3811 - DNA, 1578 bp, Homo sapiens
  source 1..1578: mol_type = genomic DNA
atgccacagcagctcctgatcaccctgcctaccgaggccagcacctgggtgaagctgcaacatccaaagaaggccgtggagggggcgcccctgtgggaggatgtgactaaaatgtttgaaggagaagctctgctgtctcaggatgctgaggacgtaaagacccagagagaaagtttagaggatgaagtgacccctggactcccgacagcagaatcccaggaattgttgactttcaaggacatatctattgacttcacccaggaagagtgggggcagctggctcctgctcaccagaatctataccgagaggtgatgctggagaactacagcaacttggtgtcagtgggatatcaactttccaaacctagtgtgatatcccagttagagaaaggagaagagccatggatggcagagaaagaaggcccaggagatcccagttcagacttgaagagtaaaatagaaaccattgagtcaactgcaaagagtaccatttcacaggagcgcttatatcatggcattatgatggaaagtttcatgagggatgatataatttattccacgttgagaaaagtctccacatatgatgatgtcttagaaaggcaccaggaaacttgtatgagagatgtgagacaagccatcttgacccataagaagagagtccaagaaactaacaaatttggggaaaatatcattgtgcattcaaatgttattattgaacagaggcaccataaatatgatacacctacaaagcggaacacatacaaattagatttgattaatcatccaacaagttacataagaacaaaaacctatgaatgtaatatatgtgaaaaaatcttcaaacaacctattcaccttactgaacatatgagaattcatactggtgagaaacctttcagatgtaaggaatgtggaagggcctttagtcaaagtgcatccctcagtacacaccagagaatccatactggtgagaaaccctttgaatgtgaggaatgtgggaaagccttcagacatcgctcatcacttaatcagcatcatagaactcacactggggagaaaccctatgtatgtgataaatgtcagaaagctttcagccagaacattagcttggttcaacatttgaggactcattctggagagaaaccttttacttgcaatgaatgtgggaaaacctttagacagattagacaccttagtgaacatataagaattcataccggggagaagccctatgcatgcactgcatgttgtaaaacctttagtcatagagcgtatctaacacatcaccagagaatccatactggggagagaccctacaaatgtaaagaatgtggaaaagcctttaggcagaggatacaccttagcaaccataaaactgttcatacaggagtgaaagcatatgaatgcaaccgctgtggaaaagcctataggcatgattcatcctttaaaaaacatcagagacatcacactggagaaaaaccttacgaatgtaacgaatgtggaaaagccttcagctataactcttcacttagtcgacatcatgaaatacacaggaggaacgccttccgaaataaggtg

SEQ ID NO: 3812 - DNA, 1512 bp, Homo sapiens
  source 1..1512: mol_type = genomic DNA
atgaaggctgcctacaccgcctatcgatgcctcaccaaagacctagaaggctgcgccatgaacccggagctgacaatggaaagtctgggcactttgcacgggccggccggcggcggcagtggcgggggcggcggcgggggcggcgggggcggcggcgggggcccgggccatgagcaggagctgctggccagccccagcccccaccacgcgggccgcggcgccgctggctcgctgcggggccctccgccgcctccaaccgcgcaccaggagctgggcacggcggcagcggcggcagcggcggcgtcgcgctcggccatggtcaccagcatggcctcgatcctggacggcggcgactaccggcccgagctctccatcccgctgcaccacgccatgagcatgtcctgcgactcgtctccgcctggcatgggcatgagcaacacctacaccacgctgacaccgctccagccgctgccacccatctccaccgtgtctgacaagttccaccaccctcacccgcaccaccatccgcaccaccaccaccaccaccaccaccagcgcctgtccggcaacgtcagcggcagcttcaccctcatgcgcgacgagcgcgggctcccggccatgaacaacctctacagtccctacaaggagatgcccggcatgagccagagcctgtccccgctggccgccacgccgctgggcaacgggctaggcggcctccacaacgcgcagcagagtctgcccaactacggtccgccgggccacgacaaaatgctcagccccaacttcgacgcgcaccacactgccatgctgacccgcggtgagcaacacctgtcccgcggcctgggcaccccacctgcggccatgatgtcgcacctgaacggcctgcaccacccgggccacactcagtctcacgggccggtgctggcacccagtcgcgagcggccaccctcgtcctcatcgggctcgcaggtggccacgtcgggccagctggaagaaatcaacaccaaagaggtggcccagcgcatcacagcggagctgaagcgctacagtatcccccaggcgatctttgcgcagagggtgctgtgccggtctcaggggactctctccgacctgctccggaatccaaaaccgtggagtaaactcaaatctggcagggagaccttccgcaggatgtggaagtggcttcaggagcccgagttccagcgcatgtccgccttacgcctggcagcgtgcaaacgcaaagagcaagaaccaaacaaagacaggaacaattcccagaagaagtcccgcctggtgttcactgacctccaacgccgaacactcttcgccatcttcaaggagaacaaacgcccgtcaaaggagatgcagatcaccatttcccagcagctgggcctggagctcacaaccgtcagcaacttcttcatgaacgcccggcgccgcagcctggagaagtggcaagacgatctgagcacagggggctcctcgtccacctccagcacgtgtaccaaagca

SEQ ID NO: 3813 - DNA, 1728 bp, Homo sapiens
  source 1..1728: mol_type = genomic DNA
atgcttcggtctgggccagcctctgggccgtccgtccccactggccgggccatgccgagtcgccgcgtcgccagaccgccggctgcgccggagctgggggccttagggtcccccgacctctcctcactctcgctcgccgtttccaggagcacagagatcatcgacgagtacatcaaggagaacggcttcggcctggacgggggacagccgggcccgggcgaggggctgccacgcctggtgtctcgcggggctgcgtccctgagcacggtcaccctgggccctgtggcgcccccagccacgccgccgccttggggctgccccctgggccgactagtgtccccagcgccgggcccgggcccgcagccgcacctggtcatcacggagcagcccaagcagcgcggcatgcgcttccgctacgagtgcgagggccgctcggccggcagcatccttggggagagcagcaccgaggccagcaagacgctgcccgccatcgagctccgggattgtggagggctgcgggaggtggaggtgactgcctgcctggtgtggaaggactggcctcaccgagtccacccccacagcctcgtggggaaagactgcaccgacggcatctgcagggtgcggctccggcctcacgtcagcccccggcacagttttaacaacctgggcatccagtgtgtgaggaagaaggagattgaggctgccattgagcggaagattcaactgggcattgacccctacaacgctgggtccctgaagaaccatcaggaagtagacatgaatgtggtgaggatctgcttccaggcctcatatcgggaccagcagggacagatgcgccggatggatcctgtgctttccgagcccgtctatgacaagaaatccacaaacacatcagagctgcggatttgccgaattaacaaggaaagcgggccgtgcaccggtggcgaggagctctacttgctctgcgacaaggtgcagaaagaggacatatcagtggtgttcagcagggcctcctgggaaggtcgggctgacttctcccaggccgacgtgcaccgccagattgccattgtgttcaagacgccgccctacgaggacctggagattgtcgagcccgtgacagtcaacgtcttcctgcagcggctcaccgatggggtctgcagcgagccattgcctttcacgtacctgcctcgcgaccatgacagctacggcgtggacaagaagcggaaacgggggatgcccgacgtccttggggagctgaacagctctgacccccatggcatcgagagcaaacggcggaagaaaaagccggccatcctggaccacttcctgcccaaccacggctcaggcccgttcctcccgccgtcagccctgctgccagaccctgacttcttctctggcaccgtgtccctgcccggcctggagccccctggcgggcctgacctcctggacgatggctttgcctacgaccctacggcccccacactcttcaccatgctggacctgctgcccccggcaccgccacacgctagcgctgttgtgtgcagcggaggtgccggggccgtggttggggagacccccggccctgaaccactgacactggactcgtaccaggccccgggccccggggatggaggcaccgccagccttgtgggcagcaacatgttccccaatcattaccgcgaggcggcctttgggggcggcctcctatccccggggcctgaagccacg

SEQ ID NO: 3814 - DNA, 1653 bp, Homo sapiens
  source 1..1653: mol_type = genomic DNA
atggacgaactgttccccctcatcttcccggcagagccagcccaggcctctggcccctatgtggagatcattgagcagcccaagcagcggggcatgcgcttccgctacaagtgcgaggggcgctccgcgggcagcatcccaggcgagaggagcacagataccaccaagacccaccccaccatcaagatcaatggctacacaggaccagggacagtgcgcatctccctggtcaccaaggaccctcctcaccggcctcacccccacgagcttgtaggaaaggactgccgggatggcttctatgaggctgagctctgcccggaccgctgcatccacagtttccagaacctgggaatccagtgtgtgaagaagcgggacctggagcaggctatcagtcagcgcatccagaccaacaacaaccccttccaagttcctatagaagagcagcgtggggactacgacctgaatgctgtgcggctctgcttccaggtgacagtgcgggacccatcaggcaggcccctccgcctgccgcctgtcctttctcatcccatctttgacaatcgtgcccccaacactgccgagctcaagatctgccgagtgaaccgaaactctggcagctgcctcggtggggatgagatcttcctactgtgtgacaaggtgcagaaagaggacattgaggtgtatttcacgggaccaggctgggaggcccgaggctccttttcgcaagctgatgtgcaccgacaagtggccattgtgttccggacccctccctacgcagaccccagcctgcaggctcctgtgcgtgtctccatgcagctgcggcggccttccgaccgggagctcagtgagcccatggaattccagtacctgccagatacagacgatcgtcaccggattgaggagaaacgtaaaaggacatatgagaccttcaagagcatcatgaagaagagtcctttcagcggacccaccgacccccggcctccacctcgacgcattgctgtgccttcccgcagctcagcttctgtccccaagccagcaccccagccctatccctttacgtcatccctgagcaccatcaactatgatgagtttcccaccatggtgtttccttctgggcagatcagccaggcctcggccttggccccggcccctccccaagtcctgccccaggctccagcccctgcccctgctccagccatggtatcagctctggcccaggccccagcccctgtcccagtcctagccccaggccctcctcaggctgtggccccacctgcccccaagcccacccaggctggggaaggaacgctgtcagaggccctgctgcagctgcagtttgatgatgaagacctgggggccttgcttggcaacagcacagacccagctgtgttcacagacctggcatccgtcgacaactccgagtttcagcagctgctgaaccagggcatacctgtggccccccacacaactgagcccatgctgatggagtaccctgaggctataactcgcctagtgacaggggcccagaggccccccgacccagctcctgctccactgggggccccggggctccccaatggcctcctttcaggagatgaagacttctcctccattgcggacatggacttctcagccctgctgagtcagatcagctcc

SEQ ID NO: 3815 - DNA, 1344 bp, Homo sapiens
  source 1..1344: mol_type = genomic DNA
atggacgaactgttccccctcatcttcccggcagagccagcccaggcctctggcccctatgtggagatcattgagcagcccaagcagcggggcatgcgcttccgctacaagtgcgaggggcgctccgcgggcagcatcccaggcgagaggagcacagataccaccaagacccaccccaccatcaagatcaatggctacacaggaccagggacagtgcgcatctccctggtcaccaaggaccctcctcaccggcctcacccccacgagcttgtaggaaaggactgccgggatggcttctatgaggctgagctctgcccggaccgctgcatccacagtttccagaacctgggaatccagtgtgtgaagaagcgggacctggagcaggctatcagtcagcgcatccagaccaacaacaaccccttccaagttcctatagaagagcagcgtggggactacgacctgaatgctgtgcggctctgcttccaggtgacagtgcgggacccatcaggcaggcccctccgcctgccgcctgtcctttctcatcccatctttgacaatcgtgcccccaacactgccgagctcaagatctgccgagtgaaccgaaactctggcagctgcctcggtggggatgagatcttcctactgtgtgacaaggtgcagaaagaggacattgaggtgtatttcacgggaccaggctgggaggcccgaggctccttttcgcaagctgatgtgcaccgacaagtggccattgtgttccggacccctccctacgcagaccccagcctgcaggctcctgtgcgtgtctccatgcagctgcggcggccttccgaccgggagctcagtgagcccatggaattccagtacctgccagatacagacgatcgtcaccggattgaggagaaacgtaaaaggacatatgagaccttcaagagcatcatgaagaagagtcctttcagcggacccaccgacccccggcctccacctcgacgcattgctgtgccttcccgcagctcagcttctgtccccaagccagcaccccagccctatccctttacgtcatccctgagcaccatcaactatgatgagtttcccaccatggtgtttccttctgggcagatcagccaggcctcggccttggccccggcccctccccaagtcctgccccaggctccagcccctgcccctgctccagccatggtatcagctctggcccagaggccccccgacccagctcctgctccactgggggccccggggctccccaatggcctcctttcaggagatgaagacttctcctccattgcggacatggacttctcagccctgctgagtcagatcagctcc

SEQ ID NO: 3816 - DNA, 1644 bp, Homo sapiens
  source 1..1644: mol_type = genomic DNA
atggacgaactgttccccctcatcttcccggcagagccagcccaggcctctggcccctatgtggagatcattgagcagcccaagcagcggggcatgcgcttccgctacaagtgcgaggggcgctccgcgggcagcatcccaggcgagaggagcacagataccaccaagacccaccccaccatcaagatcaatggctacacaggaccagggacagtgcgcatctccctggtcaccaaggaccctcctcaccggcctcacccccacgagcttgtaggaaaggactgccgggatggcttctatgaggctgagctctgcccggaccgctgcatccacagtttccagaacctgggaatccagtgtgtgaagaagcgggacctggagcaggctatcagtcagcgcatccagaccaacaacaaccccttccaagaagagcagcgtggggactacgacctgaatgctgtgcggctctgcttccaggtgacagtgcgggacccatcaggcaggcccctccgcctgccgcctgtcctttctcatcccatctttgacaatcgtgcccccaacactgccgagctcaagatctgccgagtgaaccgaaactctggcagctgcctcggtggggatgagatcttcctactgtgtgacaaggtgcagaaagaggacattgaggtgtatttcacgggaccaggctgggaggcccgaggctccttttcgcaagctgatgtgcaccgacaagtggccattgtgttccggacccctccctacgcagaccccagcctgcaggctcctgtgcgtgtctccatgcagctgcggcggccttccgaccgggagctcagtgagcccatggaattccagtacctgccagatacagacgatcgtcaccggattgaggagaaacgtaaaaggacatatgagaccttcaagagcatcatgaagaagagtcctttcagcggacccaccgacccccggcctccacctcgacgcattgctgtgccttcccgcagctcagcttctgtccccaagccagcaccccagccctatccctttacgtcatccctgagcaccatcaactatgatgagtttcccaccatggtgtttccttctgggcagatcagccaggcctcggccttggccccggcccctccccaagtcctgccccaggctccagcccctgcccctgctccagccatggtatcagctctggcccaggccccagcccctgtcccagtcctagccccaggccctcctcaggctgtggccccacctgcccccaagcccacccaggctggggaaggaacgctgtcagaggccctgctgcagctgcagtttgatgatgaagacctgggggccttgcttggcaacagcacagacccagctgtgttcacagacctggcatccgtcgacaactccgagtttcagcagctgctgaaccagggcatacctgtggccccccacacaactgagcccatgctgatggagtaccctgaggctataactcgcctagtgacaggggcccagaggccccccgacccagctcctgctccactgggggccccggggctccccaatggcctcctttcaggagatgaagacttctcctccattgcggacatggacttctcagccctgctgagtcagatcagctcc

SEQ ID NO: 3817 - DNA, 699 bp, Homo sapiens
  source 1..699: mol_type = genomic DNA
atggagcagagggcaggcggaaaccgtgtacagacgtccacacttaactgcgctggggccgcggtgattgacgagatgcctgaggctgccgtgaaatcaacagccaacaaataccaagtcttttttttcgggacccacgagacggcattcctgggccccaaagacctcttcccttacgaggaatccaaggagaagtttggcaagcccaacaagaggaaagggttcagcgaggggctgtgggagatcgagaacaaccctactgtcaaggcttccggctatcagtcctcccagaaaaagagctgtgtggaagagcctgaaccagagcccgaagctgcagagggtgacggtgataagaaggggaatgcagagggcagcagcgacgaggaagggaagctggtcattgatgagccagccaaggagaagaacgagaaaggagcgttgaagaggagagcaggggacttgctggaggactctcctaaacgtcccaaggaggcagaaaaccctgaaggagaggagaaggaggcagccaccttggaggttgagaggccccttcctatggaggtggaaaagaatagcaccccctctgagcccggctctggccgggggcctccccaagaggaagaagaggaggaggatgaagaggaagaggctaccaaggaagatgctgaggccccaggcatcagagatcatgagagcctg

SEQ ID NO: 3818 - DNA, 768 bp, Homo sapiens
  source 1..768: mol_type = genomic DNA
atgcacccggaaggtggccaatttgtgcctcaactccttggccatctcctggctaccaaactcaagcgtttcctccttagcaaaggcggacgtagggctcaaatccccgacgtttccagggccaccccccatacgattgacgagatgcctgaggctgccgtgaaatcaacagccaacaaataccaagtcttttttttcgggacccacgagacggcattcctgggccccaaagacctcttcccttacgaggaatccaaggagaagtttggcaagcccaacaagaggaaagggttcagcgaggggctgtgggagatcgagaacaaccctactgtcaaggcttccggctatcagtcctcccagaaaaagagctgtgtggaagagcctgaaccagagcccgaagctgcagagggtgacggtgataagaaggggaatgcagagggcagcagcgacgaggaagggaagctggtcattgatgagccagccaaggagaagaacgagaaaggagcgttgaagaggagagcaggggacttgctggaggactctcctaaacgtcccaaggaggcagaaaaccctgaaggagaggagaaggaggcagccaccttggaggttgagaggccccttcctatggaggtggaaaagaatagcaccccctctgagcccggctctggccgggggcctccccaagaggaagaagaggaggaggatgaagaggaagaggctaccaaggaagatgctgaggccccaggcatcagagatcatgagagcctg

SEQ ID NO: 3819 - DNA, 2601 bp, Homo sapiens
  source 1..2601: mol_type = genomic DNA
atgcctgaatctaaggttggtgacacatgtgtttgggatagcaaggtagagaatcaacagaaaaagcctgtggaaaacaggatgaaggaggacaaaagcagcatcagggaagcaatcagcaaagccaagagtacagcaaatataaagacagaacaggaaggtgaggcatctgagaagagcttgcatctgagcccacagcatatcacacaccagactatgcctataggacagagaggcagtgagcaaggcaaacgtgtggagaacattaatggaacctcctaccctagtctacagcagaaaaccaatgctgttaagaaattacataaatgtgatgaatgtgggaaatccttcaaatataattcccgccttgttcaacataaaattatgcacactggggaaaagcgctatgaatgtgatgactgtggagggactttccggagcagctcgagccttcgggtccacaaacggatccacactggggagaagccgtacaagtgtgaggaatgtgggaaagcctacatgtcctactccagccttataaaccacaaaagcacccattctggggagaagaactgtaaatgtgatgaatgtggaaaatccttcaattatagctctgttctggaccagcataaaaggatccacactggggagaagccctatgaatgtggtgagtgtgggaaggccttcaggaacagctctgggctcagagtccacaaaaggatccacacgggggagaagccctatgaatgcgacatctgtgggaaaaccttcagtaacagctctggccttagggtccataaaaggatccacacaggtgagaaaccttacgaatgtgatgagtgtgggaaggccttcattacttgtagaacacttctcaaccataaaagcatccactttggagataaaccctataaatgtgatgagtgtgagaaatcttttaattatagctctcttctcattcagcataaagtcatccacactggagagaaaccttatgaatgtgatgaatgtgggaaggctttcaggaacagctcaggcctcatagtgcataaaaggatccacacaggagagaaaccttacaagtgtgatgtctgtggcaaagcattcagctatagctcaggcctcgcagtccataaaagcattcaccctgggaagaaagcccatgaatgtaaggagtgtgggaaatcctttagttataactcactacttcttcaacacagaactattcataccggagagagaccttatgtatgtgatgtgtgtgggaaaacgttcagaaacaatgcaggcctcaaagtccacaggaggctccatactggggaaaaaccatataagtgtgatgtgtgtgggaaagcctatatctcacgctctagccttaaaaatcacaaaggaatccaccttggggagaagccctataaatgtagctattgtgagaaatccttcaactacagctctgcccttgaacagcataaaaggattcataccagggaaaaaccctttgggtgtgatgagtgtggtaaagctttcagaaataattctggccttaaagtacataaacgaatccacactggggaacgaccttacaaatgtgaagaatgtgggaaagcatacatctctctctcgagccttataaatcataaaagtgtacaccctggggagaagccctttaagtgtgacgagtgtgagaaggccttcatcacataccgaacccttacaaaccacaaaaaagttcatcttggggagaagccctacaaatgtgatgtgtgtgagaaatcttttaattacacatcgctcctttctcagcacagaagggtccacactagagagaaaccctatgaatgtgacaggtgtgagaaggtcttcagaaacaactcaagccttaaagttcataaaagaatccatactggggagaggccctatgaatgtgatgtgtgtggaaaagcctacatctcacactcaagccttattaaccataagagtacccaccctggcaggacaccccatacatgtgatgaatgtggaaaagcttttttctcaagcagaactcttataagccataaaagagtccatcttggggagaaacccttcaagtgtgttgagtgtgggaaatctttcagttacagctctctcctttctcagcacaagaggatccacacaggggagaaaccctatgtgtgtgataggtgtgggaaggccttcaggaacagctcaggcctcacagtgcataaaaggatccacacaggtgagaaaccctatgaatgtgatgagtgtgggaaggcatacatctcacactcaagtcttatcaatcataaaagtgtccaccaggggaagcagccctataattgtgagtgtgggaaatccttcaattatagatcagtccttgaccagcacaaaaggatccacactggaaagaagccataccgatgtaatgagtgtggtaaggcttttaatatcagatcaaatctcaccaagcataaaagaacccatactggagaggaatctttaaatgtgatatatgtgggaagttatagtggcacatcccagaagagaacctatgagggagggaatgccctggatgggggcaggatgaggatgcctctg

SEQ ID NO: 3820 - DNA, 2700 bp, Homo sapiens
  source 1..2700: mol_type = genomic DNA
atgtcacatttgaagacgagcactgaggatgaggaaccaactgaagaatatgaaaatgttggaaatgcagcatctaagtggccaaaagtggaggatcctatgcctgaatctaaggttggtgacacatgtgtttgggatagcaaggtagagaatcaacagaaaaagcctgtggaaaacaggatgaaggaggacaaaagcagcatcagggaagcaatcagcaaagccaagagtacagcaaatataaagacagaacaggaaggtgaggcatctgagaagagcttgcatctgagcccacagcatatcacacaccagactatgcctataggacagagaggcagtgagcaaggcaaacgtgtggagaacattaatggaacctcctaccctagtctacagcagaaaaccaatgctgttaagaaattacataaatgtgatgaatgtgggaaatccttcaaatataattcccgccttgttcaacataaaattatgcacactggggaaaagcgctatgaatgtgatgactgtggagggactttccggagcagctcgagccttcgggtccacaaacggatccacactggggagaagccgtacaagtgtgaggaatgtgggaaagcctacatgtcctactccagccttataaaccacaaaagcacccattctggggagaagaactgtaaatgtgatgaatgtggaaaatccttcaattatagctctgttctggaccagcataaaaggatccacactggggagaagccctatgaatgtggtgagtgtgggaaggccttcaggaacagctctgggctcagagtccacaaaaggatccacacgggggagaagccctatgaatgcgacatctgtgggaaaaccttcagtaacagctctggccttagggtccataaaaggatccacacaggtgagaaaccttacgaatgtgatgagtgtgggaaggccttcattacttgtagaacacttctcaaccataaaagcatccactttggagataaaccctataaatgtgatgagtgtgagaaatcttttaattatagctctcttctcattcagcataaagtcatccacactggagagaaaccttatgaatgtgatgaatgtgggaaggctttcaggaacagctcaggcctcatagtgcataaaaggatccacacaggagagaaaccttacaagtgtgatgtctgtggcaaagcattcagctatagctcaggcctcgcagtccataaaagcattcaccctgggaagaaagcccatgaatgtaaggagtgtgggaaatcctttagttataactcactacttcttcaacacagaactattcataccggagagagaccttatgtatgtgatgtgtgtgggaaaacgttcagaaacaatgcaggcctcaaagtccacaggaggctccatactggggaaaaaccatataagtgtgatgtgtgtgggaaagcctatatctcacgctctagccttaaaaatcacaaaggaatccaccttggggagaagccctataaatgtagctattgtgagaaatccttcaactacagctctgcccttgaacagcataaaaggattcataccagggaaaaaccctttgggtgtgatgagtgtggtaaagctttcagaaataattctggccttaaagtacataaacgaatccacactggggaacgaccttacaaatgtgaagaatgtgggaaagcatacatctctctctcgagccttataaatcataaaagtgtacaccctggggagaagccctttaagtgtgacgagtgtgagaaggccttcatcacataccgaacccttacaaaccacaaaaaagttcatcttggggagaagccctacaaatgtgatgtgtgtgagaaatcttttaattacacatcgctcctttctcagcacagaagggtccacactagagagaaaccctatgaatgtgacaggtgtgagaaggtcttcagaaacaactcaagccttaaagttcataaaagaatccatactggggagaggccctatgaatgtgatgtgtgtggaaaagcctacatctcacactcaagccttattaaccataagagtacccaccctggcaggacaccccatacatgtgatgaatgtggaaaagcttttttctcaagcagaactcttataagccataaaagagtccatcttggggagaaacccttcaagtgtgttgagtgtgggaaatctttcagttacagctctctcctttctcagcacaagaggatccacacaggggagaaaccctatgtgtgtgataggtgtgggaaggccttcaggaacagctcaggcctcacagtgcataaaaggatccacacaggtgagaaaccctatgaatgtgatgagtgtgggaaggcatacatctcacactcaagtcttatcaatcataaaagtgtccaccaggggaagcagccctataattgtgagtgtgggaaatccttcaattatagatcagtccttgaccagcacaaaaggatccacactggaaagaagccataccgatgtaatgagtgtggtaaggcttttaatatcagatcaaatctcaccaagcataaaagaacccatactggagaggaatctttaaatgtgatatatgtgggaagttatagtggcacatcccagaagagaacctatgagggagggaatgccctggatgggggcaggatgaggatgcctctg

SEQ ID NO: 3821 - DNA, 1218 bp, Homo sapiens
  source 1..1218: mol_type = genomic DNA
atggagtctcttcgcgggtacacccacagtgatattggctaccgcagcctggcagtcggcgaggacatcgaggaagtgaatgatgagaaacttaccgtgacctcgctgatggcaaggggaggagaggacgaggagaatacacggtccaaacctgagtacggaacagaagcggaaaacaacgttggcacggaagggtccgtcccctcggacgaccaagaccgtgagggtggcggcggccacgagccggagcaacagcaggaggagccgcccctgaccaagccggagcaacagcaggaggagccgcccctgctcgagctgaagcaagagcaggaggagccgccccagacgaccgtggaggggccacagccggcggaggggccacaaaccgctgagggaccacagcccccagagaggaaacgccgccgccgcaccgcgttcacgcagtttcagctgcaggagctagagaactttttcgatgaatctcaatatcccgacgttgtggcgcgagagagacttgcagcacgcctgaatttgactgaagacagagtgcaggtttggtttcagaacagaagagccaagtggaaacgaaatcagagggtgctaatgttgagaaacactgctactgctgacctggcccaccctttggacatgttcttgggtggggcctattatgctgctcctgctctggatcctgctttgtgtgttcatctggtgccacaactacctagaccacctgtgctgcctgtgccacctatgccacccaggccacccatggtccctatgccacccaggccacccatagcacctatgccacccatggcgcctgtgccacccggctcacgcatggcgcctgtgccacccgggccacgcatggcgcctgtgccaccctggccgcccatggcgcctgtgccaccctggccgcccatggcgcctgtgccaaccgggccgcccatggcgcctgtgccacccgggccgcccatggcgcgtgtgccacccgggccgcccatggcgcgtgtgccacccgggccgcccatggcgcctctgccacccgggccgcccatggcgcctctgccacccgggccgcccatggcgcctctgccacccgggccgcccatggcgcctctgccacccaggtcacatgtgcctcacactggcctggctcctgtacacatcacatgggcccctgtcatcaacagttattatgcatgtccctttttc

SEQ ID NO: 3822 - DNA, 993 bp, Homo sapiens
  source 1..993: mol_type = genomic DNA
atggaagaacttacggcgttcgtctccaagtcttttgaccagaaagtgaaggagaagaaggaggcgatcacgtaccgggaggtgctggagagcgggccgctgcgcggggccaaggagccgaccggctgcaccgaggcgggccgcgacgaccgcagcagcccggcagtccgggcggccggcggaggcggcggcggaggaggcggaggcggcggcggaggaggcggaggaggtgtaggaggaggaggagcaggcggaggagctggaggagggcgctctcccgtccgggagctggacatgggcgccgccgagagaagcagggagccgggcagcccgcgactgacggaggtgtccccggagctgaaagatcgcaaagaggatgcgaaagggatggaggacgaaggccagaccaaaatcaagcagaggcgaagtcggaccaatttcaccctggaacaactcaatgagctggagaggctttttgacgagacccactatcccgacgccttcatgcgagaggaactgagccagcgactgggcctgtcggaggcccgagtgcaggtttggtttcaaaatcgaagagctaaatgtagaaaacaagaaaatcaactccataaaggtgttctcataggggccgccagccagtttgaagcttgtagagtcgcaccttatgtcaacgtaggtgctttaaggatgccatttcagcaggatagtcattgcaacgtgacgcccttgtcctttcaggttcaggcgcagctgcagctggacagcgctgtggcgcacgcgcaccaccacctgcatccgcacctggccgcgcacgcgccctacatgatgttcccagcaccgcccttcggactgccgctcgccacgctggccgcggattcggcttccgccgcctcggtagtggcggccgcagcagccgccaagaccaccagcaagaactccagcatcgccgatctcagactgaaagccaaaaagcacgccgcagccctgggtctg

SEQ ID NO: 3823 - DNA, 957 bp, Homo sapiens
  source 1..957: mol_type = genomic DNA
atggaagaacttacggcgttcgtctccaagtcttttgaccagaaagtgaaggagaagaaggaggcgatcacgtaccgggaggtgctggagagcgggccgctgcgcggggccaaggagccgaccggctgcaccgaggcgggccgcgacgaccgcagcagcccggcagtccgggcggccggcggaggcggcggcggaggaggcggaggcggcggcggaggaggcggaggaggtgtaggaggaggaggagcaggcggaggagctggaggagggcgctctcccgtccgggagctggacatgggcgccgccgagagaagcagggagccgggcagcccgcgactgacggaggtgtccccggagctgaaagatcgcaaagaggatgcgaaagggatggaggacgaaggccagaccaaaatcaagcagaggcgaagtcggaccaatttcaccctggaacaactcaatgagctggagaggctttttgacgagacccactatcccgacgccttcatgcgagaggaactgagccagcgactgggcctgtcggaggcccgagtgcaggtttggtttcaaaatcgaagagctaaatgtagaaaacaagaaaatcaactccataaaggtgttctcataggggccgccagccagtttgaagcttgtagagtcgcaccttatgtcaacgtaggtgctttaaggatgccatttcagcaggttcaggcgcagctgcagctggacagcgctgtggcgcacgcgcaccaccacctgcatccgcacctggccgcgcacgcgccctacatgatgttcccagcaccgcccttcggactgccgctcgccacgctggccgcggattcggcttccgccgcctcggtagtggcggccgcagcagccgccaagaccaccagcaagaactccagcatcgccgatctcagactgaaagccaaaaagcacgccgcagccctgggtctg

SEQ ID NO: 3824 - DNA, 570 bp, Homo sapiens
  source 1..570: mol_type = genomic DNA
atggaggacgaaggccagaccaaaatcaagcagaggcgaagtcggaccaatttcaccctggaacaactcaatgagctggagaggctttttgacgagacccactatcccgacgccttcatgcgagaggaactgagccagcgactgggcctgtcggaggcccgagtgcaggtttggtttcaaaatcgaagagctaaatgtagaaaacaagaaaatcaactccataaaggtgttctcataggggccgccagccagtttgaagcttgtagagtcgcaccttatgtcaacgtaggtgctttaaggatgccatttcagcaggttcaggcgcagctgcagctggacagcgctgtggcgcacgcgcaccaccacctgcatccgcacctggccgcgcacgcgccctacatgatgttcccagcaccgcccttcggactgccgctcgccacgctggccgcggattcggcttccgccgcctcggtagtggcggccgcagcagccgccaagaccaccagcaagaactccagcatcgccgatctcagactgaaagccaaaaagcacgccgcagccctgggtctg

SEQ ID NO: 3825 - DNA, 1065 bp, Homo sapiens
  source 1..1065: mol_type = genomic DNA
atggaagaacttacggcgttcgtctccaagtcttttgaccagaaagtgaaggagaagaaggaggcgatcacgtaccgggaggtgctggagagcgggccgctgcgcggggccaaggagccgaccggctgcaccgaggcgggccgcgacgaccgcagcagcccggcagtccgggcggccggcggaggcggcggcggaggaggcggaggcggcggcggaggaggcggaggaggtgtaggaggaggaggagcaggcggaggagctggaggagggcgctctcccgtccgggagctggacatgggcgccgccgagagaagcagggagccgggcagcccgcgactgacggagggtagaaggaagccaacgaaagctgaggtccaggctacgctgcttctcccgggcgaggcgtttcggtttcttgtgtccccggagctgaaagatcgcaaagaggatgcgaaagggatggaggacgaaggccagaccaaaatcaagcagaggcgaagtcggaccaatttcaccctggaacaactcaatgagctggagaggctttttgacgagacccactatcccgacgccttcatgcgagaggaactgagccagcgactgggcctgtcggaggcccgagtgcaggtttggtttcaaaatcgaagagctaaatgtagaaaacaagaaaatcaactccataaaggtgttctcataggggccgccagccagtttgaagcttgtagagtcgcaccttatgtcaacgtaggtgctttaaggatgccatttcagcaggatagtcattgcaacgtgacgcccttgtcctttcaggttcaggcgcagctgcagctggacagcgctgtggcgcacgcgcaccaccacctgcatccgcacctggccgcgcacgcgccctacatgatgttcccagcaccgcccttcggactgccgctcgccacgctggccgcggattcggcttccgccgcctcggtagtggcggccgcagcagccgccaagaccaccagcaagaactccagcatcgccgatctcagactgaaagccaaaaagcacgccgcagccctgggtctg

SEQ ID NO: 3826 - DNA, 576 bp, Homo sapiens
  source 1..576: mol_type = genomic DNA
atggctgcccctcccaaagctcccatccgtgtcaggaatttgaccatcagagcaggagccctcactgggaaggagaacaacatgctgcagcccgagacccacatcttcacagcccccgaggaggggagctcccaaggggctctgctgcttggccaggccccagaacctttgtctctgccctgtactccagtgaccttggagcagcaactggtttctccttctggggatccccacagggcccctgccctgcccagcatatgctcaactctgatcctccagccctgtgccacccttgaccctcttctactgcagccacaggtccccaaagtctctgaccaggctttggtttctgcccactcagagtggcagcggaagctggaggccgctgaggctctgctgactctgagaaactctgcccaggcccctcctgactccatctccctgcaccagccttgcaacccaccagctcctgctggagataaaggattccagcctcccagcccctctctccgccccaggccagccagctccatctcgctgcctattggacatctgggatgcatctccctcttgagc

SEQ ID NO: 3827 - DNA, 1254 bp, Homo sapiens
  source 1..1254: mol_type = genomic DNA
atggaacccagtgacatgcctgctggctaccactgccccttagactctgccccctgggatgagaccagagacccccagagcacagagctgatccccaggagagccatcagccgctctccaacctgcgcccgctgccgcaaccatggtgtcaccgcccatctcaagggccacaagcgcctctgcctcttccaggcttgcgagtgtcacaaatgtgtcctcatcctggagcgccgcagggtcatggctgcccaggtggccttgcgtaggcagcaggaggcgcagctaaagaagcacctgatgaggagaggggaagcctctcccaaagctcccaaccacttcagaaagggaaccactcagccacaggtcccctctggaaaggagaacatagcaccccagcctcagaccccccatggggcagtcctgctggcaccgacaccccccgggaagaactcctgtgggcctctgctgctcagccatcccccggaagcctcgcccttgtcctggactccggtgcctcctggcccttgggtccctggacactggctgcctccaggcttctccatgccaccaccagtggtgtgccgcctgctgtaccaagaacctgctgtctctctgcctcccttccctggctttgaccctggcacctccctccagctgcccactcatgggcccttcaccacctgcccaggatctcacccagtactgacagctcctctttctggagagccccaagggccccctagccagccccgcacacactcaactctgatactccagccctgtggcaccccagaccctcttcagctacagccacaggtcctgggaaagaagtgggatctagggccctgggaggaggttgagcctggggaaggaaaaagcaggaaactgaaggaagcaggggctgaggaacacttagagggtgggcagaagcgggggttcccagtctgcttgtctccctttcccttgcaggcctctggagcctcgtgcctggcccggacatctggcccctcagagtggcagctgcagcaagaggcagctgaagccctcgtggggctgaaagattcatcccaggctcctcgtgtgaccccttctgtgccccccaaccctgcctggatctccctgcttcacccctgtggcccaccagctcctgctggaggaagaggattccagcctgttggcccctgtcttcgacccagcccagccccctctgttgctctgcatattggccgtctggggtccatctccctcctgagc

SEQ ID NO: 3828 - DNA, 1101 bp, Homo sapiens
  source 1..1101: mol_type = genomic DNA
atggaacccagtgacatgcctgctggctaccactgccccttagactctgccccctgggatgagaccagagacccccagagcacagagctgatccccaggagagccatcagccgctctccaacctgcgcccgctgccgcaaccatggtgtcaccgcccatctcaagggccacaagcgcctctgcctcttccaggcttgcgagtgtcacaaatgtgtcctcatcctggagcgccgcagggtcatggctgcccaggtggccttgcgtaggcagcaggaggcgcagctaaagaagcacctgatgaggagaggggaagcctctcccaaagctcccaaccacttcagaaagggaaccactcagccacaggtcccctctggaaaggagaacatagcaccccagcctcagaccccccatggggcagtcctgctggcaccgacaccccccgggaagaactcctgtgggcctctgctgctcagccatcccccggaagcctcgcccttgtcctggactccggtgcctcctggcccttgggtccctggacactggctgcctccaggcttctccatgccaccaccagtggtgtgccgcctgctgtaccaagaacctgctgtctctctgcctcccttccctggctttgaccctggcacctccctccagctgcccactcatgggcccttcaccacctgcccaggatctcacccagtactgacagctcctctttctggagagccccaagggccccctagccagccccgcacacactcaactctgatactccagccctgtggcaccccagaccctcttcagctacagccacaggcctctggagcctcgtgcctggcccggacatctggcccctcagagtggcagctgcagcaagaggcagctgaagccctcgtggggctgaaagattcatcccaggctcctcgtgtgaccccttctgtgccccccaaccctgcctggatctccctgcttcacccctgtggcccaccagctcctgctggaggaagaggattccagcctgttggcccctgtcttcgacccagcccagccccctctgttgctctgcatattggccgtctggggtccatctccctcctgagc

SEQ ID NO: 3829 - DNA, 1419 bp, Homo sapiens
  source 1..1419: mol_type = genomic DNA
atgtatgagatttacgtggagacctgtgggcaaaacactgagaaccaagtcaacccggccacctttgggaagtgtgaagatcattcaccgatgaagacagacccagttggatcccctttgtctgaattcaggagatgtccatttctggagcaagaacaggcaaagaaatactcctgtaatatgatggccttccttgctgacgaatactgcaactattgtcgagacattttacgaaatgtggaggacttgcttacttccttctggaagtctctgcagcaagacacagtcatgctgatgtcattgcctgacgtgtgccagctctttaaatgctacgacgtccagctgtacaagggaattgaggatgttctccttcatgacttcttggaagatgtttctattcagtacctgaaatctgtgcagttatttagtaagaaatttaagctgtggctccttaatgctttggaaggtgttccagccctcttgcagatctccaaactcaaagaagttactctatttgtcaaaagactaagaagaaagacgtacctttccaacatggctaagactatgcgaatggtattgaaaagtaagaggcgtgtcagcgttttgaagtcagatctacaggccatcatcaatcaaggcactttggctacttctaagaaagccctggcaagtgaccggagtggcgcagatgaactggagaacaacccagagatgaaatgtttaagaaacttaatttctttgctgggaacatcaacagatctcagggtattcctcagctgtctgtcttcacatctccaagcatttgtgttccagacaagcagaagcaaagaagagtttaccaaattggccgccagcttccagctgagatggaatcttcttctcactgctgtaagcaaagccatgaccctctgccacagagatagttttggctcctggcatctgtttcacttgttgcttttggaatatatgattcatatacttcagtcatgcctagaggaggaagaggaggaggaggacatggggactgtcaaggaaatgctaccagatgacccgactctcggccagccagaccaggcacttttccattctctgaattcctcactgtcgcaggcgtgtgccagccccagcatggagccactgggggtgatgcccacacacatgggccagggccgatatcccgtgggtgtgagcaacatggtcctcaggatcctgggcttcctggtggacactgccatgggcaataagctcatccaggtgctgttggaagatgaaaccactgaaagcgcagttaaactcagccttcctatgggacaagaagccctcataaccctaaaagatggacaacaatttgtgattcagatatcagatgtaccccaaagctctgaagatatttatttcagagaaaacaatgctaatgtg

SEQ ID NO: 3830 - DNA, 2205 bp, Homo sapiens
  source 1..2205: mol_type = genomic DNA
atgcattgtgggttactggaggaacccgacatggattccacagagagctggattgaaagatgtctcaacgaaagtgaaaacaaacgttattccagccacacatctctggggaatgtttctaatgatgaaaatgaggaaaaagaaaataatagagcatccaagccccactccactcctgctactctgcaatggctggaggagaactatgagattgcagagggggtctgcatccctcgcagtgccctctatatgcattacctggatttctgcgagaagaatgatacccaacctgtcaatgctgccagctttggaaagatcataaggcagcagtttcctcagttaaccaccagaagactcgggacccgaggacagtcaaagtaccattactatggcattgcagtgaaagaaagctcccaatattatgatgtgatgtattccaagaaaggagctgcctgggtgagtgagacgggcaagaaagaagtgagcaaacagacagtggcatattcaccccggtccaaactcggaacactgctgccagaatttcccaatgtcaaagatctaaatctgccagccagcctgcctgaggagaaggtttctacctttattatgatgtacagaacacactgtcagagaatactggacactgtaataagagccaactttgatgaggttcaaagtttccttctgcacttttggcaaggaatgccgccccacatgctgcctgtgctgggctcctccacggtggtgaacattgtcggcgtgtgtgactccatcctctacaaagctatctccggggtgctgatgcccactgtgctgcaggcattacctgacagcttaactcaggtgattcgaaagtttgccaagcaactggatgagtggctaaaagtggctctccacgacctcccagaaaacttgcgaaacatcaagttcgaattgtcgagaaggttctcccaaattctgagacggcaaacatcactaaatcatctctgccaggcatctcgaacagtgatccacagtgcagacatcacgttccaaatgctggaagactggaggaacgtggacctgaacagcatcaccaagcaaaccctttacaccatggaagactctcgcgatgagcaccggaaactcatcacccaattatatcaggagtttgaccatctcttggaggagcagtctcccatcgagtcctacattgagtggctggataccatggttgaccgctgtgttgtgaaggtggctgccaagagacaagggtccttgaagaaagtggcccagcagttcctcttgatgtggtcctgtttcggcacaagggtgatccgggacatgaccttgcacagcgcccccagcttcgggtcttttcacctaattcacttaatgtttgatgactacgtgctctacctgttagaatctctgcactgtcaggagcgggccaatgagctcatgcgagccatgaagggagaaggaagcactgcagaagtccgagaagagatcatcttgacagaggctgccgcaccaaccccttcaccagtgccatcgttttctccagcaaaatctgccacatctgtggaagtgccacctccctcttcccctgttagcaatccttcccctgagtacactggcctcagcactacaggagcaatgcagtcttacacgtggtctctaacatacacagtgacgacggctgctgggtccccagctgagaactcccaacagctgccctgtatgaggaacactcatgtgccttcttcctccgtcacacacaggataccagtttatccccacagagaggaacatggatacacgggaagctataactatgggagctatggcaaccagcatcctcaccccatgcagagccagtatccggccctccctcatgacacagctatctctgggccactccactatgccccttaccacaggagctctgcacagtacccttttaatagccccacttcccggatggaaccttgtttgatgagcagtactcccagactgcatcctaccccagtcactccccgctggccagaggtgccctcagccaacacgtgctacacaagcccgtctgtgcattctgcgaggtacggaaactctagtgacatgtatacacctctgacaacgcgcaggaattctgaatatgagcacatgcaacactttcctggctttgcttacatcaacggagaggcctctacaggatgggctaaa

SEQ ID NO: 3831 - DNA, 1923 bp, Homo sapiens
  source 1..1923: mol_type = genomic DNA
atgaactgggctgccttcggagggtctgaattcttcatcccagaaggcattcagatagattcgagatgcccactaagcagaaatatcacggaatggtaccattactatggcattgcagtgaaagaaagctcccaatattatgatgtgatgtattccaagaaaggagctgcctgggtgagtgagacgggcaagaaagaagtgagcaaacagacagtggcatattcaccccggtccaaactcggaacactgctgccagaatttcccaatgtcaaagatctaaatctgccagccagcctgcctgaggagaaggtttctacctttattatgatgtacagaacacactgtcagagaatactggacactgtaataagagccaactttgatgaggttcaaagtttccttctgcacttttggcaaggaatgccgccccacatgctgcctgtgctgggctcctccacggtggtgaacattgtcggcgtgtgtgactccatcctctacaaagctatctccggggtgctgatgcccactgtgctgcaggcattacctgacagcttaactcaggtgattcgaaagtttgccaagcaactggatgagtggctaaaagtggctctccacgacctcccagaaaacttgcgaaacatcaagttcgaattgtcgagaaggttctcccaaattctgagacggcaaacatcactaaatcatctctgccaggcatctcgaacagtgatccacagtgcagacatcacgttccaaatgctggaagactggaggaacgtggacctgaacagcatcaccaagcaaaccctttacaccatggaagactctcgcgatgagcaccggaaactcatcacccaattatatcaggagtttgaccatctcttggaggagcagtctcccatcgagtcctacattgagtggctggataccatggttgaccgctgtgttgtgaaggtggctgccaagagacaagggtccttgaagaaagtggcccagcagttcctcttgatgtggtcctgtttcggcacaagggtgatccgggacatgaccttgcacagcgcccccagcttcgggtcttttcacctaattcacttaatgtttgatgactacgtgctctacctgttagaatctctgcactgtcaggagcgggccaatgagctcatgcgagccatgaagggagaaggaagcactgcagaagtccgagaagagatcatcttgacagaggctgccgcaccaaccccttcaccagtgccatcgttttctccagcaaaatctgccacatctgtggaagtgccacctccctcttcccctgttagcaatccttcccctgagtacactggcctcagcactacaggagcaatgcagtcttacacgtggtctctaacatacacagtgacgacggctgctgggtccccagctgagaactcccaacagctgccctgtatgaggaacactcatgtgccttcttcctccgtcacacacaggataccagtttatccccacagagaggaacatggatacacgggaagctataactatgggagctatggcaaccagcatcctcaccccatgcagagccagtatccggccctccctcatgacacagctatctctgggccactccactatgccccttaccacaggagctctgcacagtacccttttaatagccccacttcccggatggaaccttgtttgatgagcagtactcccagactgcatcctaccccagtcactccccgctggccagaggtgccctcagccaacacgtgctacacaagcccgtctgtgcattctgcgaggtacggaaactctagtgacatgtatacacctctgacaacgcgcaggaattctgaatatgagcacatgcaacactttcctggctttgcttacatcaacggagaggcctctacaggatgggctaaa

SEQ ID NO: 3832 - DNA, 2232 bp, Homo sapiens
  source 1..2232: mol_type = genomic DNA
atgatcaaaaggagagcccaccctggtgcgggaggcgacaggaccaggcctcgacggcgccgttccactgagagctggattgaaagatgtctcaacgaaagtgaaaacaaacgttattccagccacacatctctggggaatgtttctaatgatgaaaatgaggaaaaagaaaataatagagcatccaagccccactccactcctgctactctgcaatggctggaggagaactatgagattgcagagggggtctgcatccctcgcagtgccctctatatgcattacctggatttctgcgagaagaatgatacccaacctgtcaatgctgccagctttggaaagatcataaggcagcagtttcctcagttaaccaccagaagactcgggacccgaggacagtcaaagtaccattactatggcattgcagtgaaagaaagctcccaatattatgatgtgatgtattccaagaaaggagctgcctgggtgagtgagacgggcaagaaagaagtgagcaaacagacagtggcatattcaccccggtccaaactcggaacactgctgccagaatttcccaatgtcaaagatctaaatctgccagccagcctgcctgaggagaaggtttctacctttattatgatgtacagaacacactgtcagagaatactggacactgtaataagagccaactttgatgaggttcaaagtttccttctgcacttttggcaaggaatgccgccccacatgctgcctgtgctgggctcctccacggtggtgaacattgtcggcgtgtgtgactccatcctctacaaagctatctccggggtgctgatgcccactgtgctgcaggcattacctgacagcttaactcaggtgattcgaaagtttgccaagcaactggatgagtggctaaaagtggctctccacgacctcccagaaaacttgcgaaacatcaagttcgaattgtcgagaaggttctcccaaattctgagacggcaaacatcactaaatcatctctgccaggcatctcgaacagtgatccacagtgcagacatcacgttccaaatgctggaagactggaggaacgtggacctgaacagcatcaccaagcaaaccctttacaccatggaagactctcgcgatgagcaccggaaactcatcacccaattatatcaggagtttgaccatctcttggaggagcagtctcccatcgagtcctacattgagtggctggataccatggttgaccgctgtgttgtgaaggtggctgccaagagacaagggtccttgaagaaagtggcccagcagttcctcttgatgtggtcctgtttcggcacaagggtgatccgggacatgaccttgcacagcgcccccagcttcgggtcttttcacctaattcacttaatgtttgatgactacgtgctctacctgttagaatctctgcactgtcaggagcgggccaatgagctcatgcgagccatgaagggagaaggaagcactgcagaagtccgagaagagatcatcttgacagaggctgccgcaccaaccccttcaccagtgccatcgttttctccagcaaaatctgccacatctgtggaagtgccacctccctcttcccctgttagcaatccttcccctgagtacactggcctcagcactacaggagcaatgcagtcttacacgtggtctctaacatacacagtgacgacggctgctgggtccccagctgagaactcccaacagctgccctgtatgaggaacactcatgtgccttcttcctccgtcacacacaggataccagtttatccccacagagaggaacatggatacacgggaagctataactatgggagctatggcaaccagcatcctcaccccatgcagagccagtatccggccctccctcatgacacagctatctctgggccactccactatgccccttaccacaggagctctgcacagtacccttttaatagccccacttcccggatggaaccttgtttgatgagcagtactcccagactgcatcctaccccagtcactccccgctggccagaggtgccctcagccaacacgtgctacacaagcccgtctgtgcattctgcgaggtacggaaactctagtgacatgtatacacctctgacaacgcgcaggaattctgaatatgagcacatgcaacactttcctggctttgcttacatcaacggagaggcctctacaggatgggctaaa

SEQ ID NO: 3833 - DNA, 1848 bp, Homo sapiens
  source 1..1848: mol_type = genomic DNA
atggcagaagatgagcctgatgctaagagccccaagactgggggaagggcccccccaggtggtgctgaggctggggaacctaccacccttcttcagaggctccgaggtaccatttccaaggccgtgcagaacaaagtagaggggatcctgcaagatgtacagaaattttctgacaatgacaagctgtatctctaccttcagctcccctcaggacccaccactggagacaaaagctcagagccaagtacactgagcaatgaggagtacatgtatgcctataggtggatccgcaaccacctggaagagcacactgacacctgtctgccaaagcaaagtgtttatgatgcctatcggaagtactgtgagagtcttgcctgttgccgcccactcagcacagccaactttggcaagatcatcagagagatcttccctgacatcaaagctcgaaggcttggtggccggggccagtccaaatattgctacagtggcataaggaggaagaccttggtgtctatgccacccctgcctggacttgacctaaagggttctgagagtccagaaatgggcccagaagtaaccccagcacctcgagatgaactggtggaggcagcgtgtgccctgacctgtgactgggcagagcggatcctgaaacggtccttcagttccatcgttgaggtcgcccgcttcctgctacagcagcatctcatctctgcccgatctgcacatgcccatgtgcttaaggccatggggctcgctgaagaggacgaacatgcacctcgggaacggtcatctaaaccaaagaatggtttagagaacccagagggtggagcccacaagaagccagagagactggcccagcctcctaaggatctggaagcccgaactggggccggtcctctcgcacgtggagagcggaagaagagtgtagttgagagctcggccccaggagccaataacctgcaggttaatgccctagtggctcggctgcctctgctccttccccgggcccctcgctcactaattccgccaatcccagtctctccacctattctggcccccaggctttcttcaggtgccctgaaagtggctacactgcctctgtctagtagggccggggcacccccagcagctgtgcccatcattaacatgatcttaccaactgttcctgctttgcctggacctggacctgggcctgggcgagctccacctgggggactcactcagccccggggcacagagaacagagaggtaggcataggtggtgaccaaggaccacatgacaagggtgtcaagaggacagctgaagtacctgtgagtgaggccagtgggcaggctccaccagctaaagcagcaaagcaggatatagaggatacagcaagtgatgccaaaaggaaacgggggcgccctcgaaaaaagtcaggtggaagtggggaaaggaattctacccctctcaagtcagcagctgccatggaatctgcccagtcctcaaggttaccatgggagacatggggctcaggaggggaaggcaactcagctggaggggcagagaggccagggccaatgggagaggctgaaaagggggcagtacttgcccagggtcagggagatggtactgtttccaaaggaggaaggggccccggttcccagcataccaaagaagcagaagataaaattcccttggtcccctcaaaagtgagtgtcatcaagggcagcagaagccaaaaggaggcttttcctttggcaaagggagaggtagacactgcaccacagggtaataaagacttaaaggagcatgtgcttcaaagttccttatcccaggagcataaagacccaaaagcaacaccccca

SEQ ID NO: 3834 - DNA, 2784 bp, Homo sapiens
  source 1..2784: mol_type = genomic DNA
atggccaaggtcccggagctggaagacaccttcctgcaggcgcagcctgcgccccaactgtccccggggatccaggaagactgctgtgtgcagctcctgggcaagggcttgctagtctatccggaagaaacagtgtacctggcggccgaagggcagcccgggggcgagcagggcggcggggagaaaggcgaagacccggagctgccgggggcagtgaaatcagaaatgcacttaaacaatggtaacttttcctctgaagaagaggacgccgacaaccacgacagcaaaaccaaagcagcggatcaatacctgtctcagaagaaaaccatcacgcagattgtgaaggataaaaagaagcagacacagctcacgctgcagtggcttgaagagaattacattgtatgtgaaggagtttgcttaccacggtgcattctttatgcacactacttagatttctgtaggaaagagaaattagagccagcctgtgcggccacctttggaaagacaattcgccagaagtttcccctcctaacaacaaggcggcttggaacaagaggccattcaaagtatcattactatgggattggcatcaaagagagcagtgcatattaccactccgtttattctggaaagggcttgacaaggttttctggaagcaagctaaagaatgagggtggcttcactcgtaaatattcgcttagctcaaaaactggaacacttcttccagaattccccagcgctcaacaccttgtataccaaggatgcatttctaaggacaaggttgatacgctcataatgatgtacaaaactcactgccagtgtatcctggacaatgcaattaatggaaactttgaagagatccagcattttttattacacttttggcaaggaatgcctgaccatctccttcccctgctcgaaaatcctgttatcattgatattttctgtgtttgtgactcaattctttataaggttcttacagatgtactcattcctgcaacaatgcaagaaatgcctgaaagcttattagcagacataagaaattttgctaaaaattgggaacagtgggttgtttcatccttggaaaacttgccagaagctctaactgacaagaaaatacctattgtgcgaagatttgtatcttctctgaaacgacaaacatctttcttacatcttgcccagattgccagaccagctctctttgaccagcatgtcgttaattctatggtgtctgatattgaaagggttgatttgaacagcattggctctcaagcccttcttaccatttcaggcagcacagacactgaatctggtatctacactgaacatgactctatcactgtgttccaagaactgaaggatctccttaagaagaatgccactgtggaggcttttattgaatggttggatactgtggtagaacagagagttattaagaccagcaaacaaaatggaaggtcattaaagaagagagctcaagactttctgttaaagtggagtttttttggtgctcgagtaatgcataatctcaccttgaacaatgcatccagttttggttcttttcatttgattcgaatgcttctcgatgaatacattctcctggccatggagacccagtttaataatgacaaagagcaggagttacagaatttattggacaagtatatgaagaattcagatgcgagtaaagctgctttcactgcttctccgagttcatgctttctggccaaccgtaataaagggagcatggtttccagcgacgctgtgaagaatgaaagccacgtggagacaacctatctccctctgccatccagtcaacctggaggcctaggccctgctctgcaccagttccctgctgggaacacagacaacatgccgctcacaggtcaaatggagctttcacagattgctggtcatctgatgacaccacccatttctccagccatggcaagccgaggaagtgtcattaaccaaggaccaatggcagggaggcccccaagtgtgggcccagtactgtcagctccatcacactgctccacatacccagagcccatttatcccactctccctcaagccaatcatgacttttatagcaccagctctaactaccagactgtgtttagggcacagccccactccacatcaggactctatcctcatcacaccgagcatggtcgatgcatggcttggactgaacagcagctttcaagagacttcttcagtggcagctgtgcggggtctccatataactcccggccaccgtctagctatggcccatccctgcaagcccaggattcacacaatatgcagtttttaaatacaggaagcttcaatttcttgagcaacacaggagctgccagctgccaaggagcaacactgcctcctaattcaccaaatggatactatggaagcaacataaactacccagagtctcacaggctcggatcaatggtgaatcagcacgtttctgtcatcagcagcattcgttcactgcccccctacagtgacatccacgatccacttaacattttagatgacagtggtagaaaacagaccagctcgttttacacagacacatcatctccagttgcatgtcgaactccagtcctagcttccagtttgcaaaccccaattccttcttcctcatcccaatgtatgtatggaacttccaaccagtatccagctcaagaaaccctggactcccatggaacaagcagtagagaaatggtgtcctctttaccacctatcaacactgtgttcatgggaacagcagctggaggcact

SEQ ID NO: 3835 - DNA, 4089 bp, Homo sapiens
  source 1..4089: mol_type = genomic DNA
atgtcatctagtcgggcacaacaaatgcatgccttttcctggattcggaataccctagaggaacatccggagacttcactgcccaaacaggaagtctatgatgagtacaagagctattgtgacaatcttggttaccatccattaagtgctgctgattttggaaagatcatgaaaaacgtctttccaaacatgaaggcacgtcgtttgggcacaagaggcaaatctaaatattgctacagtggactaagaaaaaaagcttttgttcatatgccaacactgcccaaccttgactttcacaaaactggagatgggttggaaggagctgaaccttctgggcagcttcaaaatattgatgaagaagttatctcttctgcttgccgtcttgtgtgtgagtgggcccagaaagtgttaagccaaccatttgacaccgtcttggaattagcccgcttccttgtaaaaagtcactatataggcaccaagtcaatggcagctctaactgtaatggcagcagcaccagcaggaatgaaaggaattacccagccttctgcttttatacctacagctgaaagtaattcctttcagcctcaggtgaagactttgccatctccaattgatgctaaacagcagttgcaacggaaaatccagaagaagcagcaagaacagaaactacaatcccctttgccaggagaatctgcagcaaaaaagtcagaaagtgctacaagcaatggagtgactaatcttcctaatggaaatccttcaatcctttctcctcaacctattggtatcgttgtggcagctgtccctagtcccattccggtccagcggactaggcaattggtaacttcaccgagtccaatgagttcttctgacggcaaagttcttcccctcaatgtacaggtggtcactcagcacatgcagtctgtgaaacaggcaccaaagactccccagaacgttccagccagtcctggtggggatcgttctgcccggcaccgttaccctcagatcttacccaaaccagcgaacaccagtgcactcaccattcgctctccaactactgtcctctttactagtagtcccatcaaaactgctgttgtacccgcttcacacatgagttctctaaatgtggtgaaaatgacaacaatatccctcacacccagcaacagtaacacccctcttaaacattctgcctcagtcagcagtgctacaggaacaacagaagaatcaaggagtgttccacagatcaagaatggttctgtcgtgtcgcttcagtctcctgggtccaggagcagcagtgcggggggaacatctgctgtggaagtcaaagtggaacccgaaacatcatcagatgagcatcctgtacagtgccaagagaactctgatgaggctaaagctccccagacacctagtgcccttttggggcagaaaagtaatacagacggagcactgcagaaaccttcaaatgaaggtgtcattgaaataaaagcaactaaggtctgtgaccagaggaccaaatgtaaaagtcgctgtaatgaaatgctgccaggcacgtcaacaggcaataatcaaagcactatcactctatcagttgcttctcagaacttaactttcaccagcagcagctcaccacctaatggtgactcaatcaataaagaccctaaattatgcactaaaagcccaagaaaacgactgtcttctacattgcaggagacccaggtgcctcctgtaaagaaaccaattgtggaacagctttcagcagctaccatagaagggcagaaacaaggcagtgttaagaaggaccaaaaggttccacattcagggaaaacagaaggttcaacagcaggtgctcagattcctagcaaggtatcagtaaatgtcagttcacacataggagcaaatcaacccttgaattcctctgcccttgttatcagtgattcagctttggaacagcaaacaaccccatcatcatctccagatataaaagtaaaacttgaaggaagtgtctttctcttggacagtgattcaaagtcagttggcagctttaatccaaatggatggcaacaaatcactaaagattctgagtttatatctgccagttgtgaacaacagcaagatatcagtgttatgacaattcctgagcactctgatatcaatgacttagagaaatctgtttgggaattagaaggaatgccacaggacacatatagccagcagctacatagccagatacaggaatcttctttaaatcaaatacaagcacattcttcagatcagttacctctgcaatctgaactgaaggagtttgagccttctgtttcccagacaaatgaaagctactttccttttgatgatgaacttacacaagatagtattgtggaagagctggtgcttatggagcagcaaatgtcaatgaacaattctcattcttacggcaactgtttgggaatgacccttcagagtcagtcagtaactccaggagctccaatgtcatctcacacttccagcacccacttctatcatccaatccacagcaatggcactccaatccacacacccacacccacacccacacccactcctactccaaccccaaccccaaccccgacatctgaaatgattgctggatctcagagtctgtcacgggagagcccttgctccaggctagcccagactacacctgtggatagtgctttaggaagtagccgacatacacccattggtactccacattctaactgcagcagtagtgtcccccccagccctgttgaatgcaggaatccgtttgcattcactccaataagctccagtatggcatatcatgacgccagcattgtctcaagtagtcctgtgaaaccgatgcaaagacccatggccacacaccctgacaaaaccaagcttgaatggatgaataatgggtatagtggggttggtaattcatcagtttctggccatggtattctcccaagctatcaggaactagtggaagaccgtttcaggaaacctcatgcttttgctgtgcctggacagtcttatcagtctcaatccagacatcatgacactcattttggtcgtttgactcctgtctctcctgtgcagcatcaaggtgccactgtaaataacaccaacaaacaggagggttttgcagtccctgcccctcttgataataaaggaactaattcatctgccagcagcaacttcagatgccggagtgtgagccctgctgttcatcgccaacgtaatcttagtggaagcaccctctatccagtatctaatatcccacgatctaatgtgaccccctttggaagtccagttaccccagaagttcatgttttcacaaatgttcacacagacgcatgtgccaacaacatagctcaaagaagccaatcagttccattgacagtcatgatgcagacagccttcccaaacgctcttcagaagcaagcaaacagtaaaaaaataaccaatgttttgttgagtaaacttgattccgacaatgatgatgcagtgagaggtttgggaatgaacaacctgccctctaattatacagcccggatgaatctcactcagattttggaaccttccactgtttttcctagtgccaacccacaaaatatgatcgattccagcacttctgtttatgagttccaaacaccatcttacctcaccaaaagtaatagcaccggtcagatcaatttttctcctggagataatcaagcacaatcagaaattggagagcaacaattagatttcaatagcactgttaaagacctgttgagtggagacagcttgcaaaccaaccagcagctggtaggtcagggagcatctgatctcactaatactgcatctgatttctctagcgatatcaggttgtcttctgagctctcaggcagcatcaatgatttgaacactttagacccaaatctactgtttgatccaggtcgtcagcagggacaagatgatgaagctacactggaagaattaaagaatgacccattatttcaacaaatttgcagtgaatccatgaattctatgacttcatcaggttttgaatggatagaaagcaaggaccatcctactgttgaaatgttgggt

SEQ ID NO: 3836 - DNA, 1998 bp, Homo sapiens
  source 1..1998: mol_type = genomic DNA
atggacttggtggctttcgaggatgtggctgtgaacttcacccaggaggagtggtctttgctggatccttcccagaagaatctctacagagaagtgatgcaggaaaccttgaggaatctggcctccataggagaaaaatggaaagaccagaacattgaagatcagtacaaaaatcccaggaataatctaagaagtcttctgggagagagagttgatgaaaatacagaagaaaatcattgtggagaaacttctagccagattccagatgacacactgaacaaaaaaacttctcctggagtaaaatcatgtgaaagcagtgtgtgtggagaagtcttcgtgggtcattcttcccttaataggcacattagagctgacactgcacacaagccgtctgagtatcaggaatatggacaggagccatataagtgtcaacaacgtaagaaagccttcagatgtcacccctcctttcaaatgcaagaaaaggctcacactggagaaaaactctatgattgtaaagaatgtggaaaaaccttcatatcccattcaagcattcaaagacacatgataatgcacaatggagatggaacttataaatgtaagttttgtgggaaagcctgcccttgtctcagcatatatcttatacatgaacgagttcacactggagagaaaccatataaatgtaaacaatgtggtaaagcctttagttattcaacttcccttcaaatacatgaaagaactcacactggagagaagccttatgaatgtaaggaatgtgggaaagcattcggtagtcccaattccctttatgaacatagaagaactcacactggagagaagccatatgaatgcaaacaatgtggaaaagccttcagatggttccattcctttcaaatacatgaaagaactcacagtgaggagaaggcttatgaatgtaccaaatgtgggaaagcattcaagtgtcccagttatctttgtagacatgaagtgacccactctgggaaaaagccctgtgaatgtaaacaatgtgggaaagcattatcttatcttaactttcaaagacacatgaaaatgcacactagaatgagaccttataaatgtaagactgtggaaaagcctttgattctcccagttcgttttgaagacatgaaagaactcacactggagagaaaccttatgaatgcaagcactgtggtaaagccttcaatcgttccagttcctttcactatcatgaaaggactcacactggagagaaaccctatgaatgtaagcagtgtagtaaagccttcatttcttccacttcctttcgatatcatgaaaggactcacactggagagaaaccgtatgagtgtaagcaatgtgggaaagccttcagatctgcctcacaccttcaaatgcatggaaggactcacactcaagagaaaccctatgaatgtaagcagtgtggtaaagccttcattttttccacttcctttcgatatcatgaaaggactcacactggagagaaaccctatgagtgtaagcaatgtgggaaagccttcacatctgcctcacaccttcaaatgcatgaaaggactcacactggaaagcaactgtatgaatctaaacaatgtgaaaaaacctttggatctgtcagaaaccttcaaattcatgaaaagacacaccctggagagaaaccctataaggaatatggaaaagcattcaacaatttctcttcctttcaaatacatgcaacaatgcacagaggacagaatgcctatgaatgtaaagagtgtgacaaagcattcatatctgccaagatccttcgagtacatgcaagaacacaccctggagagaaaccctatgaatgtaaggaatgcggaaaagcgttcaattatttttcttctttgcgtatacacaaaaggatgcacactggagagaaaccatattaatgtaaggattgtgggaaagcattcagtttgcctggttcctttcgtagacataaaagggctcacactggag

SEQ ID NO: 3837 - DNA, 2937 bp, Homo sapiens
  source 1..2937: mol_type = genomic DNA
atggcaacacaggcgtatactgagctacaggcagccccgccaccatcccagccgccacaggccccgccacaagcccagccccagccgccaccgccaccacccccagcggcaccccagcccccgcagccacccaccgctgctgccacccctcagccccaatatgtcaccgagctgcagagcccccagccccaggcacagccaccgggtggccagaagcagtacgtgacggagctcccggctgtacccgcaccctcgcagccaaccggtgcacccaccccttcgcctgcaccccagcagtacatcgtggtcactgtctctgaaggtgccatgcgggccagcgagacagtgtcggaggccagccccggctccaccgccagccagaccggcgttcctactcaggtggttcagcaggtgcagggcacccagcagcggctgctggtccagacgagcgtgcaggccaagccaggccacgtgtcgcccctccagctgaccaacatccaagtgccccagcaggctcttcccacgcagcgtctggtggtgcagagcgcagccccaggcagcaaaggtggccaggtctccctgacggtccatggtacccagcaggtgcactcgcccccagagcagtcgccggtgcaggccaacagctcttccagcaagacagccggggcccccacgggcacagtgccacagcagctgcaggtccacggcgtccagcagagtgtccccgtcacccaagagagatctgtggtccaggccactccacaagcgcccaaacccggcccggtgcagccgctgaccgtgcagggcctccagccagtccacgtggctcaagaggtgcagcagctccagcaggtgcccgtcccacacgtgtactccagccaggtgcagtatgtggagggcggcgatgccagctacacggccagtgccatccgttccagcacctactcctatcccgagacgccgctgtacacgcagacggcaagcaccagctactacgaggccgcaggcacggccacccaggtcagcacccccgccacctcccaggcggtggccagcagtggctccatgcccatgtacgtgtccggcagccaggtcgtcgccagctccaccagcactggggctggggccagcaacagcagcggaggtggtggcagtggtggtggcggcggcggcgggggaggcggtggcgggggtggcagtggcagcaccggaggcggcggcagcggagcaggcacctacgtgatccaaggcggctacatgctgggcagtgccagccagtcttactctcacaccacccgtgcctcgccagccacggtccagtggctcctggacaactatgagacggctgagggcgtgagtctgccacggagcaccctctactgccactacttactgcactgccaggagcagaagctggagcccgtcaacgccgcctccttcggcaagctcatccgctccgtcttcatgggcctgcgaacccgccgtctgggcaccaggggcaactccaagtaccactactatggcctgcgcatcaaggccagctcacccctgctgcggctgatggaggaccagcagcacatggccatgcggggccagcccttctcgcagaagcagaggctcaagcccatccagaagatggaaggcatgaccaacggcgtggcggtggggcagcagccgagcacggggctgtcggacatcagcgcccaggtgcagcagtaccagcaatttttggatgcctctcggagcctccctgacttcacagagctcgacctccagggcaaggtgctgcctgagggcgtcgggcccggggacatcaaagccttccaggtcctgtaccgggaacactgtgaggccattgtcgacgtcatggtgaacctgcagttcaccctggtggagacgctgtggaagaccttctggaggtacaacctcagccagcccagtgaggcgccaccgctggctgtacatgacgaggccgagaagcgactgcccaaagccatcctggtgctcctctccaagttcgagcccgtgctccaatggaccaagcactgtgacaacgtgctgtaccagggcctggtggaaatcctcattcccgacgtgctgcggcccatccccagtgccttgacccaagcgatccggaactttgccaagagcctggagagctggctcacccacgccatggtcaacatccccgaggagatgctgcgggtgaaggtggccgcggctggcgccttcgcgcagacactgcggcgctacacgtcgctcaaccacctggcgcaggcggcgcgcgctgtgctgcagaacaccgcacagatcaaccagatgctgagcgacctcaaccgcgtggacttcgccaacgtgcaggagcaggcctcgtgggtgtgccgctgcgaggaccgcgtggtgcagcggctggagcaggacttcaaggtgacgctgcagcagcagaactcgctggagcagtgggcggcctggctggacggcgtggtgagccaggtgctcaagccctaccagggcagcgccggcttccccaaggccgccaagctcttcctcctcaagtggtccttctacagctccatggtgatccgggacctgaccctgcgcagcgccgccagcttcggttccttccacctcatccggctgctctacgacgagtacatgtactacctgatcgagcaccgcgtagcccaggccaagggcgagacccccatcgccgtcatgggcgagttcgccaatctggccacctccctgaaccccctggaccccgacaaagacgaggaggaagaagaggaggaggagagcgaggacgagctgccgcaggacatctcactggcggctggcggcgagtcacccgcgctgggcccggagaccctggagccgccggccaagctggcgcggactgacgcgcgcggcctcttcgtgcaggcgctgccctccagc

SEQ ID NO: 3838 - DNA, 2094 bp, Homo sapiens
  source 1..2094: mol_type = genomic DNA
atgcagaattccgagggtggagcggattcgccagcgtccgtggctctgcgtccctcggcggcagccccgcctgtgccagcctccccgcagagggtgttggtccaggcagccagctccaatcccaaaggggcccagatgcagccgatctccctccccagagttcagcaggtaccccagcaggtgcagccggtgcagcacgtgtatcctgcccaggtgcagtacgtggaagggggagacgccgtctacaccaatggagccatacgaacagcctacacctacaaccccgagcctcagatgtacgcccccagcagcacggcttcttacttcgaggccccaggcggtgcccaggtgaccgtggcagcctcgtccccgccagcggtcccctcccacagcatggtgggcatcaccatggatgtcggggggagccccatcgtctccagcgcgggagcctatctcatccacggggggatggacagcaccagacactccctggcccacacctcccgctcatcgcccgccacgctccagtggctgttggataattatgaaacagcggaaggtgtgagtctccccagaagttctctttacaaccactaccttcggcactgccaggagcacaagctagacccagtgaacgccgcctccttcgggaaactgatccgttctgtgtttatggggctgagaacgcggcggctgggcaccaggggcaactcgaagtaccattactatgggattcgtctgaagccggactcaccactgaaccggctgcaggaggacacgcagtacatggccatgcggcagcagcccatgcaccagaagcccaggtaccggccagcccagaagacggacagcctcggggacagcggctcccacagcggcctgcacagcactccggaacagaccatggccgtgcagagccagcaccaccagcagtacatagatgtctcccacgtcttccccgagttcccagcgcccgacctgggcagcttcctgctgcaggacggcgtcacactgcacgacgtcaaggccctgcagctggtgtacagacggcactgcgaggcaactgtagatgtggtgatgaacctccagttccactacatcgagaagctgtggctctccttctggaactctaaggcctcctccagcgacggccccacctctcttcctgccagtgacgaagaccccgagggcgccgtcctgcccaaggacaagcttatctccctgtgtcagtgcgaccccatcctcaggtggatgaggagctgcgaccacatcctctaccaggcgctggtggagattctcatccccgacgtgctgaggccggtccccagtaccttgacacaggccatccgtaactttgccaagagcttggaaggctggttgacaaatgccatgagtgacttcccacaacaggtcatccagaccaaggtgggcgtcgtcagtgccttcgcccagacgctgcggcgctacacgtccctcaaccacctggcgcaggcggcccgggcggtgctgcagaacacgtcccagatcaaccagatgctcagcgacctcaaccgcgtggactttgccaacgtgcaggagcaggcctcgtgggtgtgccagtgcgaggagagtgtggtgcagcggctggagcaggatttcaagctgaccctgcagcagcagagctccctggaccagtgggccagctggctggacagtgtggtcacccaggtcctgaagcagcatgccggcagccccagcttccccaaggccgcccggcagttcttgctgaaatggtccttttacagctccatggtgatccgggacctgaccctgcgcagcgctgccagcttcggctccttccacctcatccgcctgctctacgacgagtacatgttctacctggtggagcaccgcgtcgcggaggccaccggagagacgccgatcgctgtgatgggagagttcaacgatctcgcctctctgtcgctgacgctgctcgacaaagatgacatgggcgatgagcagcgtggcagcgaggcgggcccagacgcccgcagcctgggtgagcccctggtaaagcgggagcgcagtgaccccaaccactccctgcagggcatc

SEQ ID NO: 3839 - DNA, 2169 bp, Homo sapiens
  source 1..2169: mol_type = genomic DNA
atgcagaattccgagggtggagcggattcgccagcgtccgtggctctgcgtccctcggcggcagccccgcctgtgccagcctccccgcagagggtgttggtccaggcagccagctccaatcccaaaggggcccagatgcagccgatctccctccccagagttcagcaggtaccccagcaggtgcagccggtgcagcacgtgtatcctgcccaggtgcagtacgtggaagggggagacgccgtctacaccaatggagccatacgaacagcctacacctacaaccccgagcctcagatgtacgcccccagcagcacggcttcttacttcgaggccccaggcggtgcccaggtgaccgtggcagcctcgtccccgccagcggtcccctcccacagcatggtgggcatcaccatggatgtcggggggagccccatcgtctccagcgcgggagcctatctcatccacggggggatggacagcaccagacactccctggcccacacctcccgctcatcgcccgccacgcttgaaatggcgattgaaaacctccaaaaaagcgaaggaatcacatcacacaaaagcggtttactcaacagccatctccagtggctgttggataattatgaaacagcggaaggtgtgagtctccccagaagttctctttacaaccactaccttcggcactgccaggagcacaagctagacccagtgaacgccgcctccttcgggaaactgatccgttctgtgtttatggggctgagaacgcggcggctgggcaccaggggcaactcgaagtaccattactatgggattcgtctgaagccggactcaccactgaaccggctgcaggaggacacgcagtacatggccatgcggcagcagcccatgcaccagaagcccaggtaccggccagcccagaagacggacagcctcggggacagcggctcccacagcggcctgcacagcactccggaacagaccatggccgtgcagagccagcaccaccagcagtacatagatgtctcccacgtcttccccgagttcccagcgcccgacctgggcagcttcctgctgcaggacggcgtcacactgcacgacgtcaaggccctgcagctggtgtacagacggcactgcgaggcaactgtagatgtggtgatgaacctccagttccactacatcgagaagctgtggctctccttctggaactctaaggcctcctccagcgacggccccacctctcttcctgccagtgacgaagaccccgagggcgccgtcctgcccaaggacaagcttatctccctgtgtcagtgcgaccccatcctcaggtggatgaggagctgcgaccacatcctctaccaggcgctggtggagattctcatccccgacgtgctgaggccggtccccagtaccttgacacaggccatccgtaactttgccaagagcttggaaggctggttgacaaatgccatgagtgacttcccacaacaggtcatccagaccaaggtgggcgtcgtcagtgccttcgcccagacgctgcggcgctacacgtccctcaaccacctggcgcaggcggcccgggcggtgctgcagaacacgtcccagatcaaccagatgctcagcgacctcaaccgcgtggactttgccaacgtgcaggagcaggcctcgtgggtgtgccagtgcgaggagagtgtggtgcagcggctggagcaggatttcaagctgaccctgcagcagcagagctccctggaccagtgggccagctggctggacagtgtggtcacccaggtcctgaagcagcatgccggcagccccagcttccccaaggccgcccggcagttcttgctgaaatggtccttttacagctccatggtgatccgggacctgaccctgcgcagcgctgccagcttcggctccttccacctcatccgcctgctctacgacgagtacatgttctacctggtggagcaccgcgtcgcggaggccaccggagagacgccgatcgctgtgatgggagagttcaacgatctcgcctctctgtcgctgacgctgctcgacaaagatgacatgggcgatgagcagcgtggcagcgaggcgggcccagacgcccgcagcctgggtgagcccctggtaaagcgggagcgcagtgaccccaaccactccctgcagggcatc

SEQ ID NO: 3840 - DNA, 2121 bp, Homo sapiens
  source 1..2121: mol_type = genomic DNA
atgcagacatcagagactgggtcggacacaggctcgacagtgaccttacaaacatctgtggctagtcaagcagcagtgcctacgcaggtggtacagcaagtaccagtacaacaacaggtacagcaggtacagactgtgcagcaggtacaacatgtctatcccgctcaggtgcagtatgtggaaggaagcgatactgtctataccaatggagcaatccgaacaacaacgtatccttacacagagacacagatgtacagccaaaatactggagggaattactttgatactcaagggagttccgcccaggtgactaccgtggtctcatcccacagtatggtgggcactggtgggattcagatgggcgtcacaggaggacaactcatcagcagctctggaggaacctatctgatcggcaactcaatggagaattctggtcactcagtgacacacacaactcgggcctccccagcgacaattgaaatggcgattgagacgctgcaaaagtctgacggtctgtccactcacagaagctctcttctcaacagccatctccagtggctgttggacaattatgagacagcagaaggagtgagccttcccagaagcactctgtacaaccactaccttcgacactgtcaggaacacaaactggacccagtcaatgctgcctcttttggaaaattaataagatcaatttttatggggctacgaaccaggagattgggcactagaggaaactccaaataccactactatgggattcgtgtcaagccagattcccctcttaatcgtctgcaagaagacatgcagtatatggctatgagacaacaacccatgcaacagaaacaaaggtacaagcctatgcagaaagtggatggggttgcagatggtttcacaggaagtggtcaacagacaggcacatctgttgagcaaactgtaattgcccaaagccaacatcatcaacagtttttagatgcatctcgagcacttccagagtttggagaagttgaaatctcttctctgccagatggtactacctttgaggatatcaagtcactgcagagtctttatagagagcactgtgaggcaatattggacgttgttgtgaatcttcaatttagcctgatagaaaaattgtggcaaacattctggcgctattctccctctactccaactgatggcactaccattaccgaatcgagcaatctgagtgaaatagaaagtcgacttccgaaagcaaagctgataactctgtgcaaacatgagtctatcctgaaatggatgtgtaactgtgaccatgggatgtaccaggctttggtggagattctcatccccgacgtccttagacctattcctagtgccttgacccaagccattcgaaattttgcaaaaagccttgaaggttggctttccaatgccatgaacaatattccacagagaatgatacaaaccaaggttgccgctgtaagtgcctttgcccagactctgcgaagatacacgtcgcttaatcacctggcccaggcagctcgtgcagtgcttcagaacacttcccaaatcaaccagatgcttagtgacctcaaccgtgtcgactttgccaatgtccaggagcaggcttcctgggtgtgccagtgtgatgacaacatggttcagagactagaaacagacttcaagatgactcttcagcagcagagcaccctggagcagtgggctgcgtggcttgacaatgtgatgatgcaagcactgaaaccctatgaaggaagacccagttttcctaaagccgccaggcagtttctgctaaaatggtctttctacagctcaatggttattcgggacttaaccttacgcagtgctgctagctttggctccttccacctgatccgtctactctacgacgaatatatgttttacttagtagaacatcgtgttgctcaggcaacaggagagactcctatagcagtcatgggcgaggtaagagaggctgaaagagctgtgacccactgggttattaaaaataagccagaattacacttcagtctaaatacattattgattaaaaccatggttcctaaccaagtcagcctcagagccaggagggactgtggagttattgcaagagttcct

SEQ ID NO: 3841 - DNA, 1239 bp, Homo sapiens
  source 1..1239: mol_type = genomic DNA
atgcagacatcagagactgggtcggacacaggctcgacagtgaccttacaaacatctgtggctagtcaagcagcagtgcctacgcaggtggtacagcaagtaccagtacaacaacaggtacagcaggtacagactgtgcagcaggtacaacatgtctatcccgctcaggtgcagtatgtggaaggaagcgatactgtctataccaatggagcaatccgaacaacaacgtatccttacacagagacacagatgtacagccaaaatactggagggaattactttgatactcaagggagttccgcccaggtgactaccgtggtctcatcccacagtatggtgggcactggtgggattcagatgggcgtcacaggaggacaactcatcagcagctctggaggaacctatctgatcggcaactcaatggagaattctggtcactcagtgacacacacaactcgggcctccccagcgacaattgaaatggcgattgagacgctgcaaaagtctgacggtctgtccactcacagaagctctcttctcaacagccatctccagtggctgttggacaattatgagacagcagaaggagtgagccttcccagaagcactctgtacaaccactaccttcgacactgtcaggaacacaaactggacccagtcaatgctgcctcttttggaaaattaataagatcaatttttatggggctacgaaccaggagattgggcactagaggaaactccaaataccactactatgggattcgtgtcaagccagattcccctcttaatcgtctgcaagaagacatgcagtatatggctatgagacaacaacccatgcaacagaaacaaaggtacaagcctatgcagaaagtggatggggttgcagatggtttcacaggaagtggtcaacagacaggcacatctgttgagcaaactgtaattgcccaaagccaacatcatcaacagtttttagatgcatctcgagcacttccagagtttggagaagttgaaatctcttctctgccagatggtactacctttgaggatatcaagtcactgcagagtctttatagagagcactgtgaggcaatattggacgttgttgtgaatcttcaatttagcctgatagaaaaattgtggcaaacattctggcgctattctccctctactccaactgatggcactaccattaccgaatcgaggtcagaatcaacatcttttccaattcattttcatggc

SEQ ID NO: 3842 - DNA, 2247 bp, Homo sapiens
  source 1..2247: mol_type = genomic DNA
atgcagacatcagagactgggtcggacacaggctcgacagtgaccttacaaacatctgtggctagtcaagcagcagtgcctacgcaggtggtacagcaagtaccagtacaacaacaggtacagcaggtacagactgtgcagcaggtacaacatgtctatcccgctcaggtgcagtatgtggaaggaagcgatactgtctataccaatggagcaatccgaacaacaacgtatccttacacagagacacagatgtacagccaaaatactggagggaattactttgatactcaagggagttccgcccaggtgactaccgtggtctcatcccacagtatggtgggcactggtgggattcagatgggcgtcacaggaggacaactcatcagcagctctggaggaacctatctgatcggcaactcaatggagaattctggtcactcagtgacacacacaactcgggcctccccagcgacaattgaaatggcgattgagacgctgcaaaagtctgacggtctgtccactcacagaagctctcttctcaacagccatctccagtggctgttggacaattatgagacagcagaaggagtgagccttcccagaagcactctgtacaaccactaccttcgacactgtcaggaacacaaactggacccagtcaatgctgcctcttttggaaaattaataagatcaatttttatggggctacgaaccaggagattgggcactagaggaaactccaaataccactactatgggattcgtgtcaagccagattcccctcttaatcgtctgcaagaagacatgcagtatatggctatgagacaacaacccatgcaacagaaacaaaggtacaagcctatgcagaaagtggatggggttgcagatggtttcacaggaagtggtcaacagacaggcacatctgttgagcaaactgtaattgcccaaagccaacatcatcaacagtttttagatgcatctcgagcacttccagagtttggagaagttgaaatctcttctctgccagatggtactacctttgaggatatcaagtcactgcagagtctttatagagagcactgtgaggcaatattggacgttgttgtgaatcttcaatttagcctgatagaaaaattgtggcaaacattctggcgctattctccctctactccaactgatggcactaccattaccgaatcgagcaatctgagtgaaatagaaagtcgacttccgaaagcaaagctgataactctgtgcaaacatgagtctatcctgaaatggatgtgtaactgtgaccatgggatgtaccaggctttggtggagattctcatccccgacgtccttagacctattcctagtgccttgacccaagccattcgaaattttgcaaaaagccttgaaggttggctttccaatgccatgaacaatattccacagagaatgatacaaaccaaggttgccgctgtaagtgcctttgcccagactctgcgaagatacacgtcgcttaatcacctggcccaggcagctcgtgcagtgcttcagaacacttcccaaatcaaccagatgcttagtgacctcaaccgtgtcgactttgccaatgtccaggagcaggcttcctgggtgtgccagtgtgatgacaacatggttcagagactagaaacagacttcaagatgactcttcagcagcagagcaccctggagcagtgggctgcgtggcttgacaatgtgatgatgcaagcactgaaaccctatgaaggaagacccagttttcctaaagccgccaggcagtttctgctaaaatggtctttctacagctcaatggttattcgggacttaaccttacgcagtgctgctagctttggctccttccacctgatccgtctactctacgacgaatatatgttttacttagtagaacatcgtgttgctcaggcaacaggagagactcctatagcagtcatgggcgagtttggtgatttaaatgccgtgtctcctggaaatctggataaagatgaaggcagtgaagtagaaagtgaaatggatgaagaactggatgactcttcagagcctcaagccaaaagagagaaaacagagctgagccaggcatttccagtgggctgcatgcagcctgttctcgagactggcgtgcaaccaagcctcctgaatccaattcacagcgagcacattgtcacaagtactcagactatcagacagtgcagcgctacaggaaatacctacactgcagtc

SEQ ID NO: 3843 - DNA, 285 bp, Homo sapiens
  source 1..285: mol_type = genomic DNA
atggacccatctgtgacgctgtggcagtttctgctgcagctgctgagagagcaaggcaatggccacatcatctcctggacttcacgggatggtggtgaattcaagctggtggatgcagaggaggtggcccggctgtgggggctacgcaagaacaagaccaacatgaattacgacaagctcagccgggccttgcggtactactatgacaagaacatcatccgcaaggtgagcggccagaagttcgtctacaagtttgtgtcctaccctgagtcccattgcgccccg

SEQ ID NO: 3844 - DNA, 1293 bp, Homo sapiens
  source 1..1293: mol_type = genomic DNA
atggacagtgctatcaccctgtggcagttccttcttcagctcctgcagaagcctcagaacaagcacatgatctgttggacctctaatgatgggcagtttaagcttttgcaggcagaagaggtggctcgtctctgggggattcgcaagaacaagcctaacatgaattatgacaaactcagccgagccctcagatactattatgtaaagaatatcatcaaaaaagtgaatggtcagaagtttgtgtacaagtttgtctcttatccagagattttgaacatggatccaatgacagtgggcaggattgagggtgactgtgaaagtttaaacttcagtgaagtcagcagcagttccaaagatgtggagaatggagggaaagataaaccacctcagcctggtgccaagacctctagccgcaatgactacatacactctggcttatattcttcatttactctcaactctttgaactcctccaatgtaaagcttttcaaattgataaagactgagaatccagccgagaaactggcagagaaaaaatctcctcaggagcccacaccatctgtcatcaaatttgtcacgacaccttccaaaaagccaccggttgaacctgttgctgccaccatttcaattggcccaagtatttctccatcttcagaagaaactatccaagctttggagacattggtttccccaaaactgccttccctggaagccccaacctctgcctctaacgtaatgactgcttttgccaccacaccacccatttcgtccataccccctttgcaggaacctcccagaacaccttcaccaccactgagttctcacccagacatcgacacagacattgattcagtggcttctcagccaatggaacttccagagaatttgtcactggagcctaaagaccaggattcagtcttgctagaaaaggacaaagtaaataattcatcaagatccaagaaacccaaagggttagaactggcacccacccttgtgatcacgagcagtgatccaagcccactgggaatactgagcccatctctccctacagcttctcttacaccagcatttttttcacagacacccatcatactgactccaagccccttgctctccagtatccacttctggagtactctcagtcctgttgctcccctaagtccagccagactgcaaggtgctaacacacttttccagtttccttctgtactgaacagtcatgggccattcactctgtctgggctggatggaccttccacccctggcccattttccccagacctacagaagaca

SEQ ID NO: 3845 - DNA, 975 bp, Homo sapiens
  source 1..975: mol_type = genomic DNA
atggcgcggcctgtgagcgacaggaccccggcccctctgctgctgggcggcccggccgggacaccccctggcgggggagcgctgcttgggttgcggagccttctgcaggggaccagcaagcccaaagagccggccagctgtctcctgaaggaaaaggagcgcaaggcggccctgcctgcagccacaacccctgggccaggcctggagactgcgggcccggcggatgccccggctggggcagtggtgggcggagggtccccgcgggggcgcccggggccggtgcccgccccgggtctgttggcgccactgctgtgggagcgcacgctgccgttcggcgatgtggagtacgtagacctggacgccttcctgctggagcacgggctcccgcccagcccgccgccccccggtggcccgtcgccggagccgtcgcccgcgcggacgcccgcaccctccccagggccgggttcgtgcggctcggcttccccccgctcctctcctgggcacgcccccgcccgggctgccctcgggaccgccagcggccaccgcgcaggcctgacctctcgggacacacccagccctgtggacccagacaccgtggaggtgttgatgacctttgaacccgacccagctgatcttgccctatcaagcattcctggccacgagacctttgaccctcgaagacatcgcttctcagaagaggaacttaagccccagccaatcatgaagaaggcaagaaaaatccaggtgccggaggagcagaaggatgagaaatactggagccggcggtacaagaacaacgaggcagccaagcggtcccgtgacgcccggcggctcaaggagaaccagatatcggtgcgggcggccttcctggagaaggagaacgccctgctgcggcaggaagttgtggccgtgcgccaggagctgtcccactaccgcgccgtgctgtcccgataccaggcccagcacggggccctg

SEQ ID NO: 3846 - DNA, 1083 bp, Homo sapiens
  source 1..1083: mol_type = genomic DNA
atgcactgcagctgcttggctgagggcatcccagccaaccccggcaactggatctcagggttggccttccctgattgggcctacaaagccgagtcgtccccaggctcccggcagatccagctgtggcacttcatcctggagctgctgcagaaggaagagttccgccatgtcatcgcctggcagcagggagagtacggggaatttgtcatcaaggatccagatgaggtggcccgcctctggggccgcaggaaatgcaaaccacagatgaattatgacaagctgagccgggccctcagatattactacaataagaggatcctgcataagaccaaaggcaaaaggttcacatacaagttcaacttcagcaagctcatcgtagtcaactatcctttgtgggaagtgcgggcgccgccatccccccacttgctgctgggggcccctgccctgtgtcggccagcgctggtgcccgtgggtgtgcagagtgagctcctgcacagcatgctatttgcccatcaggccatggtggagcagctgacaggacagcagaccccccgagggccaccagagacctctggggataagaaggggagcagcagcagcgtctaccgacttggctctgccccaggcccctgccggctgggcctttgctgccatttggggagcgtccaaggcgagctgcctggtgttgcctccttcactcctcccctcccgccccctctgccctccaactggacctgtctctcggggcccttcttgcctcctctcccgtcagagcagcagctcccaggggcttttaagccagacatcctgctcccaggacctaggagcctcccaggggcctggcattttccagggcttcctctcttggcagggctgggacagggtgcgggtgagaggctttggctcttgtccctcaggcccgaggggctggaagtaaagcctgctcccatgatggaggcaaagggaggcctggatcccagggaggtcttctgcccagagacccgcagactcaaaactggggaggaaagccttacttcccccaatctggagaacctcaaagcagtgtggcccttggatcctcct

SEQ ID NO: 3847 - DNA, 1296 bp, Homo sapiens
  source 1..1296: mol_type = genomic DNA
atgatgcaggaatctgcgacagagacaataagcaacagttcaatgaatcaaaatggaatgagcactctaagcagccaattagatgctggcagcagagatggaagatcaagtggtgacaccagctctgaagtaagcacagtagaactgctgcatctgcaacaacagcaggctctccaggcagcaagacaacttcttttacagcagcaaacaagtggattgaaatctcctaagagcagtgataaacagagaccactgcaggtgcctgtgtcagtggccatgatgactccccaggtgatcacccctcagcaaatgcagcagatccttcagcaacaagtcctgtctcctcagcagctacaagcccttctccaacaacagcaggctgtcatgctgcagcagcaacaactacaagagttttacaagaaacagcaagagcagttacatcttcagcttttgcagcagcagcagcaacagcagcagcagcaacaacagcagcaacaacagcagcagcaacaacaacaacaacagcagcaacaacagcagcagcagcagcaacagcagcagcagcagcaacagcatcctggaaagcaagcgaaagagcagcagcagcagcagcagcagcaacagcaattggcagcccagcagcttgtcttccagcagcagcttctccagatgcaacaactccagcagcagcagcatctgctcagccttcagcgtcagggactcatctccattccacctggccaggcagcacttcctgtccaatcgctgcctcaagctggcttaagtcctgctgagattcagcagttatggaaagaagtgactggagttcacagtatggaagacaatggcattaaacatggagggctagacctcactactaacaattcctcctcgactacctcctccaacacttccaaagcatcaccaccaataactcatcattccatagtgaatggacagtcttcagttctaagtgcaagacgagacagctcgtcacatgaggagactggggcctctcacactctctatggccatggagtttgcaaatggccaggctgtgaaagcatttgtgaagattttggacagtttttaaagcaccttaacaatgaacacgcattggatgaccgaagcactgctcagtgtcgagtgcaaatgcaggtggtgcaacagttagaaatacagctttctaaagaacgcgaacgtcttcaagcaatgatgacccacttgcacatgcgaccctcagagcccaaaccatctcccaaacctgtaagtgcatattgctttataaacagtaaa

SEQ ID NO: 3848 - DNA, 2145 bp, Homo sapiens
  source 1..2145: mol_type = genomic DNA
atgatgcaggaatctgcgacagagacaataagcaacagttcaatgaatcaaaatggaatgagcactctaagcagccaattagatgctggcagcagagatggaagatcaagtggtgacaccagctctgaagtaagcacagtagaactgctgcatctgcaacaacagcaggctctccaggcagcaagacaacttcttttacagcagcaaacaagtggattgaaatctcctaagagcagtgataaacagagaccactgcaggtgcctgtgtcagtggccatgatgactccccaggtgatcacccctcagcaaatgcagcagatccttcagcaacaagtcctgtctcctcagcagctacaagcccttctccaacaacagcaggctgtcatgctgcagcagcaacaactacaagagttttacaagaaacagcaagagcagttacatcttcagcttttgcagcagcagcagcaacagcagcagcagcaacaacagcagcaacaacagcagcagcaacaacaacaacaacagcagcaacaacagcagcagcagcagcaacagcagcagcagcagcaacagcatcctggaaagcaagcgaaagagcagcagcagcagcagcagcagcaacagcaattggcagcccagcagcttgtcttccagcagcagcttctccagatgcaacaactccagcagcagcagcatctgctcagccttcagcgtcagggactcatctccattccacctggccaggcagcacttcctgtccaatcgctgcctcaagctggcttaagtcctgctgagattcagcagttatggaaagaagtgactggagttcacagtatggaagacaatggcattaaacatggagggctagacctcactactaacaattcctcctcgactacctcctccaacacttccaaagcatcaccaccaataactcatcattccatagtgaatggacagtcttcagttctaagtgcaagacgagacagctcgtcacatgaggagactggggcctctcacactctctatggccatggagtttgcaaatggccaggctgtgaaagcatttgtgaagattttggacagtttttaaagcaccttaacaatgaacacgcattggatgaccgaagcactgctcagtgtcgagtgcaaatgcaggtggtgcaacagttagaaatacagctttctaaagaacgcgaacgtcttcaagcaatgatgacccacttgcacatgcgaccctcagagcccaaaccatctcccaaacctctaaatctggtgtctagtgtcaccatgtcgaagaatatgttggagacatccccacagagcttacctcaaacccctaccacaccaacggccccagtcaccccgattacccagggaccctcagtaatcaccccagccagtgtgcccaatgtgggagccatacgaaggcgacattcagacaaatacaacattcccatgtcatcagaaattgccccaaactatgaattttataaaaatgcagatgtcagacctccatttacttatgcaactctcataaggcaggctatcatggagtcatctgacaggcagttaacacttaatgaaatttacagctggtttacacggacatttgcttacttcaggcgtaatgcagcaacttggaagaatgcagtacgtcataatcttagcctgcacaagtgttttgttcgagtagaaaatgttaaaggagcagtatggactgtggatgaagtagaataccagaagcgaaggtcacaaaagataacaggaagtccaaccttagtaaaaaatatacctaccagtttaggctatggagcagctcttaatgccagtttgcaggctgccttggcagagagcagtttacctttgctaagtaatcctggactgataaataatgcatccagtggcctactgcaggccgtccacgaagacctcaatggttctctggatcacattgacagcaatggaaacagtagtccgggctgctcacctcagccgcacatacattcaatccacgtcaaggaagagccagtgattgcagaggatgaagactgcccaatgtccttagtgacaacagctaatcacagtccagaattagaagacgacagagagattgaagaagagcctttatctgaagatctggaa

SEQ ID NO: 3849 - DNA, 2220 bp, Homo sapiens
  source 1..2220: mol_type = genomic DNA
atgatgcaggaatctgcgacagagacaataagcaacagttcaatgaatcaaaatggaatgagcactctaagcagccaattagatgctggcagcagagatggaagatcaagtggtgacaccagctctgaagtaagcacagtagaactgctgcatctgcaacaacagcaggctctccaggcagcaagacaacttcttttacagcagcaaacaagtggattgaaatctcctaagagcagtgataaacagagaccactgcaggaattgcttccagaaacaaaattatgtatctgtggccactcttctggtgatgggcatcctcacaacacatttgcagtgcctgtgtcagtggccatgatgactccccaggtgatcacccctcagcaaatgcagcagatccttcagcaacaagtcctgtctcctcagcagctacaagcccttctccaacaacagcaggctgtcatgctgcagcagcaacaactacaagagttttacaagaaacagcaagagcagttacatcttcagcttttgcagcagcagcagcaacagcagcagcagcaacaacagcagcaacaacagcagcagcaacaacaacaacaacagcagcaacaacagcagcagcagcagcaacagcagcagcagcagcaacagcatcctggaaagcaagcgaaagagcagcagcagcagcagcagcagcaacagcaattggcagcccagcagcttgtcttccagcagcagcttctccagatgcaacaactccagcagcagcagcatctgctcagccttcagcgtcagggactcatctccattccacctggccaggcagcacttcctgtccaatcgctgcctcaagctggcttaagtcctgctgagattcagcagttatggaaagaagtgactggagttcacagtatggaagacaatggcattaaacatggagggctagacctcactactaacaattcctcctcgactacctcctccaacacttccaaagcatcaccaccaataactcatcattccatagtgaatggacagtcttcagttctaagtgcaagacgagacagctcgtcacatgaggagactggggcctctcacactctctatggccatggagtttgcaaatggccaggctgtgaaagcatttgtgaagattttggacagtttttaaagcaccttaacaatgaacacgcattggatgaccgaagcactgctcagtgtcgagtgcaaatgcaggtggtgcaacagttagaaatacagctttctaaagaacgcgaacgtcttcaagcaatgatgacccacttgcacatgcgaccctcagagcccaaaccatctcccaaacctctaaatctggtgtctagtgtcaccatgtcgaagaatatgttggagacatccccacagagcttacctcaaacccctaccacaccaacggccccagtcaccccgattacccagggaccctcagtaatcaccccagccagtgtgcccaatgtgggagccatacgaaggcgacattcagacaaatacaacattcccatgtcatcagaaattgccccaaactatgaattttataaaaatgcagatgtcagacctccatttacttatgcaactctcataaggcaggctatcatggagtcatctgacaggcagttaacacttaatgaaatttacagctggtttacacggacatttgcttacttcaggcgtaatgcagcaacttggaagaatgcagtacgtcataatcttagcctgcacaagtgttttgttcgagtagaaaatgttaaaggagcagtatggactgtggatgaagtagaataccagaagcgaaggtcacaaaagataacaggaagtccaaccttagtaaaaaatatacctaccagtttaggctatggagcagctcttaatgccagtttgcaggctgccttggcagagagcagtttacctttgctaagtaatcctggactgataaataatgcatccagtggcctactgcaggccgtccacgaagacctcaatggttctctggatcacattgacagcaatggaaacagtagtccgggctgctcacctcagccgcacatacattcaatccacgtcaaggaagagccagtgattgcagaggatgaagactgcccaatgtccttagtgacaacagctaatcacagtccagaattagaagacgacagagagattgaagaagagcctttatctgaagatctggaa

SEQ ID NO: 3850 - DNA, 2196 bp, Homo sapiens
  source 1..2196: mol_type = genomic DNA
atgatgcaggaatctgcgacagagacaataagcaacagttcaatgaatcaaaatggaatgagcactctaagcagccaattagatgctggcagcagagatggaagatcaagtggtgacaccagctctgaagtaagcacagtagaactgctgcatctgcaacaacagcaggctctccaggcagcaagacaacttcttttacagcagcaaacaagtggattgaaatctcctaagagcagtgataaacagagaccactgcaggtgcctgtgtcagtggccatgatgactccccaggtgatcacccctcagcaaatgcagcagatccttcagcaacaagtcctgtctcctcagcagctacaagcccttctccaacaacagcaggctgtcatgctgcagcaggattttttggattctggattggaaaatttcagagctgccttggaaaaaaatcaacaactacaagagttttacaagaaacagcaagagcagttacatcttcagcttttgcagcagcagcagcaacagcagcagcagcaacaacagcagcaacaacagcagcagcaacaacaacaacaacagcagcaacaacagcagcagcagcagcaacagcagcagcagcagcaacagcatcctggaaagcaagcgaaagagcagcagcagcagcagcagcagcaacagcaattggcagcccagcagcttgtcttccagcagcagcttctccagatgcaacaactccagcagcagcagcatctgctcagccttcagcgtcagggactcatctccattccacctggccaggcagcacttcctgtccaatcgctgcctcaagctggcttaagtcctgctgagattcagcagttatggaaagaagtgactggagttcacagtatggaagacaatggcattaaacatggagggctagacctcactactaacaattcctcctcgactacctcctccaacacttccaaagcatcaccaccaataactcatcattccatagtgaatggacagtcttcagttctaagtgcaagacgagacagctcgtcacatgaggagactggggcctctcacactctctatggccatggagtttgcaaatggccaggctgtgaaagcatttgtgaagattttggacagtttttaaagcaccttaacaatgaacacgcattggatgaccgaagcactgctcagtgtcgagtgcaaatgcaggtggtgcaacagttagaaatacagctttctaaagaacgcgaacgtcttcaagcaatgatgacccacttgcacatgcgaccctcagagcccaaaccatctcccaaacctctaaatctggtgtctagtgtcaccatgtcgaagaatatgttggagacatccccacagagcttacctcaaacccctaccacaccaacggccccagtcaccccgattacccagggaccctcagtaatcaccccagccagtgtgcccaatgtgggagccatacgaaggcgacattcagacaaatacaacattcccatgtcatcagaaattgccccaaactatgaattttataaaaatgcagatgtcagacctccatttacttatgcaactctcataaggcaggctatcatggagtcatctgacaggcagttaacacttaatgaaatttacagctggtttacacggacatttgcttacttcaggcgtaatgcagcaacttggaagaatgcagtacgtcataatcttagcctgcacaagtgttttgttcgagtagaaaatgttaaaggagcagtatggactgtggatgaagtagaataccagaagcgaaggtcacaaaagataacaggaagtccaaccttagtaaaaaatatacctaccagtttaggctatggagcagctcttaatgccagtttgcaggctgccttggcagagagcagtttacctttgctaagtaatcctggactgataaataatgcatccagtggcctactgcaggccgtccacgaagacctcaatggttctctggatcacattgacagcaatggaaacagtagtccgggctgctcacctcagccgcacatacattcaatccacgtcaaggaagagccagtgattgcagaggatgaagactgcccaatgtccttagtgacaacagctaatcacagtccagaattagaagacgacagagagattgaagaagagcctttatctgaagatctggaa

SEQ ID NO: 3851 - DNA, 1362 bp, Homo sapiens
  source 1..1362: mol_type = genomic DNA
atgcccaaccccaggcctggcaagccctcggccccttccttggcccttggcccatccccaggagcctcgcccagctggagggctgcacccaaagcctcagacctgctgggggcccggggcccagggggaaccttccagggccgagatcttcgaggcggggcccatgcctcctcttcttccttgaaccccatgccaccatcgcagctgcagctgcccacactgcccctagtcatggtggcaccctccggggcacggctgggccccttgccccacttacaggcactcctccaggacaggccacatttcatgcaccagctctcaacggtggatgcccacgcccggacccctgtgctgcaggtgcaccccctggagagcccagccatgatcagcctcacaccacccaccaccgccactggggtcttctccctcaaggcccggcctggcctcccacctgggatcaacgtggccagcctggaatgggtgtccagggagccggcactgctctgcaccttcccaaatcccagtgcacccaggaaggacaggtcagtggacagggctgggaaggatcctcgccctcctatcccctcccctgacaccctctgtccccccagcaccctttcggctgtgccccagagctcctacccactgctggcaaatggtgtctgcaagtggcccggatgtgagaaggtcttcgaagagccagaggacttcctcaagcactgccaggcggaccatcttctggatgagaagggcagggcacaatgtctcctccagagagagatggtacagtctctggagcagcagctggtgctggagaaggagaagctgagtgccatgcaggcccacctggctgggaaaatggcactgaccaaggcttcatctgtggcatcatccgacaagggctcctgctgcatcgtagctgctggcagccaaggccctgtcgtcccagcctggtctggcccccgggaggcccctgacagcctgtttgctgtccggaggcacctgtggggtagccatggaaacagcacattcccagagttcctccacaacatggactacttcaagttccacaacatgcgaccccctttcacctacgccacgctcatccgctgggccatcctggaggctccagagaagcagcggacactcaatgagatctaccactggttcacacgcatgtttgccttcttcagaaaccatcctgccacctggaagaacgccatccgccacaacctgagtctgcacaagtgctttgtgcgggtggagagcgagaagggggctgtgtggaccgtggatgagctggagttccgcaagaaacggagccagaggcccagcaggtgttccaaccctacacctggcccc

SEQ ID NO: 3852 - DNA, 1188 bp, Homo sapiens
  source 1..1188: mol_type = genomic DNA
atgcccaaccccaggcctggcaagccctcggccccttccttggcccttggcccatccccaggagcctcgcccagctggagggctgcacccaaagcctcagacctgctgggggcccggggcccagggggaaccttccagggccgagatcttcgaggcggggcccatgcctcctcttcttccttgaaccccatgccaccatcgcagctgcagctctcaacggtggatgcccacgcccggacccctgtgctgcaggtgcaccccctggagagcccagccatgatcagcctcacaccacccaccaccgccactggggtcttctccctcaaggcccggcctggcctcccacctgggatcaacgtggccagcctggaatgggtgtccagggagccggcactgctctgcaccttcccaaatcccagtgcacccaggaaggacagcaccctttcggctgtgccccagagctcctacccactgctggcaaatggtgtctgcaagtggcccggatgtgagaaggtcttcgaagagccagaggacttcctcaagcactgccaggcggaccatcttctggatgagaagggcagggcacaatgtctcctccagagagagatggtacagtctctggagcagcagctggtgctggagaaggagaagctgagtgccatgcaggcccacctggctgggaaaatggcactgaccaaggcttcatctgtggcatcatccgacaagggctcctgctgcatcgtagctgctggcagccaaggccctgtcgtcccagcctggtctggcccccgggaggcccctgacagcctgtttgctgtccggaggcacctgtggggtagccatggaaacagcacattcccagagttcctccacaacatggactacttcaagttccacaacatgcgaccccctttcacctacgccacgctcatccgctgggccatcctggaggctccagagaagcagcggacactcaatgagatctaccactggttcacacgcatgtttgccttcttcagaaaccatcctgccacctggaagaacgccatccgccacaacctgagtctgcacaagtgctttgtgcgggtggagagcgagaagggggctgtgtggaccgtggatgagctggagttccgcaagaaacggagccagaggcccagcaggtgttccaaccctacacctggcccc

SEQ ID NO: 3853 - DNA, 1731 bp, Homo sapiens
  source 1..1731: mol_type = genomic DNA
atgatgacacctcaagttatcactccccagcaaatgcagcagatcctccagcaacaagtgctgagccctcagcagctccaggttctcctccagcagcagcaggccctcatgcttcaacagcagcagcttcaagagttttataaaaaacaacaggaacagttgcagcttcaacttttacaacaacaacatgctggaaaacagcctaaagagcaacagcaggtggctacccagcagttggcttttcagcagcagcttttacagatgcagcagttacagcagcagcacctcctgtctttgcagcgccaaggccttctgacaattcagcccgggcagcctgcccttccccttcaacctcttgctcaaggcatgattccaacagaactgcagcagctctggaaagaagtgacaagtgctcatactgcagaagaaaccacaggcaacaatcacagcagtttggatctgaccacgacatgtgtctcctcctctgcaccttccaagacctccttaataatgaacccacatgcctctaccaatggacagctctcagtccacactcccaaaagggaaagtttgtcccatgaggagcacccccatagccatcctctctatggacatggtgtatgcaagtggccaggctgtgaagcagtgtgcgaagatttccaatcatttctaaaacatctcaacagtgagcatgcgctggacgatagaagtacagcccaatgtagagtacaaatgcaggttgtacagcagttagagctacagcttgcaaaagacaaagaacgcctgcaagccatgatgacccacctgcatgtgaagtctacagaacccaaagccgcccctcagcccttgaatctggtatcaagtgtcactctctccaagtccgcatcggaggcttctccacagagcttacctcatactccaacgaccccaaccgcccccctgactcccgtcacccaaggcccctctgtcatcacaaccaccagcatgcacacggtgggacccatccgcaggcggtactcagacaaatacaacgtgcccatttcgtcagcagatattgcgcagaaccaagaattttataagaacgcagaagttagaccaccatttacatatgcatctttaattaggcaggccattctcgaatctccagaaaagcagctaacactaaatgagatctataactggttcacacgaatgtttgcttacttccgacgcaacgcggccacgtggaagaatgcagtgcgtcataatcttagtcttcacaagtgttttgtgcgagtagaaaacgttaaaggggcagtatggacagtggatgaagtagaattccaaaaacgaaggccacaaaagatcagtggtaacccttcccttattaaaaacatgcagagcagccacgcctactgcacacctctcaatgcagctttacaggcttcaatggctgagaatagtatacctctatacactaccgcttccatgggaaatcccactctgggcaacttagccagcgcaatacgggaagagctgaacggggcaatggagcataccaacagcaacgagagtgacagcagtccaggcagatctcctatgcaagccgtgcatcctgtacacgtcaaagaagagcccctcgatccagaggaagctgaagggcccctgtccttagtgacaacagccaaccacagtccagattttgaccatgacagagattacgaagatgaaccagtaaacgaggacatggag

SEQ ID NO: 3854 - DNA, 2031 bp, Homo sapiens
  source 1..2031: mol_type = genomic DNA
atgatgcaagaatctgggactgagacaaaaagtaacggttcagccatccagaatgggtcgggcggcagcaaccacttactagagtgcggcggtcttcgggaggggcggtccaacggagagacgccggccgtggacatcggggcagctgacctcgcccacgcccagcagcagcagcaacaggcacttcaggtggcaagacagctccttcttcagcagcaacagcagcagcaagttagtggattaaaatctcccaagaggaatgacaaacaaccagctcttcaggttcccgtgtcagtggctatgatgacacctcaagttatcactccccagcaaatgcagcagatcctccagcaacaagtgctgagccctcagcagctccaggttctcctccagcagcagcaggccctcatgcttcaacagcagcagcttcaagagttttataaaaaacaacaggaacagttgcagcttcaacttttacaacaacaacatgctggaaaacagcctaaagagcaacagcaggtggctacccagcagttggcttttcagcagcagcttttacagatgcagcagttacagcagcagcacctcctgtctttgcagcgccaaggccttctgacaattcagcccgggcagcctgcccttccccttcaacctcttgctcaaggcatgattccaacagaactgcagcagctctggaaagaagtgacaagtgctcatactgcagaagaaaccacaggcaacaatcacagcagtttggatctgaccacgacatgtgtctcctcctctgcaccttccaagacctccttaataatgaacccacatgcctctaccaatggacagctctcagtccacactcccaaaagggaaagtttgtcccatgaggagcacccccatagccatcctctctatggacatggtgtatgcaagtggccaggctgtgaagcagtgtgcgaagatttccaatcatttctaaaacatctcaacagtgagcatgcgctggacgatagaagtacagcccaatgtagagtacaaatgcaggttgtacagcagttagagctacagcttgcaaaagacaaagaacgcctgcaagccatgatgacccacctgcatgtgaagtctacagaacccaaagccgcccctcagcccttgaatctggtatcaagtgtcactctctccaagtccgcatcggaggcttctccacagagcttacctcatactccaacgaccccaaccgcccccctgactcccgtcacccaaggcccctctgtcatcacaaccaccagcatgcacacggtgggacccatccgcaggcggtactcagacaaatacaacgtgcccatttcgtcagcagatattgcgcagaaccaagaattttataagaacgcagaagttagaccaccatttacatatgcatctttaattaggcaggccattctcgaatctccagaaaagcagctaacactaaatgagatctataactggttcacacgaatgtttgcttacttccgacgcaacgcggccacgtggaagaatgcagtgcgtcataatcttagtcttcacaagtgttttgtgcgagtagaaaacgttaaaggggcagtatggacagtggatgaagtagaattccaaaaacgaaggccacaaaagatcagtggtaacccttcccttattaaaaacatgcagagcagccacgcctactgcacacctctcaatgcagctttacaggcttcaatggctgagaatagtatacctctatacactaccgcttccatgggaaatcccactctgggcaacttagccagcgcaatacgggaagagctgaacggggcaatggagcataccaacagcaacgagagtgacagcagtccaggcagatctcctatgcaagccgtgcatcctgtacacgtcaaagaagagcccctcgatccagaggaagctgaagggcccctgtccttagtgacaacagccaaccacagtccagattttgaccatgacagagattacgaagatgaaccagtaaacgaggacatggag

SEQ ID NO: 3855 - DNA, 2028 bp, Homo sapiens
  source 1..2028: mol_type = genomic DNA
atgatgcaagaatctgggactgagacaaaaagtaacggttcagccatccagaatgggtcgggcggcagcaaccacttactagagtgcggcggtcttcgggaggggcggtccaacggagagacgccggccgtggacatcggggcagctgacctcgcccacgcccagcagcagcagcaacaggcacttcaggtggcaagacagctccttcttcagcagcaacagcagcagcaagttagtggattaaaatctcccaagaggaatgacaaacaaccagctcttcaggttcccgtgtcagtggctatgatgacacctcaagttatcactccccagcaaatgcagcagatcctccagcaacaagtgctgagccctcagcagctccaggttctcctccagcagcagcaggccctcatgcttcaacagcagcagcttcaagagttttataaaaaacaacaggaacagttgcagcttcaacttttacaacaacaacatgctggaaaacagcctaaagagcaacagcaggtggctacccagcagttggcttttcagcagcagcttttacagatgcagcagttacagcagcagcacctcctgtctttgcagcgccaaggccttctgacaattcagcccgggcagcctgcccttccccttcaacctcttgctcaaggcatgattccaacagaactgcagcagctctggaaagaagtgacaagtgctcatactgcagaagaaaccacaggcaacaatcacagcagtttggatctgaccacgacatgtgtctcctcctctgcaccttccaagacctccttaataatgaacccacatgcctctaccaatggacagctctcagtccacactcccaaaagggaaagtttgtcccatgaggagcacccccatagccatcctctctatggacatggtgtatgcaagtggccaggctgtgaagcagtgtgcgaagatttccaatcatttctaaaacatctcaacagtgagcatgcgctggacgatagaagtacagcccaatgtagagtacaaatgcaggttgtacagcagttagagctacagcttgcaaaagacaaagaacgcctgcaagccatgatgacccacctgcatgtgaagtctacagaacccaaagccgcccctcagcccttgaatctggtatcaagtgtcactctctccaagtccgcatcggaggcttctccacagagcttacctcatactccaacgaccccaaccgcccccctgactcccgtcacccaaggcccctctgtcatcacaaccaccagcatgcacacggtgggacccatccgcaggcggtactcagacaaatacaacgtgcccatttcgtcagatattgcgcagaaccaagaattttataagaacgcagaagttagaccaccatttacatatgcatctttaattaggcaggccattctcgaatctccagaaaagcagctaacactaaatgagatctataactggttcacacgaatgtttgcttacttccgacgcaacgcggccacgtggaagaatgcagtgcgtcataatcttagtcttcacaagtgttttgtgcgagtagaaaacgttaaaggggcagtatggacagtggatgaagtagaattccaaaaacgaaggccacaaaagatcagtggtaacccttcccttattaaaaacatgcagagcagccacgcctactgcacacctctcaatgcagctttacaggcttcaatggctgagaatagtatacctctatacactaccgcttccatgggaaatcccactctgggcaacttagccagcgcaatacgggaagagctgaacggggcaatggagcataccaacagcaacgagagtgacagcagtccaggcagatctcctatgcaagccgtgcatcctgtacacgtcaaagaagagcccctcgatccagaggaagctgaagggcccctgtccttagtgacaacagccaaccacagtccagattttgaccatgacagagattacgaagatgaaccagtaaacgaggacatggag

SEQ ID NO: 3856 - DNA, 1803 bp, Homo sapiens
  source 1..1803: mol_type = genomic DNA
atgatgcaagaatctgggactgagacaaaaagtaacggttcagccatccagaatgggtcgggcggcagcaaccacttactagagtgcggcggtcttcgggaggggcggtccaacggagagacgccggccgtggacatcggggcagctgacctcgcccacgcccagcagcagcagcaacaggcacttcaggtggcaagacagctccttcttcagcagcaacagcagcagcaagttagtggattaaaatctcccaagaggaatgacaaacaaccagctcttcagcaacagcaggtggctacccagcagttggcttttcagcagcagcttttacagatgcagcagttacagcagcagcacctcctgtctttgcagcgccaaggccttctgacaattcagcccgggcagcctgcccttccccttcaacctcttgctcaaggcatgattccaacagaactgcagcagctctggaaagaagtgacaagtgctcatactgcagaagaaaccacaggcaacaatcacagcagtttggatctgaccacgacatgtgtctcctcctctgcaccttccaagacctccttaataatgaacccacatgcctctaccaatggacagctctcagtccacactcccaaaagggaaagtttgtcccatgaggagcacccccatagccatcctctctatggacatggtgtatgcaagtggccaggctgtgaagcagtgtgcgaagatttccaatcatttctaaaacatctcaacagtgagcatgcgctggacgatagaagtacagcccaatgtagagtacaaatgcaggttgtacagcagttagagctacagcttgcaaaagacaaagaacgcctgcaagccatgatgacccacctgcatgtgaagtctacagaacccaaagccgcccctcagcccttgaatctggtatcaagtgtcactctctccaagtccgcatcggaggcttctccacagagcttacctcatactccaacgaccccaaccgcccccctgactcccgtcacccaaggcccctctgtcatcacaaccaccagcatgcacacggtgggacccatccgcaggcggtactcagacaaatacaacgtgcccatttcgtcagcagatattgcgcagaaccaagaattttataagaacgcagaagttagaccaccatttacatatgcatctttaattaggcaggccattctcgaatctccagaaaagcagctaacactaaatgagatctataactggttcacacgaatgtttgcttacttccgacgcaacgcggccacgtggaagaatgcagtgcgtcataatcttagtcttcacaagtgttttgtgcgagtagaaaacgttaaaggggcagtatggacagtggatgaagtagaattccaaaaacgaaggccacaaaagatcagtggtaacccttcccttattaaaaacatgcagagcagccacgcctactgcacacctctcaatgcagctttacaggcttcaatggctgagaatagtatacctctatacactaccgcttccatgggaaatcccactctgggcaacttagccagcgcaatacgggaagagctgaacggggcaatggagcataccaacagcaacgagagtgacagcagtccaggcagatctcctatgcaagccgtgcatcctgtacacgtcaaagaagagcccctcgatccagaggaagctgaagggcccctgtccttagtgacaacagccaaccacagtccagattttgaccatgacagagattacgaagatgaaccagtaaacgaggacatggag

SEQ ID NO: 3857 - DNA, 2037 bp, Homo sapiens
  source 1..2037: mol_type = genomic DNA
atgttccagtgtgttttctcttcgagtgtgcttcagccgcacagtacttcctgtttattcaaacatcttttttaccactcggcaacccccgcttcgcagaaacagccagaacccatctacagcaagaagacggaaatccaaaggcagacagtacgggctcccttcgccaaactcttcattttctctgcacttcaggtggcaagacagctccttcttcagcagcaacagcagcagcaagttagtggattaaaatctcccaagaggaatgacaaacaaccagctcttcaggttcccgtgtcagtggctatgatgacacctcaagttatcactccccagcaaatgcagcagatcctccagcaacaagtgctgagccctcagcagctccaggttctcctccagcagcagcaggccctcatgcttcaacagcagcagcttcaagagttttataaaaaacaacaggaacagttgcagcttcaacttttacaacaacaacatgctggaaaacagcctaaagagcaacagcaggtggctacccagcagttggcttttcagcagcagcttttacagatgcagcagttacagcagcagcacctcctgtctttgcagcgccaaggccttctgacaattcagcccgggcagcctgcccttccccttcaacctcttgctcaaggcatgattccaacagaactgcagcagctctggaaagaagtgacaagtgctcatactgcagaagaaaccacaggcaacaatcacagcagtttggatctgaccacgacatgtgtctcctcctctgcaccttccaagacctccttaataatgaacccacatgcctctaccaatggacagctctcagtccacactcccaaaagggaaagtttgtcccatgaggagcacccccatagccatcctctctatggacatggtgtatgcaagtggccaggctgtgaagcagtgtgcgaagatttccaatcatttctaaaacatctcaacagtgagcatgcgctggacgatagaagtacagcccaatgtagagtacaaatgcaggttgtacagcagttagagctacagcttgcaaaagacaaagaacgcctgcaagccatgatgacccacctgcatgtgaagtctacagaacccaaagccgcccctcagcccttgaatctggtatcaagtgtcactctctccaagtccgcatcggaggcttctccacagagcttacctcatactccaacgaccccaaccgcccccctgactcccgtcacccaaggcccctctgtcatcacaaccaccagcatgcacacggtgggacccatccgcaggcggtactcagacaaatacaacgtgcccatttcgtcagcagatattgcgcagaaccaagaattttataagaacgcagaagttagaccaccatttacatatgcatctttaattaggcaggccattctcgaatctccagaaaagcagctaacactaaatgagatctataactggttcacacgaatgtttgcttacttccgacgcaacgcggccacgtggaagaatgcagtgcgtcataatcttagtcttcacaagtgttttgtgcgagtagaaaacgttaaaggggcagtatggacagtggatgaagtagaattccaaaaacgaaggccacaaaagatcagtggtaacccttcccttattaaaaacatgcagagcagccacgcctactgcacacctctcaatgcagctttacaggcttcaatggctgagaatagtatacctctatacactaccgcttccatgggaaatcccactctgggcaacttagccagcgcaatacgggaagagctgaacggggcaatggagcataccaacagcaacgagagtgacagcagtccaggcagatctcctatgcaagccgtgcatcctgtacacgtcaaagaagagcccctcgatccagaggaagctgaagggcccctgtccttagtgacaacagccaaccacagtccagattttgaccatgacagagattacgaagatgaaccagtaaacgaggacatggag

SEQ ID NO: 3858 - DNA, 2079 bp, Homo sapiens
  source 1..2079: mol_type = genomic DNA
atgatgcaagaatctgggactgagacaaaaagtaacggttcagccatccagaatgggtcgggcggcagcaaccacttactagagtgcggcggtcttcgggaggggcggtccaacggagagacgccggccgtggacatcggggcagctgacctcgcccacgcccagcagcagcagcaacaggcacttcaggtggcaagacagctccttcttcagcagcaacagcagcagcaagttagtggattaaaatctcccaagaggaatgacaaacaaccagctcttcaggttcccgtgtcagtggctatgatgacacctcaagttatcactccccagcaaatgcagcagatcctccagcaacaagtgctgagccctcagcagctccaggttctcctccagcagcagcaggccctcatgcttcaacagcagcagcttcaagagttttataaaaaacaacaggaacagttgcagcttcaacttttacaacaacaacatgctggaaaacagcctaaagagcaacagcaggtggctacccagcagttggcttttcagcagcagcttttacagatgcagcagttacagcagcagcacctcctgtctttgcagcgccaaggccttctgacaattcagcccgggcagcctgcccttccccttcaacctcttgctcaaggcatgattccaacagaactgcagcagctctggaaagaagtgacaagtgctcatactgcagaagaaaccacaggcaacaatcacagcagtttggatctgaccacgacatgtgtctcctcctctgcaccttccaagacctccttaataatgaacccacatgcctctaccaatggacagctctcagtccacactcccaaaagggaaagtttgtcccatgaggagcacccccatagccatcctctctatggacatggtgtatgcaagtggccaggctgtgaagcagtgtgcgaagatttccaatcatttctaaaacatctcaacagtgagcatgcgctggacgatagaagtacagcccaatgtagagtacaaatgcaggttgtacagcagttagagctacagcttgcaaaagacaaagaacgcctgcaagccatgatgacccacctgcatgtgaagtctacagaacccaaagccgcccctcagcccttgaatctggtatcaagtgtcactctctccaagtccgcatcggaggcttctccacagagcttacctcatactccaacgaccccaaccgcccccctgactcccgtcacccaaggcccctctgtcatcacaaccaccagcatgcacacggtgggacccatccgcaggcggtactcagacaaatacaacgtgcccatttcgtcagcagatattgcgcagaaccaagaattttataagaacgcagaagttagaccaccatttacatatgcatctttaattaggcaggccattctcgaatctccagaaaagcagctaacactaaatgagatctataactggttcacacgaatgtttgcttacttccgacgcaacgcggccacgtggaagggtgccattcgcaccaacctctcactgcataagtgctttatcagagtagaggatgagtttgggtccttttggacagttgatgatgaagagtttaaacgtggccgccatattcaacgaggccgtcctcgcaaatactgccccgatgaaaactttgacgagcttgtcgcacataacccttcccttattaaaaacatgcagagcagccacgcctactgcacacctctcaatgcagctttacaggcttcaatggctgagaatagtatacctctatacactaccgcttccatgggaaatcccactctgggcaacttagccagcgcaatacgggaagagctgaacggggcaatggagcataccaacagcaacgagagtgacagcagtccaggcagatctcctatgcaagccgtgcatcctgtacacgtcaaagaagagcccctcgatccagaggaagctgaagggcccctgtccttagtgacaacagccaaccacagtccagattttgaccatgacagagattacgaagatgaaccagtaaacgaggacatggag

SEQ ID NO: 3859 - DNA, 3306 bp, Homo sapiens
  source 1..3306: mol_type = genomic DNA
atgttccaacttcctgtcaacaatcttggcagtttaagaaaagcccggaaaactgtgaaaaaaatacttagtgacattgggttggaatactgtaaagaacatatagaagattttaaacaatttgaacctaatgacttttatttgaaaaacactacatgggaggatgtaggactgtgggacccatcacttacgaaaaaccaggactatcggacaaaacctttctgctgcagcgcttgtccattttcctcaaaattcttctctgcctacaaaagtcatttccgcaatgtccatagtgaagactttgaaaataggattctccttaattgcccctactgtaccttcaatgcagacaaaaagactttggaaacacacattaaaatatttcatgctccgaacgccagcgcaccaagtagcagcctcagcactttcaaagataaaaacaaaaatgatggccttaaacctaagcaggctgacagtgtagagcaagctgtttattactgtaagaagtgcacttaccgagatcctctttatgaaatagttaggaagcacatttacagggaacattttcagcatgtggcagcaccttacatagcaaaggcaggagaaaaatcactcaatggggcagtccccttaggctcgaatgcccgagaagagagtagtattcactgcaagcgatgccttttcatgccaaagtcctatgaagctttggtacagcatgtcatcgaagaccatgaacgtataggctatcaggtcactgccatgattgggcacacaaatgtagtggttccccgatccaaacccttgatgctaattgctcccaaacctcaagacaagaagagcatgggactcccaccaaggatcggttcccttgcttctggaaatgtccggtctttaccatcacagcagatggtgaatcgactctcaataccaaagcctaacttaaattctacaggagtcaacatgatgtccagtgttcatctgcagcagaacaactatggagtcaaatctgtaggccagggttacagtgttggtcagtcaatgagactgggtctaggtggcaacgcaccagtttccattcctcaacaatctcagtctgtaaagcagttacttccaagtggaaacggaaggtcttatgggcttgggtcagagcagaggtcccaggcaccagcaagatactccctgcagtctgctaatgcctcttctctctcatcgggccagttaaagtctccttccctctctcagtcacaggcatccagagtgttaggtcagtccagttccaaacctgctgcagctgccacaggccctcccccaggtaacacttcctcaactcaaaagtggaaaatatgtacaatctgtaatgagctttttcctgaaaatgtctatagtgtgcacttcgaaaaagaacataaagctgagaaagtcccagcagtagccaactacattatgaaaatacacaattttactagcaaatgcctctactgtaatcgctatttacccacagatactctgctcaaccatatgttaattcatggtctgtcttgtccatattgccgttcaactttcaatgatgtggaaaagatggccgcacacatgcggatggttcacattgatgaagagatgggacctaaaacagattctactttgagttttgatttgacattgcagcagggtagtcacactaacatccatctcctggtaactacatacaatctgagggatgccccagctgaatctgttgcttaccatgcccaaaataatcctccagttcctccaaagccacagccaaaggttcaggaaaaggcagatatccctgtaaaaagttcacctcaagctgcagtgccctataaaaaagatgttgggaaaaccctttgtcctctttgcttttcaatcctaaaaggacccatatctgatgcacttgcacatcacttacgagagaggcaccaagttattcagacggttcatccagttgagaaaaagctcacctacaaatgtatccattgccttggtgtgtataccagcaacatgaccgcctcaactatcactctgcatctagttcactgcaggggcgttggaaagacccaaaatggccaggataagacaaatgcaccctctcggcttaatcagtctccaagtctggcacctgtgaagcgcacttacgagcaaatggaatttcccttactgaaaaaacgaaagttagatgatgatagtgattcacccagcttctttgaagagaagcctgaagagcctgttgttttagctttagaccccaagggtcatgaagatgattcctatgaagccaggaaaagctttctaacaaagtatttcaacaaacagccctatcccaccaggagagaaattgagaagctagcagccagtttatggttatggaagagtgacatcgcttcccattttagtaacaaaaggaagaagtgtgtccgtgattgtgaaaagtacaagcctggcgtgttgctggggtttaacatgaaagaattaaataaagtcaagcatgagatggattttgatgctgagtggctatttgaaaatcatgatgagaaggattccagagtcaatgctagtaagactgctgacaaaaagctcaaccttgggaaggaagatgacagttcctcagacagttttgaaaatttggaagaagaatccaatgaaagtggtagcccttttgaccctgtttttgaagttgaacctaaaatctctaacgataacccagaggaacatgtactgaaggtaattcctgaggatgcttcagaatctgaggagaagctagaccaaaaagaggatggttcaaaatacgaaactattcatttgactgaggaaccaaccaaactaatgcacaatgcatctgatagtgaggttgaccaagacgatgttgttgagtggaaagacggtgcttctccatctgagagtgggcctggatcccaacaagtgtcagactttgaggacaatacctgcgaaatgaaaccaggaacctggtctgacgagtcttcccaaagcgaagatgcaaggagcagtaagccagctgccaaaaaaaaggctaccatgcaaggtgacagagagcagttgaaatggaagaatagttcctatggaaaagttgaagggttttggtctaaggaccagtcacagtggaagaatgcatctgagaatgatgagcgcttatctaacccccagattgagtggcagaatagcacaattgacagtgaggatggggaacagtttgacaacatgactgatggagtagctgagcccatgcatggcagcttagccggagttaaactgagcagccaacaggcc

SEQ ID NO: 3860 - DNA, 2001 bp, Homo sapiens
  source 1..2001: mol_type = genomic DNA
atgatggtggaatctgcctcggagacaatcaggtcggctccatctggtcagaatggcgtgggcagcctctctgggcaagccgatggcagcagcggcggggccacagggacaactgcaagtggcacgggcagggaagtgaccacgggtgcagacagcaatggtgagatgagtcccgcagagctgctgcacttccagcagcaacaggctctccaagtggcccggcagttcctgctgcagcaggcctcaggcctgagctccccagggaacaatgacagcaaacagtctgcctctgctgtgcaggtgcctgtgtcggtggccatgatgtcgccgcagatgcttaccccgcaacagatgcagcagatcctgtcgcccccgcagctgcaggccttgctccagcagcagcaagccctcatgctccagcagctacaggagtactacaagaagcagcaggagcagctccacctgcagctcctcacccagcagcaggctgggaaaccgcagcccaaagaggcactggggaacaagcagctggccttccagcagcagctcctgcaaatgcaacagttgcagcagcagcacctgctcaacctgcagaggcaggggctggtcagcctgcagcccaaccaagcctcggggcccctccagacccttccgcaagctgtttgcccaacagacctgccccagctgtggaagggcgagggtgcccccgggcagcctgccgaggacagcgtcaagcaggaggggctggacctcactggcacggccgccaccgctacctcgtttgccgctccccccaaggtctcaccccccctctcccaccataccctgcccaacggacagcctactgtgctcacatctcggagagacagctcttcccacgaggagacccccggctcccaccccctgtacggacacggagagtgcaagtggccaggctgtgagaccctgtgtgaagacctgggccagtttatcaaacacctcaacacagagcacgccctggatgaccggagtacagcccagtgccgggtacagatgcaggtggtgcagcagctggagatccagctcgccaaggagagcgagcggctgcaggccatgatggcccacctgcacatgcggccctcggagcccaagcccttcagccagccagtgaccgtctctgcagcagactcattcccagatggtctcgtgcaccccccgacctcggccgcagcccctgtcacccctctacggccccctggcctgggctctgcctccctgcatggtgggggcccagcccgtcggagaagcagtgacaagttctgctcccccatctcctcagagctggcccagaatcatgagttctacaagaacgccgacgtccggccccccttcacctacgcctccctcatccgccaggccatcctggaaacccctgacaggcagctgaccctgaatgagatctataactggttcaccaggatgttcgcctatttccgcagaaacactgccacctggaagaacgccgtgcgccacaacctcagcctgcacaagtgcttcgtccgcgtggagaacgtcaagggtgccgtgtggactgtggacgagcgggagtatcagaagcggagaccgccaaagatgacagggagccccaccctggtgaagaacatgatctctggcctcagctatggagcacttaatgccagctaccaggccgccctggccgagagcagcttccccctcctcaacagccctggcatgctgaaccctggctccgccagcagcctgctgcccctcagccacgatgacgtgggtgcccccgtggagccgctgcccagcaacggcagcagcagccctcctcgcctctccccgccccagtacagccaccaggtgcaggtgaaggaggagccagcagaggcagaggaagacaggcagcccgggcctcccctgggcgcccctaaccccagcgcctcggggcctccggaagacagggacctggaggaggagctgccgggagaagaactgtcc

SEQ ID NO: 3861 - DNA, 2034 bp, Homo sapiens
  source 1..2034: mol_type = genomic DNA
atgatggtggaatctgcctcggagacaatcaggtcggctccatctggtcagaatggcgtgggcagcctctctgggcaagccgatggcagcagcggcggggccacagggacaactgcaagtggcacgggcagggaagtgaccacgggtgcagacagcaatggtgagatgagtcccgcagagctgctgcacttccagcagcaacaggctctccaagtggcccggcagttcctgctgcagcaggcctcaggcctgagctccccagggaacaatgacagcaaacagtctgcctctgctgtgcaggtgcctgtgtcggtggccatgatgtcgccgcagatgcttaccccgcaacagatgcagcagatcctgtcgcccccgcagctgcaggccttgctccagcagcagcaagccctcatgctccagcaggagtactacaagaagcagcaggagcagctccacctgcagctcctcacccagcagcaggctgggaaaccgcagcccaaagaggcactggggaacaagcagctggccttccagcagcagctcctgcaaatgcaacagttgcagcagcagcacctgctcaacctgcagaggcaggggctggtcagcctgcagcccaaccaagcctcggggcccctccagacccttccgcaagcagctgtttgcccaacagacctgccccagctgtggaagggcgagggtgcccccgggcagcctgccgaggacagcgtcaagcaggaggggctggacctcactggcacggccgccaccgctacctcgtttgccgctccccccaaggtctcaccccccctctcccaccataccctgcccaacggacagcctactgtgctcacatctcggagagacagctcttcccacgaggagacccccggctcccaccccctgtacggacacggagagtgcaagtggccaggctgtgagaccctgtgtgaagacctgggccagtttatcaaacacctcaacacagagcacgccctggatgaccggagtacagcccagtgccgggtacagatgcaggtggtgcagcagctggagatccagctcgccaaggagagcgagcggctgcaggccatgatggcccacctgcacatgcggccctcggagcccaagcccttcagccagccactgaacccggtccccggctcctcctcattctccaaggtgaccgtctctgcagcagactcattcccagatggtctcgtgcaccccccgacctcggccgcagcccctgtcacccctctacggccccctggcctgggctctgcctccctgcatggtgggggcccagcccgtcggagaagcagtgacaagttctgctcccccatctcctcagagctggcccagaatcatgagttctacaagaacgccgacgtccggccccccttcacctacgcctccctcatccgccaggccatcctggaaacccctgacaggcagctgaccctgaatgagatctataactggttcaccaggatgttcgcctatttccgcagaaacactgccacctggaagaacgccgtgcgccacaacctcagcctgcacaagtgcttcgtccgcgtggagaacgtcaagggtgccgtgtggactgtggacgagcgggagtatcagaagcggagaccgccaaagatgacagggagccccaccctggtgaagaacatgatctctggcctcagctatggagcacttaatgccagctaccaggccgccctggccgagagcagcttccccctcctcaacagccctggcatgctgaaccctggctccgccagcagcctgctgcccctcagccacgatgacgtgggtgcccccgtggagccgctgcccagcaacggcagcagcagccctcctcgcctctccccgccccagtacagccaccaggtgcaggtgaaggaggagccagcagaggcagaggaagacaggcagcccgggcctcccctgggcgcccctaaccccagcgcctcggggcctccggaagacagggacctggaggaggagctgccgggagaagaactgtcc

SEQ ID NO: 3862 - DNA, 2040 bp, Homo sapiens
  source 1..2040: mol_type = genomic DNA
atgatggtggaatctgcctcggagacaatcaggtcggctccatctggtcagaatggcgtgggcagcctctctgggcaagccgatggcagcagcggcggggccacagggacaactgcaagtggcacgggcagggaagtgaccacgggtgcagacagcaatggtgagatgagtcccgcagagctgctgcacttccagcagcaacaggctctccaagtggcccggcagttcctgctgcagcaggcctcaggcctgagctccccagggaacaatgacagcaaacagtctgcctctgctgtgcaggtgcctgtgtcggtggccatgatgtcgccgcagatgcttaccccgcaacagatgcagcagatcctgtcgcccccgcagctgcaggccttgctccagcagcagcaagccctcatgctccagcagctacaggagtactacaagaagcagcaggagcagctccacctgcagctcctcacccagcagcaggctgggaaaccgcagcccaaagaggcactggggaacaagcagctggccttccagcagcagctcctgcaaatgcaacagttgcagcagcagcacctgctcaacctgcagaggcaggggctggtcagcctgcagcccaaccaagcctcggggcccctccagacccttccgcaagcagctgtttgcccaacagacctgccccagctgtggaagggcgagggtgcccccgggcagcctgccgaggacagcgtcaagcaggaggggctggacctcactggcacggccgccaccgctacctcgtttgccgctccccccaaggtctcaccccccctctcccaccataccctgcccaacggacagcctactgtgctcacatctcggagagacagctcttcccacgaggagacccccggctcccaccccctgtacggacacggagagtgcaagtggccaggctgtgagaccctgtgtgaagacctgggccagtttatcaaacacctcaacacagagcacgccctggatgaccggagtacagcccagtgccgggtacagatgcaggtggtgcagcagctggagatccagctcgccaaggagagcgagcggctgcaggccatgatggcccacctgcacatgcggccctcggagcccaagcccttcagccagccactgaacccggtccccggctcctcctcattctccaaggtgaccgtctctgcagcagactcattcccagatggtctcgtgcaccccccgacctcggccgcagcccctgtcacccctctacggccccctggcctgggctctgcctccctgcatggtgggggcccagcccgtcggagaagcagtgacaagttctgctcccccatctcctcagagctggcccagaatcatgagttctacaagaacgccgacgtccggccccccttcacctacgcctccctcatccgccaggccatcctggaaacccctgacaggcagctgaccctgaatgagatctataactggttcaccaggatgttcgcctatttccgcagaaacactgccacctggaagaacgccgtgcgccacaacctcagcctgcacaagtgcttcgtccgcgtggagaacgtcaagggtgccgtgtggactgtggacgagcgggagtatcagaagcggagaccgccaaagatgacagggagccccaccctggtgaagaacatgatctctggcctcagctatggagcacttaatgccagctaccaggccgccctggccgagagcagcttccccctcctcaacagccctggcatgctgaaccctggctccgccagcagcctgctgcccctcagccacgatgacgtgggtgcccccgtggagccgctgcccagcaacggcagcagcagccctcctcgcctctccccgccccagtacagccaccaggtgcaggtgaaggaggagccagcagaggcagaggaagacaggcagcccgggcctcccctgggcgcccctaaccccagcgcctcggggcctccggaagacagggacctggaggaggagctgccgggagaagaactgtcc

SEQ ID NO: 3863 - DNA, 1572 bp, Homo sapiens
  source 1..1572: mol_type = genomic DNA
atggctaaaagaccaggaccccctggaagccgagaaatgggactgttgacattcagagacatagctatagaattctctctggaggaatggcaatgcctggattgtgctcagcggaatttatatagagatgtgatgttagagaactacagaaacctggtctccctgggtattgctgtctctaagccagacttgatcacctgtctggagcaaaataaagagtcccagaatataaagagaaatgagatggtagccaaacacccagttacgcgttcccatttcacccaagaccttcagccagagcagggcatcaaagattcactccaaaaagtaataccaagaacatatggaaaatgtggacatgagaaattacaatttaaaaaatgctgtaaaagtgtgggtgaatatgaggtgcacaagggaggttatagtgaagttaaccaatgtttgtcaactacccaaaacaaaatatttcagactcataaatatgtcaaagtctttggtaaattttcaaattccaatagagataaaacaagatatactggaaataaacatttcaaatgtaacaaatatggcaaatcattttgcatgctttcacacctaaatcaacatcaggtaattcatactagggagaagtcctacaaatgcaaagaatgtggcaaatcctttaactgctcctcaaaccatactacacataaaataattcatactggagagaaaccatatagatgtgaggaatgtggcaaagcctttagctggtctgcaaaccttactagacataagagaactcatactggagagaaaccctacacgtgtgaagaatgtggccaagcctttaggcgctcctcagcacttactaaccacaagagaattcatactggagagagaccctacaaatgtgaagaatgtggcaaagcctttagcgtatcctcaaccctcactgaccacaagagaattcatactggagagaaaccctgcaggtgtgaggaatgtggcaaagcctttagctggtcctcaaaccttactagacataagagaattcatactagagagaaaccctatgcctgtgaagaatgtggccaagcctttagcttatcctcgaaccttatgagacataggagaattcatactggagagaaaccctacacatgtgaagaatgtggccaagactttaggcgctcctcagcacttactatccacaagagaattcatactggagagagaccctacaaatgtgaagagtgtggcaaagtctttagcttatcctcaaccctcactgaccacaagagaattcatactggagagagaccctacaaatgtgaagaatgtggcaaagcctttagcttatcctcaaccctcactgaccacaagagaattcatactggagagagaccctacacatgtgaagaatgtggcaaagcctttaattgctcctcaacccttatgcaacataagagaattcatactggagagaaaccctacaaatgtgaagaatgtgagcaagcttttaagtggcattcaagtcttgctaaacataagataattcacactggagagaaaccctacaaatgtgaa

SEQ ID NO: 3864 - DNA, 3801 bp, Homo sapiens
  source 1..3801: mol_type = genomic DNA
atgggggatatgaaaaccccagattttgatgaccttctggctgcctttgacatcccagaccccaccagccttgatgccaaggaggccatccagacacccagtgaggagaatgagagtcccctcaaacctccaggcatatgtatggatgaaagtgtgtccttgtctcactcaggatcagcccccgatgtgccggccgtgagtgtcattgtcaagaacaccagccgccaggagtcatttgaagcggagaaagaccacattactcccagtctcctacacaatggattccggggctcagatctgcctccagatccccacaactgtgggaaatttgattctacttttatgaatggagacagtgccaggagtttccctggcaaactggagcctcccaagtcagagccattacccaccttcaaccagttcagtccaatctccagcccagaacctgaggatcccatcaaagataacggatttgggataaagcccaaacactctgacagttatttcccaccccctcttgggtgcggggctgtgggaggcccagtcctggaggctctggctaagtttccggttccagagctgcatatgtttgatcatttttgtaagaaagaacccaagccagaacccctgcccttggggagccagcaggaacacgagcaaagtgggcagaacacagtggaacctcacaaggatccggatgccactcgattcttcggggaagctttggagttcaacagccatcctagcaacagtattggagagtccaaggggcttgcccgggagcttggtacctgctcatcagtcccccctaggcagcgtctaaagccagctcattccaagctgtcctcttgtgtggcagccttggtggccttgcaggccaaaagagtggctagtgtcactaaggaggatcagcctggccacacaaaggatctctcagggcccactaaagagagttctaaaggtagccccaaaatgcccaagtcaccaaagagtccccggagccctctggaggccactagaaaaagtatcaagccatcggacagccctcgtagcatctgcagtgacagcagcagcaaaggctcaccgtctgtggctgccagctccccaccagcaattcccaaagtgagaatcaaaaccattaagacatcatcaggggaaatcaaacggactgtcacaaggatcctgccagatcctgatgatccaagtaagtcccctgttgggtcacctctagggagcgccattgcagaggcccccagcgagatgccaggggatgaggtgcctgtggaagagcactttcctgaggcaggcacaaattcagggagcccccagggggccaggaaaggggacgagagcatgacaaaggccagtgactcgtcatctcccagctgcagttctgggccccgggtcccaaagggggctgccccaggctcacagacaggcaagaagcaacagagcacagcactgcaggcatccaccctggcccctgccaacctcctgcccaaagccgtgcacttggccaacctgaacctcgtcccccacagtgttgctgcatcagtgacagccaagtcttcagtgcaaagacggagccagccacagcttacacaaatgtcggtgcccctggtccaccaggtgaaaaaggctgccccactgattgtagaggtcttcaacaaggtccttcacagctccaaccccgtgcccctctatgcgccaaatctcagcccgcctgcggacagcaggatccacgtgccggccagtgggtactgctgcctggagtgtggagacgcatttgccttagagaagagcctgagccagcactatggccggcggagcgtccacattgaggtactgtgcacactgtgctccaagacgctgctcttcttcaacaagtgcagcctgctccggcacgcccgtgaccacaagagcaaggggctcgtcatgcagtgttcccagctgctggtgaagcctatctctgcggaccaaatgttcgtgtcggcccctgtgaactccacggcaccagcagccccagccccttcatcctctcccaaacatggcctcacttcgggcagtgccagtccccctcctccagccttgccactctacccagaccctgtgaggctcatccggtactcaatcaagtgtcttgaatgtcacaagcagatgcgggactacatggtcctggctgcacatttccagaggacaacagaggagacagaggggctgacctgccaggtatgccaaatgctgctgcccaaccagtgcagtttctgtgcccaccagcggattcatgcacacaagtccccctactgctgcccggagtgtggggtcctctgccgctctgcctacttccagacccatgtaaaggagaattgcctgcactatgcccgcaaggtgggctacaggtgcatccactgtggtgtcgtccacctgaccttggccttgctgaaaagccacatccaggagcgacactgccaggttttccacaaatgtgcattctgccccatggccttcaagactgccagcagcactgcagaccacagtgccacccagcaccccacccagccccacagaccctcccagctcatttataagtgctcctgtgaaatggtcttcaacaagaagaggcacattcagcagcatttttaccagaatgtcagcaagacgcaggtgggcgtcttcaagtgccctgagtgcccactcttgttcgtgcagaagccggagttgatgcaacacgtcaagagcacccacggtgttccccgaaatgtggacgagctgtcaagcctccagtcttcagcggacacatcctcaagccgccctggctctcgagttcccactgagccaccagccactagtgtggctgctcggagcagctccctgccttctggccgctggggtaggcctgaagcccaccgcagggtggaagccaggccgcggctgaggaacactggctggacctgccaggagtgccaggagtgggttccagatcgggagagctacgtgtcccacatgaaaaagagccacggtcggacattgaagcggtacccatgccggcagtgtgaacagtccttccacacccccaacagcctgcgcaaacacatccgcaacaaccatgacacagtaaagaagttctacacctgcgggtactgcacagaggacagccccagctttcctcggccctcccttctggagagccacatcagccttatgcatggcatcagaaaccctgatttgagccagacgtccaaagtgaaacctccgggtggacattcccctcaggtgaaccatctgaaaagaccagtcagtggagtgggggacgctccaggcaccagcaatggcgcaactgtctcttccaccaaaaggcacaagtccctttttcagtgcgcgaaatgtagttttgccacagactcggggctcgagtttcagagccacatacctcagcaccaggtggacagctccacagcccaatgtctcctctgtggtttgtgctacacctctgccagctccctcagccgccacctcttcattgtccacaaggtgagagaccaggaggaggaggaggaagaggaggcggcggcagcggagatggcagtggaggtggcagagccagaggagggctccggggaggaggtgcccatggagactagagagaatggactggaagaatgtgccggtgagcctttgtcagctgacccagaggcgaggagattgctgggcccggcccctgaggacgatggtggccacaatgatcacagtcaaccacaggcctctcaggaccaggacagccacacactgtcccctcaggtg

SEQ ID NO: 3865 - DNA, 468 bp, Homo sapiens
  source 1..468: mol_type = genomic DNA
atgggtcgctcccgccggacaggcgcgcaccgagcgcactctctagcccggcagatgaaggcgaagcggcggcggccggacttggatgagattcaccgcgagctgcggcctcagggatccgcacgaccccagcccgacccaaacgccgagttcgaccccgacctgccagggggcggtctgcaccgctgtctggcctgcgcgaggtacttcatcgattccaccaacctgaagacccacttccgatccaaagaccacaagaaaaggtatgaaggagtaaggagaggattgatggatgggtgctcagcagatagggctctcacctggtcagctcccaactcctgtttttctttctcccaggctgaagcagctgagcgtcgagccctacagtcaggaagaggcggagagggcagcgggtatgggatcctatgtgccccccaggcggctggcagtgcccacggaagtgtccac

SEQ ID NO: 3866 - DNA, 402 bp, Homo sapiens
  source 1..402: mol_type = genomic DNA
atgggtcgctcccgccggacaggcgcgcaccgagcgcactctctagcccggcagatgaaggcgaagcggcggcggccggacttggatgagattcaccgcgagctgcggcctcagggatccgcacgaccccagcccgacccaaacgccgagttcgaccccgacctgccagggggcggtctgcaccgctgtctggcctgcgcgaggtacttcatcgattccaccaacctgaagacccacttccgatccaaagaccacaagaaaaggctgaagcagctgagcgtcgagccctacagtcaggaagaggcggagagggcagcgggtatgggatcctatgtgccccccaggcggctggcagtgcccacggaagtgtccactgaggtccctgagatggatacctctacc

SEQ ID NO: 3867 - DNA, 1512 bp, Homo sapiens
  source 1..1512: mol_type = genomic DNA
atgccatcaccggattccatgaccttcgaggatatcattgtagacttcactcaagaagagtgggccctgctggacacatcccagagaaagctgtttcaagatgtgatgttggagaacatcagtcatctggtctctattggcaaacagctctgcaaatcagttgtgctttcccaattggagcaagtagagaaactttcaacacaaagaataagcttactgcaaggtagagaagttggcattaaacatcaagagataccattcattcaacatatctatcagaagggcacgtccaccatcagcacaatgagatctcatactcaagaggatccttttctatgcaatgacttaggagaagatttcactcaacatatagcattgactcaaaatgtgattacctacatgagaacgaaacactttgtaagcaaaaagtttgggaaaatcttcagtgactggttatcctttaatcaacacaaggaaattcacaccaaatgtaaatcatatggaagtcatctatttgattatgcctttatccaaaactctgcccttagaccacacagtgtgactcacactagagagataacattggaatgtcgtgtgtgtgggaaaacctttagcaaaaattctaatcttaggcgacatgagatgattcacactggagagaaaccacacggatgtcatctatgtgggaaagcctttactcattgctctgatcttcgaaaacatgagagaactcacactggagagaagccatatggatgtcatctatgtgggaaagccttcagtaaaagttctaaccttagacgacatgagatgattcacactagagaaaaagcacagatatgccatctatgtgggaaagccttcactcattgctctgaccttagaaaacatgagagaactcacttaggagataaaccatatggatgtctcctatgtgggaaggctttcagtaaatgttcttaccttagacaacatgaaagaactcacaatggagagaaaccatatgaatgtcatctatgtggaaaagccttctctcattgttctcaccttagacaacatgagcgaagtcacaatggagagaaaccacatggatgtcatctatgtgggaaagcattcactgaatcttctgtgcttaaacgacatgagagaattcacactggagagaaaccatatgagtgccatgtatgtgggaaagccttcactgaatcttctgacctcagacgacatgagagaactcacactggagaaaaaccatatgaatgccatctatgcggaaaagccttcaatcactcttctgtccttagacgacatgagagaactcacactggagagaaaccatatgaatgcaatatatgtggtaaagccttcaatagaagttacaactttagacttcatagaagagttcacactggagagaaaccatatgtatgtcctctatgtgggaaagcctttagtaaattttttaaccttagacaacatgagagaactcacactaaaaaagcaatgaatatg

SEQ ID NO: 3868 - DNA, 2421 bp, Homo sapiens
  source 1..2421: mol_type = genomic DNA
atgaaggaatggaaatcaaagatggaaatttctgaagaaaagaagtcagcaagggctgcatccgaaaaactccaaagacaaatcacccaggaatgtgagttagttgaaaccagtaattctgaggacagattattgaagcactgggtaagccctttaaaggatgcaatgagacatctcccttcccaagagagcggtatcagggaaatgcatattatcccccagaaagccattgtgggagagattggccatggatgtaatgaaggagaaaaaatactttctgcaggagaaagctcccatagatatgaggttagtggccaaaacttcaaacagaagtcaggattaactgaacatcagaaaattcataatataaataagacctatgaatgtaaggaatgtgaaaaaaccttcaacaggagttcaaacctgatcatacatcagagaattcatacaggaaataagccatatgtgtgtaatgaatgtgggaaagactctaatcaaagttcaaatcttattatacatcagagaattcatacaggaaagaaaccttatatatgtcatgaatgtggaaaagacttcaatcagagctccaatctggtgagacataagcaaattcacagtggtgggaatccctatgagtgcaaagagtgtgggaaggcttttaagggaagctcaaaccttgtcctgcaccagagaatccacagtagggggaagccatatttatgcaataaatgtgggaaggctttcagtcaaagcacagatcttattatacatcacagaattcacactggagagaaaccctatgaatgttatgactgtggacagatgttcagtcaaagttcacaccttgtcccacatcagagaattcacactggagagaaacccctcaaatgtaatgaatgtgaaaaagccttcaggcagcattctcaccttactgaacaccagagactccacagtggagagaaaccctatgaatgtcacagatgtgggaagaccttcagtgggcgcacagcttttcttaaacatcagagattgcatgctggagagaaaattgaagaatgtgagaaaaccttcagcaaggatgaggagcttagggaagagcagagaattcaccaggaagagaaagcttattggtgtaatcagtgtggtaggaatttccagggcacctcagacctcatcagacatcaggtaactcatacaggagagaaaccatatgaatgtaaagaatgtgggaaaactttcaatcagagctcagaccttctgagacatcatagaattcacagtggagaaaaaccttgtgtatgtagcaaatgtgggaaatcttttaggggcagctcagatcttattagacaccatcgtgttcatactggagagaaaccctatgaatgtagtgaatgtgggaaagcctttagccagaggtcacaccttgttacacaccagaaaatccatactggagagaagccctatcagtgcactgaatgtgggaaagccttcaggcggcgttcactccttattcaacatcggagaattcatagtggtgagaaaccctatgaatgtaaggaatgtgggaagctcttcatttggcgcacagctttcctcaaacatcagagcctgcatactggagagaaacttgaatgtgagaaaaccttcagccaggatgaggagcttaggggagagcagaaaattcaccaggaagcgaaagcttattggtgtaatcagtgtggtagggctttccagggcagctcagacctcatcagacatcaggtaactcatacaagagagaaaccatatgaatgcaaagaatgtgggaaaactttcaatcagagctcagaccttctgagacatcatagaattcacagtggagaaaaaccttatgtatgcaacaaatgtgggaaatcttttaggggtagctcagatcttattaaacaccatcgtattcatactggagagaaaccctatgaatgtagtgaatgtgggaaagccttcagccagaggtcacaccttgctacacaccagaaaatccatactggagagaaaccctatcagtgcagtgaatgtgggaatgccttcaggcggcgttccctccttattcaacatcggagacttcatagtggtgagaaaccctatgaatgtaaggaatgtgggaaactcttcatgtggcacacggctttcctcaaacatcagagactgcatgctggagagaaacttgaagaatgtgagaaaaccttcagcaaggatgaggagcttagaaaagagcagagaactcaccaggaaaagaaagtttattggtgtaatcagtgtagtaggaccttccagggcagctcagatctcatcagacatcaggtaactcatacaagagagaaaccatatgaatgtaaagaatgtgggaaaactcaatcagagctcagaccttctgagacatca

SEQ ID NO: 3869 - DNA, 1848 bp, Homo sapiens
  source 1..1848: mol_type = genomic DNA
atggaactcgtaacattcagggatgtggccatagaattctcccctgaagagtggaaatgtctggaccctgcccagcagaatttgtatagagatgtgatgttggagaactacaggaacctggtctccctggctatatgttctcctttcagccaagacctttcaccagtgcaggggatagaagattcattccacaaacttatactgaaaagatacgagaaatgtggacatgagaatttacaattaagaaaaggctgtaaacgtgtgaatgagtgtaaggtgcagaaaggagttaataatggagtttaccagtgcttgtcaactacccagagcaaaatatttcaatgtaatacatgtgttaaagtttttagtaaattttcaaattcaaacaaacataagataagacatactggagagaaaccctttaaatgtacagaatgtggcagatcgttttacatgtcacacctaactcaacatacaggaattcatgctggagagaaaccctacaaatgtgaaaaatgtggcaaagcctttaataggtccacatcacttagtaaacataagagaattcatactggagagaaaccctacacatgtgaagaatgtggcaaagcctttagacggtccacagttctgaacgaacataagaaaattcatactggagagaaaccctacaaatgtgaagaatgtggcaaagcctttacaaggtccacaacactgaatgaacacaagaaaattcatactggagagaaaccctacaaatgtaaagaatgtggcaaagcctttagatggtccacaagcctgaatgaacataagaatattcatactggagagaaaccctacaaatgtaaagaatgtggcaaagcctttagacagtccaggagcctgaatgaacataaaaatattcatactggcgaaaaaccctacacatgtgaaaaatgtggcaaagcttttaaccaatcctcaagtcttattatacacaggagcattcattctgaacaaaaactttacaaatgtgaagaatgtggcaaagcctttacttggtcctcatcccttaataaacataagagaattcatactggagagaaaccctacacatgtgaagaatgtggcaaagctttttataggtcctcacaccttgctaaacataagagaattcatactggagagaaaccctacacgtgcgaagaatgtggcaaagcttttaaccaatcctcaactcttatattacacaagagaatccattctgggcaaaaaccttacaaatgtgaagaatgtggcaaagcctttacacggtccacaacactgaacgaacataagaaaattcatactggcgagaaaccctacaaatgtgaagaatgtggcaaagctttcatatggtccgcaagcctgaatgaacataagaatattcatactggagagaaaccctacaaatgtaaagaatgtggcaaagcttttaaccaatcctcaggccttattatacacaggagcattcattctgaacaaaaactttacaaatgtgaagaatgtggcaaagcctttactcggtccacagccctgaatgaacataagaaaattcattctggagagaaaccctacaaatgcaaagaatgtggcaaagcctataacttatcctcaacccttactaaacataagagaattcatactggagagaaacccttcacatgtgaagaatgtggcaaagccttcaattggtcctcatcccttactaaacataagataattcatactggagagaaatcctacaaatgtgaagaatgtggcaaagcttttaatcggccctcaacccttactgtacacaagcgaattcatactggcaaggaacatagt

SEQ ID NO: 3870 - DNA, 1395 bp, Homo sapiens
  source 1..1395: mol_type = genomic DNA
atgtcacacctaactcaacatacaggaattcatgctggagagaaaccctacaaatgtgaaaaatgtggcaaagcctttaataggtccacatcacttagtaaacataagagaattcatactggagagaaaccctacacatgtgaagaatgtggcaaagcctttagacggtccacagttctgaacgaacataagaaaattcatactggagagaaaccctacaaatgtgaagaatgtggcaaagcctttacaaggtccacaacactgaatgaacacaagaaaattcatactggagagaaaccctacaaatgtaaagaatgtggcaaagcctttagatggtccacaagcctgaatgaacataagaatattcatactggagagaaaccctacaaatgtaaagaatgtggcaaagcctttagacagtccaggagcctgaatgaacataaaaatattcatactggcgaaaaaccctacacatgtgaaaaatgtggcaaagcttttaaccaatcctcaagtcttattatacacaggagcattcattctgaacaaaaactttacaaatgtgaagaatgtggcaaagcctttacttggtcctcatcccttaataaacataagagaattcatactggagagaaaccctacacatgtgaagaatgtggcaaagctttttataggtcctcacaccttgctaaacataagagaattcatactggagagaaaccctacacgtgcgaagaatgtggcaaagcttttaaccaatcctcaactcttatattacacaagagaatccattctgggcaaaaaccttacaaatgtgaagaatgtggcaaagcctttacacggtccacaacactgaacgaacataagaaaattcatactggcgagaaaccctacaaatgtgaagaatgtggcaaagctttcatatggtccgcaagcctgaatgaacataagaatattcatactggagagaaaccctacaaatgtaaagaatgtggcaaagcttttaaccaatcctcaggccttattatacacaggagcattcattctgaacaaaaactttacaaatgtgaagaatgtggcaaagcctttactcggtccacagccctgaatgaacataagaaaattcattctggagagaaaccctacaaatgcaaagaatgtggcaaagcctataacttatcctcaacccttactaaacataagagaattcatactggagagaaacccttcacatgtgaagaatgtggcaaagccttcaattggtcctcatcccttactaaacataagataattcatactggagagaaatcctacaaatgtgaagaatgtggcaaagcttttaatcggccctcaacccttactgtacacaagcgaattcatactggcaaggaacatagt

SEQ ID NO: 3871 - DNA, 1944 bp, Homo sapiens
  source 1..1944: mol_type = genomic DNA
atggaactcgtaacattcagggatgtggccatagaattctcccctgaagagtggaaatgtctggaccctgcccagcagaatttgtatagagatgtgatgttggagaactacaggaacctggtctccctgggttttgtgatctctaacccagacctggtcacctgtctggagcaaataaaagagccctgcaatttgaagatacatgagacagcagccaaacccccagctatatgttctcctttcagccaagacctttcaccagtgcaggggatagaagattcattccacaaacttatactgaaaagatacgagaaatgtggacatgagaatttacaattaagaaaaggctgtaaacgtgtgaatgagtgtaaggtgcagaaaggagttaataatggagtttaccagtgcttgtcaactacccagagcaaaatatttcaatgtaatacatgtgttaaagtttttagtaaattttcaaattcaaacaaacataagataagacatactggagagaaaccctttaaatgtacagaatgtggcagatcgttttacatgtcacacctaactcaacatacaggaattcatgctggagagaaaccctacaaatgtgaaaaatgtggcaaagcctttaataggtccacatcacttagtaaacataagagaattcatactggagagaaaccctacacatgtgaagaatgtggcaaagcctttagacggtccacagttctgaacgaacataagaaaattcatactggagagaaaccctacaaatgtgaagaatgtggcaaagcctttacaaggtccacaacactgaatgaacacaagaaaattcatactggagagaaaccctacaaatgtaaagaatgtggcaaagcctttagatggtccacaagcctgaatgaacataagaatattcatactggagagaaaccctacaaatgtaaagaatgtggcaaagcctttagacagtccaggagcctgaatgaacataaaaatattcatactggcgaaaaaccctacacatgtgaaaaatgtggcaaagcttttaaccaatcctcaagtcttattatacacaggagcattcattctgaacaaaaactttacaaatgtgaagaatgtggcaaagcctttacttggtcctcatcccttaataaacataagagaattcatactggagagaaaccctacacatgtgaagaatgtggcaaagctttttataggtcctcacaccttgctaaacataagagaattcatactggagagaaaccctacacgtgcgaagaatgtggcaaagcttttaaccaatcctcaactcttatattacacaagagaatccattctgggcaaaaaccttacaaatgtgaagaatgtggcaaagcctttacacggtccacaacactgaacgaacataagaaaattcatactggcgagaaaccctacaaatgtgaagaatgtggcaaagctttcatatggtccgcaagcctgaatgaacataagaatattcatactggagagaaaccctacaaatgtaaagaatgtggcaaagcttttaaccaatcctcaggccttattatacacaggagcattcattctgaacaaaaactttacaaatgtgaagaatgtggcaaagcctttactcggtccacagccctgaatgaacataagaaaattcattctggagagaaaccctacaaatgcaaagaatgtggcaaagcctataacttatcctcaacccttactaaacataagagaattcatactggagagaaacccttcacatgtgaagaatgtggcaaagccttcaattggtcctcatcccttactaaacataagataattcatactggagagaaatcctacaaatgtgaagaatgtggcaaagcttttaatcggccctcaacccttactgtacacaagcgaattcatactggcaaggaacatagt

SEQ ID NO: 3872 - DNA, 1764 bp, Homo sapiens
  source 1..1764: mol_type = genomic DNA
atggcggcgccggcgttggcattagtatcatttgaagacgtggttgtgaccttcactggagaggaatgggggcacctggacctggcccagaggaccctgtaccaggaggtgatgctggagacctgcaggctcctggtctcactggggcatcctgttcccaaaccagagctgatctatctactggaacatggacaggaactgtggacagtgaagagaggcctctcccaaagcacctgcgcaggtgaaaaagcaaaacccaagattacagagcctactgcttctcagctggccttctctgaggaatcctctttccaggaacttctggcacagagatcctcaagagattccaggttggggcaagctagagatgaggaaaagctaataaaaattcaggaagggaacttgaggccaggaacaaacccccacaaagagatatgccctgagaagttgagttataaacatgatgatttggagccagatgatagtctgggcttaagggttttacaggaacgagtcactccacaagatgctctccatgagtgtgactctcaaggaccaggaaaagaccccatgactgatgcaaggaataacccttacacatgcacggaatgtgggaaagggtttagcaagaagtgggcccttgttcggcatcaacagattcatgctggagtgaagccctatgagtgcaatgagtgtgggaaagcctgtcgttatatggctgatgtcattcgacatatgaggcttcatactggggaaaaaccatacaagtgtattgagtgtgggaaagccttcaaacgcaggtttcacctcacggagcaccagcgtattcacaccggagataagccctatgagtgcaaagaatgtggcaaagcattcacccaccgctcttcttttatccagcataatatgactcacactcgagaaaaaccctttttatgcaaagaatgtgggaaagctttttactacagctcctcatttgctcaacatatgaggattcatactggaaagaaactctatgagtgcggtgaatgtggaaaggccttcacgcaccgctccacatttatccagcacaatgtgacccacacaggagaaaaaccatttttatgtaaagaatgtggaaaaaccttttgcctcaactcatccttcactcagcacatgaggattcacactggagagaaaccctatgagtgcggtgaatgtggaaaggcctttactcatcgctccactttcatccgacataagaggacccataccggagagaagccctttgagtgcaaagaatgtgggaaggccttttgtgacagctcttccttaattcaacatatgaggattcacactggtgagaagccttatgagtgcagtgaatgtggaaaggcttttacacaccactctgtttttattcgacataataggacccacagtggacaaaaacccttggagtgcaaagaatgtgcaaaagccttttactatagctcttccttcactcgacacatgaggattcacactggagagaagccctatgtttgtagagaatgtggaaaggcttttacccaacctgcaaattttgttcggcataataggatccacactggagaaaaaccttttgaatgcaaagaatgtgagaaagccttctgtgacaactttgctttaactcagcacatgagaactcacactggagagaaaccctttgaatgcaatgaatgtggaaagaccttcagccacagttcatcgttcactcaccatcgaaagattcataccagagtt

SEQ ID NO: 3873 - DNA, 1203 bp, Homo sapiens
  source 1..1203: mol_type = genomic DNA
atggaaaaatccaaaaatttccgcatcgacgccctgctggcggtggaccccccacgagccgcctctgcgcagagcgcgccgctggccttggtcacgtcgctcgccgccgccgcatctggcaccggaggtggcggcggcggcggcggggcgagcggcgggactagcggcagctgcagccccgcgtcctcggagccgccggctgcgcccgccgaccgcctgcgcgccgagagcccgtcgccgccgcgcctgctggccgcgcactgcgcgctgctgcccaagccgggcttcctgggcgcgggcggcggcggcggcggcacgggcggcgggcacggggggccccaccaccacgcgcatccgggcgcagcggccgctgccgccgccgccgccgccgccgccgccgctgggggcctggcgctggggctgcaccctgggggcgcgcagggcggcgcgggcctcccggcgcaggcggcgctctacggccacccggtctacggctactccgcggcggcggcggcggctgcgctggcgggccagcacccggcgctctcctactcgtacccgcaggtgcaaggcgcgcaccccgcgcaccccgccgaccccatcaagctgggcgccggcaccttccagctggaccagtggctgcgcgcgtccaccgcgggcatgatcctgcctaagatgcccgacttcaactcccaggcgcagtcgaacctcctggggaagtgccgccggccgcgcaccgccttcaccagccagcagctgctggagctggagcaccagttcaagctcaacaagtacctgtcgcggcccaagcgcttcgaggtggccacctcgctcatgctcaccgagacccaggtgaagatttggttccagaaccggcggatgaaatggaaacgcagcaaaaaggccaaagagcaggcggcgcaggaagcggagaaacagaagggcggcggcgggggcgcggggaagggcggcgcggaggagccgggagccgaggagctgctggggccgccagcgcccggagacaagggcagcggacgccgcctgcgggacttgagggacagtgaccccgaggaggacgaggacgaggacgacgaggaccatttcccctacagcaacggcgccagcgtccacgccgcctcctccgactgctcctcggaggacgactcgccgcccccgcggcccagccaccagcccgcgccccag

SEQ ID NO: 3874 - DNA, 567 bp, Homo sapiens
  source 1..567: mol_type = genomic DNA
atggggggactctcaacagtaggtgcctgccctggaatcctgggcgcccaacaagcccaggcgcagtcgaacctcctggggaagtgccgccggccgcgcaccgccttcaccagccagcagctgctggagctggagcaccagttcaagctcaacaagtacctgtcgcggcccaagcgcttcgaggtggccacctcgctcatgctcaccgagacccaggtgaagatttggttccagaaccggcggatgaaatggaaacgcagcaaaaaggccaaagagcaggcggcgcaggaagcggagaaacagaagggcggcggcgggggcgcggggaagggcggcgcggaggagccgggagccgaggagctgctggggccgccagcgcccggagacaagggcagcggacgccgcctgcgggacttgagggacagtgaccccgaggaggacgaggacgaggacgacgaggaccatttcccctacagcaacggcgccagcgtccacgccgcctcctccgactgctcctcggaggacgactcgccgcccccgcggcccagccaccagcccgcgccccag

SEQ ID NO: 3875 - DNA, 1392 bp, Homo sapiens
  source 1..1392: mol_type = genomic DNA
atgccgagctgctccacgtccaccatgccgggcatgatctgcaagaacccagacctcgagtttgactcgctacagccctgcttctacccggacgaagatgacttctacttcggcggccccgactcgacccccccgggggaggacatctggaagaagtttgagctgctgcccacgcccccgctgtcgcccagccgtggcttcgcggagcacagctccgagcccccgagctgggtcacggagatgctgcttgagaacgagctgtggggcagcccggccgaggaggacgcgttcggcctggggggactgggtggcctcacccccaacccggtcatcctccaggactgcatgtggagcggcttctccgcccgcgagaagctggagcgcgccgtgagcgagaagctgcagcacggccgcgggccgccaaccgccggttccaccgcccagtccccgggagccggcgccgccagccctgcgggtcgcgggcacggcggggctgcgggagccggccgcgccggggccgccctgcccgccgagctcgcccacccggccgccgagtgcgtggatcccgccgtggtcttcccctttcccgtgaacaagcgcgagccagcgcccgtgcccgcagccccggccagtgccccggcggcgggccctgcggtcgcctcgggggcgggtattgccgccccagccggggccccgggggtcgcccctccgcgcccaggcggccgccagaccagcggcggcgaccacaaggccctcagtacctccggagaggacaccctgagcgattcagatgatgaagatgatgaagaggaagatgaagaggaagaaatcgacgtggtcactgtggagaagcggcgttcctcctccaacaccaaggctgtcaccacattcaccatcactgtgcgtcccaagaacgcagccctgggtcccgggagggctcagtccagcgagctgatcctcaaacgatgccttcccatccaccagcagcacaactatgccgccccctctccctacgtggagagtgaggatgcacccccacagaagaagataaagagcgaggcgtccccacgtccgctcaagagtgtcatccccccaaaggctaagagcttgagcccccgaaactctgactcggaggacagtgagcgtcgcagaaaccacaacatcctggagcgccagcgccgcaacgaccttcggtccagctttctcacgctcagggaccacgtgccggagttggtaaagaatgagaaggccgccaaggtggtcattttgaaaaaggccactgagtatgtccactccctccaggccgaggagcaccagcttttgctggaaaaggaaaaattgcaggcaagacagcagcagttgctaaagaaaattgaacacgctcggacttgc

SEQ ID NO: 3876 - DNA, 759 bp, Homo sapiens
  source 1..759: mol_type = genomic DNA
atgcggggggctcctgggaactgtgttggagccgagcaagcgctagccaggcgcaagcgcgcacagactgtagccatccgaggacacccccgcccccccggcccacccggagacacccgcgcagaatcgcctccggatcccctgcagtcggcgggagatgatgaagatgatgaagaggaagatgaagaggaagaaatcgacgtggtcactgtggagaagcggcgttcctcctccaacaccaaggctgtcaccacattcaccatcactgtgcgtcccaagaacgcagccctgggtcccgggagggctcagtccagcgagctgatcctcaaacgatgccttcccatccaccagcagcacaactatgccgccccctctccctacgtggagagtgaggatgcacccccacagaagaagataaagagcgaggcgtccccacgtccgctcaagagtgtcatccccccaaaggctaagagcttgagcccccgaaactctgactcggaggacagtgagcgtcgcagaaaccacaacatcctggagcgccagcgccgcaacgaccttcggtccagctttctcacgctcagggaccacgtgccggagttggtaaagaatgagaaggccgccaaggtggtcattttgaaaaaggccactgagtatgtccactccctccaggccgaggagcaccagcttttgctggaaaaggaaaaattgcaggcaagacagcagcagttgctaaagaaaattgaacacgctcggacttgc

SEQ ID NO: 3877 - DNA, 2166 bp, Homo sapiens
  source 1..2166: mol_type = genomic DNA
atgatgaaggaggtcttgtcaacagggcaaggcaatacagaagtgatccacacagggacattgcaaagatatcaaagttatcacattggagatttttgcttccaggaaattgagaaagaaattcatgatattgagtttcagtgtcaagaagatgaaagaaatggccatgaagcacccatgacaaaaataaaaaagttgactggtagcacagaccaacatgatcacaggcatgctggaaacaagcctattaaagatcagcttggatcaagcttttattcacatctgcctgaactccacataattcagatcaaaggtaaaattggtaatcaatttgagaagtctaccagtgatgctccctcggtttcaacatcccaaagaatttctcctaggccccaaatccatatttctaataactatgggaataattccccgaattcttcactactcccacaaaaacaggaagtatacatgagagaaaaatctttccaatgtaatgagagtggcaaagcctttaattgtagctcactcttaaggaaacaccagataccccatttaggagacaaacaatataaatgtgatgtatgtggcaagctctttaatcacaagcaataccttacatgccattgtagatgtcacactggagagaaaccttacaagtgtaatgagtgtggaaagtccttcagtcaggtatcatcccttacatgccatcgtagacttcacactgcagtaaaatctcacaagtgtaatgagtgtggcaagatctttggtcaaaattcagcccttgtaattcataaggcaattcatactggagaaaaaccttacaagtgtaatgaatgtgacaaagcttttaatcagcaatcaaaccttgcacgtcatcgtagaattcatactggagagaaaccttacaaatgtgaagaatgtgacaaagttttcagtcggaaatcaacccttgagtcacataagagaattcatactggagagaaaccatacaaatgtaaggtttgtgacacagctttcacatggaattctcagctggcaagacataaaagaattcacactggagagaaaacttacaagtgtaatgagtgtggcaagaccttcagtcacaagtcatcccttgtatgccatcatagacttcatggtggagagaaatcttacaaatgtaaggtctgtgacaaggcttttgcgtggaattcacacctggtaagacatactagaattcatagtggaggaaaaccttacaagtgtaatgaatgtgggaagacctttggtcaaaattcagatcttctaattcataagtcaattcatactggagagcaaccttacaaatatgaagaatgtgaaaaggttttcagttgtggatcaacccttgagacacataagataattcacaccggagagaaaccatacaaatgtaaggtttgtgacaaggcttttgcgtgtcattcctatctggcaaaacatactagaattcatagtggagagaaaccttacaagtgtaatgagtgcagcaagaccttccgtctgaggtcataccttgcaagccatcgcagagttcatagtggtgagaaaccttacaagtgtaatgagtgcagcaagaccttcagtcagaggtcataccttcattgccatcgtagacttcatagtggtgagaaaccttacaagtgtaatgagtgtggcaagaccttcagtcacaagccatcccttgttcaccatcgtagacttcatactggagagaaatcttacaaatgtacggtttgtgacaaggctttcgtgcgtaattcatacctggcaagacataccagaattcacactgcagagaaaccttacaagtgtaatgaatgtgggaaggcttttaatcaacaatcacaactttcacttcatcatagaattcatgctggggagaaactttacaaatgtgaaacatgtgacaaagttttcagtcgcaaatcacaccttaaaagacataggagaattcatcctggaaagaaaccatacaaatgtaaggtttgtgacaagacttttgggagtgattcacacctgaaacaacatactggacttcacactggagagaaaccttacaagtgtaatgagtgtggcaaagcctttagcaagcagtcaacacttattcaccatcaggcagttcatggtgtagggaaacttgac

SEQ ID NO: 3878 - DNA, 1182 bp, Homo sapiens
  source 1..1182: mol_type = genomic DNA
atgtgcgtgtgtgctggctgccgggctgccccgagccggcggggagccggtccgctccaggtggcgggcggctggagcgagggagcggacatggactacgactcgtaccagcactatttctacgactatgactgcggggaggatttctaccgctccacggcgcccagcgaggacatctggaagaaattcgagctggtgccatcgccccccacgtcgccgccctggggcttgggtcccggcgcaggggacccggcccccgggattggtcccccggagccgtggcccggagggtgcaccggagacgaagcggaatcccggggccactcgaaaggctggggcaggaactacgcctccatcatacgccgtgactgcatgtggagcggcttctcggcccgggaacggctggagagagctgtgagcgaccggctcgctcctggcgcgccccgggggaacccgcccaaggcgtccgccgccccggactgcactcccagcctcgaagccggcaacccggcgcccgccgccccctgtccgctgggcgaacccaagacccaggcctgctccgggtccgagagcccaagcgactcggagaatgaagaaattgatgttgtgacagtagagaagaggcagtctctgggtattcggaagccggtcaccatcacggtgcgagcagaccccctggatccctgcatgaagcatttccacatctccatccatcagcaacagcacaactatgctgcccgttttcctccagaaagctgctcccaagaagaggcttcagagaggggtccccaagaagaggttctggagagagatgctgcaggggaaaaggaagatgaggaggatgaagagattgtgagtcccccacctgtagaaagtgaggctgcccagtcctgccaccccaaacctgtcagttctgatactgaggatgtgaccaagaggaagaatcacaacttcctggagcgcaagaggcggaatgacctgcgttcgcgattcttggcgctgagggaccaggtgcccaccctggccagctgctccaaggcccccaaagtagtgatcctaagcaaggccttggaatacttgcaagccctggtgggggctgagaagaggatggctacagagaaaagacagctccgatgccggcagcagcagttgcagaaaagaattgcatacctcactggctac

SEQ ID NO: 3879 - DNA, 1092 bp, Homo sapiens
  source 1..1092: mol_type = genomic DNA
atggactacgactcgtaccagcactatttctacgactatgactgcggggaggatttctaccgctccacggcgcccagcgaggacatctggaagaaattcgagctggtgccatcgccccccacgtcgccgccctggggcttgggtcccggcgcaggggacccggcccccgggattggtcccccggagccgtggcccggagggtgcaccggagacgaagcggaatcccggggccactcgaaaggctggggcaggaactacgcctccatcatacgccgtgactgcatgtggagcggcttctcggcccgggaacggctggagagagctgtgagcgaccggctcgctcctggcgcgccccgggggaacccgcccaaggcgtccgccgccccggactgcactcccagcctcgaagccggcaacccggcgcccgccgccccctgtccgctgggcgaacccaagacccaggcctgctccgggtccgagagcccaagcgactcggagaatgaagaaattgatgttgtgacagtagagaagaggcagtctctgggtattcggaagccggtcaccatcacggtgcgagcagaccccctggatccctgcatgaagcatttccacatctccatccatcagcaacagcacaactatgctgcccgttttcctccagaaagctgctcccaagaagaggcttcagagaggggtccccaagaagaggttctggagagagatgctgcaggggaaaaggaagatgaggaggatgaagagattgtgagtcccccacctgtagaaagtgaggctgcccagtcctgccaccccaaacctgtcagttctgatactgaggatgtgaccaagaggaagaatcacaacttcctggagcgcaagaggcggaatgacctgcgttcgcgattcttggcgctgagggaccaggtgcccaccctggccagctgctccaaggcccccaaagtagtgatcctaagcaaggccttggaatacttgcaagccctggtgggggctgagaagaggatggctacagagaaaagacagctccgatgccggcagcagcagttgcagaaaagaattgcatacctcactggctac

SEQ ID NO: 3880 - DNA, 708 bp, Homo sapiens
  source 1..708: mol_type = genomic DNA
atgtgcgtgtgtgctggctgccgggctgccccgagccggcggggagccggtccgctccaggtggcgggcggctggagcgagggagcggacatggactacgactcgtaccagcactatttctacgactatgactgcggggaggatttctaccgctccacggcgcccagcgaggacatctggaagaaattcgagctggtgccatcgccccccacgtcgccgccctggggcttgggtcccggcgcaggggacccggcccccgggattggtcccccggagccgtggcccggagggtgcaccggagacgaagcggaatcccggggccactcgaaaggctggggcaggaactacgcctccatcatacgccgtgactgcatgtggagcggcttctcggcccgggaacggctggagagagctgtgagcgaccggctcgctcctggcgcgccccgggggaacccgcccaaggcgtccgccgccccggactgcactcccagcctcgaagccggcaacccggcgcccgccgccccctgtccgctgggcgaacccaagacccaggcctgctccgggtccgagagcccaagcgactcgggtaaggacctccccgagccatccaagagggggccaccccatgggtggccaaagctctgcccctgcctgaggtcaggcattggctcttctcaagctcttgggccatctccgcctctctttggc

SEQ ID NO: 3881 - DNA, 2376 bp, Homo sapiens
  source 1..2376: mol_type = genomic DNA
atggcagccatcaacccgtgggcctcctggggtgcccttacggaccaatcttgggggatgacagctgttgacccatgggcctcctgggctctgtgtcctcagtatcctgcctggcacgtggagggaagcctggaggaggggaggagggccactgggctcccagcagcccaggttcaggaaccagtgaccttcaaggacgtggccgtggacttcacccaagaagagtgggggcagctggaccttgttcagaggaccctgtaccgtgatgtgatgctggagacctatggtcacctgctctctgtgggaaatcagattgccaagcctgaggtcatctccctgttggagcaaggagaagagccgtggtcagtggagcaggcatgtcctcaacgcacttgtccagaatgggtgagaaatcttgaaagcaaagcattgatcccagcacagagcatttttgaggaagaacaatcccatggcatgaagttggaaagatatatatgggatgatccttggttctccaggttagaagttttgggatgtaaagaccaattagaaatgtaccacatgaaccagagtacagctatgaggcagatggtcttcatgcaaaagcaagtactatcccagagaagctctgaattctgtggacttggggcagagtttagccagaacttaaactttgttccatctcagagagtttctcagatagaacatttctataagcctgatacacatgctcaaagttggagatgtgactcagccataatgtatgcagataaggttacctgtgaaaataatgattatgacaaaactgtttatcagtccattcaacctatttaccctgcaagaatacaaactggagataatcttttcaaatgtactgatgctgttaaatctttcaatcatataatacattttggtgatcataaaggaattcacacaggagaaaaactctatgaatataaggaatgccatcaaatctttaaccagagcccatcatttaatgaacacccaaggcttcatgttggagaaaaccagtataattacaaagaatatgagaatatcttttatttctcatcctttatggaacatcaaaaaattggtactgtagagaaagcgtataaatacaatgaatgggagaaagtctttgggtatgactctttccttactcaacatacaagcacttacactgcagagaaaccctatgactacaatgaatgtgggacgtctttcatctggagctcttaccttattcaacataagaaaactcatactggagaaaaaccctatgaatgtgataaatgtggaaaagtttttaggaatcgctcagcccttacgaaacatgaacggactcacactggaataaaaccctatgaatgtaataaatgtggaaaagccttcagctggaattctcatcttattgtacataagagaattcatacaggagaaaaaccttatgtttgtaatgagtgtgggaaatctttcaactggaactctcatcttattggacatcagaggactcatacaggagagaaaccttttgaatgtactgaatgtgggaaatcattcagctggagctcccatcttattgcccatatgagaatgcatactggagagaaaccctttaaatgtgatgaatgtgaaaaagcttttagggactactcagcccttagtaaacatgaaagaactcattctggagcaaaaccatataaatgtactgaatgtggaaaatccttcagctggagctcccatcttattgcccatcagagaactcacacgggagagaaaccatataactgtcaggaatgtggcaaagcattcagagaacgctcagccctcactaaacatgagataattcattctggaattaagccctatgaatgtaataaatgtggaaaatcctgtagccagatggctcaccttgttagacatcaaaggactcatactggagaaaaaccctatgaatgcaataaatgtggaaaatccttcagtcagagctgtcaccttgttgctcatcggagaattcacactggtgagaaaccctataaatgtaatcagtgtgaaagatcctttaactgtagttctcacctcattgcacaccggagaactcatactggagagaaaccatacaggtgtaatgaatgtgggaaagcatttaatgagagttcatcccttattgtacacctaagaaaccatactggagaaaagccctacaaatgtaatcattgtgaaaaagcattttgtaagaattcttcccttattattcatcagagaatgcatagtggagagaaacgctttatatgcagtgaatgtggaaaagcctttagtggtcactcagccctacttcaacaccagagaaatcacagtgaagagaaactgaat

SEQ ID NO: 3882 - DNA, 2088 bp, Homo sapiens
  source 1..2088: mol_type = genomic DNA
atgtcctatggatcaataacattcggggatgtggccatagacttctctcatcaggagtgggaatatctcagcctggttcagaagaccttgtaccaggaggtgatgatggagaactatgacaacttagtctcattggcaggacattccgtatctaagccagatttaatcaccttattggagcaaggaaaagagccatggatgattgtgagggaagaaacaagaggagagtgtacagatttggattcaagatgtgaaataatcagcgatgggaaaatgcagctttataggaaacactcatgtgttactctccatcagagaattcataatggacagaaaccatatgagtgtaagcaatgtcagaagtcctttagtcatcttacagaactcatggtacatcaaacaattcatactagtgaggaacctgatcaatgtgaaaagtttaggaaggcatttagccatcttacagaccttagaaagcatcagaaaattaatgctcgtgagaaaccttatgaatgtgaagaatgtgggaaggtcttcagttatcctgcaaaccttgctcaacatgggaaagttcatgttgagaaaccctatgaatgtaaagagtgtggggaagcttttaggactagccgtcaacttactgtacatcatagatttcattatggtgagaaaccctacgaatgtaaggaatgtggcaaggcctttagtgtgtatggacgacttagtcgacatcagagtattcacactggtgagaagccctttgaatgtaacaaatgtgggaagtcctttaggctcaaagcaggccttaaagtacatcagagtattcatactggagagaagccacatgaatgtaaggaatgtggaaaggcctttcgtcagttttcccaccttgtgggtcataaaagaattcatactggagaaaaaccctatgaatgcaaggaatgcgggaagggctttacatgtaggtatcaacttaccatgcatcagagaatttattcaggggagaaacactatgaatgtaaagaaaatggggaggcttttagtagtggccatcaacttactgcacctcatacatttgaaagtgttgagaaaccttataagtgtgaggaatgtgggaaagcctttagtgtgcatggacgacttactcgacatcagggtattcatagtggtaagaaaccctatgaatgtaacaaatgtgggaagtcctttaggctcaattcatcccttaaaatacatcaaaatattcataccggtgagaaaccctacaaatgtaaggaatgtgggaaggccttcagtcagcgtgcacaccttgcccatcataacagaattcatactggttacaaaccctttgaatgtaaagaatgtgggaagtcctttcgttgtgcctcatatcttgttatacatgagagaattcatacaggagagaaaccctatgtatgtcaagagtgtgggaagggttttagttatagccataaactcactatacatcgcagagttcatactggtgagaaaccttatgaatgtaaggaatgtgggaaggcctttagtgtatctggacaacttactcagcatctgagtattcacagtggtaagaaaccctttgaatgcaacaaatgcgggaagtcttttaggttcatttctgtacttaaagcccatcagaatattcatagcgctgagaaaccctacgaatgtaaggaatgtggcaaggcctttcgtcatgccacaagcctcatatatcatgaccgaactcatgctggtgaaaagtcctatgaatgtaaagaatgtggggaaacttttagtcatgcttcacatcttattattcatgagagaattcataccagtgataaaccctatgaatgtaaaagatgtgggaaggcatttcactgtgcctcatatcttgttagacatgaaagcgttcatgctgatggaaatccctatatgtgtgaagagtgtgggaaagcttttaatagtagccatgaacttagtatacatcatagagttcatactggtgagaaaccctttaaatgtaacaaatgcagaaggtcctttaggcttagatccatccttgaagtacatcagagaattcatatt

SEQ ID NO: 3883 - DNA, 2085 bp, Homo sapiens
  source 1..2085: mol_type = genomic DNA
atgtcctatggatcaataacattcggggatgtggccatagacttctctcatcaggagtgggaatatctcagcctggttcagaagaccttgtaccaggaggtgatgatggagaactatgacaacttagtctcattgggacattccgtatctaagccagatttaatcaccttattggagcaaggaaaagagccatggatgattgtgagggaagaaacaagaggagagtgtacagatttggattcaagatgtgaaataatcagcgatgggaaaatgcagctttataggaaacactcatgtgttactctccatcagagaattcataatggacagaaaccatatgagtgtaagcaatgtcagaagtcctttagtcatcttacagaactcatggtacatcaaacaattcatactagtgaggaacctgatcaatgtgaaaagtttaggaaggcatttagccatcttacagaccttagaaagcatcagaaaattaatgctcgtgagaaaccttatgaatgtgaagaatgtgggaaggtcttcagttatcctgcaaaccttgctcaacatgggaaagttcatgttgagaaaccctatgaatgtaaagagtgtggggaagcttttaggactagccgtcaacttactgtacatcatagatttcattatggtgagaaaccctacgaatgtaaggaatgtggcaaggcctttagtgtgtatggacgacttagtcgacatcagagtattcacactggtgagaagccctttgaatgtaacaaatgtgggaagtcctttaggctcaaagcaggccttaaagtacatcagagtattcatactggagagaagccacatgaatgtaaggaatgtggaaaggcctttcgtcagttttcccaccttgtgggtcataaaagaattcatactggagaaaaaccctatgaatgcaaggaatgcgggaagggctttacatgtaggtatcaacttaccatgcatcagagaatttattcaggggagaaacactatgaatgtaaagaaaatggggaggcttttagtagtggccatcaacttactgcacctcatacatttgaaagtgttgagaaaccttataagtgtgaggaatgtgggaaagcctttagtgtgcatggacgacttactcgacatcagggtattcatagtggtaagaaaccctatgaatgtaacaaatgtgggaagtcctttaggctcaattcatcccttaaaatacatcaaaatattcataccggtgagaaaccctacaaatgtaaggaatgtgggaaggccttcagtcagcgtgcacaccttgcccatcataacagaattcatactggttacaaaccctttgaatgtaaagaatgtgggaagtcctttcgttgtgcctcatatcttgttatacatgagagaattcatacaggagagaaaccctatgtatgtcaagagtgtgggaagggttttagttatagccataaactcactatacatcgcagagttcatactggtgagaaaccttatgaatgtaaggaatgtgggaaggcctttagtgtatctggacaacttactcagcatctgagtattcacagtggtaagaaaccctttgaatgcaacaaatgcgggaagtcttttaggttcatttctgtacttaaagcccatcagaatattcatagcgctgagaaaccctacgaatgtaaggaatgtggcaaggcctttcgtcatgccacaagcctcatatatcatgaccgaactcatgctggtgaaaagtcctatgaatgtaaagaatgtggggaaacttttagtcatgcttcacatcttattattcatgagagaattcataccagtgataaaccctatgaatgtaaaagatgtgggaaggcatttcactgtgcctcatatcttgttagacatgaaagcgttcatgctgatggaaatccctatatgtgtgaagagtgtgggaaagcttttaatagtagccatgaacttagtatacatcatagagttcatactggtgagaaaccctttaaatgtaacaaatgcagaaggtcctttaggcttagatccatccttgaagtacatcagagaattcatatt

SEQ ID NO: 3884 - DNA, 381 bp, Homo sapiens
  source 1..381: mol_type = genomic DNA
atgcctaaatcaaaggaacttgtttcttcaagctcttctggcagtgattctgacagtgaggttgacaaaaagttaaagaggaaaaagcaagttgctccagaaaaacctgtaaagaaacaaaagacaggtgagacttcgagagccctgtcatcttctaaacagagcagcagcagcagagatgataacatgtttcagattgggaaaatgaggtacgttagtgttcgcgattttaaaggcaaagtgctaattgatattagagaatattggatggatcctgaaggtgaaatgaaaccaggaagaaaaggtatttctttaaatccagaacaatggagccagctgaaggaacagatttctgacattgatgatgcagtaagaaaactg

SEQ ID NO: 3885 - DNA, 3591 bp, Homo sapiens
  source 1..3591: mol_type = genomic DNA
atggccgctgccgccgtcacccgcgggaccccgggagaaaacagccaccacctgaagatctttctccccaagaagctgctggagtgtcttcctcgctgcccgctgctgcctccagagaggctacggtggaatacaaatgaggagattgcatcctacctgatcacctttgagaagcatgatgagtggctgtcttgtgccccaaagacaaggcctcagaatggctccatcatcctctacaatcgcaagaaggtgaaatatcggaaggatggttacctctggaagaagcggaaggatgggaagaccacccgagaggaccacatgaagctgaaggtccagggcatggagtgtctctatggctgctacgttcactcttccatcgtccccacattccatcggcgctgctactggctgctccagaaccctgacatcgtccttgtgcactacctgaacgtcccagccctggaggactgtggaaagggctgcagccccatcttttgttccatcagcagcgaccgtcgagagtggctgaagtggtcccgggaggagttgttgggacagctgaagcccatgtttcatggcatcaagtggagctgcgggaatggaacagaagagttctctgtagaacacctggtgcagcagattttggacacccacccaaccaagcctgctccccgaacccacgcctgtctctgcagtggggggcttggttctgggagccttacccacaaatgcagcagcacgaaacaccgcatcatctctcccaaagtggagccccgagctttaaccctgacctctatcccccacgctcaccccccagagcctcctccactgatagccccacttcccccagagctccccaaggcacacacctccccatcttcttcctcttcttcctcctcatcaggttttgcagagcccctagaaatcagacctagccctcccacttctcgagggggttcttcaagaggaggcactgctatcctcctcctgacaggactggagcagcgggctggaggcttgacgcccaccaggcacttggctccacaggctgatcctaggccttccatgagtttggcagtggttgtaggcactgagccttctgccccaccagctcctcccagtcctgcctttgaccctgatcgttttctcaacagcccccagaggggccagacatatggaggggggcagggagtaagcccagacttccccgaggcagaggccgctcataccccctgttctgccctagagcctgctgctgccctggagccccaggcagctgctcggggtcccccaccacagtcagtagcaggtgggagaagaggaaactgcttcttcatccaagatgatgacagtggggaggagctcaagggtcacggggctgccccacccataccttcaccccctccctcacccccaccctcacctgcccccttggagccgtcaagcagggtaggaagaggagaggccttgtttggaggacctgttggggccagtgaactggagcccttcagtctttcatcattcccagaccttatgggagaactcatcagtgacgaagctccaagcatccctgctccgaccccccagctgtctcctgctcttagcaccatcacagacttctccccagagtggtcctacccagagggtggggtcaaggtgctcatcacaggtccttggaccgaagccgccgagcattactcctgtgtctttgatcacatcgcagtgccagcctcacttgtccagcctggtgtcttacgctgctactgtcccgcccatgaggtagggctggtgtctttgcaggtggcagggcgggaggggcccctttctgcttctgtgctctttgagtatcgagcccgccgattcctgtctctgcctagtactcaacttgactggctgtcactggacgacaaccagttccggatgtccatactagagcgactggagcagatggagaagcggatggcagagatcgcagcagctgggcaggtgccttgccagggtcctgatgctcctccagttcaggatgaaggccaggggcctgggttcgaagcacgggtagtggtcttggtagaaagcatgatcccacgctccacctggaagggtcctgaacgtctggcccatggaagccccttccggggcatgagccttctgcacctggctgctgcccagggctatgcccgcctcatcgagaccctgagccagtggcggagtgtggagactggaagcttggacttagagcaggaggttgacccgctcaacgtggatcatttctcttgcacccctctgatgtgggcttgtgccctgggacacctggaagctgctgtgctccttttccgttggaaccgacaggcactgagcattcccgactctctgggccgtctgccattgtctgtggctcattcccggggtcatgtgcgccttgcccgctgccttgaggaactacagagacaggagccttcggtggagcccccatttgccctatcgccaccctcctccagcccagacactggtctgagcagcgtctcctcgccctcggagctgtcggatggcaccttttccgtcacgtcagcctattctagtgccccagatggcagtcccccccctgcacctctgccagcctctgagatgactatggaggacatggccccaggccagctttcctctggtgtcccagaagcccccctactcctcatggactatgaggctaccaactccaaggggcccctctcctcccttcctgccctcccaccagcttcagatgatggggctgctccagaggacgctgacagcccacaggctgtggatgtgatcccggtggacatgatctcactagccaagcagatcatcgaagccacaccggagcggattaaacgagaggacttcgtggggctgcccgaggctggagcctcaatgcgggagcggacaggggctgtggggctcagtgagaccatgtcctggctggccagctacctggagaatgtggaccatttccccagctcaacccctcccagcgaactgccctttgagcgaggtcgcctggctgtcccttcagcaccctcctgggcagagtttctctctgcatccaccagtggcaagatggaaagtgattttgccctgctgacactatcagatcacgagcagcgggaactgtatgaggctgcccgagtcatccagacggccttccgaaagtacaagggccggcggctgaaggagcagcaggaggtagcagcagctgtaatccagcgctgttaccggaagtacaagcagtttgcactctataagaagatgacccaggcggccatcctgatccagagcaagttccgaagctactatgaacagaagcgatttcagcagagccgccgagcggctgtgctcatccagcagcactaccgctcctaccgccgcaggcccggccctccccaccggacttcggccaccctgcctgcccgcaacaaaggctcctttctcaccaagaagcaggaccaggcagcccggaagatcatgagattcctgcggcgctgccgacacaggatgagggaactgaagcagaaccaggagctggaagggcttccccagccgggactggccaca

SEQ ID NO: 3886 - DNA, 3723 bp, Homo sapiens
  source 1..3723: mol_type = genomic DNA
atgggcacagactccccctccccccggcccctcaggccgggggtgaccttgccccctggagccctcaccatgaataccaaggacaccaccgaggttgctgaaaacagccaccacctgaagatctttctccccaagaagctgctggagtgtcttcctcgctgcccgctgctgcctccagagaggctacggtggaatacaaatgaggagattgcatcctacctgatcacctttgagaagcatgatgagtggctgtcttgtgccccaaagacaaggcctcagaatggctccatcatcctctacaatcgcaagaaggtgaaatatcggaaggatggttacctctggaagaagcggaaggatgggaagaccacccgagaggaccacatgaagctgaaggtccagggcatggagtgtctctatggctgctacgttcactcttccatcgtccccacattccatcggcgctgctactggctgctccagaaccctgacatcgtccttgtgcactacctgaacgtcccagccctggaggactgtggaaagggctgcagccccatcttttgttccatcagcagcgaccgtcgagagtggctgaagtggtcccgggaggagttgttgggacagctgaagcccatgtttcatggcatcaagtggagctgcgggaatggaacagaagagttctctgtagaacacctggtgcagcagattttggacacccacccaaccaagcctgctccccgaacccacgcctgtctctgcagtggggggcttggttctgggagccttacccacaaatgcagcagcacgaaacaccgcatcatctctcccaaagtggagccccgagctttaaccctgacctctatcccccacgctcaccccccagagcctcctccactgatagccccacttcccccagagctccccaaggcacacacctccccatcttcttcctcttcttcctcctcatcaggttttgcagagcccctagaaatcagacctagccctcccacttctcgagggggttcttcaagaggaggcactgctatcctcctcctgacaggactggagcagcgggctggaggcttgacgcccaccaggcacttggctccacaggctgatcctaggccttccatgagtttggcagtggttgtaggcactgagccttctgccccaccagctcctcccagtcctgcctttgaccctgatcgttttctcaacagcccccagaggggccagacatatggaggggggcagggagtaagcccagacttccccgaggcagaggccgctcataccccctgttctgccctagagcctgctgctgccctggagccccaggcagctgctcggggtcccccaccacagtcagtagcaggtgggagaagaggaaactgcttcttcatccaagatgatgacagtggggaggagctcaagggtcacggggctgccccacccataccttcaccccctccctcacccccaccctcacctgcccccttggagccgtcaagcagggtaggaagaggagaggccttgtttggaggacctgttggggccagtgaactggagcccttcagtctttcatcattcccagaccttatgggagaactcatcagtgacgaagctccaagcatccctgctccgaccccccagctgtctcctgctcttagcaccatcacagacttctccccagagtggtcctacccagagggtggggtcaaggtgctcatcacaggtccttggaccgaagccgccgagcattactcctgtgtctttgatcacatcgcagtgccagcctcacttgtccagcctggtgtcttacgctgctactgtcccgcccatgaggtagggctggtgtctttgcaggtggcagggcgggaggggcccctttctgcttctgtgctctttgagtatcgagcccgccgattcctgtctctgcctagtactcaacttgactggctgtcactggacgacaaccagttccggatgtccatactagagcgactggagcagatggagaagcggatggcagagatcgcagcagctgggcaggtgccttgccagggtcctgatgctcctccagttcaggatgaaggccaggggcctgggttcgaagcacgggtagtggtcttggtagaaagcatgatcccacgctccacctggaagggtcctgaacgtctggcccatggaagccccttccggggcatgagccttctgcacctggctgctgcccagggctatgcccgcctcatcgagaccctgagccagtggcggagtgtggagactggaagcttggacttagagcaggaggttgacccgctcaacgtggatcatttctcttgcacccctctgatgtgggcttgtgccctgggacacctggaagctgctgtgctccttttccgttggaaccgacaggcactgagcattcccgactctctgggccgtctgccattgtctgtggctcattcccggggtcatgtgcgccttgcccgctgccttgaggaactacagagacaggagccttcggtggagcccccatttgccctatcgccaccctcctccagcccagacactggtctgagcagcgtctcctcgccctcggagctgtcggatggcaccttttccgtcacgtcagcctattctagtgccccagatggcagtcccccccctgcacctctgccagcctctgagatgactatggaggacatggccccaggccagctttcctctggtgtcccagaagcccccctactcctcatggactatgaggctaccaactccaaggggcccctctcctcccttcctgccctcccaccagcttcagatgatggggctgctccagaggacgctgacagcccacaggctgtggatgtgatcccggtggacatgatctcactagccaagcagatcatcgaagccacaccggagcggattaaacgagaggacttcgtggggctgcccgaggctggagcctcaatgcgggagcggacaggggctgtggggctcagtgagaccatgtcctggctggccagctacctggagaatgtggaccatttccccagctcaacccctcccagcgaactgccctttgagcgaggtcgcctggctgtcccttcagcaccctcctgggcagagtttctctctgcatccaccagtggcaagatggaaagtgattttgccctgctgacactatcagatcacgagcagcgggaactgtatgaggctgcccgagtcatccagacggccttccgaaagtacaagggccggcggctgaaggagcagcaggaggtagcagcagctgtaatccagcgctgttaccggaagtacaagcagctgacctggattgcacttaagtttgcactctataagaagatgacccaggcggccatcctgatccagagcaagttccgaagctactatgaacagaagcgatttcagcagagccgccgagcggctgtgctcatccagcagcactaccgctcctaccgccgcaggcccggccctccccaccggacttcggccaccctgcctgcccgcaacaagctcctttctcaccaagaagcaggaccaggcagcccggaagatcatgagattcctgcggcgctgccgacacaggatgagggaactgaagcagaaccaggagctggaagggcttccccagccgggactggccacatgacctggccaccgcctttctcaccaccctgggggcgcctcgtgcagtct

SEQ ID NO: 3887 - DNA, 3621 bp, Homo sapiens
  source 1..3621: mol_type = genomic DNA
atgaataccaaggacaccaccgaggttgctgaaaacagccaccacctgaagatctttctccccaagaagctgctggagtgtcttcctcgctgcccgctgctgcctccagagaggctacggtggaatacaaatgaggagattgcatcctacctgatcacctttgagaagcatgatgagtggctgtcttgtgccccaaagacaaggcctcagaatggctccatcatcctctacaatcgcaagaaggtgaaatatcggaaggatggttacctctggaagaagcggaaggatgggaagaccacccgagaggaccacatgaagctgaaggtccagggcatggagcctgtctcctggcagtgtctctatggctgctacgttcactcttccatcgtccccacattccatcggcgctgctactggctgctccagaaccctgacatcgtccttgtgcactacctgaacgtcccagccctggaggactgtggaaagggctgcagccccatcttttgttccatcagcagcgaccgtcgagagtggctgaagtggtcccgggaggagttgttgggacagctgaagcccatgtttcatggcatcaagtggagctgcgggaatggaacagaagagttctctgtagaacacctggtgcagcagattttggacacccacccaaccaagcctgctccccgaacccacgcctgtctctgcagtggggggcttggttctgggagccttacccacaaatgcagcagcacgaaacaccgcatcatctctcccaaagtggagccccgagctttaaccctgacctctatcccccacgctcaccccccagagcctcctccactgatagccccacttcccccagagctccccaaggcacacacctccccatcttcttcctcttcttcctcctcatcaggttttgcagagcccctagaaatcagacctagccctcccacttctcgagggggttcttcaagaggaggcactgctatcctcctcctgacaggactggagcagcgggctggaggcttgacgcccaccaggcacttggctccacaggctgatcctaggccttccatgagtttggcagtggttgtaggcactgagccttctgccccaccagctcctcccagtcctgcctttgaccctgatcgttttctcaacagcccccagaggggccagacatatggaggggggcagggagtaagcccagacttccccgaggcagaggccgctcataccccctgttctgccctagagcctgctgctgccctggagccccaggcagctgctcggggtcccccaccacagtcagtagcaggtgggagaagaggaaactgcttcttcatccaagatgatgacagtggggaggagctcaagggtcacggggctgccccacccataccttcaccccctccctcacccccaccctcacctgcccccttggagccgtcaagcagggtaggaagaggagaggccttgtttggaggacctgttggggccagtgaactggagcccttcagtctttcatcattcccagaccttatgggagaactcatcagtgacgaagctccaagcatccctgctccgaccccccagctgtctcctgctcttagcaccatcacagacttctccccagagtggtcctacccagagggtggggtcaaggtgctcatcacaggtccttggaccgaagccgccgagcattactcctgtgtctttgatcacatcgcagtgccagcctcacttgtccagcctggtgtcttacgctgctactgtcccgcccatgaggtagggctggtgtctttgcaggtggcagggcgggaggggcccctttctgcttctgtgctctttgagtatcgagcccgccgattcctgtctctgcctagtactcaacttgactggctgtcactggacgacaaccagttccggatgtccatactagagcgactggagcagatggagaagcggatggcagagatcgcagcagctgggcaggtgccttgccagggtcctgatgctcctccagttcaggatgaaggccaggggcctgggttcgaagcacgggtagtggtcttggtagaaagcatgatcccacgctccacctggaagggtcctgaacgtctggcccatggaagccccttccggggcatgagccttctgcacctggctgctgcccagggctatgcccgcctcatcgagaccctgagccagtggcggagtgtggagactggaagcttggacttagagcaggaggttgacccgctcaacgtggatcatttctcttgcacccctctgatgtgggcttgtgccctgggacacctggaagctgctgtgctccttttccgttggaaccgacaggcactgagcattcccgactctctgggccgtctgccattgtctgtggctcattcccggggtcatgtgcgccttgcccgctgccttgaggaactacagagacaggagccttcggtggagcccccatttgccctatcgccaccctcctccagcccagacactggtctgagcagcgtctcctcgccctcggagctgtcggatggcaccttttccgtcacgtcagcctattctagtgccccagatggcagtcccccccctgcacctctgccagcctctgagatgactatggaggacatggccccaggccagctttcctctggtgtcccagaagcccccctactcctcatggactatgaggctaccaactccaaggggcccctctcctcccttcctgccctcccaccagcttcagatgatggggctgctccagaggacgctgacagcccacaggctgtggatgtgatcccggtggacatgatctcactagccaagcagatcatcgaagccacaccggagcggattaaacgagaggacttcgtggggctgcccgaggctggagcctcaatgcgggagcggacaggggctgtggggctcagtgagaccatgtcctggctggccagctacctggagaatgtggaccatttccccagctcaacccctcccagcgaactgccctttgagcgaggtcgcctggctgtcccttcagcaccctcctgggcagagtttctctctgcatccaccagtggcaagatggaaagtgattttgccctgctgacactatcagatcacgagcagcgggaactgtatgaggctgcccgagtcatccagacggccttccgaaagtacaagggccggcggctgaaggagcagcaggaggtagcagcagctgtaatccagcgctgttaccggaagtacaagcagctgacctggattgcacttaagtttgcactctataagaagatgacccaggcggccatcctgatccagagcaagttccgaagctactatgaacagaagcgatttcagcagagccgccgagcggctgtgctcatccagcagcactaccgctcctaccgccgcaggcccggccctccccaccggacttcggccaccctgcctgcccgcaacaaaggctcctttctcaccaagaagcaggaccaggcagcccggaagatcatgagattcctgcggcgctgccgacacaggatgagggaactgaagcagaaccaggagctggaagggcttccccagccgggactggccaca

SEQ ID NO: 3888 - DNA, 3606 bp, Homo sapiens
  source 1..3606: mol_type = genomic DNA
atgaataccaaggacaccaccgaggttgctgaaaacagccaccacctgaagatctttctccccaagaagctgctggagtgtcttcctcgctgcccgctgctgcctccagagaggctacggtggaatacaaatgaggagattgcatcctacctgatcacctttgagaagcatgatgagtggctgtcttgtgccccaaagacaaggcctcagaatggctccatcatcctctacaatcgcaagaaggtgaaatatcggaaggatggttacctctggaagaagcggaaggatgggaagaccacccgagaggaccacatgaagctgaaggtccagggcatggagtgtctctatggctgctacgttcactcttccatcgtccccacattccatcggcgctgctactggctgctccagaaccctgacatcgtccttgtgcactacctgaacgtcccagccctggaggactgtggaaagggctgcagccccatcttttgttccatcagcagcgaccgtcgagagtggctgaagtggtcccgggaggagttgttgggacagctgaagcccatgtttcatggcatcaagtggagctgcgggaatggaacagaagagttctctgtagaacacctggtgcagcagattttggacacccacccaaccaagcctgctccccgaacccacgcctgtctctgcagtggggggcttggttctgggagccttacccacaaatgcagcagcacgaaacaccgcatcatctctcccaaagtggagccccgagctttaaccctgacctctatcccccacgctcaccccccagagcctcctccactgatagccccacttcccccagagctccccaaggcacacacctccccatcttcttcctcttcttcctcctcatcaggttttgcagagcccctagaaatcagacctagccctcccacttctcgagggggttcttcaagaggaggcactgctatcctcctcctgacaggactggagcagcgggctggaggcttgacgcccaccaggcacttggctccacaggctgatcctaggccttccatgagtttggcagtggttgtaggcactgagccttctgccccaccagctcctcccagtcctgcctttgaccctgatcgttttctcaacagcccccagaggggccagacatatggaggggggcagggagtaagcccagacttccccgaggcagaggccgctcataccccctgttctgccctagagcctgctgctgccctggagccccaggcagctgctcggggtcccccaccacagtcagtagcaggtgggagaagaggaaactgcttcttcatccaagatgatgacagtggggaggagctcaagggtcacggggctgccccacccataccttcaccccctccctcacccccaccctcacctgcccccttggagccgtcaagcagggtaggaagaggagaggccttgtttggaggacctgttggggccagtgaactggagcccttcagtctttcatcattcccagaccttatgggagaactcatcagtgacgaagctccaagcatccctgctccgaccccccagctgtctcctgctcttagcaccatcacagacttctccccagagtggtcctacccagagggtggggtcaaggtgctcatcacaggtccttggaccgaagccgccgagcattactcctgtgtctttgatcacatcgcagtgccagcctcacttgtccagcctggtgtcttacgctgctactgtcccgcccatgaggtagggctggtgtctttgcaggtggcagggcgggaggggcccctttctgcttctgtgctctttgagtatcgagcccgccgattcctgtctctgcctagtactcaacttgactggctgtcactggacgacaaccagttccggatgtccatactagagcgactggagcagatggagaagcggatggcagagatcgcagcagctgggcaggtgccttgccagggtcctgatgctcctccagttcaggatgaaggccaggggcctgggttcgaagcacgggtagtggtcttggtagaaagcatgatcccacgctccacctggaagggtcctgaacgtctggcccatggaagccccttccggggcatgagccttctgcacctggctgctgcccagggctatgcccgcctcatcgagaccctgagccagtggcggagtgtggagactggaagcttggacttagagcaggaggttgacccgctcaacgtggatcatttctcttgcacccctctgatgtgggcttgtgccctgggacacctggaagctgctgtgctccttttccgttggaaccgacaggcactgagcattcccgactctctgggccgtctgccattgtctgtggctcattcccggggtcatgtgcgccttgcccgctgccttgaggaactacagagacaggagccttcggtggagcccccatttgccctatcgccaccctcctccagcccagacactggtctgagcagcgtctcctcgccctcggagctgtcggatggcaccttttccgtcacgtcagcctattctagtgccccagatggcagtcccccccctgcacctctgccagcctctgagatgactatggaggacatggccccaggccagctttcctctggtgtcccagaagcccccctactcctcatggactatgaggctaccaactccaaggggcccctctcctcccttcctgccctcccaccagcttcagatgatggggctgctccagaggacgctgacagcccacaggctgtggatgtgatcccggtggacatgatctcactagccaagcagatcatcgaagccacaccggagcggattaaacgagaggacttcgtggggctgcccgaggctggagcctcaatgcgggagcggacaggggctgtggggctcagtgagaccatgtcctggctggccagctacctggagaatgtggaccatttccccagctcaacccctcccagcgaactgccctttgagcgaggtcgcctggctgtcccttcagcaccctcctgggcagagtttctctctgcatccaccagtggcaagatggaaagtgattttgccctgctgacactatcagatcacgagcagcgggaactgtatgaggctgcccgagtcatccagacggccttccgaaagtacaagggccggcggctgaaggagcagcaggaggtagcagcagctgtaatccagcgctgttaccggaagtacaagcagctgacctggattgcacttaagtttgcactctataagaagatgacccaggcggccatcctgatccagagcaagttccgaagctactatgaacagaagcgatttcagcagagccgccgagcggctgtgctcatccagcagcactaccgctcctaccgccgcaggcccggccctccccaccggacttcggccaccctgcctgcccgcaacaaaggctcctttctcaccaagaagcaggaccaggcagcccggaagatcatgagattcctgcggcgctgccgacacaggatgagggaactgaagcagaaccaggagctggaagggcttccccagccgggactggccaca

SEQ ID NO: 3889 - DNA, 3603 bp, Homo sapiens
  source 1..3603: mol_type = genomic DNA
atgggcacagactccccctccccccggcccctcaggccgggggtgaccttgccccctggagccctcaccatgaataccaaggacaccaccgaggttgctgaaaacagccaccacctgaagatctttctccccaagaagctgctggagtgtcttcctcgctgcccgctgctgcctccagagaggctacggtggaatacaaatgaggagattgcatcctacctgatcacctttgagaagcatgatgagtggctgtcttgtgccccaaagacaaggcctcagaatggctccatcatcctctacaatcgcaagaaggtgaaatatcggaaggatggttacctctggaagaagcggaaggatgggaagaccacccgagaggaccacatgaagctgaaggtccagggcatggagaaccctgacatcgtccttgtgcactacctgaacgtcccagccctggaggactgtggaaagggctgcagccccatcttttgttccatcagcagcgaccgtcgagagtggctgaagtggtcccgggaggagttgttgggacagctgaagcccatgtttcatggcatcaagtggagctgcgggaatggaacagaagagttctctgtagaacacctggtgcagcagattttggacacccacccaaccaagcctgctccccgaacccacgcctgtctctgcagtggggggcttggttctgggagccttacccacaaatgcagcagcacgaaacaccgcatcatctctcccaaagtggagccccgagctttaaccctgacctctatcccccacgctcaccccccagagcctcctccactgatagccccacttcccccagagctccccaaggcacacacctccccatcttcttcctcttcttcctcctcatcaggttttgcagagcccctagaaatcagacctagccctcccacttctcgagggggttcttcaagaggaggcactgctatcctcctcctgacaggactggagcagcgggctggaggcttgacgcccaccaggcacttggctccacaggctgatcctaggccttccatgagtttggcagtggttgtaggcactgagccttctgccccaccagctcctcccagtcctgcctttgaccctgatcgttttctcaacagcccccagaggggccagacatatggaggggggcagggagtaagcccagacttccccgaggcagaggccgctcataccccctgttctgccctagagcctgctgctgccctggagccccaggcagctgctcggggtcccccaccacagtcagtagcaggtgggagaagaggaaactgcttcttcatccaagatgatgacagtggggaggagctcaagggtcacggggctgccccacccataccttcaccccctccctcacccccaccctcacctgcccccttggagccgtcaagcagggtaggaagaggagaggccttgtttggaggacctgttggggccagtgaactggagcccttcagtctttcatcattcccagaccttatgggagaactcatcagtgacgaagctccaagcatccctgctccgaccccccagctgtctcctgctcttagcaccatcacagacttctccccagagtggtcctacccagagggtggggtcaaggtgctcatcacaggtccttggaccgaagccgccgagcattactcctgtgtctttgatcacatcgcagtgccagcctcacttgtccagcctggtgtcttacgctgctactgtcccgcccatgaggtagggctggtgtctttgcaggtggcagggcgggaggggcccctttctgcttctgtgctctttgagtatcgagcccgccgattcctgtctctgcctagtactcaacttgactggctgtcactggacgacaaccagttccggatgtccatactagagcgactggagcagatggagaagcggatggcagagatcgcagcagctgggcaggtgccttgccagggtcctgatgctcctccagttcaggatgaaggccaggggcctgggttcgaagcacgggtagtggtcttggtagaaagcatgatcccacgctccacctggaagggtcctgaacgtctggcccatggaagccccttccggggcatgagccttctgcacctggctgctgcccagggctatgcccgcctcatcgagaccctgagccagtggcggagtgtggagactggaagcttggacttagagcaggaggttgacccgctcaacgtggatcatttctcttgcacccctctgatgtgggcttgtgccctgggacacctggaagctgctgtgctccttttccgttggaaccgacaggcactgagcattcccgactctctgggccgtctgccattgtctgtggctcattcccggggtcatgtgcgccttgcccgctgccttgaggaactacagagacaggagccttcggtggagcccccatttgccctatcgccaccctcctccagcccagacactggtctgagcagcgtctcctcgccctcggagctgtcggatggcaccttttccgtcacgtcagcctattctagtgccccagatggcagtcccccccctgcacctctgccagcctctgagatgactatggaggacatggccccaggccagctttcctctggtgtcccagaagcccccctactcctcatggactatgaggctaccaactccaaggggcccctctcctcccttcctgccctcccaccagcttcagatgatggggctgctccagaggacgctgacagcccacaggctgtggatgtgatcccggtggacatgatctcactagccaagcagatcatcgaagccacaccggagcggattaaacgagaggacttcgtggggctgcccgaggctggagcctcaatgcgggagcggacaggggctgtggggctcagtgagaccatgtcctggctggccagctacctggagaatgtggaccatttccccagctcaacccctcccagcgaactgccctttgagcgaggtcgcctggctgtcccttcagcaccctcctgggcagagtttctctctgcatccaccagtggcaagatggaaagtgattttgccctgctgacactatcagatcacgagcagcgggaactgtatgaggctgcccgagtcatccagacggccttccgaaagtacaagggccggcggctgaaggagcagcaggaggtagcagcagctgtaatccagcgctgttaccggaagtacaagcagctgacctggattgcacttaagtttgcactctataagaagatgacccaggcggccatcctgatccagagcaagttccgaagctactatgaacagaagcgatttcagcagagccgccgagcggctgtgctcatccagcagcactaccgctcctaccgccgcaggcccggccctccccaccggacttcggccaccctgcctgcccgcaacaaaggctcctttctcaccaagaagcaggaccaggcagcccggaagatcatgagattcctgcggcgctgccgacacaggatgagggaactgaagcagaaccaggagctggaagggcttccccagccgggactggccaca

SEQ ID NO: 3890 - DNA, 1563 bp, Homo sapiens
  source 1..1563: mol_type = genomic DNA
atggaggccaactggaccgcgttcctgttccaggcccatgaagcttcccatcaccaacagcaggcagcacagaacagcttgctgcccctcctgagctctgccgtggagccccctgatcagaaaccattgcttccaataccaataactcagaaacctcagggtgcaccagaaacattaaaggatgccattgggattaaaaaagaaaaacccaaaacttcatttgtgtgcacttactgcagtaaagctttcagggacagctatcacctgaggcgccacgaatcctgccacacagggatcaagttggtgtcccggccaaagaaaacccccaccacggtggttccccttatctctaccatcgctggggacagcagccgaacttcgttggtctcgaccattgcaggcatcttgtcaacagtcactacatcttcctcgggcaccaaccccagtagcagtgccagcaccacagctatgccagtgacccagtctgtcaagaaacccagtaagcctgtcaagaagaaccatgcttgtgagatgtgtgggaaggccttccgagatgtgtaccatctcaatcgacacaagctctcccattcagatgagaaaccctttgagtgtcctatttgtaatcagcgcttcaagaggaaggaccggatgacttaccatgtgaggtctcatgaaggaggcatcaccaaaccctatacttgcagtgtttgtgggaaaggcttctcaaggcctgaccacttaagctgtcatgtaaaacatgtccattcaacagaaagacccttcaaatgccaaacgtgcactgctgcctttgccaccaaagacagactgcggacacacatggtgcgccatgaaggcaaggtatcatgtaacatctgtgggaagctcctgagtgcagcatacatcaccagccacttaaagactcatgggcagagccaaagtatcaactgtaatacatgtaaacaaggcatcagtaaaacatgcatgagtgaagagaccagtaaccaaaagcagcagcagcagcagcagcagcagcagcagcagcagcaacaacaacaacaacaacatgtgacaagctggccagggaagcaagtagaaacactgagactgtgggaagaagctgttaaagcaaggaagaaagaagctgctaacctgtgccaaacctccacggctgctacgacacctgtgactctcactactccattcagtataacatcctctgtgtcgtctgggactatgtcaaacccagtcacagtggcagctgcaatgagcatgagaagtccagtaaatgtttcaagtgcagttaacataaccagcccaatgaacatagggcatcctgtaactataaccagtccattatccatgacctctcctttaacactcactaccccagtcaacctccccacccccgtcactgccccagtgaatatagcacaccctgtcaccatcacatctccaatgaatctacccacacctatgacattagccgcccctctcaatatagcaatgagacctgtagagagcatgcctttcttgccccaagctttgcctacatcaccgccttgg

SEQ ID NO: 3891 - DNA, 1536 bp, Homo sapiens
  source 1..1536: mol_type = genomic DNA
atggcagcccatgaagcttcccatcaccaacagcaggcagcacagaacagcttgctgcccctcctgagctctgccgtggagccccctgatcagaaaccattgcttccaataccaataactcagaaacctcagggtgcaccagaaacattaaaggatgccattgggattaaaaaagaaaaacccaaaacttcatttgtgtgcacttactgcagtaaagctttcagggacagctatcacctgaggcgccacgaatcctgccacacagggatcaagttggtgtcccggccaaagaaaacccccaccacggtggttccccttatctctaccatcgctggggacagcagccgaacttcgttggtctcgaccattgcaggcatcttgtcaacagtcactacatcttcctcgggcaccaaccccagtagcagtgccagcaccacagctatgccagtgacccagtctgtcaagaaacccagtaagcctgtcaagaagaaccatgcttgtgagatgtgtgggaaggccttccgagatgtgtaccatctcaatcgacacaagctctcccattcagatgagaaaccctttgagtgtcctatttgtaatcagcgcttcaagaggaaggaccggatgacttaccatgtgaggtctcatgaaggaggcatcaccaaaccctatacttgcagtgtttgtgggaaaggcttctcaaggcctgaccacttaagctgtcatgtaaaacatgtccattcaacagaaagacccttcaaatgccaaacgtgcactgctgcctttgccaccaaagacagactgcggacacacatggtgcgccatgaaggcaaggtatcatgtaacatctgtgggaagctcctgagtgcagcatacatcaccagccacttaaagactcatgggcagagccaaagtatcaactgtaatacatgtaaacaaggcatcagtaaaacatgcatgagtgaagagaccagtaaccaaaagcagcagcagcagcagcagcagcagcagcagcagcagcaacaacaacaacaacaacatgtgacaagctggccagggaagcaagtagaaacactgagactgtgggaagaagctgttaaagcaaggaagaaagaagctgctaacctgtgccaaacctccacggctgctacgacacctgtgactctcactactccattcagtataacatcctctgtgtcgtctgggactatgtcaaacccagtcacagtggcagctgcaatgagcatgagaagtccagtaaatgtttcaagtgcagttaacataaccagcccaatgaacatagggcatcctgtaactataaccagtccattatccatgacctctcctttaacactcactaccccagtcaacctccccacccccgtcactgccccagtgaatatagcacaccctgtcaccatcacatctccaatgaatctacccacacctatgacattagccgcccctctcaatatagcaatgagacctgtagagagcatgcctttcttgccccaagctttgcctacatcaccgccttgg

SEQ ID NO: 3892 - DNA, 303 bp, Homo sapiens
  source 1..303: mol_type = genomic DNA
atgtggcgcgcggaggggaaatggctgccgaaaacaagccggaagagcgtttcccaaagtgtattctgcggaactagcacctactgtgttctcaacaccgtgccacctatagaagatgatcatgggaacagcaatagtagtcatgtaaaaatctttttaccgaaaaagctgcttgaatgtctgccgaaatgttcaagtttaccaaaagagaggcaccgctggaacactaatgaggctctcaccacacacttgttcatgggcgcagcaaagaagagggatccacagagctggagccatgagggc

SEQ ID NO: 3893 - DNA, 5019 bp, Homo sapiens
  source 1..5019: mol_type = genomic DNA
atgtggcgcgcggaggggaaatggctgccgaaaacaagccggaagagcgtttcccaaagtgtattctgcggaactagcacctactgtgttctcaacaccgtgccacctatagaagatgatcatgggaacagcaatagtagtcatgtaaaaatctttttaccgaaaaagctgcttgaatgtctgccgaaatgttcaagtttaccaaaagagaggcaccgctggaacactaatgaggaaattgcagcttatttaataacatttgagaaacacgaagaatggctaaccacctcccctaagacaagaccacagaatggctcaatgatactctacaacaggaagaaagtgaaatacaggaaagatgggtattgctggaaaaagaggaaagatgggaaaacgaccagagaggaccacatgaaactcaaggtccagggagtggagtgcttgtacggctgctatgtccattcctccatcatccccaccttccaccggaggtgctactggctccttcagaaccccgacatcgtcctggtgcactacctgaacgtgccggccatcgaggactgcggcaagccttgcggccccatcctctgctccatcaacaccgacaagaaggagtgggcgaaatggacgaaagaagagctcatcgggcagctgaaacccatgttccatggcatcaagtggacctgcagcaatgggaacagcagctcaggcttctcggtggaacagctggtgcagcagatcctcgacagccaccagaccaagccccagccgcggacccacaactgcctctgcaccggcagcctgggagctggcggcagcgtgcatcacaagtgtaacagcgccaaacaccgcatcatctcgcccaaggtggagccacggacaggggggtacgggagccactcggaggtgcagcacaatgacgtgtcggagggcaagcacgagcacagccacagcaagggctccagccgtgagaagaggaacggcaaggtggccaagcccgtgctcctgcaccagagcagcaccgaggtctcctccaccaaccaggtggaagtccccgacaccacccagagctcccctgtgtccatcagcagcgggctcaacagcgacccggacatggtggacagcccggtggtcacaggtgtgtccggtatggcggtggcctctgtgatggggagcttgtcccagagcgccacggtgttcatgtcagaggtcaccaatgaggccgtgtacaccatgtcccccaccgctggccccaaccaccacctcctctcacctgacgcctctcagggcctcgtcctggccgtgagctctgatggccacaagttcgcctttcccaccacgggcagctcggagagcctgtccatgctgcccaccaacgtgtccgaagagctggtcctctccaccaccctcgacggtggccggaagattccagaaaccaccatgaactttgaccccgactgtttccttaataacccaaagcagggccagacgtacgggggtggaggcctgaaagccgagatggtcagctccaacatccggcactcgccacccggggagcggagcttcagctttaccaccgtcctcaccaaggagatcaagaccgaggacacctccttcgagcagcagatggccaaagaagcgtactcctcctccgcggcggctgtggcagccagctccctcaccctgaccgccggctccagcctcctgccgtcgggcggcggcctgagtcccagcaccaccctggagcagatggacttcagcgccatcgactccaacaaggactacacgtccagcttcagccagacgggccacagcccccacatccaccagaccccctccccgagcttcttcctgcaggacgccagcaaacccctccccgtcgagcagaacacccacagcagcctgagtgactctgggggcaccttcgtgatgcccacggtgaaaacggaggcctcgtcccaaaccagctcctgcagcggtcacgtggagacgcggatcgagtccacttcctccctccacctcatgcagttccaggccaacttccaggccatgacggcagaaggggaggtcaccatggagacctcgcaggcggcggaagggagcgaggtcctgctcaagtctggggagctgcaggcttgcagctctgagcactacctgcagccggagaccaacggggtaatccgaagcgccggcggcgtccccatcctcccgggcaacgtggtgcagggactctaccccgtggcccagcccagcctcggcaacgcctccaacatggagctcagcctggaccactttgacatctccttcagcaaccagttctccgacctgatcaacgacttcatctccgtggaggggggcagcagcaccatctatgggcaccagctggtgtcgggggacagcacggcgctctcacagtcagaggacggggcgcgggcccccttcacccaggcagagatgtgcctcccctgctgtagcccccagcagggtagcctgcagctgagcagctcggagggcggggccagcaccatggcctacatgcacgtcgccgaggtggtctcggccgcctcggcccagggcaccctaggcatgctgcagcagagcggacgggtgttcatggtgaccgactactccccagagtggtcttacccagagggaggagtgaaggtcctcatcacaggcccgtggcaagaagccagcaataactacagctgcctgtttgaccagatctcagtgcctgcatccctgattcagcctggggtgctgcgctgctactgcccagcccatgacactggtcttgtgaccctacaagttgccttcaacaaccagatcatctccaactcggtggtgtttgagtacaaagcccgggctctgcccacgctcccttcctcccagcacgactggctgtcgttggacgataaccagttcaggatgtccatcctggaacgactggagcagatggagaggaggatggccgagatgacggggtcccagcagcacaaacaggcgagcggaggcggcagcagtggaggcggcagcgggagcgggaatggagggagccaggcacagtgtgcttctgggactggggccttggggagctgctttgagagccgtgtggtcgtggtatgcgagaagatgatgagccgagcctgctgggcgaagtccaagcacttgatccactcaaagactttccgcggaatgaccctactccacctggccgctgcccagggctatgccaccctaatccagaccctcatcaaatggcgtacaaagcacgcggatagcattgacctggaactggaagttgaccccttgaatgtggaccacttctcctgtactcctctgatgtgggcgtgtgccctagggcacttggaagctgccgtcgtgctgtacaagtgggaccgtcgggccatctcgattcccgactctctaggaaggctgcctttgggaattgccaggtcacggggtcatgtgaaattagcagagtgtctggagcacctgcagagagatgagcaggctcagctgggacagaaccccagaatccactgtcctgcaagcgaagagcccagcacagagagctggatggcccagtggcacagcgaagccatcagctctccagaaatacccaagggagtcactgttattgcaagcaccaacccagagctgagaagacctcgttctgaaccctctaattactacagcagtgagagccacaaagattatccggctcccaaaaagcataaattgaaccctgagtacttccagacaaggcaggagaagctgcttcccactgcactgagtctggaagagccaaatatcaggaagcaaagccctagttctaagcagtctgtccccgagacactcagccccagtgaaggagtgagggacttcagccgggaactctcccctcccactccagagactgcagcatttcaagcctctggatctcagcctgtaggaaagtggaattccaaagatctttacattggtgtgtctacagtacaggtgactggaaatccgaaggggaccagtgtaggaaaggaggcagcaccttcacaggtgcgtccacgggaaccaatgagtgtcctgatgatggctaacagagaggtggtgaatacagagctggggtcctaccgtgatagtgcagaaaatgaagaatgcggccagcccatggatgacatacaggtgaacatgatgaccttggcagaacacattattgaagccacacctgaccgaatcaagcaggagaattttgtgcccatggagtcctcaggattggaaagaacagaccctgccaccattagcagtacaatgagctggctggccagttatctagcggatgctgactgccttcccagtgctgcccagatccgaagtgcatataacgagcctctaaccccttcttctaataccagcttgagccctgttggctctcccgtcagtgaaatcgctttcgagaaacctaaccttccctccgccgcggattggtcagaattcctgagtgcatctaccagtgagaaggtagagaatgagtttgctcagctcactctgtctgatcatgaacagagagaactctatgaggctgccaggcttgtccagacagctttccggaaatacaagggccgacccttgcgggaacagcaagaagtagctgctgctgttattcagcgttgttacagaaaatataaacagtacgcactttataaaaagatgacacaggctgccatccttatccagagcaaattccgaagttactatgaacaaaaaaaattccagcagagccgacgggctgctgtgctcatccaaaagtactaccgaagttataagaaatgtggcaaaagacggcaggctcgccggacggctgtgattgtacaacagaaactcaggagcagtttgctaaccaaaaagcaggatcaagctgctcgaaaaataatgaggtttcttcgccgctgtcgccacagccccctggtggaccataggctgtacaaaaggagtgaaagaattgaaaaaggccaaggaact

SEQ ID NO: 3894 - DNA, 240 bp, Homo sapiens
  source 1..240: mol_type = genomic DNA
atgtggcgcgcggaggggaaatggctgccgaaaacaagccggaagagcgtttcccaaagtgtattctgcggaactagcacctactgtgttctcaacaccgtgccacctatagaagatgatcatgggaacagcaatagtagtcatgtaaaaatctttttaccgaaaaagctgcttgaatgtctgccgaaatgttcaagtttaccaaaagagaggcaccgctggaacactaatgagagatca

SEQ ID NO: 3895 - DNA, 2031 bp, Homo sapiens
  source 1..2031: mol_type = genomic DNA
atgcatcaccaacagcgaatggctgccttagggacggacaaagagctgagtgatttactggatttcagtgcgatgttttcacctcctgtgagcagtgggaaaaatggaccaacttctttggcaagtggacattttactggctcaaatgtagaagacagaagtagctcagggtcctgggggaatggaggacatccaagcccgtccaggaactatggagatgggactccctatgaccacatgaccagcagggaccttgggtcacatgacaatctctctccaccttttgtcaattccagaatacaaagtaaaacagaaaggggctcatactcatcttatgggagagaatcaaacttacagggttgccaccagcagagtctccttggaggtgacatggatatgggcaacccaggaaccctttcgcccaccaaacctggttcccagtactatcagtattctagcaataatccccgaaggaggcctcttcacagtagtgccatggaggtacagacaaagaaagttcgaaaagttcctccaggtttgccatcttcattggttctttctcctcaggtctatgctccatcagcaagcactgccgactacaatagggactcgccaggctatccttcctccaaaccagcaaccagcactttccctagctccttcttcatgcaagatggccatcacagcagtgacccttggagctcctccagtgggatgaatcagcctggctatgcaggaatgttgggcaactcttctcatattccacagtccagcagctactgtagcctgcatccacatgaacgtttgagctatccatcacactcctcagcagacatcaattccagtcttcctccgatgtccactttccatcgtagtggtacaaaccattacagcacctcttcctgtacgcctcctgccaacgggacagacagtataatggcaaatagaggaagcggggcagccggcagctcccagactggagatgctctggggaaagcacttgcttcgatctattctccagatcacactaacaacagcttttcatcaaacccttcaactcctgttggctctcctccatctctctcagcaggcacagctgtttggtctagaaatggaggacaggcctcatcgtctcctaattatgaaggacccttacactctttgcaaagccgaattgaagatcgtttagaaagactggatgatgctattcatgttctccggaaccatgcagtgggcccatccacagctatgcctggtggtcatggggacatgcatggaatcattggaccttctcataatggagccatgggtggtctgggctcagggtatggaaccggccttctttcagccaacagacattcactcatggtggggacccatcgtgaagatggcgtggccctgagaggcagccattctcttctgccaaaccaggttccggttccacagcttcctgtccagtctgcgacttcccctgacctgaacccaccccaggacccttacagaggcatgccaccaggactacaggggcagagtgtctcctctggcagctctgagatcaaatccgatgacgagggtgatgagaacctgcaagacacgaaatcttcggaggacaagaaattagatgacgacaagaaggatatcaaatcaattactaggtcaagatctagcaataatgacgatgaggacctgacaccagagcagaaggcagagcgtgagaaggagcggaggatggccaacaatgcccgagagcgtctgcgggtccgtgacatcaacgaggctttcaaagagctcggccgcatggtgcagctccacctcaagagtgacaagccccagaccaagctcctgatcctccaccaggcggtggccgtcatcctcagtctggagcagcaagtccgagaaaggaatctgaatccgaaagctgcgtgtctgaaaagaagggaggaagagaaggtgtcctcagagcctccccctctctccttggccggcccacaccctggaatgggagacgcatcgaatcacatgggacagatg

SEQ ID NO: 3896 - DNA, 1611 bp, Homo sapiens
  source 1..1611: mol_type = genomic DNA
atggatatgggcaacccaggaaccctttcgcccaccaaacctggttcccagtactatcagtattctagcaataatccccgaaggaggcctcttcacagtagtgccatggaggtacagacaaagaaagttcgaaaagttcctccaggtttgccatcttcagtctatgctccatcagcaagcactgccgactacaatagggactcgccaggctatccttcctccaaaccagcaaccagcactttccctagctccttcttcatgcaagatggccatcacagcagtgacccttggagctcctccagtgggatgaatcagcctggctatgcaggaatgttgggcaactcttctcatattccacagtccagcagctactgtagcctgcatccacatgaacgtttgagctatccatcacactcctcagcagacatcaattccagtcttcctccgatgtccactttccatcgtagtggtacaaaccattacagcacctcttcctgtacgcctcctgccaacgggacagacagtataatggcaaatagaggaagcggggcagccggcagctcccagactggagatgctctggggaaagcacttgcttcgatctattctccagatcacactaacaacagcttttcatcaaacccttcaactcctgttggctctcctccatctctctcagcaggcacagctgtttggtctagaaatggaggacaggcctcatcgtctcctaattatgaaggacccttacactctttgcaaagccgaattgaagatcgtttagaaagactggatgatgctattcatgttctccggaaccatgcagtgggcccatccacagctatgcctggtggtcatggggacatgcatggaatcattggaccttctcataatggagccatgggtggtctgggctcagggtatggaaccggccttctttcagccaacagacattcactcatggtggggacccatcgtgaagatggcgtggccctgagaggcagccattctcttctgccaaaccaggttccggttccacagcttcctgtccagtctgcgacttcccctgacctgaacccaccccaggacccttacagaggcatgccaccaggactacaggggcagagtgtctcctctggcagctctgagatcaaatccgatgacgagggtgatgagaacctgcaagacacgaaatcttcggaggacaagaaattagatgacgacaagaaggatatcaaatcaattactagcaataatgacgatgaggacctgacaccagagcagaaggcagagcgtgagaaggagcggaggatggccaacaatgcccgagagcgtctgcgggtccgtgacatcaacgaggctttcaaagagctcggccgcatggtgcagctccacctcaagagtgacaagccccagaccaagctcctgatcctccaccaggcggtggccgtcatcctcagtctggagcagcaagtccgagaaaggaatctgaatccgaaagctgcgtgtctgaaaagaagggaggaagagaaggtgtcctcagagcctccccctctctccttggccggcccacaccctggaatgggagacgcatcgaatcacatgggacagatg

SEQ ID NO: 3897 - DNA, 1788 bp, Homo sapiens
  source 1..1788: mol_type = genomic DNA
atgaaggatatttttttccagtttatcatagccagagtgaggaagtgttattccctctcttgcttgcatacattgccagtagtgcctactttacgtaaaacagaaaggggctcatactcatcttatgggagagaatcaaacttacagggttgccaccagagtctccttggaggtgacatggatatgggcaacccaggaaccctttcgcccaccaaacctggttcccagtactatcagtattctagcaataatccccgaaggaggcctcttcacagtagtgccatggaggtacagacaaagaaagttcgaaaagttcctccaggtttgccatcttcagtctatgctccatcagcaagcactgccgactacaatagggactcgccaggctatccttcctccaaaccagcaaccagcactttccctagctccttcttcatgcaagatggccatcacagcagtgacccttggagctcctccagtgggatgaatcagcctggctatgcaggaatgttgggcaactcttctcatattccacagtccagcagctactgtagcctgcatccacatgaacgtttgagctatccatcacactcctcagcagacatcaattccagtcttcctccgatgtccactttccatcgtagtggtacaaaccattacagcacctcttcctgtacgcctcctgccaacgggacagacagtataatggcaaatagaggaagcggggcagccggcagctcccagactggagatgctctggggaaagcacttgcttcgatctattctccagatcacactaacaacagcttttcatcaaacccttcaactcctgttggctctcctccatctctctcagcaggcacagctgtttggtctagaaatggaggacaggcctcatcgtctcctaattatgaaggacccttacactctttgcaaagccgaattgaagatcgtttagaaagactggatgatgctattcatgttctccggaaccatgcagtgggcccatccacagctatgcctggtggtcatggggacatgcatggaatcattggaccttctcataatggagccatgggtggtctgggctcagggtatggaaccggccttctttcagccaacagacattcactcatggtggggacccatcgtgaagatggcgtggccctgagaggcagccattctcttctgccaaaccaggttccggttccacagcttcctgtccagtctgcgacttcccctgacctgaacccaccccaggacccttacagaggcatgccaccaggactacaggggcagagtgtctcctctggcagctctgagatcaaatccgatgacgagggtgatgagaacctgcaagacacgaaatcttcggaggacaagaaattagatgacgacaagaaggatatcaaatcaattactagcaataatgacgatgaggacctgacaccagagcagaaggcagagcgtgagaaggagcggaggatggccaacaatgcccgagagcgtctgcgggtccgtgacatcaacgaggctttcaaagagctcggccgcatggtgcagctccacctcaagagtgacaagccccagaccaagctcctgatcctccaccaggcggtggccgtcatcctcagtctggagcagcaagtccgagaaaggaatctgaatccgaaagctgcgtgtctgaaaagaagggaggaagagaaggtgtcctcagagcctccccctctctccttggccggcccacaccctggaatgggagacgcatcgaatcacatgggacagatg

SEQ ID NO: 3898 - DNA, 1926 bp, Homo sapiens
  source 1..1926: mol_type = genomic DNA
atgttttcacctcctgtgagcagtgggaaaaatggaccaacttctttggcaagtggacattttactggctcaaatgtagaagacagaagtagctcagggtcctgggggaatggaggacatccaagcccgtccaggaactatggagatgggactccctatgaccacatgaccagcagggaccttgggtcacatgacaatctctctccaccttttgtcaattccagaatacaaagtaaaacagaaaggggctcatactcatcttatgggagagaatcaaacttacagggttgccaccagagtctccttggaggtgacatggatatgggcaacccaggaaccctttcgcccaccaaacctggttcccagtactatcagtattctagcaataatccccgaaggaggcctcttcacagtagtgccatggaggtacagacaaagaaagttcgaaaagttcctccaggtttgccatcttcagtctatgctccatcagcaagcactgccgactacaatagggactcgccaggctatccttcctccaaaccagcaaccagcactttccctagctccttcttcatgcaagatggccatcacagcagtgacccttggagctcctccagtgggatgaatcagcctggctatgcaggaatgttgggcaactcttctcatattccacagtccagcagctactgtagcctgcatccacatgaacgtttgagctatccatcacactcctcagcagacatcaattccagtcttcctccgatgtccactttccatcgtagtggtacaaaccattacagcacctcttcctgtacgcctcctgccaacgggacagacagtataatggcaaatagaggaagcggggcagccggcagctcccagactggagatgctctggggaaagcacttgcttcgatctattctccagatcacactaacaacagcttttcatcaaacccttcaactcctgttggctctcctccatctctctcagcaggcacagctgtttggtctagaaatggaggacaggcctcatcgtctcctaattatgaaggacccttacactctttgcaaagccgaattgaagatcgtttagaaagactggatgatgctattcatgttctccggaaccatgcagtgggcccatccacagctatgcctggtggtcatggggacatgcatggaatcattggaccttctcataatggagccatgggtggtctgggctcagggtatggaaccggccttctttcagccaacagacattcactcatggtggggacccatcgtgaagatggcgtggccctgagaggcagccattctcttctgccaaaccaggttccggttccacagcttcctgtccagtctgcgacttcccctgacctgaacccaccccaggacccttacagaggcatgccaccaggactacaggggcagagtgtctcctctggcagctctgagatcaaatccgatgacgagggtgatgagaacctgcaagacacgaaatcttcggaggacaagaaattagatgacgacaagaaggatatcaaatcaattactagcaataatgacgatgaggacctgacaccagagcagaaggcagagcgtgagaaggagcggaggatggccaacaatgcccgagagcgtctgcgggtccgtgacatcaacgaggctttcaaagagctcggccgcatggtgcagctccacctcaagagtgacaagccccagaccaagctcctgatcctccaccaggcggtggccgtcatcctcagtctggagcagcaagtccgagaaaggaatctgaatccgaaagctgcgtgtctgaaaagaagggaggaagagaaggtgtcctcagagcctccccctctctccttggccggcccacaccctggaatgggagacgcatcgaatcacatgggacagatg

SEQ ID NO: 3899 - DNA, 1521 bp, Homo sapiens
  source 1..1521: mol_type = genomic DNA
atgaaatttaaacaatgcagatgctcagatacagggctatgttgcctggaccacgaagggaaagcagaggtctatgctccatcagcaagcactgccgactacaatagggactcgccaggctatccttcctccaaaccagcaaccagcactttccctagctccttcttcatgcaagatggccatcacagcagtgacccttggagctcctccagtgggatgaatcagcctggctatgcaggaatgttgggcaactcttctcatattccacagtccagcagctactgtagcctgcatccacatgaacgtttgagctatccatcacactcctcagcagacatcaattccagtcttcctccgatgtccactttccatcgtagtggtacaaaccattacagcacctcttcctgtacgcctcctgccaacgggacagacagtataatggcaaatagaggaagcggggcagccggcagctcccagactggagatgctctggggaaagcacttgcttcgatctattctccagatcacactaacaacagcttttcatcaaacccttcaactcctgttggctctcctccatctctctcagcaggcacagctgtttggtctagaaatggaggacaggcctcatcgtctcctaattatgaaggacccttacactctttgcaaagccgaattgaagatcgtttagaaagactggatgatgctattcatgttctccggaaccatgcagtgggcccatccacagctatgcctggtggtcatggggacatgcatggaatcattggaccttctcataatggagccatgggtggtctgggctcagggtatggaaccggccttctttcagccaacagacattcactcatggtggggacccatcgtgaagatggcgtggccctgagaggcagccattctcttctgccaaaccaggttccggttccacagcttcctgtccagtctgcgacttcccctgacctgaacccaccccaggacccttacagaggcatgccaccaggactacaggggcagagtgtctcctctggcagctctgagatcaaatccgatgacgagggtgatgagaacctgcaagacacgaaatcttcggaggacaagaaattagatgacgacaagaaggatatcaaatcaattactagcaataatgacgatgaggacctgacaccagagcagaaggcagagcgtgagaaggagcggaggatggccaacaatgcccgagagcgtctgcgggtccgtgacatcaacgaggctttcaaagagctcggccgcatggtgcagctccacctcaagagtgacaagccccagaccaagctcctgatcctccaccaggcggtggccgtcatcctcagtctggagcagcaagtccgagaaaggaatctgaatccgaaagctgcgtgtctgaaaagaagggaggaagagaaggtgtcctcagagcctccccctctctccttggccggcccacaccctggaatgggagacgcatcgaatcacatgggacagatg

SEQ ID NO: 3900 - DNA, 2319 bp, Homo sapiens
  source 1..2319: mol_type = genomic DNA
atgttttctaaaaggctggagaaaataccacaggtgcctctcctctttcccttcatcttcatcattttgacaaattactcaaagatggagggtgcagttgaaagccagccatcattttttaaaacttctcaggacattgtaacatgcacttgggttgagaactgctactcgagcttctccaggaggcccttggagcaaatgttttgtaaacaccaatctaagaacattatctcttggacgggcatggtggctcacacctgtaatcccagcactttgggaggccaaggtttgtgtgattttgctaaaatgcatcaccaacagcgaatggctgccttagggacggacaaagagctgagtgatttactggatttcagtgcgatgttttcacctcctgtgagcagtgggaaaaatggaccaacttctttggcaagtggacattttactggctcaaatgtagaagacagaagtagctcagggtcctgggggaatggaggacatccaagcccgtccaggaactatggagatgggactccctatgaccacatgaccagcagggaccttgggtcacatgacaatctctctccaccttttgtcaattccagaatacaaagtaaaacagaaaggggctcatactcatcttatgggagagaatcaaacttacagggttgccaccagcagagtctccttggaggtgacatggatatgggcaacccaggaaccctttcgcccaccaaacctggttcccagtactatcagtattctagcaataatccccgaaggaggcctcttcacagtagtgccatggaggtacagacaaagaaagttcgaaaagttcctccaggtttgccatcttcagtctatgctccatcagcaagcactgccgactacaatagggactcgccaggctatccttcctccaaaccagcaaccagcactttccctagctccttcttcatgcaagatggccatcacagcagtgacccttggagctcctccagtgggatgaatcagcctggctatgcaggaatgttgggcaactcttctcatattccacagtccagcagctactgtagcctgcatccacatgaacgtttgagctatccatcacactcctcagcagacatcaattccagtcttcctccgatgtccactttccatcgtagtggtacaaaccattacagcacctcttcctgtacgcctcctgccaacgggacagacagtataatggcaaatagaggaagcggggcagccggcagctcccagactggagatgctctggggaaagcacttgcttcgatctattctccagatcacactaacaacagcttttcatcaaacccttcaactcctgttggctctcctccatctctctcagcaggcacagctgtttggtctagaaatggaggacaggcctcatcgtctcctaattatgaaggacccttacactctttgcaaagccgaattgaagatcgtttagaaagactggatgatgctattcatgttctccggaaccatgcagtgggcccatccacagctatgcctggtggtcatggggacatgcatggaatcattggaccttctcataatggagccatgggtggtctgggctcagggtatggaaccggccttctttcagccaacagacattcactcatggtggggacccatcgtgaagatggcgtggccctgagaggcagccattctcttctgccaaaccaggttccggttccacagcttcctgtccagtctgcgacttcccctgacctgaacccaccccaggacccttacagaggcatgccaccaggactacaggggcagagtgtctcctctggcagctctgagatcaaatccgatgacgagggtgatgagaacctgcaagacacgaaatcttcggaggacaagaaattagatgacgacaagaaggatatcaaatcaattactaggtcaagatctagcaataatgacgatgaggacctgacaccagagcagaaggcagagcgtgagaaggagcggaggatggccaacaatgcccgagagcgtctgcgggtccgtgacatcaacgaggctttcaaagagctcggccgcatggtgcagctccacctcaagagtgacaagccccagaccaagctcctgatcctccaccaggcggtggccgtcatcctcagtctggagcagcaagtccgagaaaggaatctgaatccgaaagctgcgtgtctgaaaagaagggaggaagagaaggtgtcctcagagcctccccctctctccttggccggcccacaccctggaatgggagacgcatcgaatcacatgggacagatg

SEQ ID NO: 3901 - DNA, 1533 bp, Homo sapiens
  source 1..1533: mol_type = genomic DNA
atgtactgcgcatacacaatcccgggcatgggcggcaactctttgatgtactactataatgggaaagcggtctatgctccatcagcaagcactgccgactacaatagggactcgccaggctatccttcctccaaaccagcaaccagcactttccctagctccttcttcatgcaagatggccatcacagcagtgacccttggagctcctccagtgggatgaatcagcctggctatgcaggaatgttgggcaactcttctcatattccacagtccagcagctactgtagcctgcatccacatgaacgtttgagctatccatcacactcctcagcagacatcaattccagtcttcctccgatgtccactttccatcgtagtggtacaaaccattacagcacctcttcctgtacgcctcctgccaacgggacagacagtataatggcaaatagaggaagcggggcagccggcagctcccagactggagatgctctggggaaagcacttgcttcgatctattctccagatcacactaacaacagcttttcatcaaacccttcaactcctgttggctctcctccatctctctcagcaggcacagctgtttggtctagaaatggaggacaggcctcatcgtctcctaattatgaaggacccttacactctttgcaaagccgaattgaagatcgtttagaaagactggatgatgctattcatgttctccggaaccatgcagtgggcccatccacagctatgcctggtggtcatggggacatgcatggaatcattggaccttctcataatggagccatgggtggtctgggctcagggtatggaaccggccttctttcagccaacagacattcactcatggtggggacccatcgtgaagatggcgtggccctgagaggcagccattctcttctgccaaaccaggttccggttccacagcttcctgtccagtctgcgacttcccctgacctgaacccaccccaggacccttacagaggcatgccaccaggactacaggggcagagtgtctcctctggcagctctgagatcaaatccgatgacgagggtgatgagaacctgcaagacacgaaatcttcggaggacaagaaattagatgacgacaagaaggatatcaaatcaattactaggtcaagatctagcaataatgacgatgaggacctgacaccagagcagaaggcagagcgtgagaaggagcggaggatggccaacaatgcccgagagcgtctgcgggtccgtgacatcaacgaggctttcaaagagctcggccgcatggtgcagctccacctcaagagtgacaagccccagaccaagctcctgatcctccaccaggcggtggccgtcatcctcagtctggagcagcaagtccgagaaaggaatctgaatccgaaagctgcgtgtctgaaaagaagggaggaagagaaggtgtcctcagagcctccccctctctccttggccggcccacaccctggaatgggagacgcatcgaatcacatgggacagatg

SEQ ID NO: 3902 - DNA, 1929 bp, Homo sapiens
  source 1..1929: mol_type = genomic DNA
atgttttcacctcctgtgagcagtgggaaaaatggaccaacttctttggcaagtggacattttactggctcaaatgtagaagacagaagtagctcagggtcctgggggaatggaggacatccaagcccgtccaggaactatggagatgggactccctatgaccacatgaccagcagggaccttgggtcacatgacaatctctctccaccttttgtcaattccagaatacaaagtaaaacagaaaggggctcatactcatcttatgggagagaatcaaacttacagggttgccaccagcagagtctccttggaggtgacatggatatgggcaacccaggaaccctttcgcccaccaaacctggttcccagtactatcagtattctagcaataatccccgaaggaggcctcttcacagtagtgccatggaggtacagacaaagaaagttcgaaaagttcctccaggtttgccatcttcagtctatgctccatcagcaagcactgccgactacaatagggactcgccaggctatccttcctccaaaccagcaaccagcactttccctagctccttcttcatgcaagatggccatcacagcagtgacccttggagctcctccagtgggatgaatcagcctggctatgcaggaatgttgggcaactcttctcatattccacagtccagcagctactgtagcctgcatccacatgaacgtttgagctatccatcacactcctcagcagacatcaattccagtcttcctccgatgtccactttccatcgtagtggtacaaaccattacagcacctcttcctgtacgcctcctgccaacgggacagacagtataatggcaaatagaggaagcggggcagccggcagctcccagactggagatgctctggggaaagcacttgcttcgatctattctccagatcacactaacaacagcttttcatcaaacccttcaactcctgttggctctcctccatctctctcagcaggcacagctgtttggtctagaaatggaggacaggcctcatcgtctcctaattatgaaggacccttacactctttgcaaagccgaattgaagatcgtttagaaagactggatgatgctattcatgttctccggaaccatgcagtgggcccatccacagctatgcctggtggtcatggggacatgcatggaatcattggaccttctcataatggagccatgggtggtctgggctcagggtatggaaccggccttctttcagccaacagacattcactcatggtggggacccatcgtgaagatggcgtggccctgagaggcagccattctcttctgccaaaccaggttccggttccacagcttcctgtccagtctgcgacttcccctgacctgaacccaccccaggacccttacagaggcatgccaccaggactacaggggcagagtgtctcctctggcagctctgagatcaaatccgatgacgagggtgatgagaacctgcaagacacgaaatcttcggaggacaagaaattagatgacgacaagaaggatatcaaatcaattactagcaataatgacgatgaggacctgacaccagagcagaaggcagagcgtgagaaggagcggaggatggccaacaatgcccgagagcgtctgcgggtccgtgacatcaacgaggctttcaaagagctcggccgcatggtgcagctccacctcaagagtgacaagccccagaccaagctcctgatcctccaccaggcggtggccgtcatcctcagtctggagcagcaagtccgagaaaggaatctgaatccgaaagctgcgtgtctgaaaagaagggaggaagagaaggtgtcctcagagcctccccctctctccttggccggcccacaccctggaatgggagacgcatcgaatcacatgggacagatg
